United States Patent Application Publication US 2023/0272434 A1 - sequence listing, part 18

SEQ ID NO: 30233 - protein, 962 aa, Spodoptera frugiperda
MCGKNRALVSALDSLLKTYFESSENLYDTHSILYCGAVAACRVANVRFSNLDAAVRPKPAVPAWQCRIERRISEARVLIGKLSCFREGNTRPRVMRFVRRAFVGTETSPHEYMSRVTERIDFLKQKVYAWANRIRRYKKRVERYTQNRMFQRDQRWVYRNWERSNQDVTDGRRPDDEATNTFWRNIWSVPVSHTEDDWICDVERRCETVPEMEEVIITSSDVSSAACLVPNWKSPGPDGLHNFWLKWFTSSHSRLASQFQAALEAGSLPQFLTTGVTHLLHKSGSSTEPKNYRPITCLPTVYKLLTSILRTKITKHIEKHSIMSVSQNGCRKGSRGTKELLLIDMVVSQQVRRSRKNLSTCWIDYKKAYDSVPHTWLMRVLELYKIDATLRAFLQSCMRQWSTVLCYPGCRQIQGSEEPVRIVRGIFQGDSLSPLWFCLALNPLSTLLEASGLGYPLRRRGLVISHLLYMDDLKLFAPNNKQLMELLKITEKFSSSIRMEFGVDKCAVMHVKRGGIVESEGLELSDFTKLRALSANDTYKYLGMSEGLGINGPDMKQSLRERFFGRLNKVLKSSLSGGNKVRAYNGWVMPVLMYSFGILKWTQTELDTLDRRVRTLLTANRMHHPRSSIMRLYIPRKCGGRGLLNAKTLHNREVCNLREYFLKVNEGMHREVAAVDNGFTPLSLAKENWRKPVVLSVNDRKEVWHSKELHGRFFRALHGPSVDFLASVSWLRFSNLFGETEGFVCAIMDEVILTNNYRKYIIKDGTVDICRACHSPGESIRHIISGCGRLANGEYLHRHNQVAKIIHQQLALHYQLVEFEVPYYKYAPDPVLENGHITLYWDRSIITDRTIVANKPDIVVIDRQARRTMIIDVTIPHDENLVKAEKDKQIKYLDLAHEVVDMWNVDSAIVVPIVVSANGLIPNSLDNHLRRLGLGGWIKGLMQKAVLLETARIVRRFLSLEP

SEQ ID NO: 30234 - protein, 1132 aa, Spodoptera frugiperda
MTDDSGPVPTSGRVPATGGCARRMKWSQTINENVMRAYYGATEGGTNLTAYRERMLSMFQVLESSVNVSAQRLSDQVRAIQRNSRLDEAALDRLRSEALRNRVVPAPPQEVAQTPIASQNVIPTPPAARVEDDRVEQVSTQCNERLRSALEDAIREYRFAPLKPKLPRLPMCGKNRALVSALDSLLKTYFESSENLYDTHSILYCGAVAACRVANVRFSNLDAAVRPKPAVPAWQCRIERRISEARVLIGKLSCFREGNTRPRVMRFVRRAFVGTETSPREYMSRVTERIDFLKQKVYAWANRIRRYKKRVERYTQNRMFQRDQRWVYRNWERSNQDVTDGRRPDDEATNTFWRNIWSVPVTHTEDDWICDVERRCETVPEMEEVIITSSDVSSAACSVPNWKSPGPDGLHNFWLKWFTSSHSRLASQFQAALEAGSLPQFLTTGVTHLLHKSGSSTEPKNYRPITCLPTVYKLLTSILRTKITKHIEKHSIMSVSQNGCRKGSRGTKELLLIDMVVSQQVRRSRKNLSTCWIDYKKAYDSVPHTWLMRVLELYKIDATLRAFLQSCMRQWSTVLCYPGCRQIQGSEEPVRIVRGIFQGDSLSPLWFCLALNPLSTLLEASGLGYPLRRRGLVISHLLYMDDLKLFAPNNKQLMELLKITEKFSSSIRMEFGVDKCAVMHVKRGGIVESEGLELSDFTKLRALSANDTYKYLGMSEGLGINGPDMKQSLRERFFGRLNRVLKSSLSGGNKVRAYNGWVMPVLMYSFGILKWTQTELDTLDRRVRTLLTANRMHHPRSSIMRLYIPRKCGGRGLLNAKTLHNREVCNLREYFLKVNEGMHREVAAVDNGFTPLSLAKENWRKPVVLSVNDRKEVWHSKELHGRFFRTLHGPSVDFLASVSWLRFSNLFGETEGFVCAIMDEVILTNNYRKYIIKDGTVDICRACHSPGESIRHIISGCGRLANGEYLHRHNQVAKIIHQQLALHYQLVEFEVPYYKYAPDPVLENGHITLYWDRSIITDRTIVANKPDIVVIDRQTRRTMIIDITIPHDENLVKAEKDKQIKYLDLAHEVVDMWNVDSAIVVPIVVSANGLIPNSLDNHLRRLGLGGWIKGLMQKAVLLETARIVRGFLSLEP

SEQ ID NO: 30235 - protein, 1197 aa, Vanessa tameamea
MLTRARQRAHNKPSSDPPLSSASQAQDPAKGSSLVSAIASSSSDEYFSPPTSPTPVRRAGRRRPPTGLGARGQPASNRVPASGGGVQRMRWTQPINENVMRAYYGATEGGINLTAYRVRMLSLFQALEPAINVSAQRLSDQVWIILRNNRLSDTVLDRIRSEMCNSGFTSAPSQPVVEGPLPATPQGPDHDDEGEGDMAITTSKYSDQMRSALADAIREYRNTPAELRPRLPRLPMTKRNRDLVCTLDSLLADYFESSENLEDTHSILFCAAVAACRVAGVTFEDTERAIRPKAAAPAWQSRIEKRINETRVLIGKLYCFKEGNTRPRVMRFVGRAFLGTGISSQEYPSHVMERIDFLKQKVYAWASRIRRYRRRVDRYYLNRIFQSDQRWVYRTWERLDQGVSDGYRPDDDTTNTFWRNIWSVPVDHIEGDWMREVRQACEPLEAMGEISIASEDVAAAVRSVPNWKSPGPDGLHSFWLKWLRSSHDCLASQFQSALESGSLPQFLTTGVTHLLHKSGSATDPKNYRPITCLPTVYKLLTSILRDKINSHIQNNNILSVSQNGCRGGSRGTKELLLIDMTISQQVRRFRKSLSTCWIDYKKAYDSVPHTWLLRVLELYKLDTTLCSFLRSCMGQWRTVLRYPGCRTIHGNDEPIRIERGIFQGDSLSPLWFCLALNPLSTLLEGSRLGYCLRRGGKVISHLLYMDDLKLFAPSGSQLMELLKVTETFSNSIRMEFGVDKCAVMHVERGEIMESDGLQLSDSINFRSLSANESYKYLGVSEALGINVTDMKQSLQERFFGRLKKVLKSLLSGGNKVRAFNGWVMPVLMYSFGILKWTQKELDALDRRVRVLLTAYRMHHPRSSVMRLYIPRRCGGRGFLNAKTLHNSEVYKLREYFLHTDLDMHREVVTMDKGLTPLSLGKENWRKPVVLSTENRKEVWKSKELHGRFYRALHGPDVDFIASVAWLRFGNLFGETEGFVCAIMDEVIMTNNYRKYIVRDGTVDICRACHTPGESIRHIISGCSRLANGEYLHRHNQVAKIIHQQLALRYGLVVSEVPYYRYVPDPVLENGCITLYWDRSIITDRTVVANKPDIVVIDRSERRTIIIDVTIPHDENLVKAEKDKQIKYLDLAHEVVDMWDVDTAVIVPIVVSANGLMAKSLDQHLKRLSLGSWVKGLMQKAVLLGTARIVRKFLSLGP

SEQ ID NO: 30236 - protein, 1198 aa, Eilema depressum
MLTRSQARKNASAPVTSPDSSLSSAAQPSPTEPAASSSSSSDEFFSPPTSPTPVRRPGRGRPPASLEPRRPPASNRAPAAGGNVHRMRWTTSINENVMRAYFAATGGGTNLTAYRDRMLLVFQGLEPTLNVSAQRLSDQVRAIQRCHLLDSSVLERIRSDLQNSDVIPPPPQAPLLTPRVQGFTQVTEPDSGDGELDNVAFSVSTQYNDLIRNTLECAIRDYRSMHYQIRPRLPRLPVHKRNIALVCALDSLLPIYLDNSENLGDTHSILYCAAIAACRVAGIRFPETNTTTRPNSGKPRWQCRIECRIAEARALIGKLICFRSGNTRPRVMRFVNRAFSGTGISPRDYAARVIERIDFLKQKVYAWANRLKRYKKRCDRYTLNRTFQRDERWVYRSWERPDLVDDVHLPDIDATNTFWRNIWSVPVAHTEGDWMREVKRSCEAIETMEPVIITEDDIACVVRSLPNWKAAGPDGLHNFWLKWLRSSHVRLASQFQSALESGSLPNFMTTGVTHLLFKSGSAVDPRNYRPITCLPTVYKLLTSVLRVKITNHITGNSILSYSQNGCRSGARGTKEHLIIDAAINQQVRRNRKDMATCWIDYKKAYDSVPHTWLLRVLELYKVDTTLCTFLKACMGQWRTALRYPGCRHIRDDGELIKIERGIFQGDSLSPLWFCLALNPLSTLLEDSGLGYCLRRGGQVISHLLYMDDLKLYAPNSLRLMELLKVTETFSNSIRMEFGVDKCAVMQVKRGGIVESEGIELSDSTKLRSLSANDTYKYLGVSQALGINEAGMKQSLRERFFCRLKKVLNSLLSGGNKVRAYNDWVIPVLTYSFGILRWTQTELEALDRRVRTLLTAYRMHHPRSSVMRLYIPRKCGGRGFLNVKNLHNREIYNLREYFLKVDVDVHRDVVAVDNGLTPLALAKENWRKPAILSIDDRKEVWRSKELHGRFYRALYGPDIDLKASVSWLRFGDLFGETEGFVCAITDEVVMTNNYRRYILKDGTVDICRACHRPGESLRHIISGCSRLANGEYLHRHNLVARIIHQQLALKYKLVDSEVPYYRYVPDPVLDDGRVTLYWDRSIITDRTILANKPDIVVIDRSERRAIIVDITIPHDENLVKAEKDKQIKYLDLAREVVDMWAVDSAIVVPIVVSAHGLIAKSLDQHLKRLALDSWIKGLMQKAVLLDTARIVRRFLSLEP

SEQ ID NO: 30237 - protein, 1199 aa, Vanessa cardui
MLTRARQRAHKNPSPDPPLSSASQAQDPAQGNNLMSAAASSSSDEYFSPPTSPTPVRRAGRRRPPTGLGARGQPVSNGVPASGGGVQRMRWTQSINVNVMRAYYGATEGGTNLTAYRVRMLSMFQALEPAINVSAQRLSDQVRVILRNNRLSDTVLDRIRSEQCNGGVTSAPSQPVVQGPLPAIPQGPCHNHDDEGEGDMAITTSKYSDQLRSALEDAIREYRDIPAELRPRLPRLPMTKRNRDLVCTLDSLLADYFESSENLEDTHSILFCAAVAACRVAGVTFEDTERATRPKTVAPAWQSRIEKRINETRVLIGKLCCFKEGNTRPRVMRFVGRAFLGTGISPQEYPSHVVERIDFLKQKVYAWASRIRRYRRRVDRYYLNRMFQSDQRWVYRTWERLDQGVSDGCRPDDDATNTFWRNIWSVPVDHIEGDWMREVRQACEPLEAMGEISIASEDVAAAVRSVPNWKSPGPDGLHSFWLKWLRSSHECLASQFQSALESGSLPQFLTTGVTHLLHKSGSATDPKNYRPITCLPTVYKLLTSILRDKINSHIENNTILSVSQNGCRGGSRGTKELLLIDMTISQQVRRSRKSLSTCWIDYKKAYDSVPHTWLLRVLELYKLDTTLCSFLRSCMGQWRTVLRYPGCRTIHSNDEPIRIERGIFQGDSLSPLWFCLALNPLSTLLESSRLGYRLRRGGKVISHLLYMDDLKLFAPSDSQLVELLKVTETFSNSIRMEFGVDKCAVMHVKRGEIVESDGLQLSDSINFKSLSANESYKYLGMSEALGINVTDMKQSLQERFFGRLKKVLKSLLSGGNKVRAFNGWVMPVLMYSFGILKWTQKELDALDRRVRVLLTTYRMHHPRSSVMRLYIPRRCGGRGFLNAKTLHNREVYKLREYFLHTDLDMHRDVVTIDKGLTPLSLGKENWRKPVVLSTENRKEVWKSKELHGRFYRALHGPDVDFMASVSWLRFGNLFGETEGFVCAIMDEVIMTNNYRRYIVRDGTVDICRACHTPGESLRHIISGCSRLANGEYLHRHNQVAKIIHQQLALRYGLVVSEVPYYRYVPDPVLENGHITLYWDRSIITDRTVVANKPDIVVIDRSERRTIIVDITIPHDENLVKAEKDKQIKYLDLAHEVVDMWDVDTAVIVPIVVSANGLMAKSLDQHLKRLSLGSWVKGLMQKAVLLGTARIVRKFLSLEP

SEQ ID NO: 30238 - protein, 1199 aa, Schrankia costaestrigalis
MMITRAKARIAQATPPDSSLSSASQTVENVPDSVEASSSSSSEEFFSPPSSPTPVLRRGRGRPPIGLGSRAPQASNRVPAVGGNVHRMKWTSTINENVMRAYFVATEGGTNLTAYRDRMLSLFQELEPAVNVSTQRLSDQVRAIQRCHLLNDTVLDRIRSDILSNLTISTPPPVTTQVNTIIPLSQPIELNSSETIDCEVTNVSIQYNDQLRSALECTIGEYRFMEPDKRPRLPRLPTHKKNIALVCALDSLLSNYFDNSENLSDAHSILYCGAVTACRVAHIRFPTDDIATRLRPTVPVWQCRIERRIAEARALIGKLICFRSGNTRPRVMRFVTRAFADTNIDRRDYILHVTERIDFLKQKVYAWANRIKRFKKRMERYTQNRAFQRDERWVYRNWERPVQDSGDRQLPDADATTNFWRSIWSVPVSHVEGDWIGDVEKACERIHQMEPVTISTLDVSSAVRRLPNWKSAGPDGLHNFWLKWLHSSHACLASHFQSSLETGTLPDFITTGETHLLYKSGSSTDPKNYRPITCLPTIYKLLTSILRKKISLHIQHNSIMYISQNGCRNEARGTKEQLLIDTTISEQVRRNRKDLSTCWIDYKKAYDSVPHTWLLRVLELYKIDATLCTFLRTCMTKWNTVLFYSGCRQGLGNNVPIQIKRGIFQGDSFSPLWFCLALNPLSTLLECSGLGYRLKRHGQVISHLLYMDDLKLFAPTKSQLLVLLKETETFSNSIKMEFGVDKCAVMHVKRGKVVESDELQLSDTIKLRCLSPSDTYKYLGMSQALCIAETDMKQQLRDRFFARLKKVLNSLLTGGNKVRAYNGWVMPVLMYSFGILRWTQTELETLDRKVRTLLTAHRMHHPRSSVMRLYIPRKSGGRGFLSAKTLHNREVYNLREYFLSVDADIHRDVVSVDVGLTPLCLGKENWRKPIIHTIDDRKEVWKSKELHGRFYRTLNGPDVDTLASVSWLRFGDLFGETEGFVFAIMDEVVMTKNYRKYILKDGTVDICRACHCPGESLRHIVSGCSRLANGEYLHRHNQVARIVHQQLALKYHLVDAEVPYYKYVPDPVLENSSVTLYWDRSIITDRTIVANKPDIVVIDRSERRAMIIDITIPHDENLVKAEKDKQTKYLDLAHEVVDMWHVDSAIIVPIVLSVNGLIPKSLYQHLRRLSLDSWIIGLMQKAVLLDTARIVRRFLSLEP

SEQ ID NO: 30239 - protein, 1191 aa, Trichoplusia ni
MLTRRRAARLPSPGSSPSSASQLPPGRGPAPAVAVASSSSDEYYSPPTSPTPVRRPGRRRPPSSLAPSGQPASNRAPAPGGVVQRMKWTRPMNENVMRAYYGATGGGTNLTAYRARMLSLFRALEPDVDVSAQRLSDQVRVIQRNHRLDDATLDRLRSEVQTSPVVVTPSIAEAPAASALPANPADGGDDDGAITVSTQCSDHIRSTLEQAVLEYRSTPRDQRPRLPRLPMHNRNKALMGVLDSLLSSYFGNSEDLGDTHSLLYCAAVAACRVAGVTFRDNTAARPKQAAPAWQCRIEKRVAEARTLIAKLVAFRGGNTRPRVMRFVKRAFAGTNISPSEYTARVTERIDFFKQKVCAWASRIRRYKTRVDRFHQNRMFQRDQRWVYRSWEQPASEEGAGRLPDDVATNLFWRSIWSAPVTHSEGDWIRDVEQSCERIEEMGAIDISPQDVANAVRPLANWKAPGPDGLHNFWLKWLPSSHGCLASQFQSAVDSGVLPQFFTTGSTHLLHKTGSTTDPKNYRPITCLPTIYKLLTSILREKINDHIERFSIMSASQNGCRNGSRGTKELLLIDMTICQQVRRSKKGVSTCWIDYKKAYDSVPHAWLMRVLELYKINTTLRTFLKSCMGQWTTVLHYPGCRDIQKSGQLIRIERGIFQGDSLSPLWFCLALNPLSTLLENSRLGYSLRRGSQVISHLLYMDDLKLFASNKLQLMKLLKITESFSNSIRMEFGVDKCAVMHVKRGGIVESQGIQLSDSINLRSLSSTETYKYLGMSEALGINVADMKQSLQTRFFGRLNKVLKSSLSGGNKVRAFNGWVMPVIMYSFGILKWTQTELDALDRRVRTLLTANRMHHPRSSVMRLYIPRKCGGRGFLNAKTLHNREVCNLREYFLRVDVGMHRDVVAVDKGFTPLSLGKENWHKPIVLSVKDRKDVWQSKELHGRYYRTLHGADVDFLASVAWLRFGDLFGETEGFVCAIMDEVIMTNNYRKYIIKDGTVDICRACHCPGESLRHIVSGCSRLANGEYLHRHNQVARIIHQQLALKYKLVESEVPYYKYVPDPVLESGHITLYWDRSIITDRTIVANKPDIVVIDRSERRTMIVDITIPHDENLVKAEKEKQLKYLDLAHEVVDLWEVDSAIIVPIVVSANGLIAKSLDQHLRRLSLGVWVKGLIQKAVLLDTARIVRRFLSLEP

SEQ ID NO: 30240 - protein, 1199 aa, Spodoptera exigua
MLTRAKARARAAPPPSPDSSLSSASPSPETRTTRSPVIAVASSSSDEYFSPLASPAPERRQRRGRPPMGLGTRGQRAPGRVPATGGCARRMKWSQSMNENVMRAYYGATEGGTNLTAYRDRMLSLFQVLEPSVNVSAQRLSDQVRVIQRSRRLDDAALDRLRLETLHNRVVLTSSQSATQTPVENATLATPVADVEDDKVEQVSTQCNERLRNALEDAIHEYRFAPSELRPKLPRLPMCGKNRALVCALDSLLENYFESSENLYDTHSILYCGAIAACRVANVRFPNLDAAVRPKPAAPAWQCRIERRIDEARVLIGKLTCFREGNNRPRVMRFVRRAFVGTETSPHEYLTRVTERIDFLKQKIYAWANRIRRYKKRVERYTQNRMFQSDQRWVYRDWERSSQDVVNGQRPDDETTNSFWRNIWSVPVNHTEADWMCDVKRECETLPEMEKVVITSSDVANAACSVPNWKSPGPDGLHNFWLKSFSSSHDRLASQFQMALEAGSLPQFLTTGITHLLHKSGSYTEPKNYRPITCLPTVYKLFTSILRAKITKHIEKNSIMSVSQNGCRKGSRGTKELLLIDMVISQQVRRSRKDLSTCWIDYKKAYDSVPHTWLMRVLELYKINTTLRTFLQSCMRQWSTVLSYPGCKQIQRSEEPVRIVRGIFQGDSLSPLWFCLALNPLSTLLEASGLGYRLRRKGHVISHLLYMDDLKLFAPNKEELMELLKITKNFSSSIRMEFGVDKCAVMHVKRGGIVESESLELSDFTKLRSLSANDTYKYLGMSEGLGINGPHMKQSLQERFFGRLNKVLKSSLSGGNKVRAFNGWVMPVLMYSFGILKWTQTELDTLDRRVRTLLTANRMHHPRSSVMRLYIPRKRGGRGFLNAKTLHNREVCNLREHFLKVDEDMHREVVTVDKGFTPLSLAKENWCKPVVLSVNDRKTVWSSKELHGRFFRALHGPDVDFLASVAWLRFSNLFGETEGFVCAIMDEVILTNNYRKYIMKDGTVDICRACHSPGESIRHIISGCGRLANGEYLHRHNQVAKIIHQQLALKYRLVESEVPYYKYVPDPVLEKDHITLYWDRSIITDRTIVANKPDIVLVDRLARRTTIIDVAIPHDENLVKAEKDKQLKYLDLAHEVVDMWSVDSAIVVPIVVSANGLVPKSLDNHLKRLTLGGWIKGLIQKAVLLETARIVRRFLSLEP

SEQ ID NO: 30241 - protein, 1098 aa, Spodoptera frugiperda
MRAYYGATQGGTNLTAYRERMLSMFQVLEPSVNVSAQRLSDQVRVIQRNRRLDEAALDRLRSEALRNRVVPAPPQEVAQTPTVSQNVTPTTPAAGVEDDRVEQVSTQCNERLRSALEDAIREYRFAPLKPKLPRLPMCGKNRALVSALDSLLKTYFESSENLYDTHSILYCGAVAACRVANVRFSNLDAAVRPKPAVPAWQCRIERRISEARVLIGKLSCFREGNTRPRVMRFVRRAFVGTETSPHEYMSRVTERIDFLKQKVYSWANRIRRYKKRVERYTQNRMFQRDQRWVYRNWERSNQDVTDGRRPDDEATNTFWCNIWSVPVSHTEDDWICDVKRRCETVPEMEEVIITSSDVSSAACSVPNWKSPGPDGLHNFWLKWFTSSHARLASQFQAALEAGSLPQFLTTGVTHLLHKSGSSTEPKNYRPITCLPTVYKLLTSILRTKITKHIEKHSIMSVSQNGCRKGSRGTKELLLIDMVVSQQVRRSRKNLSTCWIDYKKAYDSVPHTWLMRVLELYKIDATLRAFLQSCMRQWSTVLCYPGCRQIQGSEEPVRIVRGIFQGDSLSPLWFCLALNPLSTLLEASELGYPLRRRGLVISHLLYMDDLKLFAPNNKQLMELLKITEKFSSSIRMEFGVDKCAVMHVKRGGIVESEGLELSDFTKLRTLSANDTYKYLGMSEGLGINGPNMKQSLRERFFGRLNKVLKSSLSGGNKVRAYNGWVMPVLMYSFGILKWTQTELDALDRRVRTLLTANRMHHPRSSIMRLYIPRKCGGRGLLNAKTLHNREVCNLREYFLKVNEGMHREVAAVDNGFTPLSLAKENWRKPVVLSVNDRKEVWHSKELHGRFFRALHGPSVDFLASVSWLRFSNLFGETEGFVCAIMDEVILTNNYRKYIIKDGTVDICRACHSPGESIRHIISGCGRLANGEYLHRHNQVAKIIHQQLALHYQLVEFEVPYYKYVPDPVLENGHITLYWDRSIITDRTIVANKPDIVVIDRQARRAMIVDITIPHDENLVKAEKDKQIKYLDLAHEVVDMWSVDSAIIVPIVVSANGLIPNSLDNHLRRLGLGGWIKGLMQKAVLLETARIVRRFLSLEP

SEQ ID NO: 30242 - protein, 1200 aa, Spodoptera litura
MLTRARSRQGAPPPPPDSSLSSASPSPEPRSAGTPVTAVASSSSDDYFSPPTSPPPVRRPGRGRPPTGLGTRGHQALGRVPATGGCVRRMKWTQSINENVMRAYYGATEGGTNLTAYRERMLSMFQVLEPSVNVSAQRLSDQVRVIQRNCRLDETTLDRLRLEALRNRVVPAPPQLVAQTPVVSQCVTSTTPIVGVEDDRVEQVSTQCNERLRSALEDAVREYRLAPSNLRPKLPRLPMCIKNRALVSALDSLLKKYFESSENLYDTHSILYCGAVAACRVANVRFPNLDAAVRPKPAVPAWQYRIERRISEARVLIGKLSCFREGNTRPRVMRFVRRAFVGTETSPHEYLSRVTERIDFLKQKVYAWANRIRRYKKRVERYTQNRMFQRDQRWVYRDWERSNQDVVDGRRPDDDATSTFWRNIWSVPVSHTEGDWMFDVKRRCETIPEMEEVEITSSDVASAACSVPNWKSPGPDGLHNFWIKWFKSSHVRLALHFQAALETGSLPQFLTTGVTHLLHKSGSSTEPKNYRPITCLPTVYKLLTSILRTKITKHIEQNSIMSVSQNGCREGSRGTKELLLIDMVVSQQVRRSRKDLSTCWIDYKKAYDSVPHTWLLKVLELYKIHASLRAFLESCMRQWSTVLCYPGCRQIQGNEEPVRIVRGIFQGDSLSPLWFCLALNPLSTLLEDSGLGYPLRRRGLVISHLLYMDDLKLFAPNKKQLMELLNITEKFSSSIRMEFGVDKCAVMHVKRGGIVESEGLELSDFTKLRSLSANDTYKYLGMSEGLGINGLDMKQSLQERFFGRLNKVLKSSLSGGNKVRAFNGWVMPVLMYSFGILKWTQTELDTLDRRVRTLLTANRMHHPRSSVMRLYIPRKCGGRGLLNAKTLHNREVCSLREYFLKVNEGMHREVAAVDNGFTPLSLAKENWRKPVVLSVNDRKEVWHSKELHGRFFRALHGPSVDFLASVSWLRFSNLFGETEGFVCAIMDEVILTNNYRKYIIKDGTVDICRACHSPGESIRHIISGCGRLANSEYLHRHNQVAKIIHQQLALHYRLVESEVPYYKYVPDPVLENDHITLYWDRSIITDRTIIANKPDIVVIDRQVRRTMIIDITIPHDENLVKAEKDKQIKYLDLAHEVVDMWNVDSAIIVPIVVSANGLIPNSLDNHLRRLALGSWVKGLIQKAVLLETARIVRRFLSLEP

SEQ ID NO: 30243 - protein, 1111 aa, Spodoptera litura
MKWSQTINENVMRSYYGATEGGTNLTAYRERMLSIFQVLEPSINVSAQRLSDQVRVIQRNRRLDEAALDRLRLEALRNRVVPAPPQSVAQTPIVSQCVTPTTPIVGVEDDRVEQVSTQCNERLRSALEDAVREYRLAPSNLRPKLPRLPMCRKNRALVSALDSLLKKYFESSENLYDTHSILYCGAVAACRVANVRFPNLDAAVRPKPAVPAWQYRIERRISEARVLIGKLSCFREGNTRPRVMRFVRRAFVGTETSPHEYLSRVTERIDFLKQKVYAWANRIRRYKKRVERYTQNRMFQRDQRWVYRDWERSNQDVVDGRRPDDDATSTFWRNIWSVPVSHTEGDWMFDVKRRCETIPEMEEVEITSSDVASAACSVPNWKSPGPDGLHNFWIKWFKSSHVRLALHFQAALETGSLPQFLTTGVTHLLHKSGSSTEPKNYRPITCLPTVYKLLTSILRTKITKHIKKNSIMSVSQNGCREGSRGTKELLLIDMVVSQQVRRSRKDLSTCWIDYKKAYDSVPHTWLLKVLELYKIHASLRAFLESCMRQWSTVLCYPGCRQIQGNEEPVRIVRGIFQGDSLSPLWFCLALNPLSTLLEDSGLGYPLRRRGLVISHLLYMDDLKLFAPNKKQLMELLNITEKFSSSIRMEFGVDKCAVMHVKRGGIVESEGLELSDFTKLRSLSANDTYKYLGMSEGLGINGPDMKQSLQERFFGRLNRVLKSSLSGGNKVRAFNGWVMPVLMYSFGILKWTQTELDTLDRRVRTLLTANRMHHPRSSVMRLYIPRKCGGRGLLNAKTLHNREVCSLREYFLKVNEGMHREVAAVDNGFTPLSLAKENWRKPVVLSVNDRKEVWHSKELHGRFFRALHGPNVDFLASVSWLRFSNLFGETEGFVCAIMDEVILTNNYRKYIIKDGTVDICRACHSPGESIRHIISGCGRLANSEYLHRHNQVAKIIHQQLALHYRLVESEVPYYKYVPDPVLENDHITLYWDRSIITDRTIVANKPDIVVIDRQVRRTMIIDVTIPHDENLVKAEKDKQIKYLDLAHEVVDMWSVDSAIIVPIVVSANGLIPKSLDIHLRRLALGGWIKGLIQKAVLLETARIVRRFLSLEP

SEQ ID NO: 30244 - protein, 1197 aa, Vanessa tameamea
MLTRARQRAHKNPSPDPPLSSASQAQDPAQGSSLVSASASSSSDEYFSPPTSPTPVRRAGRRRPPTSLGARGQPASNGVPASGGGVQRMRWTQSINENVMRAYYGATEGGTNLTAYRVRMLSLFQALEPAINVSAQRLSDQVRVILRNNRLSDTVLDRIRSEMCNSGFTSAPSQPVVEGPLPATPQGPDHDDEDEGDMAITTSKYSDQLRSALGDAIREYRNTPAELRPRLPRLPMTKRNKDLVCTLDSLLADYFESSEDLEDTHSILFCAAVAACRVAGVTFEDTERATRPKAATPAWQSRIEKRINKTRVLIGKLYCFKEGNTRPRVMRFVGRAFLGTGISPQEYPSHVVERIDFLKQKVYAWASRIRRYRRRVDRYYLNRMFQSDQRWVYRTWERLDQGVSDGCRPDDDATNIFWRNIWSVPVDHIEGDWMREVRQACEPLEAMGEISIASEDVAAAVRSVPNWKSPGPDGLHSFWLKWLRSSHDCLASQFQSALESGSLPQFLTTGVTHLLHKSGSATDPKNYRPITCLPTVYKLLTSILRDKINSHIQNNSILSVSQNGCRGGSRGTKELLLIDMTISQQVRRFRKSLSTCWIDYKKAYDSVPHTWLLRVLELYKLDTTLCSFLRSCMGQWRTVLRYPGCRTIHSNDEPIRIERGIFQGDSLSPLWFCLALNPLSTLLESSRLGYCLWRGGKVISHLLYMDDLKLFAPSGSQLMELLKVTETFSNSIGMEFGVDKCAVMHVKRGEIMESDGLQLSDSINFRSLSANESYKYLGVSEALGINVTDMKQSLQERFFGRLKKVLKSLLSGGNKVRAFNGWVMPVLMYSFGILKWTQKELDALDRRVRVLLTAYRMHHPRSSVMRLYIPRRCGGRGFLNAKTLHNREVYKLREYFLHTDLDMHRDVVTMDKGLTPLSLGKENWRKPVVLSTENRKGVWKSKELHGRFYRALHGPDVDFMASVSWLRFGNLFGETEGFVCAIMDEVIMTNNYRKYIVRDGTVDICRACHTPGESLRHIISGCSRLANGEYLHRHNQVAKIIHQQLALRYGLVVSEVPYYRYVPDPVLENGRITLYWDRSIITDRTVVANKPDIVVIDRSERRTIIVDVTIPHDENLVKAEKDKQIKYLDLAHEVVDMWDVDTAIIVPIVVSANGLMAKSLDQHLKRLSLGGWVKGLMQKAVLLGTARIVRKFLSLGP

SEQ ID NO: 30245 - protein, 1198 aa, Eilema depressum
MLTRSQARKNASAPVTSPDSSLSSAAQPSPTEPAASSSSSSDEFFSPPTSPTPVRRPGRGRPPASLEPRRPPASNRAPAAGGNVHRMRWTTSINENVMRAYFAATGGGSNLTAYRDRMLLVFQGLEPTLNVSAQRLSDQVRAIQRCHLLDSSVLERIRSDLQNSDVIPPPPQAPLLTPRVQGFTQVTEPDSGDGELDNVAFSVSTQYNDLIRNTLECAIRDYRSMHYQIRPRLPRLPVHKRNIALVCALDSLLPIYLDNSENLGDTHSVLYCAAIAACRVAGIRFPETNTTTRPNSGKPRWQCRIECRIAEARALIGKLICFRSGNTRPRVMRFVNRAFSGTGISPRDYAARVIERIDFLKQKVYAWANRIKRYKKRCDRYTLNRTFQRDERWVYRSWERPDLVDDVHLPDIDATNTFWRNIWSVPVAHTEGDWMREVKRSCEAIETMEPVIITEDDIACVVRSLPNWKAAGPDGLHNFWLKWLRSSHVRLASQFQSALESGSLPNFMTTGVTHLLFKSGSAVDPRNYRPITCLPTVYKLLTSVLRVKITNHITGNSILSYSQNGCRSGARGTKEHLIIDAAINQQVRRNRKDMATCWIDYKKAYDSVPHTWLLRVLELYKVDTTLCTFLKACMGQWRTALRYPGCRHIRDDGELIKIERGIFQGDSLSPLWFCLALNPLSTLLEDSGLGYCLRRGGQVISHLLYMDDLKLYAPNSLRLMELLKVTETFSNSIRMEFGVDKCAVMQVKRGGIVESEGIELSDSTKLRSLSANDTYKYLGMSQALGINEAGMKQSLRERFFCRLKKVLNSLLSGGNKVRAYNDWVIPVLTYSFGILRWTQTELEALDRRVRTLLTAYRMHHPRSSVMRLYIPRKCGGRGFLNVKNLHNREIYNLREYFLKVDVDVHRDVVAVDNGLTPLALAKENWRKPAILSIDDRKEVWRSKELHGRFYRALYGPDIDLKASVSWLRFGDLFGETEGFVCAITDEVVMTNNYRRYILKDGTVDICRACHRPGESLRHIISGCSRLANGEYLHRHNLVARIIHQQLALKYKLVDSEVPYYRYVPDPVLDDGRVTLYWDRSIITDRTILANKPDIVVIDRSERRAIIVDITIPHDENLVKAEKDKQIKYLDLAREVVDMWAVDSAIVVPIVVSAHGLIAKSLDQHLKRLALDSWIKGLMQKAVLLDTARIVRRFLSLEP

SEQ ID NO: 30246 - protein, 867 aa, Eilema depressum
MRFVNRAFSGTGISPRDYAARVIERIDFMKQKVYAWANRLKRYKKRCDRYTLNRTFQRDERWVYRSWERPDLVDDVHLPDIDATNTFWRNIWSVPVAHTEGDWMREVKRSCEAIETMEPVIITEDDIACVVRSLPNWKAAGPDGLHNFWLKWLRSSHVRLASQFQSALESGSLPNFMTTGVTHLLFKSGSAVDPRNYRPITCLPTVYKLLTSVLRVKITNHITGNSILSYSQNGCRSGARGTKEHLIIDAAINQQVRRNRKDMATCWIDYKKAYDSVPHTWLLRVLELYKVDTTLCTFLKACMGQWRTALRYPGCRHIRDDGELIKIERGIFQGDSLSPLWFCLALNPLSTLLEDSGLGYCLRRGGQVISHLLYMDDLKLYAPNSLRLMELLKVTETFSNSIRMEFGVDKCAVMQVKRGGIVESEGIELSDSTKLRSLSANDTYKYLGMSQALGINEAGMKQSLRERFFCRLKKVLNSLLSGGNKVRAYNDWVIPVLTYSFGILRWTQTELEALDRRVRTLLTAYRMHHPRSSVMRLYIPRKCGGRGFLNVKNLHNREIYNLREYFLKVDVDVHRDVVAVDNGLTPLALAKENWRKPAILSIDDRKEVWRSKELHGRFYRALYGPDIDLKASVSWLRFGDLFGETEGFVCAITDEVVMTNNYRRYILKDGTVDICRACHRPGESLRHIISGCSRLANGEYLHRHNLVARIIHQQLALKYKLVDSEVPYYRYVPDPVLDDGRVTLYWDRSIITDRTILANKPDIVVIDRSERRAIIVDITIPHDENLVKAEKDKQIKYLDLAREVVDMWAVDSAIVVPIVVSAHGLIAKSLDQHLKRLALDSWIKGLMQKAVLLDTARIVRRFLSLEP

SEQ ID NO: 30247 - protein, 1199 aa, Vanessa cardui
MLTRARQRAHKNPSPDPPLSSASQAQDPAQGNNLMSAAASSSSDEYFSPPTSPTPVRRAGRRRPPTGLGARGQPVSNGVPASGGGVQRMRWTQSINENVMRAYYGATEGGTNLTAYRVRMLSMFQALEPAINVSAQRLSDQVRVILRNNRLSDTVLDRIRSEQCNGGVTSAPSQPVVQGPLLAIPQGPCHDHDDEGEGDMAITTSKYSDQLRSALEDAIREYRDIPAELRPRLPRLPMTKRNRDLVCTLDSLLADYFESSENLEDTHSILFCAAVTACRVAGVTFEDTERATRPKTVAPAWQSRIEKRINETRVLIGKLCCFKEGNTRPRVMRFVGRAFLGTGISPQEYPSHIVERIDFLKQKVYAWASRIRRYRRRVDRYYLNRMFQSDQRWVYRTWERLDQGVSDGCRPDDDATNTFWRNIWSVPVDHIEGDWMREVRQACEPLEAMGEISIASEDVAAAVRSVPNWKSPGPDGLHSFWLKWLRSSHECLASQFQSALESGSLPQFLTTGVTHLLHKSGSATDPKNYRPITCLPTVYKLLTSILRDKINSHIENNTILSVSQNGCRGGSRGTKELLLIDMTISQQVRRSRKSLSTCWIDYKKAYDSVPHTWLLRVLELYKLDTTLCSFLRSCMGQWRTVLRYPGCRTIHSNDEPIRIERGIFQGDSLSPLWFCLALNPLSTLLESSRLGYRLRRGGKVISHLLYMDDLKLFAPSDSQLVELLKVTETFSNSIRMEFGVDKCAVMHVKRGEIVESDGLQLSDSINFKSLSANESYKYLGMSEALGINVTDMKQSLQERFFGRLKKVLKSLLSGGNKVRAFNGWVMPVLMYSFGILKWTQKELDALDRRVRVLLTTYRMHHPRSSVMRLYIPRRCGGRGFLNAKTLHNREVYKLREYFLHTDLDMHRDVVTIDKGLTPLSLGKENWRKPVVLSTENRKEVWKSKELHGRFYRALHGPDVDFMASVSWLRFGNLFGETEGFVCAIMDEVIMTNNYRKYIVRDGTVDICRACHTPGESLRHIISGCSRLANGEYLHRHNQVAKIIHQQLALRYGLVVSEVPYYRYVPDPVLENGHITLYWDRSIITDRTVVANKPDIVVIDRSERRTIIVDITIPHDENLVKAEKDKQIKYLDLAHEVVDMWDVDTAVIVPIVVSANGLMAKSLDQHLKRLSLGSWVKGLMQKAVLLGTARIVRKFLSLEP

SEQ ID NO: 30248 - protein, 1191 aa, Trichoplusia ni
MLTRRRAARLPSPGSSPSSASQLPPGRGPAPAVAVASSSSDEYYSPPTSPTPVRRPGRRRPPSSLAPSGQPASNRAPAPGGVVQRMKWTRPMNENVMRAYYGATGGGTNLTAYRARMLSLFRALEPDVDVSAQRLSDQVRVIQRNHRLDDATLDRLRSEVQTSPVVVTPSIAEAPAASALPANPVDGGDDDGAITVSTQCSDHIRSTLEQAVLEYRSTPRDQRPRLPRLPMHNRNKALMGVLDSLLSSYFGNSEDLGDTHSLLYCAAVAACRVAGVTFRDNTAARPKQAAPAWQCRIEKRVAEARTLIAKLVAFRGGNTRPRVMRFVKRAFAGTNISPSEYTARVTERIDFFKQKVCAWASRIRRYKTRVDRFHQNRMFQRDQRWVYRSWEQPASEEGAGRLPDDVATNLFWRSIWSAPVTHSEGDWIRDVEQSCERIEEMGAIDISPQDVANAVRPLANWKAPGPDGLHNFWLKWLPSSHGCLASQFQSAVDSGVLPQFFTTGSTHLLHKTGSTTDPKNYRPITCLPTIYKLLTSILREKINDHIERFSIMSASQNGCRNGSRGTKELLLIDMTICQQVRRSKKGVSTCWIDYKKAYDSVPHAWLMRVLELYKINTTLRTFLKSCMGQWTTVLHYPGCRDIQKSGQLIRIERGIFQGDSLSPLWFCLALNPLSTLLENSRLGYSLRRGSQVISHLLYMDDLKLFASNKLQLMKLLKITESFSNSIRMEFGVDKCAVMHVKRGGIVESQGIQLSDSINLRSLSSTETYKYLGMSEALGINVADMKQSLQTRFFGRLNKVLKSSLSGGNKVRAFNGWVMPVIMYSFGILKWTQTELDALDRRVRTLLTANRMHHPRSSVMRLYIPRKCGGRGFLNAKTLHNREVCNLREYFLRVDVGMHRDVVAVDKGFTPLSLGKENWHKPIVLSVKDRKDVWQSKELHGRYYRTLHGADVDFLASVAWLRFGDLFGETEGFVCAIMDEVIMTNNYRKYIIKDGTVDICRACHCPGESLRHIVSGCSRLANGEYLHRHNQVARIIHQQLALKYKLVESEVPYYKYVPDPVLESGHITLYWDRSIITDRTIVANKPDIVVIDRSERRTMIVDITIPHDENLVKAEKEKQLKYLDLAHEVVDLWEVDSAIIVPIVVSANGLIAKSLDQHLRRLSLGVWVKGLIQKAVLLDTARIVRRFLSLEP

SEQ ID NO: 30249 - protein, 1138 aa, Spodoptera frugiperda
MMFLSTVISVITIIINTGRVPATGGCARRMKWSQTINENVMRAYYGATEGGTNLTAYRERMLSMFQVLEPSVNVSAQRLSDQVRVIQRNRRLDEAALDRLRSEALHNRVVPAPPQEVAQTPTVSQNVTPTTPDAGVEDDRVEQVSTQCNERLRSALEDAIREYRFAPLKPKLPRLPMCGKNRALVSALDSLLKTYFESSENLYDTHSILYCGAVAACRVANVRFSNLEAAVRPKPAVPAWQCRIERRISEARVLIGKLSCFREGNTRPRVMRFVRRAFVGTETSPHEYMSRVTERIDFLKQKVYAWANRIRRYKKRVERYTQNRMFQRDQRWVYRNWERSNQDVTDGRRPDDEATNTFWRNIWSVPVSHTEDDWICDVKRRCETVPEMEEVIITSSDVSSAACSVPNWKSPGPDGLHNFWLKWFTSSHARLASQFQAALEAGSLPQFLTTGVTHLLHKSGSSTEPKNYRPITCLPTVYKLLTSILRTKITKHIEKHSIMSVSQNGCRKGSRGTKELLLIDMVVSQQVRRSRKNLSTCWIDYKKAYDSVPHTWLMRVLELYKIDATLRAFLQSCMRQWSTVLCYPGCRQIQGSEEPVRIVRGIFQGDSLSPLWFCLALNPLSTLLEASGLGYPLRRRGLVISHLLYMDDLKLFAPNNKQLMELLKITEKFSSSIRMEFGVDKCAVMHVKRGGIVESEGLELSDFTKLRTLSANDTYKYLGMSEGLGINGPDMKQSLRERFFGRLNKVLKSSLSGGNKVRAYNGWVMPVLMYSFGILKWTQTELDALDRRVRTLLTANRMHHPRSSIMRLYIPRKCGGRGLLNAKTLHNREVRNLREYFLKVNEGMHREVAAVDNGFTPLSLAKENWRKPVVLSVNDRKEVWHSKELHGRFFRALHGPSVDFLASVSWLRFSNLFGETEGFVCAIMDEVILTNNYRKYIIKDGTVDICRACHSPGESIRHIISGCGRLANGEYLHRHNQVAKIIHQQLALHYQLVEFEVPYYKYVPDPVLENGHITLYWDRSIITDRTIVANKPDIVVIDRQARRAMIVDITIPHDENLVKAEKDKQIKYLDLAHEVVDMWSVDSAIIVPIVVSANGLIPNSLDNHLRRLGLGGWIKGLMQKAVLLETARIVRRFLSLEP

SEQ ID NO: 30250 - protein, 1200 aa, Spodoptera litura
MLTRARCRQDAPPPPPDSSLSSASPSPEPRSAGSPVTAVASSSSDDYFSPPTSPPPVRRPGRGRPPTGLGTRGHQALGRVPATGGCVRRMKWSQTINENVMRAYYGATEGGTNLTAYRERMLSMFQVLEPSVNVSAQRLSDQVRVIQRNCRLDEATLDRLRLEALRNRVVPAPPQLVAQTPVVSQCVTSTTPIVGVEDDRVEQVSTQCNERLRSALEDAVREYRLAPSDLRPKLPRLPMCRKNRALVSALDSLLKKYFESSENLYDTHSILYCGAVAACRVANVRFPNLDAAVRPKPAVPAWQYRIERRISEARVLIGKLSCFREGNTRPRVMRFVRRAFVGTETSPHEYLSRVTERIDFLKQKVYAWANRIRRYKKRVERYTQNRMFQRDQRWVYRDWERSNQDVADGRRPDDDATNTFWRNIWSVPVSHTEGDWMFDVKRRCETIPEMEEVEITSSDVASAACSVPNWKSPGPDGLHNFWIKWFKSSHVRLALHFQAALETGSLPQFLTTGVTHLLHKSGSSTEPKNYRPITCLPTVYKLLTSILRTKITKHIEQNSIMSVSQNGCREGSRGTKELLLIDMVVSQQVRRSRKDLSTCWIDYKKAYDSVPHTWLLKVLELYKIHASLRAFLESCMRQWSTVLCYPGCRQIQGNEEPVRIVRGIFQGDSLSPLWFCLALNPLSTLLEDSGLGYPLRRRGLVISHLLYMDDLKLFAPNKKQLMELLNITEKFSSSIRMEFGVDKCAVMHVKRGGIVESEGLELSDFTKLRSLSANDTYKYLGMSEGLGINGLDMKQSLQERFFGRLNKVLKSSLSGGNKVRAFNGWVMPVLMYSFGILKWTQTELDTLDRRVRTLLTANRMHHPRSSVMRLYIPRKCGGRGLLNAKTLHNREVCSLREYFLKVNEGMHREVAAVDNGFTPLSLAKENWRKPVVLSVNDRKEVWHSKELHGRFFRALHGPSVDFLASVSWLRFSNLFGETEGFVCAIMDEVILTNNYRKYIIKDGTVDICRACHSPGESIRHIISGCGRLANSEYLHRHNQVAKIIHQQLALHYRLVESEVPYYKYVPDPVLENDHITLYWDRSIITDRTIIANKPDIVVIDRQVRRTMIIDITIPHDENLVKAEKDKQIKYLDLAHEVVDMWNVDSAIIVPIVVSANGLIPNSLDDHLRRLALGSWVKGLIQKAVLLETARIVRRFLSLEP

SEQ ID NO: 30251 - protein, 1197 aa, Vanessa tameamea
MLTRARQRAHKNPSPDPPLSSASQAQDPAQGSSLVSASASSSSDEYFSPPTSPTPVRRAGRRRPPTSLGARGQPASNGVPASGGGVQRMRWTQSINENVMRAYYGATEGGTNLTAYRVRMLSLFQALEPAINVSAQRLSDQVRVILRNNRLSDTVLDRIRSEMCNSGFTSAPSQPVVEGPLPATPQGPDHDDEDEGDMAITTSKYSDQLRSALGDAIREYRNTPAELRPRLPRLPMTKRNRDLVCTLDSLLADYFESSENLEDTHSILFCAAVAACRVAGVTFEDTERATRPKAATPAWQSRIEKRINKTRVLIGKLYCFKEGNTRPRVMRFVGRAFLGTGISPQEYPSHVVERIDFLKQKVYAWASRIRRYRRRVDRYYLNRMFQSDQRWVYRTWERLDQGVSDGCRPDDDATNIFWRNIWSVPVDHIEGDWMREVRQACEPLEAMGEISIASEDVAAAVRSVPNWKSPGPDGLHSFWLKWLRSSHDCLASQFQSALESGSLPQFLTTGVTHLLHKSGSATDPKNYRPITCLPTVYKLLTSILRDKINSHIQNNSILSVSQNGCRGGSRGTKELLLIDMTISQQVRRFRKSLSTCWIDYKKAYDSVPHTWLLRVLELYKLDTTLCSFLRSCMGQWRTVLRYPGCRTIHSNDEPIRIERGIFQGDSLSPLWFCLALNPLSTLLECSRLGYCLWRGGKVISHLLYMDDLKLFAPSGSQLMELLKVTETFSNSIGMEFGVDKCAVMHVKRGEIMESDGLQLSDSINFRSLSANESYKYLGVSEALGINVTDMKQSLQERFFGRLKKVLKSLLSGGNKVRAFNGWVMPVLMYSFGILKWTQKELDALDRRVRVLLTAYRMHHPRSSVMRLYIPRRCGGRGFLNAKTLHNREVYKLREYFLHTDLDMHRDVVTMDKGLTPVSLGKENWRKPVVLSTENRKGVWKSKELHGRFYRALHGPDVDFMASVSWLRFGNLFGETEGFVCAIMDEVIMTNNYRKYIVRDGTVDICRACHTPGESLRHIISGCSRLANGEYLHRHNQVAKIIHQQLALRYGLVVSEVPYYRYVPDPVLENGRITLYWDRSIITDRTVVANKPDIVVIDRSERRTIIVDVTIPHDENLVKAEKDKQIKYLDLAHEVVDMWDVDTAVIVPIVVSANCLMAKSLDQHLKRLSLGSWVKGLMQKAVLLGTARIVRKFLSLGP

SEQ ID NO: 30252 - protein, 1192 aa, Eilema sororculum
MLTRAQAKRNGSAPITSPDSSLSSAAQPPAVEPAASSSSSSDEFFSPPTSPTPVRRPGRGRPPTCLGPRRPPASNGAPATGGDVHRMRWTNSINENVMRAYFAATEGGTNLSAYRTRMLPLFQALEPSINVSAQRLSDQVRVIQRNRMLNETVLETLRLECLRNICVTPAPVPVPASTVELNDDTCVAPDDTPIPVSIQYNEEIKEALECALREYRSMPVHVRPRLPRLPIHRRNIALVSALDSLLPRYLENSENLGDTHSILYCTAVAACRMAGAKFPIKDPAIRPKSAIPAWQCRIERRVTEARVLIGKLICFRSGNTRPRVMRYVTRAFAGTDISPQDYTSRVTERIDFLKQKVYAWANRIRRYKKRVDRYTVNRMFQRDQRWVYRSWERTEESVDDVRRPDAEVTNAFWRSIWSVPVSHTEGDWLHEVKRACETIPEMEEINIDAIDVDCAVRSLSNWKSPGPDGLHNFWLKWLRSSHVVLASQFQSAVESGTLPAFMTTGVTHLLHKTGSTLEPNNYRPITCLPTVYKLLTSILRAKINNHINNNSIMCASQNGCRNGARGTKELLLIDMAISQQARRNRKDLTACWIDYKKAFDSVPHTWLLRVLELYKVNTTLCTFLRSCMGQWRTVLFYPGCRQALGGGVPITIERGIFQGDSLSPLWFCLALNPLSTLLVNSGLGYRLRREGQMVSHLFYMDDLKLFAHTNPQLITLLKITETFSNSIKMAFGVDKCAVIHVKRGRVVESEGIQLSDSTNLRSLLVTETYKYLGMSQALCINEVDMKQMLQERFFGRLKKVLNSLLSGGNKVRACNSWVMPLLMYSFGILKWTQTELDTIDRKVRTQLTAFRMHHPRSSVMRLYIPRKCGGRGFLNAKILHNREVCNLRDYFLKSNVDMHRDVVNVDTGLTPLGLAKENWRRPTIVSTDSRREVWQSKELHGRFYRALHRPEVDLLASVSWLRFSDLFGETEGFVCAIADEVIKTNNYRKYIMRDGTIDICRACHQPGESLRHITSGCSRLANGEYLHRHNQVARIIHQRLALKYNLVEFEVPYYRYVPEPVLENTHITLYWDRSIITDRTVVANKPDIVVIDRSERRALIVDVTIPHDENLVKAEKDKQVKYLDLAHEVVDMWSVDSAIIVPIVVSVNGLIAKSLDQHLKRLGLDGWVKGQMQKAVLLDTARIVRKFLSLEP

SEQ ID NO: 30253 - protein, 1191 aa, Eilema sororculum
MLTRAQARNRNAQTTSPDSSLSSAAQPPAMEPAASSSSSSDEFFSPPTSPTPVRRPGRGRPPTCLGPRRPPASNRAPAAGGNVHRMRWTNSINENVMRAYFAATEGGTNLSAYRTRMLPLFQALEPSINTSAQRLSDQVRVIQRNRMLNETVLETLRQECLRNICVTPAPAPAPASTAEINNDTYVAPDDTPIPVSIQYNEEIKEALECALREYRSVPVHVRPRLPRMPIHRRNIALVSALDSLLPRYLENSENLGDTHSILYCTAVAACRMAGAKFPIKDPAIRPKSAIPAWQCRIERRVAEARVLIGKLICFRSGNTRPRVMRYVTRAFAGTDISPQDYTSRVTERIDFLKQKVYAWANRIRRYKRRVDRYTVNHMFQRDQRWVYRSWERTDESVDDVRRPDAEATNAFWRSIWSVPVSHTEGDWMREVERACETIPEMEEIYIDATDVDCAVRSLSNWKSPGPDGLHNFWLKWLRSSHVVLASQFQSAIESGTLPAFMTTGVTHLLHKTGSTLEPNNYRPITCLPTVYKLLTSILRAKINNHINNNSIMCASQNGCRNGARGTKELLLIDMAISQQARRNRKDLTACWIDYKKAFDSVPHTWLLRVLELYKVNTTLCTFLRSCMGQWRTVLFYPGCRQALGGGVPITIERGIFQGDSLSPLWFCLALNPLSTLLVNSGLGYRLRREGQMVSHLFYMDDLKLFAHTNPQLIALLKVTETFSNSIKMAFGVDKCAVIHVKRGRVVESEGIQLSDSTNLRSLLVTETYKYLGMSQALCINEVDMKQMLQERFFGRLKKVLNSLLSGGNKVRACNSWVMPLLMYSFGILRWTQTELDTIDRKVRTQLTAFRMHHPRSSVMRLYIPRKCGGRGFLNAKTLHNREVCNLRDYFLKSNVDMHRDVVNVDTGLTPLGLAKENWRRPTIVSTDSRREVWQSKELHGRFYRALHRPEVDLLASVSWLRFSDLFGETEGFVCAIADEVIKTNNYRRYIMRDGTIDICRACHQPGESLRHITSGCSRLANGEYLHRHNQVARIIHQRLALKYNLVEVEVPYYRYVPEPVLENSHITLYWDRSIITDRTVVANKPDIVVIDRSERRALIVDVTIPHDENLVKAEKDKQVKYLDLAHEVVDMWSVDSAIIVPIVVSVNGLIAKSLDQHLKRLGLDGWVKGQMQKAVLLDTARIVRKFLSLEP

SEQ ID NO: 30254 - protein, 1198 aa, Eilema depressum
MLTRSQARKNASAPVTSPDSSLSSAAQPSPTEPAASSSSSSDEFFSPPTSPTPVRRPGRGRPPASLEPRRPPASNRAPAAGGNVRRMRWTTSINENVMRAYFAATGGGTNLTAYRDRMLLVFQGLEPTLNVSAQRLSDQVRAIQRCHLLDSSVLERIRSDLQNSDVIPPPPQAPLLTPRVQGFTQVTEPDSGDGELDNVAFSVSTQYNDLIRNTLECAIRDYRSMHYQIRPRLPRLPVHKRNIALVCALDSLLPIYLDNSENLGDTHSILYCAAIAACRVAGIRFPETNTTTRPNSGKPRWQCRIECRIAEARALIGKLICFRSGNTRPRVMRFVNRAFSGTGISPRDYAARVIERIDFLKQKVYAWANRIKRYKKRCDRYTLNRTFQRDERWVYRSWERPDLVDDVHLPDIDATNTFWRNIWSVPVAHTEGDWMREVKRSCEAIETMEPVIITEDDIACVVRSLPNWKAAGPDGLHNFWLKWLRSSHVRLASQFQSALESGSLPNFMTTGVTHLLFKSGSTVDPRNYRPITCLPTVYKLLTSVLRVKITNHITGNSILSYSQNGCRSGARGTKEHLIIDAAINQQVRRNRKDMATCWIDYKKAYDSVPHTWLLRVLELYKVDTTLCTFLKACMGQWRTALRYPGCRHIRDDGELIKIERGIFQGDSLSPLWFCLALNPLSTLLEDSGLGYCLRRGGQVISHLLYMDDLKLYAPNSLRLMELLKVTENFSNSIRMEFGVDKCAVMQVKRGGIVESEGIELSDSTKLRSLSANDTYKYLGMSQALGINEAGMKQSLRERFFCRLKKVLNSLLSGGNKVRAYNDWVIPVLTYSFGILRWTQTELDALDRRVRTLLTAYRMHHPRSSVMRLYIPRKCGGRGFLNVKNLHNREIYNLREYFLKVDVDVHRDVVAVDNGLTPLALAKENWRKPAILSIDDRKEVWRSKELHGRFYRALYGPDIDLKASVSWLRFGDLFGETEGFVCAITDEVVMTNNYRRYILKDGTVDICRACHRPGESLRHIISGCSRLANGEYLHRHNLVARIIHQQLALKYKLVDSEVPYYRYVPDPVLDDGRVTLYWDRSIITDRTILANKPDIVVIDRSERRAIIVDITIPHDENLVKAEKDKQIKYLDLAREVVDMWAVDSAIVVPIVVSAHGLIAKSLDQHLKRLALDSWIKGLMQKAVLLDTARIVRRFLSLEP

SEQ ID NO: 30255 - protein, 1199 aa, Vanessa cardui
MLTRARQRAHNNPSPDPPLSSASQAQDPAQGNNLMSAAASSSSDEYFSPPTSPTPVRRAGRRRPPTGLGARGQPVSNRVPASGGGVQRMRWTQSINENVMRAYYGATEGGTNLTAYRVRMLSMFQALEPAINVSAQRLSDQVRVILRNNRLSDTVLDRIRSEQCNSGVTSAPSQPVVQGPLPAIPQGPCHDHDDEGEGDMAITTSKYSDQLRSALEDAIREYRDIPAELRPRLPRLPMTKRNRDLVCTLDSLLADYFESSENLEDTHSILFCAAVAACRVAGVTFEDNERATRPKTVTPAWQSRIEKRINETRVLIGKLCCFKEGNTRPRVMRFVGRAFLGTGISPQEYPSHVVERIDFLKQKVYAWASRIRRYRRRVDRYYLNRMFQSDQRWVYRTWERLDEGVSDGCRPDDDATNTFWRNIWSVPVDHIEGDWMREVRQACEPLEAMGEISIASEDVAAAVRSVPNWKSPGPDGLHSFWLKWLRSLHECLASQFQSALESGSLPQFLTTGVTHLLHKSGSATDPKNYRPITCLPTVYKLLTSILRDKINSHIENNTILSVSQNGCRGGSRGTKELLLIDMTISQQVRRSRKSLSTCWIDYKKAYDSVPHTWLLRVLELYKLDTTLCSFLRSCMGQWRTVLRYPGCRTIHSNDGPIRIERGIFQGDSLSPLWFCLALNPLSTLLESSRLGYRLRRGGKVISHLLYMDDLKLFAPSDSQLVELLKVTETFSNSIRMEFGVDKCAVMHVKRGEIVESDGLQLSDSINFKSLSANESYKYLGMSEALGINVTDMKQSLQERFFGRLKKVLKSLLSGGNKVRAFNGWVMPVLMYSFGILKWTQKELDALDRRVRVLLTTYRMHHPRSSVMRLYIPRRCGGRGFLNAKTLHNREVYKLREYFLHTDLDMHRDVVTIDKGLTPLSLGKENWRKPVVLSTENRKEVWKSKELHGRFYRALHGPDVDFMASVSWLRFGNLFGETEGFVCAIMDEVIMTNNYRKYIVRDGTVDICRACHTPGESLRHIISGCSRLANGEYLHRHNQVAKIIHQQLALRYGLVVSEVPYYRYVPDPVLENGHITLYWDRSIITDRTVVANKPDIVVIDRSERRTIIVDITIPHDENLVKAEKDKQIKYLDLAHEVVDMWDVDTAVIVPIVVSANGLMAKSLDQHLKRLSLGSWVKGLMQKAVLLGTARIVRKFLSLEP

SEQ ID NO: 30256 - protein, 1109 aa, Vanessa cardui
MRWTQPINENVMRAYYGATKGGTNLTAYRVRMLSLFQALEPAVNVSAQRLSDQVRVILRNNRLSDTVLDRIRSETCNSDVTSGPSTPVVEEPLPAIPQGPEHDDEGGGDMAITKSKYSDHLRSALGDAIREYRNTPAELRPRLPRLPMTKRNRDLVCTLDSLLADYFESSENLENTHSILFCAAVAACRVAGVTFEDTERATRPKAVAPAWQSRIEKRINETRVLIGKLYCFKEGNTRPRVMRFVGRAFLGTGIGPQEYPSHVVERIDFLKQKVYAWASRIRRYRRRVDRYHLNRKFQSDQRWVYRTWERLDQDVSDGCRPDDDATNTFWRNIWSVPVDHIEGDWMLEVRQACEPLEVMGKISIASEDVAAAVRSVANWKSPGPDGLHNFWLKWLRSSHECLASQFQSALESGSLPQFLTTGVTHLLHKSGSATDPKNYRPITCLPTVYKLLTAILRDKINSHIQNNSILSVSQNGCRGGSRGTKELLLIDMTISQQVRRSRKSLSTCWIDYKKAYDSVPHTWLLRVLELYKLDTTLCSFLRSCMGQWRTVLRYPGCRTIHGNDEPIRIERGIFQGDSLSPLWFCLALNPLSTLLESSRLGYRLRRGGKVISHLLYMDDLKLFAPSDSQLMELLKVTETFSNSIRMEFGVDKCAVMHVKRGEIMESDGLQLSDSINFKSLSANESYKYLGMSEALGINVTDMKQSLQERFFGRLKKVLKSLLSGGNKVRAFNGWVMPVLMYSFGILKWTQKELDALDRKVRVLLTAYRMHHPRSSVMRLYIPRRCGGRGFLNAKTLHNREVYKLREYFLHTDLDMHRDVVTMDKGLTPLSLGKENWHKPVVLSTENRKEVWKSKELHGRFYRALHGPDVDFMASVSWLRFGNLFGETEGFVCAIMDEVIMTNNYRRYIVRDGTVDICRACHTPGESLRHIISGCSRLANGEYLHRHNQVAKIIHQQLALRYGLVVSEVPYYKYVPDPVLENGHITLYWDRSIITDRTVVANKPDIVVIDRSERRTIIVDITIPHDENLVKAEKDKQIKYLDLAHEVVDMWDVDTAVIVPIVVSANGLMTKSLDQHLKRLSLDSWVKGLMQKAVLLGTARIVRKFLSLEP

SEQ ID NO: 30257 - protein, 1197 aa, Vanessa cardui
MLTRARQRAHNYPSPDPPLSSASQTQDPAQGSSLVSAVASSSSDEYFSPPTSPTPVRRAGRRRPPTGLGARGQPVSNRVPASGGGVQRMRWTQPINENVMRAYYGATKGGTNLTAYRVRMLSLFQALEPAVNVSAQRLSDQVRVILRNNRLSDTVLDRIRSETCNSGVTSGPSTPVVEVPLPTIPQGPEHDDEGGGDMAITTSKYSDHLRSALGDAIREYRNTPAELRPRLPRLPMTKRNRDLVCTLDSLLTDYFGGSENLEDTHSILFCAAVAACRVAGVTFEDTERATRPKAVAPAWQSRIEKRINETRVLIGKLYCFKEGNTRPRVMRFVGRAFLGTGIGPQEYPSHVVERIDFLKQKVYAWASRIRRYRRRVDRYHLNRKFQSDQRWVYRTWERLDQDVSDGCRPDDDATNTFWRNIWSVPVDHIEGDWMLEVRQACEPLEVMGKISIASEDVAAAVRSVSNWKSPGPDGLHNFWLKWLRSSHECLASQFQSALESGSLPQFLTTGVTHLLHKSGSATDPKNYRPITCLPTVYKLLTAILRDKINSHIQNNSILSVSQNGCRGGSRGTKELLLIDMTISQQVRHSRKSLSTCWIDYKKAYDSVPHTWLLRVLELYKLDTTLCSFLRSCMGQWRTVLRYPGCRRIHGNDEPIRIERGIFQGDSLSPLWFCLALNPLSTLLESSRLGYRLRRGGKVISHLLYMDDLKLFAPSDSQLMELLKVTETFSNSIRMEFGVDKCAVMHVKRGEIMESDGLQLSDSINFKSLSANESYKYLGMSEALGINVTDMKQSLQERFFGRLKKVLKSLLSGGNKVRAFNGWVMPVLMYSFGILKWTQKELDALDRKVRVLLTAYRMHHPRSSVMRLYIPRRCGGRGFLNAKTLHNREVYKLREYFLHTDLDMHRDVVTMDKGLTPLSLGKENWRKPVVLSTENRKEVWKCKELHGRFYRVLHGPDVDFMASVSWLRFGNLFGETEGFVCAIMDEVIMTNNYRKYIVRDGTVDICRACHTPGESLRHIISGCSRLANGEYLYRHNQVAKIIHQQLALRYGLVVSEVPYYRYVPDPVLGNGHITLYWDRSIITDRTVVANKPDIVVIDRSERRTIIVDITIPHDENLVKAEKDKQIKYLDLAHEVVDMWDVDTAVIVPIVVSANGLMAKSLDQHLKRLSLGSWVKGLMQKAVLLGTARIVRKFLSLEP

SEQ ID NO: 30258 - protein, 1201 aa, Spodoptera litura
MMLTRARSKQGAPPPPPDSSLSSASPSPDPSPAGSPVTAVASSSSDDYFSPPTSPTPVRRPGRGRPPTGLGARGQQAPGRVPATGGCVRRMKWSQTINENVMRSYYGATEGGTNLTAYRERMLSIFQVLEPSINVSAQRLSDQVRVIQRNRRLDEAALDRLRLEALRNRVVPAPPQSVAQTPIVSQCVTPTTPIVGVEDDRVEQVSTQCNERLRSALEDAVREYRLAPSNLRPKLPRLPMCRKNRALVSALDSLLKKYFESSENLYDTHSILYCGAVAACRVANVRFPNLDAAVRPKPAVPAWQYRIERRISEARVLIGKLSCFREGNTRPRVMRFVRRAFVGTETSPHEYLSRVTERIDFLKQKVYAWANRIRRYKKRVERYTQNRMFQRDQRWVYRDWERSNQDVVDGRRPDDDATSTFWRNIWSVPVSHTEGDWMFDVKRRCETIPEMEEVEITSSDVASAACSVPNWKSPGPDGLHNFWIKWFKSSHVRLALHFQAALETGSLPQFLTTGVTHLLHKSGSSTEPKNYRPITCLPTVYKLLTSILRTKITKHIEQNSIMSVSQNGCREGSRGTKELLLIDMVVSQQVRRSRKDLSTCWIDYKKAYDSVPHTWLLKVLELYKIHASLRAFLESCMRQWSTVLCYPGCRQIQGNEEPVRIVRGIFQGDSLSPLWFCLALNPLSTLLEDSGLGYPLRRRGLVISHLLYMDDLKLFAPNKKQLMELLNITEKFSSSIRMEFGVDKCAVMHVKRGGIVESEGLELSDFTKLRSLSANDTYKYLGMSEGLGINGPDMKQSLQERFFGRLNRVLKSSLSGGNKVRAFNGWVMPVLMYSFGILKWTQTELDTLDRRVRTLLTANRMHHPRSSVMRLYIPRKCGGRGLLNAKTLHNREVCNLREYFLKVNEGMHREVAAVDNGFTPLSLAKENWRKPVVLSVNDRKEVWHSKELHGRFFRALHGPNVDFLASVSWLRFSNLFGETEGFVCAIMDEVILTNNYRKYIIKDGTVDICRACHSPGESIRHIISGCGRLANSEYLHRHNQVAKIIHQQLALHYRLVESEVPYYKYVPDPVLENDHITLYWDRSIITDRTIVANKPDIVVIDRQVRRTMIIDVTIPHDENLVKAEKDKQIKYLDLAHEVVDMWSVDSAIIVPIVVSANGLIPKSLDIHLRRLALGGWIKGLIQKAVLLETARIVRRFLSLEP

SEQ ID NO: 30259 - protein, 1078 aa, Vanessa tameamea
MLSLFQALEPAINVSAQRLSDQVRVILRNNRLSDTVLDRIRSEMCNSGFTSAPSQPVVEGPLPATPQGPDHDDEDEGDMAITTSKYSDQLRSALGDAIREYRNTPAELRPRLPRLPMTKRNRDLVCTLDSLLADYFESSEDLEDTHSILFCAAVAACRVAGVTFEDTERATRPKAATPAWQSRIEKRINKTRVLIGKLYCFKEGNTRPRVMRFVGRAFLGTGISPQEYPSHVVERIDFLKQKVYAWASRIRRYRRRVDRYYLNRMFQSDQRWVYRTWERLDQGVSDGCRPDDDATNIFWRNIWSVPVDHIEGDWMREVRQACEPLEAMGEISIASEDVAAAVRSVPNWKSPGPDGLHSFWLKWLRSSHDCLASQFQSALESGSLPQFLTTGVTHLLHKSGSATDPKNYRPITCLPKVYKLLTSILRDKINSHIQNNSILSVSQNGCRGGSRGTKELLLIDMTISQQVRRFRKSLSTCWIDYKKAYDSVPHTWLLRVLELYKLDTTLCSFLRSCMGQWRTVLRYPGCRTIHSNDEPIRIERGIFQGDSLSPLWFCLALNPLSTLLECSRLGYCLWRGGKVISHLLYMDDLKLFAPSGSQLMELLKVTETFSNSIGMEFGVDKCAVMHVKRGEIMESDGLQLSDSINFRSLSANESYKYLGVSEALGINVTDMKQSLQERFFGRLKKVLKSLLSGGNKVRAFNGWVMPVLMYSFGILKWTQKELDASDRRVRVLLTAYRMHHPRSSVMRLYIPRRCGGRGFLNAKTLHNREVYKLREYFLHTDLDMHRDVVTMDKGLTPLSLGKENWRKPVVLSTENRNGVWKSKELHGRFYRALHGPDVDFMASVSWLRFGNLFGETEGFVCAIMDEVIMTNNYRKYIVRDGTVDICRACHTPGESLRHIISGCSRLANGEYLHRHNQVAKIIHQQLALRYGLVVSEVPYYRYVPDPVLENGRITLYWDQSIITDRTVVANKPDIVVIDRSERRTIIVDVTIPHDENLVKAEKDKQIKYLDLAHEVVDMWDVDTAIIVPIVVSANGLMAKSLDQHLKRLSLGSWVKGLMQKAVLLGTARIVRKFLSLGP

SEQ ID NO: 30260 - protein, 1198 aa, Eilema depressum
MLTRSQARKNASAPVTSPDSSLSSAAQPSPTEPAASSSSSSDEFFSPPTSPTPVRRPGRGRPPASLEPRCPPASNRAPAAGGNVRRMRWTTSINENVMRAYFAATGGGTNLTAYRDRMLLVFQGLEPTLNVSAQRLSDQVRAIQRCHLLDSSVLERIRSDLQNSDVIPPPPQAPLLTPRVQGFTQVTEPDSGDGELDNVAFSVSTQYNDLIRNTLECAIRDYRSMHYQIRPRLPRLPVHKRNIALVCALDSLLPIYLDNSENLGDTHSILYCAAIAACRVAGIRFPETNTTTRPNSGKPRWQCRIECRIAEARALIGKLICFRSGNTRPRVMRFVNRAFSGTGISPRDYAARVIERIDFLKQKVYAWANRIKRYKKRCDRYTLNRTFQRDERWVYRSWERPDLVDDVHLPDIDATNTFWRNIWSVPVAHTEGDWMREVKRSCEAIETMEPVIITEDDIACVVRSLPNWKAAGPDGLHNFWLKWLRSSHVRLASQFQSALESGSLPNFMTTGVTHLLFKSGSAVDPRNYRPITCLPTVYKLLTSVLRVKITNHITGNSILSYSQNGCRSGARGTKEHLIIDAAINQQVRRNRKDMATCWIDYKKAYDSVPHTWLLRVLELYKVDTTLCTFLKACMGQWRTALRYPGCRHIRDDGELIKIERGIFQGDSLSPLWFCLALNPLSTLLEDSGLGYCLRRGGQVISHLLYMDDLKLYAPNSLRLMELLKVTENFSNSIRMEFGVDKCAVMQVKRGGIVESEGIELSDSTKLRSLSANDTYKYLGMSQALGINEAGMKQSLRERFFCRLKKVLNSLLSGGNKVRAYNDWVIPVLTYSFGILRWTQTELDALDRRVRTLLTAYRMHHPRSSVMRLYIPRKCGGRGFLNVKNLHNREIYNLREYFLKVDVDVHRDVVAVDNGLTPLALAKENWRKPAILSIDDRKEVWRSKELHGRFYRALYGPDIDLKASVSWLRFGDLFGETEGFVCAITDEVVMTNNYRRYILKDGTVDICRACHRPGESLRHIISGCSRLANGEYLHRHNLVARIIHQQLALKYKLVDSEVPYYRYVPDPVLDDGRVTLYWDRSIITDRTILANKPDIVVIDRSERRAIIVDITIPHDENLVKAEKDKQIKYLDLAREVVDMWAVDSAIVVPIVVSAHGLIAKSLDQHLKRLALDSWIKGLMQKAVLLDTARIVRRFLSLEP

SEQ ID NO: 30261 - protein, 1000 aa, Vanessa cardui
MAITTSKYSDHLRSALGEAIREYRNTPAELRPRLPRLPMTKRNRDLVCTLDSLLTDYFESSENLEDTHSILFFTAVAACRVAGVTFEDTERATRPKAVAPAWQSRIEKRINETRVLIGKLYCFKEGNTRPRVMRFVGRAFLGTGIGPQEYPSHVVERIDFLKQKVYAWASRIRRYRRRVDRYHLNRKFQSDQRWVYRTWERLDQDVSDGCRPDDDATNTFWRNIWSVPVDHIEGDWMLEVRQACEPLEVMGKISIVSEDVTAAVRSVSNWKSPGPDGLYNFWLKWLRSSHECLASQFQSALESGSLPQFLTTGITHLLHKSGSATDPKNYRPITCLPTVYKLLTAILRDKINSHIQNNSILSVSQNGCRGGSRGTKELLLIDMTISQQVRRSRKSLSTCWIDYKKAYDSVPHTWLLRVLELYKLDTTLCSFLRSCMGQWRTVLRYPGCRTIHGNDEPIRIERGIFQGDSLSPLWFCLALNPLSTLLESSRLGYRLRRGGKVISHLLYMDDLKLFAPSDSQLMELLKVTETFSNSIRMEFGVDKCAVMHVKRGEIMESDGLQLSDSINFKSLSANESYKYLGMSEALGINVTDMKQSLQERFFGRLKKVLKSLLSGGNKVRAFNGWVMPVLMYSFGILKWTQKELDTLDRKVRVLLTAYRMHHPRSSVMRLYIPRRCGGRGFLNAKTLHNREVYKLREYFLHTDLDMHRDVVTMDKGLTPLSLGKENWRKPVVLSTENRKEVWKCKELHGRFYRVLHGPDVDFMASVSWLRFGNLFGETEGFVCAIMDEVIMTNNYRKYIVRDGTVDICRACHTPGESLRHIISGCSRLANGEYLYRHNQVAKIIHQQLALRYGLVVSEVPYYRYVPDPVLENGHITLYWDRSIITDRTVVANKPDIVVIDRSERRTIIVDITIPHDENLVKAEKDKQIKYLDLAHEVVDMWDVDTAVIVPIVVSANGLMAKSLDQHLKRLSLGSWVKGLMQKAVLLGTARIVMKFLSLEP

SEQ ID NO: 30262 - protein, 1078 aa, Vanessa cardui
MLSLFQALEPAVNVSAQRLSDQVRVILRNNRLSDTVLDRIRSETCNSDVTSGPSTPVVEEPLPAIPQGPEHDDEGGGDMAITKSKYSDHLRSALGDAIREYRNTPAELRPRLPRLPMTKRNRDLVCTLDSLLADYFESSENLEDTHSILFCAAVAACRVAGVTFEDTERATRPKAVAPAWQSRIEKRINETRVLIGKLYCFKEGNTRPRVMRFVGRAFLGTGISPQEYPSHVVERIDFLKQKVYAWASRIRRYRRRVDRYHLNRKFQSDQRWVYRTWERLNQDVSDGCRPDDDATNTFWRNIWSVPVDHIEGDWMLEVRQACEPLEVMGKISIASEDVAAAVRSVANWKSPGPDGLHNFWLKWLRSSHECLASQFQSALESGSLPQFLTTGVTHLLHKSGSATDPKNYRPITCLPTVYKLLTAILRDKINSHIQNNSILSVSQNGCRGGSRGTKELLLIDMTISQQVRRSRKSLSTCWIDYKKAYDSVPHTWLLRVLELYKLDTTLCSFLRSCMGQWRTVLRYPGCRTIHGNDEPIRIERGIFQGDSLSPLWFCLALNPLSTLLESSRLGYRLRRGGKVISHLLYMDDLKLFAPSDSQLMELLKVTETFSNSIRMEFGVDKCAVMHVKRGEIMESDGLQLSDSINFKSLSANESYKYLGMSEALGINVTDMKQSLQKRFFGRLKKVLKSLLSGGNKVRAFNGWVMPVLMYSFGILKWTQKELDALDRKVRVLLTAYRMHHPRSSVMRLYIPRRCGGRGFLNAKTLHNREIYKLREYFLHTDLDMHRDVVTMDKGLTPLSLGKENWHKPVVLSTENRKEVWKSKELHGRFYRALHGPDVDFMASVSWLRFGNLFGETEGFVCAIMDEVIMTNNYRRYIVRDGTVDICRACHTPGESLRHIISGCSRLANEEYLHRHNQVAKIIHQQLALRYGLVVSEVPYYKYVPDPVLENGHITLYWDRSIITDRTVVANKPDIVVIDRSERRTIIVDITIPHDGNLVKAEKDKQIKYLDLAHEVVDMWDVDTAVIVPIVVSANGLMAKSLDQHLKRLSLDSWVKGLMQKAVLLGTARIVRKFLSLEP

SEQ ID NO: 30263 - protein, 1017 aa, Vanessa cardui
MRWTQSINENVMRAYYGATKGGTNLTAYRVRMLSLFQALEPAVNVSAQRLSDQVRVILRNNRLSDTVLDRIRSETCNSGVTSGPSTPVVEEPLPAIPQGPEHDDEGGGDMAITKSKYSDHLRSALGDAIREYRNTPAELRPRLPRLPMTKRNRDLVCTLDSLLADYFESSENLEDTHSILFCAAVAACRVAGVTFEDTERATRPKAVAPAWQSRIEKRINETRVLIGKLYCFKEGNTRPRVMRFVGRAFLGTGIGPQEYPSHVVERIDFLKQKVYAWASRIRRYRRRVDRYHLNRKFQSDQRWVYRTWERLDQDVSDGCRPDDDATNTFWRNIWSVPVDHIEGDWMLEVRQACEPLEVMGKISIASEDVAAAVRSVANWKSPGPDGLHNFWLKWLRSSHECLASQFQSALESGSLPQFLTTGVTHLLHKSGSATDPKNYRPITCLPTVYKLLTAILRDKINSHIQNNSILSVSQNGCRGGSRGTKELLLIDMTISQQVRRSRKSLSTCWIDYKKAYDSVPHTWLLRVLELYKLDTTLCSFLRSCMGQWRTVLRYPGCRTIHGNDEPIRIERGIFQGDSLSPLWFCLALNLLSTLLESSRLGYRLRRGGKVISHLLYMDDLKLFAPSDSQLMELLKVTETFSNSIRMEFGVDKCAVMHVKRGEIMESEGLQLSDSINFKSLSANESYKYLGMSEALGINVTDMKQSLQERFFGRLKKVLKSLLSGGNKVRAFNGWVMPVLMYSFGILNWTQKELDALDRKVRVVLTVYRMHHPRSSVMRLYIPRRCGGRGFLNAKTLHNREVYKLREYFLHTDLDMHRDVVTMDKGLTTLSLGKENWHKPVVLSTENRKEVWKSKELHGRFYRALHGQDVDFMASVSWLRFGNLFGETEGFVCAIMDEVIMTNNYRRYIVRDGTVDICRACHTPGESLRHIISGCSRLANGEYLHRHNQVAKIIHQQLALRYGLVVSEVPYYKYVPDPVLENGHISRGCRHVGCGYSSYCADSCFSEWPNGQEPRPTS

SEQ ID NO: 30264 - protein, 1197 aa, Vanessa cardui
MLTRARQQAHNNPSPDPPLSSASQAQDPAQGSSLVSAAASSSSDEYFSPPTSPTPVRRAGRRRPPTGLGARGQPVSNRVPASGGGVQRMRWTQPINENVMRAYYGATKGGTNLTAYRVRMLSLFQALEPAVNVSAQRLSDQVRVILRNNRLSDTVLDRIRSETCNSGVTSGPSTPVVEEPLPAIPQGPEHDDEGGGDMAITKSKYSDHLRSALGDAIREYRNTPAELRPRLPRLPMTKRNRDLVCTLDSLLADYFESSENLEDTHSILFCAAVAACRVAGVTFEDTERATRPKAVAPAWQSRIEKRINETRVLIGKLYCFKEGNTRPRVMRFVGRAFLGTGISPQEYPSHVVERIDFLKQKVYAWASRIRRYRRRVDRYHLNRKFQSDQRWVYRTWERLDQDVSDGCRPDDDATNTFWRNIWSVPVDHIEGDWMLEVRQACEPLEVMGKISIASEDVAAAVRSVANWKSPGPDGLHNFWLKWLRSSHECLASQFQSALESGSLPQFLTTGVTHLLHKSGSATDPKNYRPITCLPTVYKLLTAILRDKINSHIQNNSILSVSQNGCRGGSRGTKELLLIDMTISQQVRRSRKSLSTCWIDYKKAYDSVPHTWLLRVLELYKLDTTLCSFLRSCMGQWRTVLRYPGCRTIHGNDEPIRIERGIFQGDSLSPLWFCLALNPLSTLLESSRLGYRLRRGGKVISHLLYMDDLKLFAPSDSQLMELLKVTETFSNSIRMEFGVDKCAVMHVKRGEIMESDGLQLSDSINFKSLSANESYKYLGMSEALGINVTDMKQSLQERFFGRLKKVLKSLLSGGNKVRAFNGWVMPVLMYSFGILKWTQKELDALDRKVRVLLTAYRMHHPRSSVMRLYIPRRCGGRGFLNAKTLHNREVYKLREYFLHTDLDMHRDVVTMDKGLTPLSLGKENWHKPVVLSTENRKEVWKSKELHGRFYRALHGPDVDFMTSVSWLRFGNLFGETEGFVCAIMDEVIMTNNYRRYIVGDGTVDICRACHTPGESLRHIISGCSRLANGEYLHRHNQVAKIIHQQLALRYGLVVSEVPYYKYVPDPVLENGHITLYWDRSIITDRTVVANKPDIVVIDRSERRTIIVDITIPHDENLVKAEKDKQIKYLDLAHEVVDMWDVDTAVIVPIVVSVNGIMAKSLDQHLKRLSLDSWVKGLMQKAVLLGTARIVRKFLSLEP

SEQ ID NO: 30265 - protein, 1201 aa, Schrankia costaestrigalis
MMITRAKARIAQATPPDSSLSSASQTVENVPDSVEASSSSSSDEFFSPPSSPTPVLRRGRGRPPIGLGSRAPQASNRVPAVGGNVHRMKWTSTINENVMRAYFVATEGGTNLTAYRDRMLSLFRELEPAVNVSTQRLSDQVRAIQRCHLLNDTVLDRIRSDILSNLTISTPPPVTTQVNTIIPLSQPIELNSSETIDCEVTNVSIQYNDQLRSALECTIGEYRFMEPDKRPRLPRLPTHKKNIALVCALDSLLSNYFDNSENLSDAHSILYCGAVTACRVAHIRFPTDDIATRLRPTVPAWQCRIERRIAEARALIGKLICFRSGNTRPRVMRFVTRAFADTNIDTDRRDYILHVTERIDFLKQKVYAWANRIKRFKKIMERYTQNRAFQRDERWVYRNWERPVQDSGDRQLPDADATTNFWRSIWSVPVSHVEGDWIGDVEKACERIHQMEPVTISTLDVSSAVRRLPNWKSTGPDGLHNFWLKWLHSSHACLASHFQSSLETGTLPDFITTGETHLLYKSGSSTDPKNYRPITCLPTIYKLLTSILRKKISLHIQHNSIMYISQNGCRNEARGTKEQLLIDTTISEQVRRNRKDLSTCWIDYKKAYDSVPHTWLLRVLELYKIDATLCTFLRTCMTKWNTVLFYSGCRQGLGNNVPIQIKRGIFQGDSFSPLWFCLALNPLSTLLECSGLGYRLKRHGQVISHLLYMDDLKLFAPTKSQLLVLLKETETFSNSIKMEFGVDKCAVMHVKRGKVVESDELQLSDTIKLRCLSPSDTYKYLGMSQALCIAETDMKQQLRDRFFARLKKVLNSLLTGGNKVRAYNGWVMPVLMYSFGILRWTQTELETLDRKVRTLLTAHRMHHPRSSVMRLYIPRKSGGRGFLSAKTLHNREVYNLREYFLSVDADIHRDVVSVDVGLTPLCLGKENWRKPIIHTIDDRKEVWKSKELHGRFYRTLNGPDVDTLASVSWLRFGDLFGETEGFVFAIMDEVVMTKNYRKYILKDGTVDICRACHCPGESLRHIVSGCSRLANGEYLHRHNQVARIVHQQLALKYHLVDTEVPYYKYVPDPVLENSSVTLYWDRSIITDRTIVANKPDIVVIDRSERRAMIIDITIPHDENLVKAEKDKQTKYLDLAHEVVDMWHVDSAIIVPIVLSVNGLIPKSLYQHLRRLSLDSWIIGLMQKAVLLDTARIVRRFLSLEP

SEQ ID NO: 30266 - protein, 1196 aa, Lymantria monacha
MLTRSQTKAARPPPPGSSQSSASQPTASVPAASVTTEASSSSSSDEYFSPPTTPTPAPRRGRGRPPICLGPRGPPTSHRAPAAGGNVQRMKWTHSINENVMRAYFEATEGGIKLTAYRDRMLLLFQNLEPTINVTAQRLSDQVRAIQRCHLLDVATLDRLRLVSIQTCRVTPISTEISTIDTTQSVPPPYAEGEDATVSMDTQYNEEVRNALECAIREYRFIPHNIRPRLPRLPMHRKNRRLVGTLDSLLTSYLHTSDSISDTHSILYCVAVAACRIAGLKFLENESTIQQKKAKPAWQCRIECRICEARVLIGKLICFRAGNTRPKVMRYVRRAFLGTDIKPDEYNARVTERIDFLKQKVYAWASRIRRYKKRMNRYSVNRMFESDQKSVYRNWERPCLIVDNERLPDAEVTNTFWRSIWSVPVVHSEGDWMGDVKRACENIPQMENVLIDKDDVTCAVRSLSNWKSPGPDGLHNFWLKWLHSAHARLASHFQSALVSGTLPEFMTTGITHLLHKTGSTTEPCNYRPITCLPSVYKLLTSILSNKIAKHVQLNSVMSISQNGCRNGGRGTKELLLIDTAISQQVRRNRKDLSVCWIDYRKAFDSVPHTWLLRVLELYKINSLLCTFLKSCMGQWKTFLKYPMHRLNLGSSEPIYIRRGIFQGDSLSPLWFCLALNPLSILLEHSGLGCRLRRGGQIISHLLYMDDLKLFAPNNPQLVKLLKVTETFSSSIKMEFGVDKCAVMHVKHGGIVEVDRGQLFNTLQFRPLQVTDTYKYLGMSQALNINESDMKQTLRERFFGRLKKVLNSLLSGGNKVRAYNAWVMPILMYSFGILKWTQTELDALDRKVRTLLTSHRMHHPRSSVMRLYIPRKCGGRGFLNAKTLHNREIYNLRDYFLKMTSGMHLDVVAVDNGLTPLGLAKENWHKPAVLSTKDRESIWQSKELHGRFYGALNASEVDFSASVTWLQFGNLFGETEGFVCAIADEVIKTNNYRRYILRDGTADICRACHLPGESLRHIVSGCSRLANGEYLHRHNQVARIIHQQLALLYRLVSTEVPYYRYIPQPVLENGRATLYWDRSIITDRTIVANKPDIVVIDRLQRRAMIVDVTVPHDGNLVKAEKDKQIKYQDLAHEIVDMWDVDTAIVVPIVISTNGLIAKSLAQHLKRLALGSWIGGLMQKAVLLDTARIVRKFLSLEP

SEQ ID NO: 30267 - protein, 1191 aa, Trichoplusia ni
MLTRRRAARLPSPGSSPSSASQLPPGRGPAPAVAVASSSSDEYYSPPTSPTPVRRPGRRRPPSSLAPSGQPASNRAPAPGGVVQRMKWTRPMNENVMRAYYGATEGGTNLTAYRARMLSLFRTLEPDVDVSAQRLSDQVRVIQRNHRLDDATLDRLRSEVQTSPVVVTPSIAEAPAASALPANPADGGDDDGAITVSTQCSDHIRSTLEQAVLEYRSTPRDQRPQLPRLPMHNRNKALMGVLDSLLSSYFENSEDLGDTHSLLYCAAVAACRVAGVTFRDNTAARPKQAAPAWQCRIEKRVAEARTLIAKLVAFRGGNTRPRVMRFVKRAFAGTNISPSEYTARVTERIDFFKQKVCAWASRIRRYKTRVDRFHQNRMFQRDQRWVYRSWEQPASEEGAGRLPDDVATNLFWRSIWSAPVTHSEGDWIRDVEQSCERIEEMGAIDISPQDVANAVRPLANWKAPGPDGLHNFWLKWLPSSHGCLASQFQSAVDSGVLPQFFTTGSTHLLHKTGSTTDPKNYRPITCLPTIYKLLTSILREKINDHIERFSIMSASQNGCRNGSRGTKELLLIDMTICQQVRRSKKGVSTCWIDYKKAYDSVPHAWLMRVLELYKINTTLRTFLKSCMGQWTTVLHYPGCRDIQKSGQLIRIERGIFQGDSLSPLWFCLALNPLSTLLENSRLGYSLRRGSQVISHLLYMDDLKLFASNKLQLMKLLKITESFSNSIRMEFGVDKCAVMHVKRGGIVESQGIQLSDSINLRSLSSTETYKYLGMSEALGINVADMKQSLQTRFFGRLNKVLKSSLSGGNKVRAFNGWVMPVIMYSFGILKWTQTELDALDRRVRTLLTANRMHHPRSSVMRLYIPRKCGGRGFLNAKTLHNREVCNLREYFLRVNVGMHRDVVAVDKAFTPLSLGKENWHKPVVMSVKDRKDVWQSKELHGRYYRTLHGADVDFLASVAWLRFGDLFGETEGFVCAIMDEVIMTNNYRKYIIKDGTVDICRACHSSGESLRHIVSGCSRLANGEYLHRHNQVARIIHQQLALKYKLLESEVPYYKYVPDPVLESGHITLYWDRSIITDRTIVANKPDIVVIDRSERRTMIVDITIPHDENLVKAEKEKQLKYLDLAHEVVDLWEVDSAIIVPIVVSANGLIAKSLDQHLRRLSLGVWVKGLIQKAVLLDTARIVRRFLSLEP

SEQ ID NO: 30268 - protein, 1197 aa, Spodoptera frugiperda
MLTRARRRYAHPPSPDSSLSSASPSPEPNHEELPVTVVASSSSDEYFSPPTSPPPTRRPRRGRPPTGLGARGQQTPGRVPATGGCARRMKWSQTINENVMRAYYGATEGGTNLTAYRERMLSMFQVLEPSVNVSAQRLSDQVRVIQRNRRLDEAALDRLRSEALRNRVVPAPPQEVAQTPTVSQNVTPTTPAAGVEDDRVEQVSTQCNERLRSALEDAIREYRFAPLKPKLPRLPMCGKNRALVSALDSLLKTYFESSENLYDTHSILYCGAVAACRVANVRFSNLDAAVRPKPAVPAWQCRIERRISEARVLIGKLSCFREGNTRPRVMRFVRRAFVGTETSPHEYMSRVTERIDFLKQKVYAWANRIRRYKKRVERYTQNRMFQRDQRWVYRNWERSNQDVTDGRRPDDEATNTFWRNIWSVPVSHTEDDWICDVKRRCETVPEMEEVIITSSDVSSAACSVPNWKSPGPDGLHNFWLKWFTSSHARLASQFQAALEAGSLPQFLTTGVTHLLHKSGSSTEPKNYRPITCLPTVYKLLTSILRTKITKHIEKHSIMSVSQNGCRKGSRGTKELLLIDMVVSQQVRRSRKNLSTCWIDYKKAYDSVPHTWLMRVLELYKIDATLRAFLQSCMRQWSTVLCYPGCRQIQGSEEPVRIVRGIFQGDSLSPLWFCLALNPLSTLLEASGLGYPLRRRGLVISHLLYMDDLKLFAPNNKQLMELLKITEKFSSSIRMEFGVDKCAVMHVKRGGIVESEGLELSDFTKLRTLSANDTYKYLGMSEGLGINGPDMKQSLRERFFGRLNKVLKSSLSGGNKVRAYNGWVMPVLMYSFGILKWTQTELDALDRRVRTLLTANRMHHPRSSIMRLYIPRKCGGRGLLNAKTLHNREVCNLREYFLKVNEGMHREVAAVDNGFTPLSLAKENWRKPVVLSVNDRKEVWHSKELHGRFFRALHGPSVDFLASVSWLRFSNLFGETEGFVCAIMDEVILTNNYRKYIIKDGTVDICRACHSPGESIRHIISGCGRLANGEYLHRHNQVAKIIHQQLALHYQLVEFEVPYYKYVPDPVLENGHITLYWDRSIITDRTIVANKPDIVVIDRQARRAMIVDITIPHDENLVKAEKDKQIKYLDLAHEVVDMWSVDSAIIVPIVVSANGLIPNSLDNHLRRLGLGGWIKGLMQKAVLLETARIVRRFLSLEP

SEQ ID NO: 30269 - protein, 1111 aa, Spodoptera litura
MKWSQTINENVMRSYYGATEGGTNLTAYRERMLSIFQVLEPSINVSAQRLSDQVRVIQRNRRLDEAALDRLRLEALRNRVVPAPPQSVAQTCVVSQCVTATTPIVGVEDDRVEQVSTQCNERLRSALEDAVREYRLAPSNLRPKLPRLPMCRKNRALVSALDSLLKKYFESSENLYDTHSILYCGAVAACRVANVRFPNLDAAVRPKPAVPAWQYRIERRISEARVLIGKLSCFREGNTRPRVMRFVRRAFMGTEISPHEYLSRVTERIDFLKQKVYAWANRIRRYKKRVERYTQNRMFQRDQRWVYRDWERSNQDVADGRRPDDDATNTFWRNIWSVPVSHTEGDWMFDVKRKCETIPEMEEVVITSSDVASAACSVPNWKSPGPDGLHNFWIKWLKSSHVRLALHFQAALETGSLPQFLTTGVTHLLHKSGSSTEPKNYRPITCLPTVYKLLTSILRTKITKHIEKNSIMSVSQNGCREGSRGTKELLLIDMVVSQQARRSRKDLSTCWIDYKKAYDSVPHTWLLKVLELYKIDATLRAFLESCMRQWSTVLCYPGCRQIQGNEEPVRIVRGIFQGDSLSPLWFCLALNPLSTLLEDSGLGYPLRRRGLVISHLLYMDDLKLFAPNKKQLMELLNITEKFSSSIRMEFGVDKCAVMHVKRGGIVESEGLELSDFTKLRSLSANDTYKYLGMSEGLGINGPDMKQSLQERFFGRLNRVLKSSLSGGNKVRAFNGWVMPVLMYSFGILKWTQTELDTLDRRVRTLLTANRMHHPRSSVMRLYIPRKCGGRGLLNAKTLHNREVCSLREYFLKVNEGMHREVAAVDNGFTPLSLAKENWRKPVVLSVNDRKEVWHSKELHGRFFRALHGPNVDFLASVSWLRFSNLFGETEGFVCAIMDEVILTNNYRKYIIKDGTVDICRACHSPGESIRHIISGCGRLANSEYLHRHNQVAKIIHQQLALHYRLVESEVPYYKYVPDPVLENDHITLYWDRSIITDRTIVANKPDIVVIDRQVRRTMIIDVTIPHDENLVKAEKDKQIKYLDLAHEVVDMWSVDSAIIVPIVVSANGLIPKSLDIHLRRLALGGWIKGLIQKAVLLETARIVRRFLSLEP

SEQ ID NO: 30270 - protein, 1104 aa, Mythimna ferrago
MRWTSSINENVMRSYFGATEGGINLTAYRGRMLSLFQVLEPAVNVSVQRLSDQVRVIQRNRMLNDAVLDRLRLESQSSRATPSAAAQRQPSAAPRPDHVGDADDDAAISVSTQCNERLRGALEDAFREYRSIPPELRPRLPRLPMHKRNRALVCALDSQLSICFDSSEDLADTHSILYCAAVAACRVAHVKFPNCNRATRPAVPPWQCRIERRIGEARALIGKLICFREGNTRPRVMRFVRRAFSGTDISPRDYLPCVTERIDFLKQKIYAWANRIRRYKRRVERYTQNRTFQSNERWVYRAWERPDQGVTDTRLPDDDAMCSFWRSIWSAPVSHTEGDWIREVERACDLLPEMGAITISPQDVARAVRPLPNWKSPGPDGLHNFWLKWFQRSHARLASQFQSALESGSLPLFLTTGITHLLHKSGSTAEPKNYRPITCLPTVYKVLTSILRAKINSHIETNSIMSVSQNGCRNGSRGTKELLLIDIAISQQVRRSRKNLSACWIDYKKAYDSVPHTWLMRVLELYKVDATLRTFLMSCMGQWRTVLHYPGCRQIWENSEPIRIERGIFQGDSLSPLWFCLALNPLSTLLEGSGLGYRLKRGGLVISHLLYMDDLKLFAPNNLQLMELLKVTETFSSAIRMDFGVDKCAVIHVKRGEIMESEGIQLSDSIHLRSLSSTETYKYLGMSEALGINTDDVKQSLKERFFGHLNKVLNSLLSGGNKVRAFNGWVMPVLMYSFGILKWTQTKLDALDRRVRTLLTANRMHHPRSSVMRLYIPRKCGGRGFLNAKSLHNREVCSLREYFLAVDVGMHRDVVAVDKGLTPLSLANENWRKPLVLDTNDRREVWQGKELHGRFYRALHGPDVDLLASVSWLRFGDLFGETEGFVFAIMDEVMMTNNYRKYIVKDGTVDICRACHRPGESIRHIISGCSRLANGDYLHRHNLVARIIHQQLALKYNLVESEVPYYRYVPDPVLDNGSITLYWDRSIITDRTIVANKPDIVVIDRLERRTMIVDLADPHDENLVKAEKDKQIKYLDLAREVVDMWEVDRAIIVPIVVTANGLIAKSLEQHLRRLSLGSWIKGLIQKAVLLDTARIVRRFLSQEP

SEQ ID NO: 30271 - protein, 868 aa, Vanessa cardui
MRFVGRAFLGTGISPQEYPSHVVERIDFLKQKVYAWASRIRRYRRRVDRYHLNRKFQSDQRWVYRTWERLDQDVSDGCRPDDDATNTFWRNIWSVPVDHIEGDWMLKVRQACEPLEVMGKISIASEDVAAAVRSVANWKSPGPDGLHNFWLKWLRSSHECLASQFQSALESGSLPQFLTTGVTHLLHKSGSATDPKNYRPITCLPTVYKLLTAILRDKINSHIQNNSILSVSQNGCRGGSRGTKELLLIDMTISQQVRRSRKSLSTCWIDYKKAYDSVPHTWLLRVLELYKLDTTLCSFLRSCMGQWRTVLRYPGCRTIHGNDEPIRIERGIFQGDSLSPLWFCLALNPLSTLLESSRLGYRLRRGGKVISHLLYMDDLKLFAPSDSQLMELLKVTETFSNSIRMEFGVDKCAVMHVKRGEIMESDGLQLSDSINFKSLSANESYKYLGMSEALGINVTDMKQSLQERFFGRLKKVLKSLLSGGNKVRAFNGWVMPVLMYSFGILKWTQKELDALDRKVRVLLTAYRMHHPRSSVMRLYIPRRCGGRGFLNAKTLHNREVYKLREYFLHTDLDMHRDVVTMDKGLTPLSLGKENWHKPVVLSTENRREVWKSKELHGRFYRVLHGPDVDFMASVSWLRFGNLFGETEGFVCAIMDEVIMTNNYRRYIVGDGTVDICRACHTPGESLRHIISGCSRLANGEYLHRHNQVAKIIHQQLALRYGLVVSEVPYYKYVPDPVLENGHITLYWDRSKITDRTVVANKPDIVVIDRSERRTIIVDITIPHDENLVKAEKDKQIKYLDLAHEVVDMWDVDTAVIVPIVVSANGLMAKSLDQHLKRLSLDSWVKGLMQKAVLLGTARIVRKFLSLEP

SEQ ID NO: 30272 - protein, 1109 aa, Vanessa cardui
MRWTQPINENVMRAYYGATKGGTNFTAYRVRMLSLFQALESAVNVSAQRLTDQVRVILRNNRLSDTVPDRIRSETCNSGVTSGPSTPVVEEPLPAIPQGPEYDDEGGGDMAITTSKYSDHLRSALGHAIREYRNTPAELRPRLPRLPMTKRNRDLVCTLDSLLADYFESSENLEDTHSILFCAAVAACRIAGVTFEDTERATRPKAAAPAWQSRIEKRINETRVLIGKLYCFKEGNTRPRVMRFVERAFLGTGISPQEYPSHVVERIDFLKQKVYAWASRIRRYRRRVDRYHLNRKFQSDQRWVYRTWERLDQDVSDGCRPDDDATNTFWRNIWSVPVDHSEADWMLEVRQACEPLEVMGKFSIVSEDVAAAVRSVSNWKSPGPDGLHSFWLKWLRSSHECLASHFQSALESGSLPQFLTTGVTHLLHKSGSARDPKNYRPITCLPTVYKLLTAILRDKINSHIQNNSILSVSQNGCRGGSRGTKELLLIDMTNSQQVRRSRKSLSTCWIDYKKAYDSVPHTWLLRVLELYKLDTTLCSFLRSCMGQWRTVLRYPGCRTIHGSDEPIRIERGIFQGDSLSPLWFCLALNPLSTLLESSRLGYRLRRGGKVISHLLYMDDLKLFAPSDSQLMELLKVTETFSNSIRMEFGVDKCAVMHVKRGEIMESEGLQLSDSINFKSLSANESYKYLGMSEALGINVTDMKQSLQERFFGRLKKVLKSLLSGGNKVRAFNGWVMPVLMCSFGILKWTQKELDALDRRVRVLLTTYRMHHPRYSVMRLYIPRRYGGRGFLNAKTLHNREVYKLREYFLHSDLDMHRDVVIMDKGLTPLSLGKENWRKPVVLSTENRREVWKSKELHGRFYRALHGPDVDFMASVSWLRFGNLFGETEGFVCAIMDEVIMTNNYRKYIVRDGTVDICRACHTPGESLRHIISGCSRLANGEYLHRHNQVAKIIHQQLALRYGLVVSEVAYYRYVPDPVLENGHITLYWDRSIITDRTVVANKPDIVVIDRSERHTIIVDITIPHDENLVKAEKDKQIKYLDLAHEVVDMWDVDTAVIVPIVVSANGLMAKSLDQHLKRLSLGSWVKGLMQKVVLLGTARIVRKFLSLEP

SEQ ID NO: 30273 - protein, 1198 aa, Vanessa cardui
MLTRARQRAHKNPSPDPPLCSASQAQEPAQGNNLMSAAASSSSDEYFSPPTSPTPARRAGRRRPPTGLGARGQPVSDGVPASGGGVQRMRWTQSINENVMLAYYGATEGGTNLTAYRVRMLSLFQALEPAINVSAQRLSDQVRVILRNNRLSDTVLDRIRSEMCNGGVTSAPSQPVVQGPLPATPQGPDHDDEGEGDMAITTSKYSDQLRSALEDAIREYRNTPAELRPRLPRLPMTKRNRDLVCTLDSLLADYFESSENLENTHSILFCAAVAACRIAGVTFEDTERATRPKAAAPAWQSRIEKRINETRVLIGKLYCFKEGNTRPRVMRFVGRAFLGTGIGPQEYPSHVVERIDFLKQKVYAWASRIRRYRRRVDRYYLNRMFQSDQRWDRYRTWERLDQGVSDGCRPDDDATNTFWRNIWSVPVDHIEGDWMREVRQACEPLEAMGEISIASEDVAAAVRSVPNWKSPGPDGLHSFWLKWLRSSHECLASQFQSSLESGSLPQFLTTGVTHLLHKSGSATDPKNYRPITCLPTVYKLLTSILRDKINSHIENNSILSVSQNGCKGGSRGTKELLLIDMTICQQVRRSRKSLSTCWIDYKKAYDSVPHTWLLRVLELYKLDTTLCSFLRSCMGQWRTVLRYPGCRTIHSNDEPIRIERGIFQGDSLSPLWFCLALNPLSTLLERSRLGYRLRRGGKVISHLLYMDDLKLFAPSDSQLVELLKVTETFCNSIRMEFGVDKCAVMHVKRGEIMESDGLQLSDSINFKSLAANESYKYLGMSEALGINVTDMKQSLQERFFGRLKKVLNSLLSGGNKVRAFNGWVMPVLMYSFGILKWTQKELDALDRRVRVLLTAYRMHHPRSSVMRLYIPRRCGGRGFLNAKTLHNREVYKLREYFLHTDLDMHRDVVIMHKGLTPLSLGKENWRKPVVLSTENRKEVWKSKELHGRFYRALHGPDVDFMASVSWLRFGNLFGETEGFVCAIMDEVIMTNNYRKYIVRDGTVDICRACHTPGESLRHIISGCSRLANGEYLHRHNQVAKIIHQQLALRYGLVVSEVPYYRYVPDPVLENGHITLYWDRSIITDRTVVANKPDIVVIDWSERRTIIVDITIPHDENLVKAEKDKQIKYLDLAREVVDMWDVDTAVIVPIVVSVNGLMAKSLDQHLKRLSLGSWVKGLMQKAVLLGTARIVRKFLSLEP

SEQ ID NO: 30274 - protein, 984 aa, Schrankia costaestrigalis
MECAIREYRFMDPGRRPRIPRLPTHKQNIALVCALDSLLLNYFDNSENLGDAHSILYCGAVAACRVAHIKFPVDDIATRLRPTVPAWQCRIERRIAEARALIGKLICFRSGSRPRVMRFVTRAFSETNVDRRDYMLHVTERIDFLKQKVYAWANRIKRFKKRMERYTQNRAFQKDERWVYRNWERPVVGSVDMQLPDADATNDFWRSIWSVPVNHTEGGWIGDVEKACERIHQMEPVIITTEDVTCAVRRLPNWKSAGPDGLHNFWLKWLHSSHACLASHFQSSLETGTLPDFITTGVTHLLYKSGSSTDPKNYRPITCLPTIYKLLTSILRKKISLHIQKNSIMCISQNGCRNEARGTKEQLLIDTTISEQVRRNRKDLSTCWIDYKKAYDSVPHTWLLRVLELYKIDATLCTFLRTCMTKWNTVLFYSGCRQGLGNEVPIQIKRGIFQGDSLSPLWFCLALNPLSTLLEYSGLGYRLKRHGQVISHLLYMDNLKLFAPTKSQLLVLLKETETFSNSIKMEFGVDKCAVMHVKRGKVEESDELQLSDSIKLRCLSPSDTYKYLGMSQALCITETDMKQQLRDRFFARLKKVLNSLLTGGNKVRAYNSWVMPVLMYSFGILKWTQTELEALDRKVRTLLTAHRMHHPRSSVMRLYIPRKSGGRGFLSARTLHNREVYNLREYFLTVDADIHKDVVSVDVGLTPLCLAKENWRKPIIQTIDDRKEIWKSKELHGRFYRALNGPDVDTLSSVSWLRFGDLFGETEGFVFAIMDEVVMTKNYRKYILKDGTVDICRACHCPGESLRHIVSGCSRLANGEYLHRHNQVARIVHQQLALKYHLVDAEVPYYKYVPDPVLENSSVTLYWDRSIITDRTIVANKPDIVVIDRSERRAMIIDVTVPHDENLVKAEKDKQTKYLDLAHEVVDMWNVDSAIIVPIVLSVNGLIPKSLYQHLRRLDLGSWIIGLMQKAVLLDTARIVRRFLSLEP

SEQ ID NO: 30275 - protein, 1200 aa, Spodoptera exigua
MLTRAKARARAAPPPSPDSSLSSASPSPETRTTRSPVIAVASSSSDEYFSPLASPAPVRRQRRGRPPMGLGTRGQRAPGRVPATGGCARRMKWSQSINENVMRAYYGATEGGTNLTAYRDRMLSLFQVLEPSVNVSAQRLSDQVRVIQRSRRLDDAALDRLRLETLHNRVVLTSSQLATQTPPVENATLATPVADVEDDKVEQVSTQCNERLRNALEDAIHEYRFAPSELRPKLPRLPMCGKNRALVCALDSLLENYFESSENLYDTHSILYCGAIAACRVANVRFPNLDAAVRPKPAAPAWQCRIERRIDEARVLIGKLTCFREGNNRPRVMRFVRRAFVGTETSPHEYLTRVTERIDFLKQKIYAWANRIRRFKKRVERYTQNRMFQSDQRWVYRDWERSSQDVVNGQRPDDETTNSFWRNIWSVPVNHTEADWMCDVKRECETLPEMEKVVITSSDVANAACSVPNWKSPGPDGLHNFWLKSFTSSHDRLASQFQMALEAGSLPQFLTTGITHLLHKSGSYTEPKNYRPITCLPTVYKLFTSILRAKITKHIEKNSIMSVSQNGCRKGSRGTKELLLIDMVISQQVRRSRKDLSTCWIDYKKAYDSVPHTWLMRVLELYNINTTLRTFLQSCMRQWSTVLSYPGCKQIQRSEEPVRIVRGIFQGDSLSPLWFCLALNPLSTLLEASGLGYRLRRKGHVISHLLYMDDLKLFAPNKEELMELLKITKNFSSSIRMEFGVDKCAVMHVKRGGIVESESLELSDFTKLRSLSANDTYKYLGMSEGLGINGPHMKQSLQERFFGRLNKVLKSSLSGGNKVRAFNGWVMPVLMYSFGILKWTQTELDTLDRRVRTLLTANRMHHPRSSVMRLYIPRKRGGRGFLNAKTLHNREVCNLREHFLKVDEDMHREVVTVDKGFTPLSLAKENWCKPVVLSVNDRKAVWSSKELHGRFFRALHGPDVDFLASVAWLRFSNLFGETEGFVCAIMDEVILTNNYRKYIMKDGTVDICRACHNPGESIRHIISGCGRLANGEYLHRHNQVAKIIHQQLALKYRLVESEVPYYKYVPDPVLEKDHITLYWDRSIITDRTIVANKPDIVVVDRLARCTTIIDVAIPHDENLVKAEKDKQLKYLDLAHEVVDMWSVDSAIVVPIVVSANGLVPKSLDNHLKRLTLGGWIKGLIQKAVLLETARIVRRFLSLEP

SEQ ID NO: 30276 - protein, 1196 aa, Spodoptera frugiperda
MLTRARRRRGAPPPSPDSSLSSASPSPEPNHEPVTAVASSSSDEYFSPPTSPPPVRRPRRGRPPTGLGARGQQTPGRVPAAGGCARRMKWTQTINENVMRAYYGATEGGTNLTAYRERMLSMFQVLEPSVNVSAQRLSDQVRVIQRNRRLDEAALDRLRSEALRNRVVPAPPQEVVQTPTALQNVTPTTPAAGVEDDRVEQVSTQCNERLRSALEDAIREYRFAPLKPKLPRLPMCGRNRALVSALDSLLKTYFESSENLYDTHSILYCGAVAACRVANVRFSNLDAAVRPKPAVPAWQCRIERRISEARVLIGKLSCFRDGNTRPRVMRFVRRAFVGTETSPHEYMSRVTERIDFLKQKIYAWANRIRRYKKRVERYTQNRMFQRDQRWVYRNWERSNQDVTDGRRPDDEATNTFWCNIWSVPVSHTEDDWICDVERRCETVPEMEEVIITSSDVSSAACSVPNWKSPGPDGLHNFWLKWFTSSHARLASQFQAALEAGSLPQFLTTGVTHLLHKSGSSTEPKNYRPITCLPTIYKLLTSILRTKITKHIEKHSIMSVSQNGCRKGSRGTKELLLIDMVVSQQVRRSRKNLSTCWIDYKKAYDSVPHTWLMRVLELYKIDATLRAFLQSCMRQWSTVLCYPGCRQIQGSEEPVRIVRGIFQGDSLSPLWFCLALNPLSTLLEASGLGYPLRRRGLVISHLLYMDDLKLFAPNNKQLMELLKITEKFSSSIRMEFGVDKCAVMHVKRGGIVESEGLELSDLTKLRALSANDTYKYLGMSEGLGINGPDMKQSLRERFFGRLNKVLKSSLSGGNKVRAYNGWVMPVLMYSFGILKWTQTELDTLDRRVRTLLTANRMHHPRSSIMRLYIPRKCGGRGLLNAKTLHNREVCNLREYFLKVNEGMHREVAAVDNGFTPLSLAKENWRKPVVLSVNDRKEVWHSKELHGRFFRALHGPSVDFLASVSWLRFSNLFGETEGFVCAIMDEVILTNNYRKYIIKDGTVDICRACHSPGESIRHIISGCGRLANGEYLHRHNQVAKIIHQQLALQYQLVEFEVPYYKYVPDPVLENGHITLYWDRSIITDRTIVANKPDIVVIDRQARRTMIIDITIPHDENLVKAEKDKQIKYLDLAHEVVDMWNVDSAIVVPIVVSANGLIPNSLDNHLRRLGLGGWIKGLMQKAVLLETARIVRRFLSLEP

SEQ ID NO: 30277 - protein, 1080 aa, Spodoptera litura
MLSMFQVLEPSISVSAQRLSDQVRVIQRNRRLDEAALDRLRLEALRNCVVPAPPQSVAQTFVVSQCVTATTPIVGVVDDRVEQVSTQCNERLRSALEDAVREYRLAPSNLRPKLPRLPMCRKNRALVSALDSLLKKYFESSENLYDTHSILYCGAVAACRVANVRFPNLDAAVRPKPAVPAWQYRIERRISEARVLIGKLSCFREGNTRPRVMRFVRRAFVGTETSPHEYLSRVTERIDFLKQKVYAWANRIRRYKKRVERYTQNRMFQRDQRWVYRDWERSNQDVVDGRRPDDDATSTFWRNIWSVPVSHTEGDWMFDVKRRCETIPEMEEVEITSSDVASAACSVPNWKSPGPDGLHNFWIKWFKSSHVRLALHFQAALETGSLPQFLTTGVTHLLHKSGSSTEPKNYRPITCLPTVYKLLTSILRTKITKHIKKNSIMSVSQNGCREGSRGTKELLLIDMVVSQQVRRSRKDLSTCWIDYKKAYDSVPHTWLLKVLELYKIHASLRAFLESCMRQWSTVLCYPGCRQIQGNEEPVRIVRGIFQGDSLSPLWFCLALNPLSTLLEDSGLGYPLRRRGLVISHLLYMDDLKLFAPNKKQLMELLNITEKFSSSIRMEFGVDKCAVMHVKRGGIVESEGLELSDFTKLRSLSANDTYKYLGMSEGLGINGPDMKQSLQERFFGRLNRVLKSSLSGGNKVRAFNGWVMPVLMYSFGILKWTQTELDTLDRRVRTLLTANRMHHPRSSVMRLYIPRKCGGRGLLNAKTLHNREVCNLREYFLKVNEGMHREVAAVDNGFTPLSLAKENWRKPVVLSVNDRKEVWHSKELHGRFFRALHGPNVDFLASVSWLRFSNLFGETEGFVCAIMDEVILTNNYRKYIIKDGTVDICRACHSPGESIRHIISGCGRLANSEYLHRHNQVAKIIHQQLALHYRLVESEVPYYKYVPDPVLENDHITLYWDRSIITDRTIVANKPDIVVIDRQVRRTMIIDVTIPHDENLVKAEKDKQIKYLDLAHEVVDMWSVDSAIIVPIVVSANGLIPKSLDIHLRRLALGGWIKGLIQKAVLLETARIVRRFLSLEP

SEQ ID NO: 30278 - protein, 1197 aa, Vanessa tameamea
MLTRARQRAHNKPSSDPPLSSASQTQDPAQGSSLVSAIASSSSDEYFSPPTSPTPVRRAGRRRPPTGLGARGQPASNRVPASGGGVQRMRWTQPINENVMRAYYRATEGGTNLTAYRVRMLSLFQALEPAINVSAQRLSDQVRIILRNNRLSDTVLDRIRSEMCNSGFTSAPSQPVVEGPLPATPQGPDHDDVSEGDMAITTTKYSDQLRSALADAIREYRNTPAELRPRLPRLPMTKRNRDLVCTLDSLLADYFESSENLEDTHSILFCAAVAAYRVAGVTFEDTERAIRPKAAAPAWQSRIEKRINKTRVLIGKLYCFKEGNTRPRVMRFVGRAFLGTGISPQEYPSHVVERIDFLKQKVYAWASRIRRYRRRVDRYYLNRMFQSDQRWVYRTWERLDQGVSDGCRPDDDATNTFWRNIWSVPVDHIEGDWMREVRQACEPLEAMGEISIASEDVAAAVRSVPNWKSPGPDGLHSFWLKWLCSSHDCLASQFQSALESGSLPQFLTTGVTHLLHKSGSATDPKNYRPITCLPTVYKLLTSILRDKINSYIQNNSILSVSQNGCRGGSRGTKELLLIDMTISQQVRRFRKSLSTCWIDYKKAYDSVPHTWLLRVLELYKLDTTLCSFLRSCMGQWRTVLRYPGCRTIHGNDEPIRIERGIFQGDSLSPLWFCLALNPLSTLLEGSRLGYCLRRGGKVISHLLYMDDLKLFAPSGSQLMELLKVTETFSNSIRMEFGVDKCAIMHVERGEIMESDGLQLSDSINFRSLSANESYKYLGVSEALSINVTDMKQSLQERFFGRLKKVLKSLLSGGNKVRAFNGWVMPVLMYSFGILKWTQKELDALDRRVRVLLTAYRMHHPRSSVMRLYIPRRCGGRGFLNAKTLHNREVYKLREYFLHTDLDMHRDVVTMDKGLTPLSLGKENWRKPVVLSTENRKGVWKSKELHGRFYRALHGPDVDFIASVSWLRFGNLFGETEGFVCAIMDEVIMTNNYRKYIVRDGTVDICRACHTPGESLRHIISGCSRLANGEYLHRHNQVAKIIHQQLALRYGLVVSEVPYYRYVPDPVLENGCITLYWDRSIITDRTVVANKPDIVVIDRSERRTIIVDVTIPHDENLVKAEKDKQIKYLDLAHEVVDMWDVDTAVIVPIVVSANSLMAKSLDQHLKRLSLGSWVKGLMQKAVLLSTARIVRKFLSLGP

SEQ ID NO: 30279 - protein, 1198 aa, Eilema depressum
MLTRSQARKNTSAPVTSPDSSLSSAAQPSPTEPAASSSSSSDEFFSPPTSPTPVRRPGRGRPPASLEPRRPPASNRAPAAGGNVRRMRWTTSINENVMRAYFAATGGGTNLTAYRDRMLLVFQGLEPTLNVSAQRLSDQVRAIQRCHLLDSSVLERIRSDLQNSDVIPPPPQAPLLTPRVLGFTQVTEPDSGDGELDNVAFSVSTQYNDLIRNTLECAIRDYRSMHYQIRPRLPRLPVHKRNIALVCALDSLLPIYLDNSENLGDTHSILYCAAIAACRVAGIRFPETNTTTRPNSGKPRWQCRIECRIAEARALIGKLICFRSGNTRPRVMRFVNRAFSGTGISPRDYAARVIERIDFLKQKVYAWANRLKRYKKRCDRYTLNRTFQRDERWVYRSWERPDLVDDVHLPDIDATNTFWRNIWSVPVAHTEGDWMREVKRSCEAIETMEPVIITEDDIACVVRSLPNWKAAGPDGLHNFWLKWLRSSHVRLASQFQSALESGSLPNFMTTGVTHLLFKSGSAVDPRNYRPITCLPTVYKLLTSVLRVKITNHITGNSILSYSQNGCRSGARGTKEHLIIDGAINQQVRRNRKDMATCWIDYKKAYDSVPHTWLLRVLELYKVDTTLCTFLKACMGQWRTALRYPGCRHIRDDGELIKIERGIFQGDSLSPLWFCLALNPLSTLLEDSGLGYCLRRGGQVISHLLYMDDLKLYAPNSLRLMELLKVTETFSNSIRMEFGVDKCAVMQVKRGGIVESEGIEHSDSTKLRSLSANDTYKYLGMSQALGINEAGMKQSLRERFFCRLKKVLNSLLSGGNKVRAYNDWVIPVLTYSFGILRWTQTELEALDRRVRTLLTAYRMHHPRSSVMRLYIPRKCGGRGFLNVKNLHNREIYNLREYFLKVDVDVHRDVVAVDNGLTPLALAKENWRKPAILSIDDRKEVWRSKELHGRFYRALYGPDIDLKASVSWLRFGDLFGETEGFVCAITDEVVMTNNYRRYILKDGTVDICRACHRPGESLRHIISGCSRLANGEYLHRHNLVARIIHQQLALKYKLVDSEVPYYRYVPDPVLDDGRVTLYWDRSIITDRTILANKPDIVVIDRSEHRAIIVDITIPHDENLVKAEKDKQIKYLDLAREVVDMWAVDSAIVVPIVVSAHGLIAKSLDQHLKRLALDSWIKGLMQKAVLLDTARIVRRFLSLEP

SEQ ID NO: 30280 - protein, 1197 aa, Vanessa cardui
MLTRARKRAHNYPSPDPPLSSASQAQESAQGSSLVSAAASSSSDEYFSPPTSPTPVRRAGRRRPPTGLGARGQPVSNRVPASGGGVQRMRWTQSINENVMRAYYGATEGGTNLTAYRVRMLSLFQALEPAINVSAQRLSDQVRVILRNNRLSDTVLDRIRSETCNSGVTSGPSTPVVEEPLPAIPQGPEHDDEDGGDMAITTSKYSDQLRSALGDAIRDYRNTPAELRPRLPRLPMSKRNRDLVCTLDSLLADYFESSENLEDTHSILFCAAVAACRVAGVTFEDTERATRPMAAAPAWQSRIEKRISETRVLIGKLYCFKEGNTRPRVMRFVGRAFLGTGIGPQEYPSHVVERIDFLKQKVYAWASRIRRYRRRVDRYYLNRKFQSDQRWVYRTWERLDQDVSDGCRPDDDATNTFWRNIWSVPVDHIEGDWMREVRQACEPLEVMGKISIASEGVAAAVRSFPNWKSPGPDGLHSFWLKWLRSSHECLAFQFQSALESGSLPQFLTTGVTHLLHKSGSATDPKNYRPITCLPTVYKLLTSILRDKINSHIQNNSILSVSQNGCRGGSRGTKELLLIDMTISQQVRRFRKSLSTCWIDYKKAYDSVPHTWLLRVLELYKLDTTLCSFLRSCMRQWRTVLRYPGCRTIHGDDEPIRIERGIFQGDSLSPFWFCLALNPLSTLLEGSRLGYRLRRGGKVISHLLYMDDLKLFAPSGSQLVELLKVTETFSNSIRMEFGVDKCAVMHVKRGEIMESDGLQLSDSINFKSLSANESYKYLGMSEALGINVTDMKQSLQERFFGRLKKVLKSLLSGGNKVRAFNGWVMPVLMYSFGILKWTQKELDALDRRVRVLLTAYRMHHPRSSVMRLYIPRRYGGRGFLNAKTLHNREVYKLREYFLHTDLDMHRDVVIMDKGLTPLSLGKENWRKPVVLSTENRKEVWKSKELHGRFYRALHGPDVDFMASVSWLRFGNLFGETEGFVCAIMDEVIMTNNYRKYIVRDGTVDICRACHTPGESLRHIISGCSRLANGEYLYRHNQVAKIIHQQLALRYGLVVSEVPYYRYVPDPVLENGHITLYWDRSIITDRTVVANKPDIVVIDRSERRTIIVDITIPHDENLVKAEKDKQIKYLDLAHEVVDMWDVDTAVIVPIVVSANGLMAKSLDQHLKRLSLGSWVKGLMQKAVLLGTARIVRKFLSLEP

SEQ ID NO: 30281 - protein, 1197 aa, Vanessa cardui
MLTRARQQAHNNPSPDPPLSSASQAQDPAQGNSLVSAAASSSSDEYFSPPTSPTPVRRAGRRRPPTGLGARGQPVSNRVPASGGGVQRMRWTQPINENVMRAYYGATKGGTNLTAYRVRMLSLFQALEPAVNVSAQRLSDQVRVILRNNRLCDTVLDRIRSETCNSDVTSGPSTPVVEEPLPAIPQGPEHDDEGGGDMAITKSKYSDHLRSALGDAIREYRNTPAELRPRLPRLPMTKRNRDLVCTLDSLLADYFESSENLEDTHSILFCAAVAACRVAGVTFEDTERATRPKAVAPAWQSRIEKRINETRVLIGKLYCFKEGNTRPRVMRFVGRAFLGTGISPQEYPSHVVERIDFLKQKVYAWASRIRRYRRRVDRYHLNRKFQSDQRWVYRTWERLDQDVSDGCRPDDDATNTFWRNIWSVPVDHIEGDWMLEVRQACEPLEVMGKISIASEDVAAAVRSVANWKSPGPDGLHNFWLKWLRSSHECLASQFQSALESGSLPQFLTTGVTHLLHKSGSATDPKNYRPITCLPTVYKLLTAILRDKINSHIQNNSILSVSQNGCRGGSRGTKELLLIDMTISQQVRRSRKSLSTCWIDYKKAYDSVPHTWLLRVLELYKLDTTLCSFLRSCMGQWRTVLRYPGRRTIHGNDEPIRIERGIFQGDSLSPLWFCLALNPLSTLLESSRLGYRLRRGGKVISHLLYMDDLKLFAPSDSQLMELLKVTETFSNSIRMEFGVDKCAVMHVKRGEIMESDGLQLSDSINFKSLSANESYKYLGMSEALGINVTDMKQSLQERFFGRLKKVLKSLLSGGNKVRAFNGWVMPVLMYSFGILKWTQKELDALDRKVRVLLTAYRMHHPRSSVMRLYIPRRCGGRGFLNAKTLHNREVYKLREYFLHTDLDMHRDVVTMDKGLTPLSLGKENWHKPVVLSTENRKEVWKSKELHGRFYRALHGPDVNFMASVSWLRFGNLFGETEGFVCAIMDEVIMTNNYRRYIVRDGTVDICRACHTPGESLRHIISGCSRLANGEYLHRHNQVAKIIHQQLALRYGLVVSEVPYYKYVPDPVLENGHITLYWDRSIITDRTVVANKPDIVVIDRSERRTIIVDITIPHDENLVKAEKDKQIKYLDLAHEVVDMWDVDTAVIVPIVVSANGLMAKSLDQHLKRLSLGSRVKGLMQKAVLLGTARIVRKFLSLEP

SEQ ID NO: 30282 - protein, 1112 aa, Schrankia costaestrigalis
MKWTSSINENVMRAYFVATEGGTNLTAYRDRMLSLFQELEPAVNVSTQRLSDQVRAIQRCHLLNDTVLDRIRSDILSNLTISTPPSVTTQVNTTIPLSQPTELNSFETIDCEVTNVSIQYNDQLRSALECAIREYRFMDPGRRPRIPRLPTHKQNIALVCALDSLLLNYFDNSENLGDAHSILYCGAVAACRVAHIKFPVDDIATRLRPTVPAWQCRIERRIAEARALIGKLICFRSGNTRPRVMRFVTRAFSETNIDRRDYMLHVTERIDFLKQKVYAWANRIKRFKKRMERYTQNRAFQKDERWVYRNWERPVLGSVDMQLPDADATNDFWRSIWSVPVNHTEGAWIGDVEKACEHIHQMEPVVITTEDVTCAVRRLPNWKSAGPDGLHNFWLKWLHSSHACLASHFQSSLETGTLPDFITTGVTHLLYKSGSSTDPKNYRPITCLPTIYKLLTSILRKKISLHIQENSIMCISQNGCRNEARGTKEQLLIDTTISEQVRRNRKDLFTCWIDYKKAYDSVPHTWLLRVLELYKIDATLCTFLRTCMTKWNTLLFYSGCRLGLGNEVPIQIKRGIFQGDSLSPLWFCLALNPLSTLLECSGLGYRLKRHGQVISHLLYMDDLKLFAPTKSQLLVLLKETETFSNSIKMEFGVDKCAVMHVKRGKVVESDELQLSDSIKLRCLSPSDTYKYLGMSQALCITETDMKQQLRDRFFARLKKVLNSLLTGGNKVRAYNSWVMPVLMYSFGILKWTQTELEALDRKVRTLLTAHRMHHPRSSVMRLYIPRKSGGRGYLSAKTLHNREVYNLREYFLTVDADIHRDVVSVDVGLTPLGLCKENWRKPIIQTIDDRKEIWKSKELHGRFYRALNGPDVDTLSSVSWLRFGDLFGETEGFVFAIMDEVVMTKNYRKYILKDGTVDICRACHCPGESLRHIVSSCSRLANGEYLHRHNQVARIVHQQLALKYHLVDAEVPYYKYVPDPVLENSSVTLYWDRSIITDRTIVANKPDIVVIDRSERRAMIIDITIPHDENLVKAEKDKQTKYLDLAHEVVDMWNVDSAIIVPIVLSVNGLIPKSLYQHLRRLSLDSWIIGLMQKAVLLDTARIVRRFLSLEP

SEQ ID NO: 30283 - protein, 1191 aa, Trichoplusia ni
MLTRRRAARLPSPGSSPSSASQLPPGRGPAPAVAVASSSSDEYYSPPTSPTPVRRPGRRRPPSSLAPSGQPASNRAPAPGGVVQRMKWTRPMNENVMRAYYGATGGGTNLTAYRARMLSLFRALEPDVDVSAQRLSDQVRVIQRNHRLDDATLDRLRSEVQTSPVVVTPSIAEAPAASALPANPADGGDDDGAITVSTQCSDHIRSTLEQAVLEYRSTPRDQRPRLPRLPMHNRNKALMGVLDSLLSSYFGNSEDLGDTHSLLYCAAVAACRVAGVTFRDNTAARPKQAAPAWQCRIEKRVAEARTLIAKLIAFRGGNTRPRVMRFVKRAFAGTNISPSEYTARVTERIDFFKQKVCAWASRIRRYKTRVDRFHQNRMFQRDQRWVYRSWEQPASEEGAGRLPDDVATNLFWRSIWSAPVTHSEGDWIRDVEQSCERIEEMGAIDISPQDVANAVRPLANWKAPGPDGLHNFWLKWLPSSHGCLASQFQSAVDSGVLPQFFTTGSTHLLHKTGSTTDPKNYRPITCLPTIYKLLTSILREKINDHIERFSIMSASQNGCRNGSRGTKELLLIDMTICQQVRRSKKGVSTCWIDYKKAYDSVPHAWLMRVLELYKINTTLRTFLKSCMGQWTTVLHYPGCRDIQKSGQLIRIERGIFQGDSLSPLWFCLALNPLSTLLENSRLGYSLRRGSQVISHLLYMDDLKLFASNKLQLMKLLKITESFSNSIRMEFGVDKCAVMHVKRGGIVESQGIQLSDSINLRSLSSTETYKYLGMSEALGINVADMKQSLQTRFFGRLNKVLKSSLSGGNKVRAFNGWVMPVIMYSFGILKWTQTELDALDRRVRTLLTANRMHHPRSSVMRLYIPRKCGGRGFLNAKTLHNREVCNLREYFLRVDVGMHRDVVAVDKGFTPLSLGKENWHKPIVLSVKDRKDVWQSKELHGRYYRTLHGADVDFLASVAWLRFGDLFGETEGFVCAIMDEVIMTNNYRKYIIKDGTVDICRACHCPGESLRHIVSGCSRLANGEYLHRHNQVARIIHQQLALKYKLVESEVPYYKYVPDPVLESGHITLYWDRSIITDRTIVANKPDIVVIDRSERRTMIVDITIPHDENLVKAEKEKQLKYLDLAHEVVDLWEVDSAIIVPIVVSANGLIAKSLDQHLRRLSLGVWVKGLIQKAVLLDTARIVRRFLSLEP

SEQ ID NO: 30284 - protein, 962 aa, Spodoptera exigua
MCGKNRALVCALDSLLENYFESSENLYDTHSILYCGAIAACRVANVRFPNLDAAVRPKPAAPAWQCRIERRIDEARVLIGKLTCFREGNNRPRVMRFVRRAFVGTETSPHEYLTRVTERIDFLKQKIYAWANRIRRYKKRVERYTQNRMFQSDQRWVYRDWERSSQDVVNGQRPDDETTNSFWRNIWSVPVNHTEADWMCDVKRECETLPEMEEVVITSSDVANAACSVPNWKSPGPDGLHNFWLKSFSSSHDRLASQFQMALEAGSLPQFLTTGITHLLHKSGSYTEPKNYRPITCLPTVYKLFTSILRAKITKHIEKNSIMSVSQNGCRKGSRGTKELLLIDMVISQQVRRSRKDLSTCWIDYKKAYDSVPHTWLMRVLELYKINTTLRTFLQSCMRQWSTVLSYPGCKQIQRSEEPVRIVRGIFQGDSLSPLWFCLALNPLSTLLEASGLGYRLRRKGHVISHLLYMDDLKLFAPNKEELMELLKITKNFSSSIRMEFGVDKCAVMHVKRGGIVESESLELSDFTKLRSLSANDTYKYLGMSEGLGINGPHMKQSLQERFFGRLNKVLKSSLSGGNKVRAFNGWVMPVLMYSFGILKWTQTELDTLDRRVRTLLTANRMHHPRSSVMRLYIPRKRGGRGFLNAKTLHNREVCNLREHFLKVDEDMHREVVTVDKGFTPLSLAKENWCKPVVLSVNDRKTVWSSKELHGRFFRALHGPDVDFLASVAWLRFSNLFGETEGFVCAIMDEVILTNNYRKYIMKDGTVDICRACHSPGESIRHIISGCGRLANVEYLHRHNQVAKIIHQQLALKYRLVESEVPYYKYVPDPVLEKDHITLYWDRSIITDRTIVANKPDIVLVDRLARRTTIIDVAIPHDENLVKAEKDKQLKYLDLAHEVVDMWSVDSAIVVPIVVSANGLVPKSLDNHLKRLTLGGWIKGLIQKAVLLETARIVRRFLSLEP

SEQ ID NO: 30285 - protein, 890 aa, Spodoptera frugiperda
MALPHLKDYDDKIMNDIIIIIIFRFVRRAFVGTETSPHEYMSRVTERIDFLKQKVYAWANRIRRYKKRVERYTQNRMFQRDQRWVYRNWERSNQDVTDGRRPDDEATNTFWRNIWSVPVSHTENDWICDVERRCETVPEMEEVIITSSDVSSAACSVPNWKSPGPDGLHNFWLKWFTSSHARLASQFQAALEAGSLPQFLTTGVTHLLHKSGSSTEPKNYRPITCLPTVYKLLTSILRTKITKHIEKHSIMSVSQNGCRKGSRGTKELLLIDMVVSQQVRRSRKNLSTCWIDYKKAYDSVPHTWLMRVLKLYKIDATLRAFLQSCMRQWSTVLCYPGCRQIQGSEEPVRIVRGIFQGDSLSPLWFCLALNPLSTLLEASGLGYPLRRRGLVISHLLYMDDLKLFAPNNKQLMELLKITEKFSSSIRMEFGVDKCAVMHVKRGGIVESEGLELSDLTKLRALSANDTYKYLGMSEGLGINGPDMKQSLRERFFGRLNKVLKSSLSGGNKMRAYNGWVMPVLMYSFGILKWTQTELDTLDRRVRTLLTANRMHHPRSSIMRLYIPRKCGGRGLLNAKTLHNREVCNLREYFLKVNEGMHREVAAVDNGFTPLSLAKENWRKPVVLSVNDRKEVWHSKELHGRFFRALHGPSVDFLASVSWLRFSNLFGETEGFVCAIMDEVILTNNYRKYIIKDGTVDICRACHSPGESIRHIISGCGRLANGEYLHRHNQVAKIIHQQLALQYQLVEFEVPYYKYMPDPVLENGHITLYWDRSIITDRTIVANKPDIVVIDRQARRTMIIDITIPHDENLVKAEKDKQIKYLDLAHEVVDMWNVDSAIVVPIVVSANGLIPNSLDNHLRRLGLGGWIKGLMQKAVLLETARIVRRFLSLEP

SEQ ID NO: 30286 - protein, 1201 aa, Spodoptera litura
MMLTRARSKQGAPPPPPDSSLSSASPSPDPSPAGSPVTAVASSSSDDYFSPPTSPTPVRRPGRGRPPTGLGARGQQAPGRVPATGGCVRRMKWSQTINENVMRSYYGATEGGTNLTAYRERMLSIFQVLEPSINVSAQRLSDQVRVIQRNRRLDEAALDRLRLEALRNRVVPAPPQSVAQTPIVSQCVTPTTPIVGVEDDRVEQVSTQCNERLRSALEDAVREYRLAPSNLRPKLPRLPMCRKNRALVSALDSLLKKYFESSENLYDTHSILYCGAVAACRVANVRFPNLDAAVRPKPAVPAWQYRIERRISEARVLIGKLSCFREGNTRPRVMRFVRRAFVGTETSPHEYLSRVTERIDFLKQKVYAWANRIRRYKKRVERYTQNRMFQRDQRWVYRDWERSNQDVVDGRRPDDDATSTFWRNIWSVPVSHTEGDWMFDVKRRCETIPEMEEVEITSSDVASAACSVPNWKSPGPDGLHNFWIKWFKSSHVRLALHFQAALETGSLPQFLTTGVTHLLHKSGSSTEPKNYRPITCLPTVYKLLTSILRTKITKHIKKNSIMSVSQNGCREGSRGTKELLLIDMVVSQQVRRSRKDLSTCWIDYKKAYDSVPHTWLLKVLELYKIHASLRAFLESCMRQWSTVLCYPGCRQIQGNEEPVRIVRGIFQGDSLSPLWFCLALNPLSTLLEDSGLGYPLRRRGLVISHLLYMDDLKLFAPNKKQLMELLNITEKFSSSIRMEFGVDKCAVMHVKRGGIVESEGLELSDFTKLRSLSANDTYKYLGMSEGLGINGPDMKQSLQERFFGRLNRVLKSSLSGGNKVRAFNGWVMPVLMYSFGILKWTQTELDTLDRRVRTLLTANRMHHPRSSVMRLYIPRKCGGRGLLNAKTLHNREVCSLREYFLKVNEGMHREVAAVDNGFTPLSLAKENWRKPVVLSVNDRKEIWHSKELHGRFFRALHGPSVDFLASVSWLRFSNLFGETEGFVCAIMDEVILTNNYRKYIIKDGTVDICRACHSPGESIRHIISGCGRLANSEYLHRHNQVAKIIHQQLALHYRLVESEVPYYKYVPDPVLENDHITLYWDRSIITDRTIIANKPDIVVIDRQVRRTMIIDITIPHDENLVKAEKDKQIKYLDLAHEVVDMWNVDSAIIVPIVVSANGLIPNSLDNHLRRLALGSWVKGLIQKAVLLETARIVRRFLSLEP

SEQ ID NO: 30287 - protein, 1040 aa, Vanessa tameamea
MRWTQSINENVMRAYYGATEGGTNLTAYRVRMLSLFQALEPAINVSAQRLSDQVRVILRNNRLSDTVLDRIRSEMCNSGFTSAPSQPVVEGPLPATPQGPDHDDEDEGDMAITTSKYSDQLRSALGDAIREYRNTPAELRPRLPRLPMTKRNRDLVCTLDSLLADYFESSENLEDTHSILFCAAVAACRVAGVTFEDTERATRPKAATPAWQSRIEKRINKTRVLIGKLYCFKEGNTRPRVMRFVGRAFLGTGISPQEYPSHVVERIDFLKQKVYAWASRIRRYRRRVDRYYLNRMFQSDQRWVYRTWERLDQGVSDGCRPDDDATNTFWRNIWSVPVDHIEGDWMREVRQACEPLEAMGEISIASEDVAAAVRSVPNWKSPGPDGLHSFWLKWLRSSHDCLASQFQSALESGSLPQFLTTGVTHLLHKSGSATDPKNYRPITCLPTVYKLLTSILRDKINSHIQNNSILSVSQNGCRGGSRGTKELLLIDMTISQQVRRFRKSLSTCWIDYKKAYDSVPHTWLLRVLELYKLDTTLCSFLRSCMGQWRTVLRYPGCRTIHSNDEPIRIERGIFQGDSLSPLWFCFALNPLSTLLECSRLGYCLWRGTKVISHLLYMDDLKLFAPSGSQLMELLKVTETFSNSIGMEFGVDKCAVMHVKRGEIMESDGLQLSDSINFRSLSANDSYKYLGVSEALGINVTDMKQSLQERFFGRLKKVLKSLLSGGNKVRAFNGWVMPVLMYSFGILKWTQKELDALDRRVRVLLTAYRMHHPRSSVMRLYIPRRYGGRGFLNAKTLHNREVYKLREYFLHTDLDMHRDVVTMDKGLTPLSLGKENWRKPVVLSTENRKGVWKSKELHGRFYRALHGPDVDFMASVSWLRFGNLFGETEGFVCAIMDEVIMTNNYRKYIVRDGTADICRACHTPGESIRHIISGCSRLANGEYLHRHNQVAKIIHQQLALRYGLVVSEVPYYRYVPDPVLENGRITLYWDRSIITDRTVVANKPDIVVIDRSERRTIIVDVTIPHDENLVKAEKDKQIKLS

SEQ ID NO: 30288 - protein, 1191 aa, Eilema sororculum
MLTRAQARNRNAQTTSPGSSLSSAAQLPAVEPAASSSSSSDEFFSPPTSPTPVRRPGRGRPPTCLGPRRPPASNRAPATGGNVHRMRWTTSINENVMRAYFAATEGGTNLSAYRTRMLPLFQALEPTINTSAQRLSDQVRVIQRNRLLNETVLETLRLECLRNICVTPAPAPAPASTAEINDDTYVAPDDTPIPVSIQYNEEIKEALECALREYQSMPVHVRPRLPRLPIHRRNIALVSALDSLLPRYLENSENLGDTHSILYCTAVAACRIAGAKFPIKDPAIRPKPAIPAWQCRIERRVAEARVLIGKLICFRSGNTRPRVMRYVTRAFAGTDISPQDYTSRVTKRIDFLKQKVYAWANRIRRYKKRVDRYTLNCMFQRDQRWVYRSWERTEESVDDVRRPDAEATNAFWRSIWSVPVSHTEGDWMREVERACETIPEMEEINIDAIDVDCAVRPLSNWKSPGPDGLHNFWLKWLRSSHVVLASQFQSAVESGTLPAFMTTGVTHLLHKTGSTLEPNNYRPITYLPTVYKLLTSILRAKINNHINNNSIMCASQNGCRNGARGTKELLLIDMTISQQARRNRKDLAACWIDYKKAFDSVPHTWLLRVLELYKVNTTLCTFLRSCMGQWRTVLFYPGCRQALGSGEPITIERGIFQGDSLSPLWFCLALNPLSTLLVNSGLGYRLRREGQMVSHLFYMDDLKLFAHTNPQLIALLKVTETFSNSIKMAFGVDKCAVIHVKRGRVVESEGIQLSDSTNLRSLLVTETYKYLGMSQTLCINEADMKQMLQDRFFGRLKKVLNSLLSGGNKVRACNSWVMPLLMYSFGILKWTQTELDTIDRKVRAQLTAFRMHHPRSSVMRLYIPRKCGGRGFLNAKTLHNREVCNLRDYFLKSNVDMHRDVVIVDTGLTPLGLAKENWRRPTIVSTDSRREVWQSKELHGRFYRALHRPEVDLLASVSWLRFSDLFGETEGFVCAIADEVIKTNNYRKYIMRDGTIDICRACHQPGESLRHITSGCSRLANGEYLHRHNQVARIIHQRLALKYNLVEVEVPYYRYVPEPVLENSHITLYWDRSIITDRTVVANKPDIVVIDRSERRALIVDVTIPHDENLVKAEKDKQVKYLDLAHEVVDMWSVDSAIIVPIVVSVNGLIAKSLDQHLKRLGLDGWVKGQMQKAVLLDTARIVRKFLSLEP

SEQ ID NO: 30289 - protein, 868 aa, Eilema sororculum
MRYVTRAFAGTDISPQDYTSRVTERIDFLKQKVYAWANRIRRYKKRVDRYTVNRMFQRDQRWVYRSWERTEESVDDVRRPDAEVTNAFWRSIWSVPVSHTEGDWMHEVKRACETIPEMEEINIDAIDVDCAVRSLSNWKSPGPDGLHNFWLKWLRSSHVVLASQFQSAVESGTLPAFMTTGVTHLLHKTGSTLEPNNYRPITCLPTVYKLLTSILRAKINNHINNNSIMCASQNGCRNGARGTKELLLIDMAISQQARRNRKDLTACWIDYKKAFDSVPHTWLLRVLELYKVNTTLCTFLRSCMGQWRTVLFYPGCRQALGGGVPITIERGIFQGDSLSPLWFCLALNPLSTLLVNSGLGYRLRREGQMVSHLFYMDDLKLFAHTNPQLITLLKITETFSNSIKMAFGVDKCAVIHVKRGRVVESEGIQLSDSTNLRSLLVTETYKYLGMSQALCINEVDMKQMLQERFFGRLKKVLNSLLSGGNKVRACNSWVMPLLMYSFGILKWTQTELDTIDRKVRTQLTAFRMHHPRSSVMRLYIPRKCGGRGFLNAKTLHNREVCNLRDYFLKSNVDMHRDVVNVDTGLTPLGLAKENWRRPTIVSTDSRREVWQSKELHGRFYRALHRPEVDLLASVSWLRFSDLFGETEGFVCAIADEVIKTNNYRKYIMRDGTIDICRACHQPGESLRHITSGCSRLANGEYLHRHNQVARIIHQRLALKYNLVEFEVPYYRYVPEPVLENTHITLYWDRSIITDRTVVANKPDIVVIDRSERRALIVDVTIPHDENLVKAEKDKQVKYLDLAHEVVDMWSVDSAIIVPIVVSVNGLIAKSLDQHLKRLGLDGWVKGQMQKAVLLDTARIVRKFLSLEP

SEQ ID NO: 30290 - protein, 867 aa, Eilema depressum
MRFVNRAFSGTGISPRDYAARVIERIDFLKQKVYAWANRIKRYKKRCDRYTLNRTFQRDERWVYRNWERPDLVGDVHLPDIDATNTFWRNIWSVPVAHTEGDWMREVKRSCEAIEIMEPVIISEDDIACVVRSLPNWKAAGPDGLHNFWLKWLRSSHVRLASQFQSALESGSLPNFMTTGVTHLLYKSGSATDPKNYRPITCLPTVYKLLTSVLRVKIANHITGNSILSYSQNGCRSGARGTKEHLIIDMAVNQQVRRNRKDMATCWIDYKKAYDSVPHTWLLKVLELYKVDTTLCTFLKACMGQWRTALRYPGCRHIRDDGELIKIERGIFQGDSLSPLWFCLALNPLSTLLEDSGLGYCLRRGGQVISHLLYMDDLKLYAPNSLRLMELLKVTETFSNSIRMEFGVDKCAVIQVKRGGIVESEGIELSDSTKLRSLSANDTYKYLGMSQALGINEAGMKQSLRERFFCRLKKVLNSLLSGGNKVRAYNDWVIPVLTYSFGILRWTQTELGALDRRVRTLLTAYRMHHPRSSVMRLYIPRKCGGRGFLNVKNLHNREIYNLREYFLKVDVDVHRDVVAVDNGLTPLALAKENWRKPAILSIDDRKEVWRSKELHGRFYRALYGPDVDLKASVSWLRFGDLFGETEGFVCAITDEVVMTNNYRRYILKDGTVDICRACHRPGESLRHIISGCSRLANGEYLHRHNLVARIIHQQLALKYKLVDSEVPYYRYVPDPVLDDGRVTLYWDRSIITDRTILANKPDIVVIDRLERRAIIVDITIPHDENLVKAEKDKQIKYLDLAREVVDMWAVDSAIVVPIVVSAHGLIAKSLDQHLKRLALDSWIKGLMQKAVLLDTARIVRRFLSLEP

SEQ ID NO: 30291 - protein, 1197 aa, Vanessa cardui
MLTRARQQAHNNPSPDPPLSSASQAQDPAQGSSLVSAAASSSSDEYFSPPTSPTPVRRAGRRRPPTGLGARGQPISNRVPASGGGVQRMRWTQPINENVMRAYYGATKGGTNLTAYRVRMLSLFQALEPAVNVSAQRLSDQVRVILRNNRLSDTVLDRIRSETCNSDVTSGPSTPVVEEPLPAIPQGPEHDDEGGGDMAITKSKYSDHLRSALGDAIREYRNTPAELRPRLPRLPMTKRNRDLVCTLDSLLADYFESSENLEDTHSILFCAAVAACRVAGVTFEDTERATRPKAVAPAWQSRIEKRINETRVLIGKLYCFKEGNTRPRVMRFVGRAFLGTGISPQEYPSHVVERIDFLKQKVYAWASRIRRYRRRVDRYHLNRKFQSDQRWVYRTWERLDQDVSDGCRPDDDATNTFWRNIWSVPVDHIEGDWMLEVRQACEPLEVMGKISIASEDVAAAVRSVANWKSPGPDGLHNFWLKWLRSSHECLASQFQSALESGSLPQFLTTGVTHLLHKSGSATDPKNYRPITCLPTVYKLLTAILRDKINSHIQNNSILSVSQNGCRGGSRGTKELLLIDMTISQQVRRSRKSLSTCWIDYKRAYDSVPHTWLLRVLELYKLDTTLCSFLRSCMGQWRTVLRYPGCRTIHGNDEPIRIERGIFQGDSLNPLWFCLALNPLSTLLESSRLGYRLRRGGKVISHLLYMDDLKLFAPSDSQLMELLKVTETFSNSIRMEFGVDKCAVMHVKRGEIMESDGLQLSDSINFKSLSANESYKYLGMSEALGINVTDMKQSLQERFFGRLKKVLKSLLSGGNKVRSFNGWVMPVLMYSFGILKWTQKELDALDRKVRVLLTAYRMHHPRSSVMRLYIPRRCGGRGFLNAKTLHNREVYKLREYFLHTDLDMHRDVVTMDKGLTPLSLGKENWHKPVVLSTENRKEVWKSKELHGRFYRALHGPDVDFMASVSWLRFGNLFGETEGFVCAIMDEVIMTNNYRRYIVRDGTVDICRACHTPGESLRHIISGCSRLANGEYLHRHNQVAKIIHQQLALRYGLVVSEVPYYKYVPDPVLENGHITLYWDRSIITDRTVVANKPDIVVIDRSERRTIIVDITIPHDENLVKAEKDKQIKYLDLAHEVVDMWDVDTAVIVPIVVSANGLMAKSLDQHLKRLSLDSWVKGLMQKAVLLGTARIVRKFLSLEP

SEQ ID NO: 30292 - protein, 1197 aa, Vanessa cardui
MLTRARQRAHNYPSPDPPLSSASQAQDPAQGSSLVSAAASSSSDEYFSPPTSPTPVRRAGRRRPPTGLGARGQPVSNRVPASGGGVQRMRWTQPINENVMRAYYGATKGGTNLTAYRVRMLSLFQALEPAVNVSAQRLSDQVRVILRNNRLSDTVLDRIRSETCNSDVTSGPSTPVVEEPLPAIPQGPEHDDEGGGDMAITKSKYSDHLRSALGDAIREYRNTPAELRPRLPRLPMTKRNRDLVCTLDSLLADYFESSENLEDTHSILFCAAVAACRVAGVTFEDTERATRPKAVAPAWQSRIEKRINETRVLIGKLYCFKEGNTRPRVMRFVRRAFLGTGIGPQEYPSHVVERIDFLKQKVYAWASRIRRYRRRVDRYHLNRKFQSDQRWVYRTWERLDQDVSDGCRPDDDATNTFWRNIWSVPVDHIEGDWMLEIGQACEPLEVMGKISIASEDVAAAVRSVANWKSPGPDGLHNFWLKWLRSSHECLASQFQSALESGSLPQFLTTGVTHLLHKSGSATDPKNYRPITCLPTVYKLLTAILRDKINSHIQNNSILSVSQNGCRGGSRGTKELLLIDMTISQQVRRTRKSLSTCWIDYKKAYDSVPHTWLLRVLELYKLDTTLCSFLRSCMGQWRTVLRYPGCRTIHGNDEPIRIERGIFQGDSLSPLWFCLALNPLSTLLESSRLGYRLRRGGKVISHLLYMDDLKLFAPSDSQLMELLKVTETFSNSIRMEFGVDKCAVMHVKRGEIMESDGLQLSDSINFKSLSANESYKYLGMSEALGINVTDMKQSLQERFFGRLKKVLKSLLSGGNKVRAFNGWVMPVLMYSFGILKWTQNELDALDRKVRVLLTAYRMHHPRSSVMRLYIPRRCGGRGFLNAKTLHNREVYKLREYFLHTDLDMHRDVVTMDKGLTPLSLGKENWHKPVVLSTENRKEVWKSKELHGRFYRALHGPDVDFMASVSWLRFGNLFGETEGFVCAIMDEVIMTNNYRRYIVRDGTVDICRACHTPGESLRHIISGCSRLANGEYLHRHNQVAKIIHQQLALRYGLVVSEVPYYKYVPDPVLENGHITLYWDRSIITDRTVVANKPDIVVIDRSERRTIIVDITIPHDENLVKAEKDKQIKYLDLAHEVVDMWDVDTAVIVPIVVSANGLMAKSLDQHLKRLSLGSWVKGLMQKAVLLGTARIVRKFLSLEP

SEQ ID NO: 30293 - protein, 1191 aa, Trichoplusia ni
MLTRRRAARLPSPGSSPSSASQLPPGRGPAPAVAVASSSSDEYYSPPTSPTPVRRPGRRRPPSSLAPSGQPASNRAPAPGGVVQRMKWTRPMNENVMRAYYGATGGGTNLTAYRARMLSLFRALEPDVDVSAQRLSDQVRVIQRNHRLDDATLDRLRSEVQTSPVVVTPSIAEAPAASALPANPADGGDDDGAITVSTQCSDHIRSTLEQAVLEYRSTPRDQRPRLPRLPMHNRNKALMGVLDSLLSSYFGNSEDLGDTHSLLYCAAVAAYRVAGVTFRDNTAARPKQAAPAWQCRIEKRVAEARTLIAKLVAFRGGNTRPRVMRFVKRAFAGTNISPSEYTARVTERIDFFKQKVCAWASRIRRYKTRVDRFHQNRMFQRDQRWVYRSWEQPASEEGAGRLPDDVATNLFWRSIWSAPVTHSEGDWIRDVEQSCERIEEMGAIDISPQDVANAVRPLANWKAPGPDGLHNFWLKWLPSSHGCLASQFQSAVDSGVLPQFFTTGSTHLLHKTGSTTDPKNYRPITCLPTIYKLLTSILREKINDHIERFSIMSASQNGCRNGSRGTKELLLIDMTICQQVRRSKKGVSTCWIDYKKAYDSVPHAWLMRVLELYKINTTLRTFLKSCMGQWTTVLHYPGCRDIQKSGQLIRIERGIFQGDSLSPLWFCLALNPLSTLLENSRLGYSLRRGSQIISHLLYMDDLKLFASNKLQLMKLLKITESFSNSIRMEFGVDKCAVMHVKRGGIVESQGIQLSDSINLRSLSSTETYKYLGMSEALGINVADMKQSLQTRFFGRLNKVLKSSLSGGNKVRAFNGWVMPVIMYSFGILKWTQTELDALDRRVRTLLTANRMHHPRSSVMRLYIPRKCGGRGFLNAKTLHNREVCNLREYFLRVDVGMHRDVVAVDKGFTPLSLGKENWHKPIVLSVKDRKDVWQSKELHGRYYRTLHGADVDFLASVAWLRFGDLFGETEGFVCAIMDEVIMTNNYRKYIIKDGTVDICRACHCPGESLRHIVSGCSRLANGEYLHRHNQVARIIHQQLALKYKLVESEVPYYKYVPDPVLESGHITLYWDRSIITDRTIVANKPDIVVIDRSERRTMIVDITIPHDENLVKAEKEKQLKYLDLAHEVVDLWEVDSAIIVPIVVSANGLIAKSLDQHLRRLSLGVWVKGLIQKAVLLDTARIVRRFLSLEP

SEQ ID NO: 30294 - protein, 1200 aa, Spodoptera exigua
MLTRAKARARAAPPPSPDSSLSSASPSPETRTTRSPVIAVASSSSDEYFSPLASPTPERRQRRGRPPMGLGTRGQRAPERVPATGGCARRMKWSQSMNENVMRAYYGATEGGTNLTAYRDRMLSLFQVLEPSVNVSAQRLSDQVRVIQRSRRLDDAALDRLRLETLHNRVVLTSSQSATQTPPVENATLATPGAAVEDDKVEQVSTQCNERLRNALEDAIHEYRFAPSELRPKLPRLPMCGKNRALVCALDSLLENYFESSENLYDTHSILYCGAIAACRVANVRFPNLDAAVRPKPAAPAWQCRIERRIDEARVLIGKLTCFREGNNRPRVMRFVRRAFVGTETSPHEYLTRVTERIDFLKQKIYAWANRIRRYKKRVERYTQNRMFQSDQRWVYRDWERSSQDVVNGQRPDDETTNSFWRNIWSVPVNHTEADWMCDVKRECETLPEMEKVVITSSDVANAACSVPNWKSPGPDGLHNFWLKSFSSSHDRLASQFQMALEAGSLPQFLTTGITHLLHKSGSYTEPKNYRPITCLPTVYKLFTSILRAKITKHIEKNSIMSVSQNGCRKGSRGTKELLLIDMVISQQVRRSRKDLSTCWIDYKKAYDSVPHTWLMRVLELYKINTTLRTFLQSCMRQWSTVLSYPGCKQIQRSEEPVRIVRGIFQGDSLSPLWFCLALNPLSTLLEASGLGYRLRRKGHVISHLLYMDDLKLFAPNKEELMELLKITKNFSSSIRMEFGVDKCAVMHVKRGGIVESESLELSDFTKLRSLSANDTYKYLGMSEGLGINGPHMKQSLQERFFGRLNKVLKSSLSGGNKVRAFNGWVMPVLMYSFGILKWTQTELDTLDRRVRTLLTANRMHHPRSSVMRLYIPRKRGGRGFLNAKTLHNREVCNLREHFLKVDEDMHREVVTVDKGFTPLSLAKENWCKPVVLSVNDRKTVWSSKELHGRFFRALHGPDVDFLASVAWLRFSNLFGETEGFVCAIMDEVILTNNYRKYIMKDGTVDICRACHSPGESIRHIISGCGRLANGEYLHRHNQVAKIIHQQLALKYRLVESEVPYYKYVPDPVLEKDHITLYWDRSIITDRTIVANKPDIVLVDRLARRTTIIDVAIPHDENLVKAEKDKQLKYLDLAHEVVDMWSVDSAIVVPIVVSANGLVPKSLDNHLKRLTLGGWIKGLIQKAVLLETARIVRRFLSLEP

SEQ ID NO: 30295 - protein, 1197 aa, Spodoptera frugiperda
MLTRARRRYAHPPSPDSSLSSASPSPEPNHEELPVTVVASSSSDEYFSPPTSPPPVRRPRRGRPPTGLGARGQQTPGRVPATGGCARRMKWSQTINENVMRAYYGATEGGTNLTAYRERMLSMFQVLEPSVNVSAQRLSDQVRVIQRNRRLDEAALDRLRSEALRNRVVPAPPQEVAQTPTVSQNVTPTTPAAGVEDDRVEQVSTQCNERLRSALEDAIREYRFAPLKPKLPRLPMCGKNRALVSALDSLLKTYFESSENLYDTHSILYCGAVAACRVANVRFSNLDAAVRPKPAVPAWQCRIERRISEARVLIGKLSCFREGNTRPRVMRFVRRAFVGTETSPHEYISRVTERIDFLKQKVYAWANRIRRYKKRVERYTQNRMFQRDQRWVYRNWERSNQDVTDGRRPDDEATNTFWRNIWSVPVSHTEDDWICDVERRCETVPEMEEVIITSSDVSSAACSVPNWKSPGPDGLHNFWLKWFTSSHARLASQFQAALEAGSLPQFLTTGVTHLLHKSGSSTEPKNYRPITCLPTVYKLLTSILRTKITKHIEKHSIMSVSQNGCRKGSRGTKELLLIDMVVSQQVRRSRKNLSTCWIDYKKAYDSVPHTWLMRVLELYKIDATLRAFLQSCMRQWSTVLCYPGCRQIQGSEEPVRIVRGIFQGDSLSPLWFCLALNPLSTLLEASGLGYPLRRRGLVISHLLYMDDLKLFAPNNKQLMELLKITEKFSSSIRMEFGVDKCAVMHVKRGGIVESEGLELSDFTKLRTLSANDTYKYLGMSEGLGINGPDMKQSLRERFFGRLNKVLKSSLSGGNKVRAYNGWVMPVLMYSFGILKWTQTELDALDRRVRTLLTANRMHHPRSSIMRLYIPRKCGGRGLLNAKTLHNREVCNLREYFLKVNEGMHREVAAVDNGFTPLSLAKENWRKPVVLSVNDRKEVWHSKELHGRFFRALHGPSVDFLASVSWLRFSNLFGETEGFVCAIMDEVILTNNYRKYIIKDGTVDICRACHSPGESIRHIISGCGRLANGEYLHRHNQVAKIIHQQLALHYQLVEFEVPYYKYVPDPVLENGHITLYWDRSIITDRTIVANKPDIVVIDRQARRAMIVDITIPHDENLVKAEKDKQIKYLDLAHEVVDMWSVDSAIIVPIVVSANGLIPNSLDNHLRRLGLGGWIKGLMQKAVLLETARIVRRFLSLEP

SEQ ID NO: 30296 - protein, 896 aa, Spodoptera frugiperda
MCGKNRALVSALDSLLKTYFESSENLYDTHSILYCGAVAACRVANVRFSNLDAAVRPKPAVPAWQCRIERRISEARVLIGKLSCFREGNTRPRVMRFVRRAFVGTETSPHEYMSRVTERIDFLKQKVYAWANRIRRYKKRVERYTQNRMFQRDQRWVYRNWERSNQDVTDGRRPDDEATNTFWRNIWSVPVSHTEDDWICDVERRCETVPEMEEVIITSSDVSSAACSVPNWKSPGPDGLHNFWLKWFTSSHSRLASQFQAALEAGSLPQFLTTGVTHLLHKSGSSTEPKNYRPITCLPTVYKLLTSILRTKITKHIEKHSIMSVSQNGCRKGSRGTKELLLIDMVVSQQVRRSRKNLSTCWIDYKKAYDSVPHTWLMRVLELYKIDATLRAFLQSCMRQWSTVLCYPGCRQIQGSEEPVRIVRGIFQGDSLSPLWFCLALNPLSTLLEASGLGYPLRRRGLVISHLLYMDDLKLFAPNNKQLMELLKITEKFSSSIRMEFGVDKCAVMHVKRGGIVESEGLELSDFTKLRALSANDTYKYLGMSEGLGINGPDMKQSLRERFFGRLNKVLKSSLSGGNKVRAYNGWVMPVLMYSFGILKWTQTELDTLDRRVRTLLTANRMHHPRSSIMRLYIPRKCGGRGLLNAKTLHNREVCNLREYFLKVNEGMHREVAAVDNGFTPLSLAKENWRKPVVLSVNDRKEVWHSKELHGRFFRALHGPSVDFLASVSWLRFSNLFGETEGFVCAIMDEVILTNNYRKYIIKDGTVDICRACRSPGESIRHIISGCGRLANGEYLHRHNQVAKIIHQQLALHYQLVEFEVPYYKYAPDPVLENGHITLYWDRSIITDRTIVANKPDIVVIDRQARRTMIIDITIPHDENLVKAEKDHHQPRDVHC

SEQ ID NO: 30297 - protein, 1000 aa, Vanessa cardui
MAITTSKYSDQLRSALGDAIREYRNTPAELRPRLPRLPMSKRNRDLVCTLDSLLADYFESSENLEDTHSILFCAAVAACRVAGVTFEDAERATRPKAAAPAWQSRIEKRISETRVLIGKLYCFKEGNTRPRVMRFVGRAFLRTGIGPQEYPSHVVERIDFLKQKVYAWASRIRRYRRRVDRYHLNRKFQSDQRWVYRTWERLDQDVSDGCRPDDDATNTFWRNIWSVPVDHIEGDWMLEVRQACEPLEVMGKISIASEDVAAAVRSVPNWKSPGPDGLHSFWLKWLRSSHECLAFQFQSALESGSLPQFLTTGVTHLLHKSGSATDPKNYRPITCLPTVYKLLTSILRDKINSHIQNNSILSVSQNGCRGGSRGTKELLLIDMTISQQVRRFRKSLSTCWIDYKKAYDSVPHTWLLRVLDLYKLDTTLCSFLRSCMRQWRTVLRYPGCRTIHGDDEPIRIERGIFQGDSLSPLWFCLALNPLSTLLEGSRLGYCLRRGGKVISHLLYMDDLKLFAPSGSQLVELLKVTETFSNSIRMEFGVDKCAVMHVKRGEIMESDGLQNSDSINFKSLSANESYKYLGMSEALGINVTDMKQSLQERFFGRLKKVLKSLLSGGNKVRAFNGWVMPVLMYSFGILKWTQKELDALDRRVRVLLTAYLMHHPRSSVMRLYVPRRYGGRGFLNAKTLHNREVYKLREYFLHTDLDMHRDVVIMDKRLTPLSLGKENWRKPVVLSTENRKEVWKSKELHGRFYRALHGPNEDFMASVSWLRFGNLFGETEGFVCAIMDEVIMTNNYRKYIVRDGTVDICRACHTPGESLRHIISGCSRLANGEYLYRHNQVAKIIHQQLAFRYGLVVSEVPYYRYVPDPVLENGHITLYWDRSIITDRTVVANKPDIVVIDRSERRTIIVDITIPHDENLVKAEKDKQIKYLDLAHEVVDMWDVDTAVIVPIVVSANGLMAKSLDQHLKRLSLGSWVKGLMQKAVLLGTARIVRKFLSLEP

SEQ ID NO: 30298 - protein, 1199 aa, Vanessa cardui
MLTRARQRAHNNPSPDPPLSSASQAQDPAQGNNLMSAAALSSSDEYFSPPTSPTPVRRAGRRRPPTGLGSRGQPVSNGVPASGGGVQRMRWTQSINENVMRAYYGATEGGTNLTAYRVRMLSMFQALEPTINVSAQRLSDQVRVILRNNRLSDTVLDRIRSEQCNGGVTSAPSQPVVQGPLPAIPQGPCHDHDDEGEGDMAITTSKYSDQLRSALEDAIREYRDIPAELRPRLPRLPMTKRNRDLVCTLDSLLADYFESSENLEDTHSILFCAAVAACRVAGVTFEDTERATRPKTVAPAWQSRIEKRINETRVLIGKLCCFKEGNTRPRVMRFVGRAFLGTGISPQEYPSHVVERIDFLKQKVYAWASRIRRYRRRVDRYYLNRMFQSDQRWVYRTWERLDEGVSDGCRPDDDATNTFWRNIWSVPVDHIEGDWMREVRQACEPLEAMGEISIASEDVAAAVRSVPNWKSPGPDGLHSFWLKWLRSSHECLASQFQSALESGSLPQFLTTGVTHLLHKSGSATDPKNYRPITCLPTVYKLLTSILRDKINSHIENNSILSVSQNGCRGGSRGTKELLLIDMTISQQVRRSRKSLSTCWIDYKKAYDSVPHTWLLRVLELYKLDTTLCSFLRSCMGQWRTVLRYPGCRTIHSNDEPIRIERGIFQGDSLSPLWFCLALNPLSTLLESSRLGYRLRRGGKVISHLLYMDDLKLFAPSDSQLVELLKVTETFSNSIRMEFGVDKCAVMHVKRGEIVESDGLQLSDSINFKSLSANESYKYLGMSEALGINVTDMKQSLQERFFGRLKKVLKSLLSGGNKVRAFNGWVMPVLMYSFGILKWTQKELDALDRRVRVLLTTYRMHHPRSSVMRLYIPRRCGGRGFLNAKTLHNREVYKLREYFLHTDLDMHRDVVTIDKGLTPLSLGKENWRKPVVLSTENRKEVWKSKELHGRFYRALHGPDVDFMASVSWLRFGNLFGETEGFVYAIMDEVIMTNNYRKYVVRDGTVDICRACHTPGESLRHIISGCSRLANGEYLHRHNQVAKIIHQQLALRYGLVVSEVPYYRYVPDPVLENGHITLYWDRSIITDRTVVANKPDIVVIDRSERCTIIVDITIPHDENLVKAEKDKQIKYLDLAHEVVDMWDVDTAVIVPIVVSANGLMAKSLDQHLKRLSLGSWVKGLMQKAVLLGTARIVRKFLSLEP

SEQ ID NO: 30299 - protein, 962 aa, Vanessa cardui
MTKRNRDLVCTLDSLLADYFESSENLEDTHSILFCAAVAACRVAGVTFEDTERATRPKAVAPAWQSRIEKRINETRVLIGKLYCFKEGNTRPRVMRFVGRAFLGTGISPQEYPSHVVERIDFLKQKVYAWASRIRRYRRRVDRYHLNRKFQSDQRWVYRTWERLDQDVSDGCRPDDDATNTFWRNIWSVPVDHIEGDWMLEVRQACEPLEVMGKISIASEDVAAAVRSVANWKSPGPDGLHNFWLKWLRSSHECLASQFQSALESGSLPQFLTTGVTHLLHKSGSAMDPKNYRPITCLPTVYKLLTAILRDKINSHIQNNIILSVSQNGCRGGSRGTKELLLIDMTISQQVRRSRKSLSTCWIDYKKAYDSVPHTWLLRVLELYKLDTTLCSFLRSCMGQWRTVLRYPGCRTIHGNDEPIRIERGIFQGDSLSPLWFCLALNPLSTLLESSRLGYRLRRGGKVISHLLYMDDLKLFAPSDSQLMELLKVTETFSNSIRMEFGVDKCAVMHVKRGEIMESDGLQLSDSINFKSLSANESYKYLGMSEALGINVTDMKQSLQERFFGRLKKVLKSLLSGGNKVRAFNGWVMPVLMYSFGILKWTQKELDALDRKVRVLLTAYRMHHPRSSVMRLYIPRRCGGRGFLNAKTLHNREVYKLREYFLHTDLDMHRDVVTMDKGLTPLSLGKENWHKPVVLSTENRKEVWKSKELHGRFYRALHGPDVDFMASVSWLRFGNLFGETEGFVCAIMDEVIMTNNYRRYIVRDGTVDICRACHTPGESLRHIISGCSRLANGEYLHRHNQVAKIIHQQLALRYGLVVSEVPYYKYVPDPVLENGHITLYWDRSIITDRTVVANKPDIVVIDRSERRTIIVDITIPHDENLVKAEKDKQIKYLDLAHEVVDMWDVDTAVIVPIVVSANGLMAKSLDQHLKRLSLDSWVKGLMQKAVLLGTARILRKFLSLEP

SEQ ID NO: 30300 - protein, 1198 aa, Schrankia costaestrigalis
MITRAASRRALLTPPDSSLSSASQTVQNVPDSVEASSSSSSDEFFSPPSSPTPVLRRGRGRPPIGLGSRAPQASNRVPAAGGNVHRMKWTSSINENVMRAYFVATEGGTNLTAYRDRMLSLFQELEPAVNVSTQRLSDQVRAIQRCHLLNDTVLDRIRSDILSNLTISTPPSVTTQVNTTIPLSQPTELNSFETIDCEVTNVSIQYNDQLRSSLECAIREYRFMDPGRRPRIPRLPTHKQNIALVCALDSLLLNYFDNSENLGDAHSILYCGAVAACRVAHIKFPVDDIATRLRPTVPAWQCRIERRIAEARALIGKLICFRSGNTRPRVMRFVTRAFSETNIDRRDYMLHVTERIDFLKQKVYAWANRIKRFKKRMERYTQNRAFQKDERWVYRNWERPVLGSVDMQLPDADATNDFWRSIWSVPVNHTEGAWIGDVEKACEHIHQMEPVVITTEDVTCAVRRLPNWKSAGPDGLHNFWLKWLHSSHACLASHFQSSLETGTLPDFITTGVTHLLYKSGSSTDPKNYRPITCLPTIYKLLTSILRKKISLHIQENSIMCISQNGCRNEARGTKEQLLIDTTISEQVRRNRKDLSTCWIDYKKAYDSVPHTWLLRVLELYKIDATLCTFLRTCMTKWNTVLFYSGCRLGLGNEVPIQIKRGIFQGDSLSPLWFCLALNPLSTLLECSGLGYRLKRHGQVISHLLYMDDLKLFAPTKSQLLVLLKETETFSNSIKMEFGVDKCAVMHVKRGKVVESDELQLSDTIKLRCLSPSDTYKYLGMSQALCITETDMKQQLRDRFFARLKKVLNSLLTGGNKVRAYNSWVMPVLMYSFGILKWTQTELEALDRKVRTLLTAHRMHHPRSSVMRLYIPRKSGGRGYLSAKTLHNREVYNLREYFLTVDADIHRDVVSVDVGLTPLSLGKENWRKPIIQTIDDRKEIWKSKELHGRFYRALNRPDVDTLSSVSWLRFGDLFGETEGFVFAIMDEVVMTKNYRKYILKDGTVDICRACHCPGESLRHIVSSCSRLANGEYLHRHNQVARIVHQQLALKYHLVDAEVPYYKYVPDPVLENSSVTLYWDRSIITDRIIVANKPDIVVIDRSERRAMIIDITIPHDENLVKAEKDKQTKYLDLAHEVVDMWNVDSAIIVPIVLSVNGLIPKSLYQHLRRLSLDSWIIGLMQKAVLLDTARIVRRFLSLEP

SEQ ID NO: 30301 - protein, 1191 aa, Trichoplusia ni
MLTRRRAARLPSPGSSPSSASQLPPGRGPAPAVAVASSSSDEYYSPPTSPTPVRRPGRRRPPSSLAPSGQPASNRAPAPGGVVQRMKWTRPMNENVMRAYYGATGGGTNLTAYRAKMLSLFRTLEPDVDVSAQRLSDQVRVIQRNHRLDDATLDRLRSEVQTSPVVVTPSIAEAPAASALPANPADGGDDDGAITVSTQCSDHIRSTLEQAVLEYRSTPRDQRPRLPRLPMHNRNKALMGVLDSLLSSYFGNSEDLGDTHSLLYCAAVAACRVAGVTFRDNTAARPKQAAPAWQCRIEKRVAEARTLIAKLVAFRGGNTRPRVMRFVKRAFAGTNISPSEYTARVTERIDFFKQKVCAWASRIRRYKTRVDRFHQNRMFQRDQRWVYRSWEQPASEEGAGRLPDDVATNLFWRSIWSAPVTHSEGDWIRDVEQSCERIEEMGAIDISPQDVANAVRPLANWKAPGPDGLHNFWLKWLPSSHGCLASQFQSAVDSGVLPQFFTTGSTHLLHKTGSTTDPKNYRPITCLPTIYKLLTSILREKINDHIERFSIMSASQNGCRNGSRGTKELLLIDMTICQQVRRSKKGVSTCWIDYKKAYDSVPHAWLMRVLELYKINTTLRTFLKSCMGQWTTVLHYPGCRDIQKSGQLIRIERGIFQGDSLSPLWFCLALNPLSTLLENSRLGYSLRRGSQVISHLLYMDDLKLFASNKLQLMKLLKITESFSNSIRMEFGVDKCAVMHVKRGGIVESQGIQLSDSINLRSLSSTETYKYLGMSEALGINVADMKQSLQTRFFGRLNKVLKSSLSGGNKVRAFNGWVMPVIMYSFGILKWTQTELDALDRRVRTLLTANRMHHPRSSVMRLYIPRKCGGRGFLNAKTLHNREVCNLREYFLRVNVRMHRDVVAVDKAFTPLSLGKENWHKPVVMSVKDRKDVWQSKELHGRYYRTLHGADVDFLASVAWLRFGDLFGETEGFVCAIMDEVIMTNNYRKYIIKDGTVDICRACHSSGESLRHIVSGCSRLANGEYLHRHNQVARIIHQQLALKYKLVESEVPYYKYVPDPVLESGHITLYWDRSIITDRTIVANKPDIVVIDRSERRTMIVDITIPHDENLVKAEKEKQLKYLDLAHEVVDLWEVDSAIIVPIVVSANGLIAKSLDQHLRRLSLGVWVKGLIQKAVLLDTARIVRRFLSLEP

SEQ ID NO: 30302 - protein, 1199 aa, Spodoptera exigua
MLTRAKARARAAPPPSPDSSLSSASPSPETRTTRSPVIAVASSSSDEYFSPLASPGPERRQRRGRPPMGLGTRGQRAPGRVPATGGCARRMKWSQSMNENVMRAYYGATEGGTNLTAYRDRMLSLFQVLEPSVNVSAQRLSDQVRVIQCSRRLDDAALDRLRLETQHNRVVLTSSQSATQTPVENATLATPVADVEDDKVEQVSTQCNERLRNALEDAIHEYRFAPSELRPKLPRLPMCGKNRALVCALDSLLENYFESSENLYDTHSILYCGAIAACRVANVRFPNLDAAVRPKPAAPAWQCRIERRIDEARVLIGKLTCFREGNNRPRVMRFVRRAFVGTETSPHEYLTRVTERIDFLKQKIYAWANRIRRYKKRVERYTQNRMFQSDQRWVYRDWERSSQDVVNGQRPDDETTNSFWRNIWSVPVNHTEADWMCDVKRECETLPEMEKVVITSSDVANAACSVPNWKSPGPDGLHNFWLKSFSSTHDRLASQFQMALEAGSLPQFLTTGITHLLHKSGSYTEPKNYRPITCLPTVYKLFTSILRAKITKHIEKNSIMSVSQNGCRKGSRGTKELLLIDMVISQQVRRSRKDLSTCWIDYKKAYDSVPHTWLMRVLELYKINTTLRTFLQSCMRQWSTVLSYPGCKQIQRSEEPVRIVRGIFQGDSLSPLWFCLALNPLSTLLEASGLGYRLRRKGHVISHLLYMDDLKLFAPNKEELMELLKITKNFSSSIRMEFGVDKCAVMHVKRGGIVESESLELSDFTKLRSLSANDTYKYLGMSEGLGINGPHMKQSLQERFFGRLNKVLKSSLSGGNKVRAFNGWVMPVLMYSFGILKWTQTELDTLDRRVRTLLTANRMHHPRSSVMRLYIPRKRGGRGFLNAKTLHNRDVCNLREHFLKVDEDMHREVVTVDKGFTPLSLAKENWCKPVVLSVNDRKTVWSSKELHGRFFRALHGPDVDFLASVAWLRFSNLFGETEGFVCAIMDEVILTNNYRKYIMKDGTVDICRACHSPGESIRHIISGCGRLANGEYLHRHNQVAKIIHQQLALKYRLVESEVPYYKYVPDPVLEKDHITLYWDRSIITDRTIVANKPDIVLVDRLARRTTIIDVAIPHDENLVKAEKDKQLKYLDLAHEVVDMWSVDSAIVVPIVVSANGLVPKSLDKHLKRLTLGGWIKGLIQKAVLLETARIVRRFLSLEP

SEQ ID NO: 30303 - protein, 1196 aa, Spodoptera frugiperda
MLTRARRTRGAPPPSPDSSLSSASPSPEPNHEPVTAVASSSSDEYFSPPTSPPPVRRPRRGRPPTGLGARGQQTPGRVPAAGGCARRMKWTQTINENVMRAYYGATEGGTNLTAYRERMLSMFQVLEPSVNVSAQRLSDQVRVIQRNRRLDEAALDRLRSEALRNRVVPAPPQEVAQIPTVSQNVTPTTPAAGVEDDRVEQVSTQCNERLRSALEDAIREYRFAPLKPKLPRLPMCGRNRALVSALDSLLKTYFESSENLYDTHSILYCGAVAACRVANVRFSNLDAAVRPKPAVPAWQCRIERRISEARVLIGKLSCFRDGNTRPRVMRFVRRAFVGTETSPHEYMSRVTERIDFLKQKIYAWANRIRRYKKRVERYTQNRMFQRDQRWVYRNWERSNQDVTDGRRPDDEATNTFWRNIWSVPVSHTEDDWICDVERRCETVPEMEEVIITSSDVSSAACSVPNWKSPGPDGLHNFWLKWFTSSHARLASQFQAALEAGSLPQFLTTGVTHLLHKSGSSTEPKNYRPITCLPTVYKLLTSILRTKITKHIEKHSIMSVSQNGCRKGSRGTKELLLTDMVVSQQVRRSRKNLSTCWIDYKKAYDSVPHTWLMRVLELYKIDATLRAFLQSCMRQWSTVLCYPGCRQIQGSEEPVRIVRGIFQGDSLSPLWFCLALNPLSTLLEASGLGYPLRRRGLVISHLLYMDDLKLFAPNNKQLMELLKITEKFSSSIRMEFGVDKCAVMHVKRGGIVESEGLELSDFTKLRALSANDTYKYLGMSEGLGINGPDMKQSLRERFFGRLNKVLKSSLSGGNKVRAYNGWVMPVLMYSFGILKWTQTELDTLDRRVRTLLTANRMHHPRSSIMRLYIPRKCGGRGLLNAKTLHNREVCNLREYFLKVNEGMHREVAAMDNGFTPLSLAKENWRKPVVLSVNDRKEVWHSKELHGRFFRALHGPSVDFLASVSWLRFSNLFGETEGFIFAIMDEVILTNNYRKYIIKDGTVDICRACHSPGESIRHIISGCGRLANGEYLHRHNQVAKIIHQQLALHYQLVEFEVPYYKYAPDPVLENGHITLYWDRSIITDRTIVANKPDIVVIDRQARRTMIIDITIPHDENLVKAEKDKQIKYLDLAHEVVDMWNVDSAIVVPIVVSANGLIPNSLDNHLRRLGLGGWIKGLMQKAVLLETARIVRRFLSLEP

SEQ ID NO: 30304 - protein, 1201 aa, Spodoptera litura
MMLTRARSKQGAPPPPPDSSLSSASPSPDPSPAGSPVTAVASSSSDDYFSPPTSPTPVRRPGRGRPPTGLGARGQQAPGRVPATGGCVRRMKWSQTINENVMRSYYGATEGGTNLTAYRERMLSIFQVLEPSINVSAQRLSDQVRVIQRNRRLDEAALDRLRLEALRNRVVPAPPQSVAQTPIVSQCVTPTTPIVGVEDDRVEQVSTQCNERLRSALEDAVREYRLAPSNLRPKLPRLPMCRKNRALVSALDSLLKKYFESSENLYDTHSILYCGAVAACRVANVRFPNLDAAVRPKPAVPAWQYRIERRISEARVLIGKLSCFREGNTRPRVMRFVRRAFVGTETSPHEYLSRVTERIDFLKQKVYAWANRIRRYKKRVERYTQNRMFQRDQRWVYRDWERSNQDVVDGRRPDDDATSTFWRNIWSVPVSHTEGDWMFDVKRRCETIPEMEEVEITSSDVASAACSVPNWKSPGPDGLHNFWIKWFKSSHVRLALHFQAALETGSLPQFLTTGVTHLLHKSGSSTEPKNYRPITCLPTVYKLLTSILRTKITKHIKKNSIMSVSQNGCREGSRGTKELLLIDMVVSQQVRRSRKDLSTCWIDYKKAYDSVPHTWLLKVLELYKIHASLRAFLESCMRQWSTVLCYPGCRQIQGNEEPVRIVRGIFQGDSLSPLWFCLALNPLSTLLEDSGLGYPLRRRGLVISHLLYMDDLKLFAPNKKQLMELLNITEKFSSSIRMEFGVDKCAVMHVKRGGIVESEGLELSDFTKLRSLSANDTYKYLGMSEGLGINGPDMKQSLQERFFGRLNRVLKSSLSGGNKVRAFNGWVMPVLMYSFGILKWTQTELDTLDRRVRTLLTANRMHHPRSSVMRLYIPRKCGGRGLLNAKTLHNREVCNLREYFLKVNEGMHREVAAVDNGFTPLSLAKENWRKPVVLSVNDRKEVWHSKELHGRFFRALHGPNVDFLASVSWLRFSNLFGETEGFVCAIMDEVILTNNYRKYIIKDGTVDICRACHSPGESIRHIISGCGRLANSEYLHRHNQVAKIIHQQLALHYRLVESEVPYYKYVPDPVLENDHITLYWDRSIITDRTIVANKPDIVVIDRQVRRTMIIDVTIPHDENFVKAEKDKQIKYLDLAHEVVDMWSVDSAIIVPIVVSANGLIPKSLDIHLRRLALGGWIKGLIQKAVLLETARIVRRFLSLEP

SEQ ID NO: 30305 - protein, 1192 aa, Eilema sororculum
MLTRAQAKRNGSAPITSPDSSLSSAAQPPTVEPAASSSSSSDEFFSPPTSPTPVRRPGRGRPPTCLGPRRPPASNGAPATGGDVHRMRWTNSINENVMRAYFAATEGGTNLSAYRTRMLPLFQALEPSINVSAQRLSDQVRVIQRNRMLNETVLETLRLECLRNICVTPAPVPVPASTVELNDDTCVAPDDTPIPVSIQYNEEIKEALECALREYRSMPVHVRPRLPRLPIHRRNIALVSALDSLLPRYLENSENLGDTHSILYCTAVAACRMAGAKFPIKDPAIRPKSAIPAWQCRIERRVTEARVLIGKLICFRSGNTRPRVMRYVTRAFAGTDISPQDYTSRVTERIDFLKQKVYAWANRIRRYKKRVDRYTVNRMFQRDQRWVYRSWERTEESVDDVRRPDAEVTNAFWRSIWSVPVSHTEGDWMHEVKRACETIPEMEEINIDAIDVDCAVRSLSNWKSPGPDGLHNFWLKWLRSSHVVLASQFQSAVESGTLPAFMTTGVTHLLHKTGSTLEPNNYRPITCLPTVYKLLTSILRAKINNHINNNSIMCASQNGCRNGARGTKELLLIDMAISQQARRNRKDLTACWIDYKKAFDSVPHTWLLRVLELYKVNTTLCTFLRSCMGQWRTVLFYPGCRQPLGGGVPITIERGIFQGDSLSPLWFCLALNPLSTLLVNSGLGYRLRREGQMVSHLFYMDDLKLFAHTNPQLITLLKITETFSNSIKMAFGVDKCAVIHVKRGRVVESEGIQLSDSTNLRSLLVTETYKYLGMSQALCINEVDMKQMLQERFFGRLKKVLNSLLSGGNKVRACNSWVMPLLMYSFGILKWTQTELDTIDRKVRTQLTAFRMHHPRSSVMRLYIPRKCGGRGFLNAKTLHNREVCNLRDYFLKSNVDMHRDVVNVDTGLTPLGLAKKNWRRPTIVSTDSRREVWQSKELHGRFYRALHRPEVDLLASVSWLRFSDLFGETEGFVCAIADEVIKTNNYRKYIMRDGTIDICRACHQPGESLRHITSGCSRLANGEYLHRHNQVARIIHQRLALKYNLVEFEVPYYRYVPEPVLENTHITLYWDRSIITDRTVVANKPDIVVIDRSERRALIVDVTIPHDENLVKAEKDKQVKYLDLAHEVVDMWSVDSAIIVPIVVSVNGLIAKSLDQHLKRLGLDGWVKGQMQKAVLLDTARIVRKFLSLEP

SEQ ID NO: 30306 - protein, 1192 aa, Eilema sororculum
MLTRAQAKRNGSAPITSPDSSLSSAAQPPAVEPAASSSSSSDEFFSPPTSPTPVRRPGRGRPPTCLGPRRPPASNGAPATGGDVHRMRWTNSINENVMRAYFAATEGGTNLSAYRTRMLPLFQALEPSINVSAQRLSDQVRVIQRNRMLNETVLETLRLECLRNICVTPAPVPVPASTVELNDDTCVAPDDTPIPVSIQYNEEIKEALECALREYRSMPVHVRPRLPRLPIHRRNIALVSALDSLLPRYLENSENLGDTHSILYCTAVAACRMAGAKFPIKDPAIRPKSAIPAWQCRIERRVTEARVLIGKLICFRSGNTRPRVMRYVTRAFAGTDISPQDYTSRVTERIDFLKQKVYAWANRIRRYKKRVDRYTVNRMFQRDQRWVYRSWERTEESVDDVRRPDAEVTNAFWRSIWSVPVSHTEGDWMHEVKRACETIPEMEEINIDAIDVDCAVRSLSNWKSPGPDGLHNFWLKWLRSSHVVLASQFQSAVESGTLPAFMTTGVTHLLHKTGSTLEPNNYRPITCLPTVYKLLTSILRAKINNHINNNSIMCASQNGCRNGARGTKELLLIDMAISQQARRNRKDLTACWIDYKKAFDSVPHTWLLRVLELYKVNTTLCTFLRSCMGQWRTVLFYPGCRQALGGGVPITIERGIFQGDSLSPLWFCLALNPLSTLLVNSGLGYRLRREGQMVSHLFYMDDLKLFAHTNPQLITLLKITETFSNSIKMAFGVDKCAVIHVKRGRVVESEGIQLSDSTNLRSLLVTETYKYLGMSQALCINEVDMKQMLQERFFGRLKKVLNSLLSGGNKVRACNSWVMPLLMYSFGILKWTQTELDTIDRKVRTQLTAFRMHHPRSSVMRLYIPRKCGGRGFLNTKTLHNREVCNLRDYFLKSNVDMHRDVVNVDTGLTPLGLAKENWRRPTIVSTDSRREVWQSKELHGRFYRALHRPEVDLLASVSWLRFSDLFGETEGFVCAIADEVIKTNNYRKYIMRDGTIDICRACHQPGESLRHITSGCSRLANGEYLHRHNQVARIIHQRLALKYNLVEFEVPYYRYVPEPVLENTHITLYWDRSIITDRTVVANKPDIVVIDRSERRALIVDVTIPHDENLVKAEKDKQVKYLDLAHEVVDMWSVDSAIIVPIVVSVNGLIAKSLDQHLKRLGLDGWVKGQMQKAVLLDTARIVRKFLSLEP

SEQ ID NO: 30307 - protein, 1109 aa, Vanessa cardui
MRWTQPINENVMRAYYGATKGGTNLTAYRVRMLSLFQALEPAVNVSAQRLSDQVRVILRNNRLSDIVLDRIRSEKCNSDVTSGPSTPVVEEPLPAIPQGPEHDDEGGGDMAITKSKYSDHLRSALGDAIREYRNTPAELRPRLPRLPMTKRNRDLVCTLDSLLADYFESSENLEDTHSILFCAAVAACRVAGVTFEDTERATRPKAVAPAWQSRIEKRINETRVLIGKLYCFKEGNTRPRVMRFVGRAFLGTGISPQEYPSHVVERIDFLKQKVYAWASRIRRYRRRVDRYHLNRKFQSDQRWVYRTWERLDQDVSDGCRPDDDATNTFWRNIWSVPVDHIEGDWMLEVRQACEPLEVMGKISIASEDVAAAVRSVANWKSPGPDGLHNFWLKWLRSSHECLASQFQSALESGSLPQFLTTGVTHLLHKSGSATDPKNYRPITCLPTVYKLLTAILRDKINSHIQNNSILSVSQNGCRGGSRGTKELLLIDMTISQQVRRSRKSLSTCWIDYKKAYDSVPHTWLLRVLELYKLDTTLCSFLRSCMGQWRTVLRYPGCRTIHGNDGPIKIERGIFQGDSLSPLWFCLALNPLSTLLESSRLGYRLRRGGKVISHLLYMDDLKLFAPSDSQLMELLKVTETFSNSIRMEFGVDKCAVMHVKRGEIMESDGLQLSDSINFKSLSANESYKYLGMSEALGINVTDMKQSLQERFFGRLKKVLKSLLSGGNKVRAFNGWVMPVLMYSFGILKWTQKELDALDRKVRVLLTAYRMHHPRSSVMRLYIPRRCGGRGFLNAKTLHNREVYKLREYFLHTDLDMHRDVVTMDKGLTPLSLGKENWHKPVVLSTENRKEVWKSKELHGRFYRALNGPDVDFMASVSWLRFGNLFGETEGFVCAIMDEVIMTNNYRRYIVRDGTVDICRACHTPGESLRHIISGCSRLANGEYLHRHNQVAKIIHQQLALRYGLVVSEVPYYKYVPDPVLENGHITLYWDRSIITDRTVVANKPDIVVIDRSERCTIIVDITIPHDENLVKAEKDKQIKYLDLAHEVVDMWDVDTAVIVPIVVSANGLMAKSLDQHLKRLSLDSWVKGLMQKAVLLGTARIVRKFLSLEP

SEQ ID NO: 30308 - protein, 1197 aa, Vanessa cardui
MLTRARQQAHKNPSPDPPLSSVSQAQDPAQGNNMMSATASSSSDEYFSPPTSPTPVRRAGRRRPPTGLGARGQPVSNGIPASGGGVQRMRWTQSINENVMRAYYGATEGGTNLTAYRVRMLSLFQALEPAINVSAQRLSDQVRVILRNNRLSDTVLDRIRSEKCNGGVTSAPSQPVVQGPLPATPQGPDHDDEGEGDMAIATSKYSDQLRSALKDAIREYRNIPAELRPRLPRLPMTKRNRDLVCTLDSLLSDYFESSENLEDTHSILFCAAVAACRVAGVTFEDTERATRPKTVAPAWQSRIEKRINETRVLIGKLCCFKEGNTRPRVMRFVERAFLGTGISPQEYPSHVVERIDFLKQKVYAWASRIRRYRRRVDRYYLNRMFQSDQRWVYRTWERLDQGVSDGCRPDDDATNTFWRNIWSVPVDHIEGDWMREVRQACEPLEAMGEISIASEDVAAAVRSVPNWKSPGPDGLHSFWLKWLRSSHECLASQFQSALESGSLPQFLTTGVTHLLHKSGSATDPKNYRPITCLPTVYKLLTSILRDKINSHIENNNILFVSQNGCRGGSRGTKELLLIDMTISQQVRRSRKSLSTCWIDYKKAYDSVPHTWLLRVLELYKLDTTLCSFLRSCMGQWRTVLRYPGCRTIHSNDEPIRIERGIFQGDSLSPLWFCLALNPLSTLLESSRLGYRLRRGGKVISHLLYMDDLKLFAPSDSQLVELLKVTETFSNSIGMEFGVEKCAVMHVKRGEIVESDGLQLSDSINFKSLSANESYKYLGMSEALGINVTDMKQSLQERFFGRLKKVLKSLLSGGNKVRAFNGWVMPVLMYSFGILKWTQKELDALDRRVRVLLTAYRMHHPRSSVMRLYIPRRCGGRGFLNAKTLHNREVYKLREYFLHTDLDMHRDVVTIDKGLTPLSLGKENWRKPVVLSTENRKEVWKSKELHGRFYRALHGPDVDFMASVSWLRFGNLFGETEGFVCAIMDEVIMTNNYRKYIVRDGTVDICRACHTPGESLRHIISGCSRLANGEYLHRHNQVAKIIHQQLALRYGLVVSEVPYYRYVPDPVLENGHITLYWDRSIITDRTVVANKPDIVVIDRSERRTIIVDITIPHDENLVKAEKDKQIKYLDLAHEVVDMWDVDTAVIVPIVVSANGLMAKSLDQHLKRLSLGSWVKGLMQKAVLLGTSRIVRKFLSLEP

SEQ ID NO: 30309 - protein, 1197 aa, Vanessa cardui
MLTRARQQAHNNPSPDPPLSSASQAQDPAQGSSLVSAAASSSSDEYFSPPTSPTPVRRAGRRRPPTGLGARGQPVSNRVPASGGGVQRMRWTQPINENVMRAYYGATKGGTNLTAYRVRMLSLFQALEPAVNVSAQRLSDQVRVILRNNRLSDTVLDRIRSETCNSDVTSGPSTPVVEEPLPAIPQGPEHDDEGGGDMAITKSKYSDHLRSALGDAIREYRNTPAELRPRLPRLPMTKRNRDLVCTLDSLLADYFESSENLEDTHSILFCAAVAACRVAGVTFEDTERATRPKAVAPAWQSRIEKRINETRVLIGKLYCFKEGNTRPRVMRFVGRAFLGTGISPQEYPSHVVERIDFLKQKVYAWASRIRRYRRRVDRYHLNRKFQSDQRWVYRTWERLDQDVSDGCRPDDDATNTFWRNIWSVPVDHIEGDWMLEVRQACEPLEVMGKISIASEDVAAAVRSVANWKSPGPDGLHNFWLKWLRSSHECLASQFQSALESGSLPQFLTTGVTHLLHKSGSATDPKNYRPITCLPTVYKLLTAILRDKINSHIQNNSILSVSQNGCRGGSRGTKELLLIDMTISQQVRRSRKSLSTCWIDYKKAYDSVPHTWLLRVLELYKLDTTLCSFLRSCMGQWRTVLRYPGCRTIHGNDEPIRIERGIFQGDSLSLLWFCLALNPLSTLLESSRLGYRLRRGGKVISHLLYMDDLKLFAPSDSQLMELLKVTETFSNSIRMEFGVDKCAVMHVKREEIMESDGLQLSDSINFKSLSANESYKYLGMSEALGINVTDMKQSLQERFFGRLKKVLKSLLSGGNKVRAFNGWVMPVLMYSFGILKWTQKELDALDRKVRVLLTAYRMHHPRSSVMRLYIPRRCGGRGFLNAKTLHNREVYKLREYFLHTDLDMHRDVVTMDKGLTPLSLGKENWHKPIVLSTENRKEVWKSKELHGRFYRALHGPDVDFMASVSWLRFGNLFGETEGFVCAIMDEVIMTNNYRRYIVRDGTVDICRACHTPGESLRHIISGCSRLANGEYLHRHNQVAKIIHQQLALRYGLVVSEVPYYKYVPDPVLENGHITLYWDRSIITDRTVVANKPDIVVIDRSERRTIIVDITIPHDENLVKAEKDKQIKYLDLAHEVVDMWDVDTAVIVPIVVSANGLMAKSLDQHLKRLSLDSWVKGLMQKAVLLGTARIVRKFLSLEP

SEQ ID NO: 30310 - protein, 975 aa, Schrankia costaestrigalis
MDPGRRPRIPRLPTHKQNIALVCALDSLLLNYFDNSENLGDAHSILYCGAVAACRVAHIKFPVDDIATRLRPTVPAWQCRIERRIAEARALIGKLICFRSGNTRPRVMRFVTRAFSETNIDRRDYMLHVTERIDFLKQKVYAWANRIKRFKKRMERYTQNRAFQKDERWVYRNWERPVLGSVDMQLPDADATNDFWRSIWSVPVNHTEGAWIGDVEKACEHIHQMEPVVITTEDVTCAVRRLPNWKSAGPDGLHNFWLKWLHSSHACLASHFQSSLETGTLPDFITTGVTHLLYKSGSSTDPKNYRPITCLPTIYKLLTSILRKKISLHIQENSIMCISQNGCRNEARGTKEQLLIDTTISEQVRRNRKDLSTCWIDYKKAYDSVPHTWLLRVLELYKIDATLCTFLRTCMTKWNTVLFYSGCRLGLGNEVPIQIKRGIFQGDSLSPLWFCLALNPLSTLLECSGLGYRLKRHGQVISHLLYMDDLKLFAPTKSQLLVLLKETETFSNSIKMEFGVDKCAVMHVKRGKVVESDELQLSDSIKLRCLSPSDTYKYLGMSQALCITETDMKQQLRDRFFARLKKVLNSLLTGGNKVRAYNSWVMPVLLYSFGILKWTQTELEALDRKVRTLLTAHRMHHPRSSVMRLYIPRKSGGRGYLSAKTLHNREVYNLREYFLTVDADIHRDVVSVDVGLTPLSLGKENWRKPIIQTIDDRKEIWKSKELHGRFYRALNGPDVDTLSSVSWLRFGDLFGETEGFVFAIMDEVVMTKNYRKYILKDGTVDICRACHCPGESLRHIVSSCSRLANGEYLHRHNQVARIVHQQLALKYHLVDAEVPYYKYVPDPVLENSSVTLYWDRSIITDRTIVANKPDIVVIDRSERRAMIIDITIPHDENLVKAEKDKQTKYLDLAHEVVDMWNVDSAIIVPIVLSVNGLIPKSLYQHLRRLSLNSWIIGLMQKAVLLDTARIVRRFLSLEP

SEQ ID NO: 30311 - protein, 1191 aa, Trichoplusia ni
MLTRRRAARLPSPGSSPSSASQLPPGRGPAPAVAVASSSSDEYYSPPTSPTPVRRPGRRRPPSSLAPSGQPASNRAPAPGGVVQRMKWTRPMNENVMRAYYGATGGGTNLTAYRARMLSLFRALEPDVDVSAQRLSDQVRVIQRNHRLDDATLDRLRSEVQTSPVVVTPSIAEAPAASALPANPADGGDDDGAITVSTQCSDHIRSTLEQAVLEYRSTPRDQRPRLPRLPMHNRNKALMGVLDSLLSSYFGNSEDLGDTHSLLYCAAVAACRVAGVTFRDNTAARPKQAAPAWQCRIEKRVAEARTLIAKLVAFRGGNTRPRVMRFVKRAFTGTNISPSEYTARVTERIDFFKQKVCAWASRIRRYKTRVDRFHQNRMFQRDQRWVYRSWEQPASEEGAGRLPDDVATNLFWRSIWLAPVTHSEGDWIRDVEQSCERIEEMGAIDISPQDVANAVRPLANWKAPGPDGLHNFWLKWLPSSHGCLASQFQSAVDSGVLPQFFTTGSTHLLHKTGSTTDPKNYRPITCLPTIYKLLTSILREKINDHIERFSIMSASQNGCRNGSRGTKELLLIDMTICQQVRRSKKGVSTCWIDYKKAYDSVPHAWLMRVLELYKINTTLRTFLKSCMGQWTTVLHYPGCRDIQKSGQLIRIERGIFQGDSLSPLWFCLALNPLSTLLENSRLGYSLRRGSQVISHLLYMDDLKLFASNKLQLMKLLKITESFSNSIRMEFGVDKCAVMHVKRGGIVESQGIQLSDSINLRSLSSTETYKYLGMSEALGINVADMKQSLQTRFFGRLNKVLKSSLSGGNKVRAFNGWVMPVIMYSFGILKWTQTELDALDRRVRTLLTANRMHHPRSSVMRLYIPRKCGGRGFLNAKTLHNREVCNLREYFLRVDVGMHRDVVAVDKGFTPLFLGKENWHKPIVLSVKDRKDVWQSKELHGRYYRTLHGADVDFLASVAWLRFGDLFGETEGFVCAIMDEVIMTNNYRKYIIKDGTVDICRACHCPGESLRHIVSGCSRLANGEYLHRHNQVARIIHQQLALKYKLVESEVPYYKYVPDPVLESGHITLYWDRSIITDRTIVANKPDIVVIDRSERRTMIVDITIPHDENLVKAEKEKQLKYLDLAHEVVDLWEVDSAIIVPIVVSANGLIAKSLDQHLRRLSLGVWVKGLIQKAVLLDTARIVRRFLSLEP

SEQ ID NO: 30312 - protein, 1200 aa, Spodoptera exigua
MLTRSKARARGASPPSPDSSLSSASPSPETRTTRSPVVAVASSSSDEYLSPLASPVPVRRQRRGRPPMGLGTRGQRAPGRVPAAGGCARRMKWSQAINENVMRAYYGATEGGTNLTAYRDRMLSLFQVLEPSVNVSAQRLSDQVRVIQRSRRLDDAALDRLRLETLHNRVVLTSSQPATKTRPVENATLATPVAAVEDDKVEQVSTQCNEILRNALEDAIHEYRFAPSELRPRLPRLPMCGKNRALVCALDSLLENYFESSENLYDTHSILYCGAIAACRVANVRFPNLDAAVRPKPAAPAWQCRIERRIDETRVLIGKLICFREGNNRPRVMRFVRRAFVRTETSPHEYLTRVTERIDFLKQKIYAWANRIRRYKKRVERYTQNRMFQSDQRWVYRDWERSSQDVVNGRHPDDETTNSFWRNIWSVPVNHTEADWMCDVKRECETLPEMEEVVITSSDVANAACSVPNWKSPGPDGLHNFWLKSFTSSHDRLASQFQMALEAGSLPQFLTTGITHLLHKSGSYTEPKNYRPITCLPTVYKLFTSILRAKITKHIEKNSIMSVSQNGCRKGSRGTKELLLIDMVISQQVRRSRKDLSTCWIDYKKAYDSVPHTWLMRVLELYKINTTLRTFLQSCMRQWSTVLSYPGCKQIQRSEEPVRIVRGIFQGDSLSPLWFCLALNPLSTLLEASGLGYRLRRKGHVISHLLYMDDLKLFAPNKEELMELLKITKNFSSSIRMEFGVDKCAVMHVKRGGIVESESLELSDFTKLRSLSANDTYKYLGMSEGLGINGPHMKQSLQERFFGRLNKVLKSSLSGGNKVRAFNGWVMPVLMYSFGILKWTQTELDTLDRRVRTLLTANRMHHPRSSVMRLYIPRKCGGRGFLNAKTLHNREVCNLREHFLKVDEDMHREVVTVDKGFTPLSLAKENWCKPVVLSVNDRKAVWSSKELHGRFFRALHGPDIDFLASVAWLRFSNLFGETEEFVCAIMDEVILTNNYRKYIMKDGTVDICRACHSSGESIRHIISGCGRLANGEYLHRHNQVAKIIHQQLALKYRLVESEVPYYKYVPDPVLEKDHITLYWDRSIITDRTIVANKPDIVVVDRLARRTTIIDVAIPHDENLVKAEKDKQLKYLDLAHEVVDMWNVDSAIVVPIVVSANGLVPKSLDNHLKRLTLGGWIKGLIQKAVLLETARIVRRFLSLEP

SEQ ID NO: 30313 - protein, 1197 aa, Vanessa cardui
MLTRARKRAHNYPSPDPPLSSASQAQESAQGSSLVSAAASSSSDEYFSPPTSPTPVRRARRRRPPTGLGARGQPVSNRVPASGGGVQRMRWTQSINENVMRAYYGATEGGTNLTAYRVRMLSLFQALEPAINVSAQRLSDQVRVILRNNRLSDTVLDRIRSETCNSGVTSGPSTPVVEEPLPAIPQGPEHDDEDGGDMAITTSKYSDQLRSALGDAIREYRNTPAELRPRLPRLPMSKRNRDLVCTLDSLLADYFESSENLEDTHSILFCAAVAACRVAGVTFEDTERATRPMAAAPAWQSRIEKRISETRVLIGKLYCFKEGNTRPRVMRFVGRAFLGTGIGPQEYPSHVVERIDFLKQKVYAWASRIRRYRRRVDRYYLNRKFQSDQRWVYRTWERLDQDVSDGCRPDDDATNTFWRNIWSVPVDHIEGDWMREVRQACEPLEVMGKISIASEDVAAAVRSVPNWKSPGPDGLHSFWLKWLRSSHECLAFQFQSALEFGSLPQFLTTGVSHLLHKSGSATDPKNYRPITCLPTVYKLLTSILRDKINSHIQNNSILSVSQNGCRGGSRGTKELLLIDMTISQQVRRFRKSLSTCWIDYKKAYDSVPHTWLLRVLELYKLDTTLCSFLRSCMRQWRTVLRYPGCRTIHGDDEPIRIERGIFQGDSLSPLWFCLALNPLSTLLEGSRLGYRLRRGGKVISHLLYMDDLKLFAPSGSQLVELLKVTETFSNSIRMEFGVDKCAVMHVKRGEIMESDGLQLSDSINFKSLSANESYKYLGMSEALGINETDMKQSLQERFFGRLRKVLKSLLSGGNKVRAFNGWIMPVLMYSFGILKWTQKELDALDRRVRVLLTAYRMHHPRSSVMRLYIPRRYGGRGFLNAKTLHNREVYKLREYFLHTDLDMHRDVVIMDKGLTPLSLGKENWRKPVVLSTENRKEVWKSKELHGRFYRALHGPDVDFMASVSWLRFGNLFGETEGFVCAIMDEVIMTNNYRKYIVRDGTVDICRACHTPGESLRHIISGCSRLANGEYLYRHNQVAKIIHQQLALRYGLVVSEVPYYRYVPDPVLENGHITLYGDRSIITDRTVVANKPDIVVIDRSERRTIIVDITIPHDENLVKAEKDKQIKYLDLAHEVVDMWDVDTAVIVPIVVSANGLMAKSLDQHLKRLSLGSWVKGLMQKAVLLGTARIVRKFLSLEP

SEQ ID NO: 30314 - protein, 1198 aa, Spilosoma lubricipeda
MLTRAKLRAQLSPPDSSLCSALPPREATVEVSAVAEASSSSSSDEFFSPPTSPTPVRRQGRGRPPTSLGSRGPLTSNRAPATGGDVRRMKWTRCINENVMRAYFRATELGTNLTAYRVRLVSLFQELEPAVNVSAQRLSDQVRAIQRCHLLDDVVLERIRSDVRNTLTVPSSSHAVDVVGNTQQLPYNEDVDEQVESEIISVSTQYNDRIRSALEDAIQDYRYVNYNNRPRLPRLPIHKRNLALVSALNSLLPDYFGNSEDLSDTHSILYCAAIAVCRVAGIKFNVEQITTRPKNTVPAWQYRIERRIAETRTLIGKLIAFKFGNTRPRVMRFVKQAFLGTTISPQQYMSSVTERIDFLKQKVYAWANRIRRYKKRGDRFNQNRMFQRNEKWVYRKWEAPNPCESDGDLPDENTTNSFWRNIWSVPVTHTDGDWMRDVSRSCESITSMEPVIINEDDISCAVCSLPNWKSPGPDGLHNFWLKWFRSSHACLASQLQAALDSGSLPQFLTTGITHLLYKSGSAMDPKNFRPITCLPTLYKLLTSILRLKITKHINNNSIISVSQNGCRSGTRGTKELLITDMTISQQVRRNRKSLATCWIDYKKAFDSVPHTWLLKVLELYKIDTTLCTFLKSCMRQWRTVLRYPGCRQTAVNDVPIKIERGIFQGDSLSPLWFCLALNPLSTLLEGSGLGYRLEKEAPVISHLFYMDDLKLFAPTKLQLTALLRVTENFSNSIKMEFGIDKCAVMHVKKGVIVESEGIELSDSTRLRSLSATETYKYLGFSQSLGIPESDMKQSLRERFFGRLKKVLKSLLSGGNKVRAYNGWVMPVLMYSFGILRWTQTELDALDRRVRTLLTAFRMHHPRSSVMRLYIPRKFGGRGLLNVKTLHNREIYNLREYFLHTDVGVHRSVVAVDTGLTPLALAKENWRKPVVLGTNERREVWKGKELHGRFYRALNGSDIDFKASTSWLRYGDLFGETEGFVCAIMDEVIMTNNYRKYILKDGTVDICRACHRPGESIRHIISGCSRLANGEYLHRHNQVARIVHQQLALKYKLVSSEVPYYRYVPDPVLENGRATLYWDRSVITDRTIVANKPDIVVIDRSERRAMIVDIAVPHDENLVKVEKEKQIKYLDLSHEIVEMWDVDSVIIVPIVVSVHGLIAKSLDQHLKRLTLDGWIKGLMQKAVLLDTARIVRRFLSLEP

SEQ ID NO: 30315 - protein, 1199 aa, Schrankia costaestrigalis
MMITRAKARIAQATPPDSSLSSASQTVENVPDSVEASSSSSSDEFFSPPSSPTPVLRRGRGRPPIGLGSRAPQASNRVPAVGGNVHRMKWTSTINENVMRAYFVATEGGTNLTAYRDRMLSLFQELEPAVNVSTQRLSDQVRAIQRCHLLNDTVLDRIRSDILSNLTISTPPPVTTQVNTIIPLSQPIELNSSETIDCEVTNVSIQYNDQLRSALECTIGEYRFMEPDKRPRLPRLPTHKKNIALVCALDSLLSNYFDNSENLSDAHSILYCGAVTACRVAHIRFPTDDIATRLRPTVPVWQCRIERRIAEARALIGKLICFRSGNTRPRVMRFVTRAFADTNIDRRDYILHVTERIDFLKQKVYAWANRIKRFKKRMERYTQNRAFQRDERWVYRNWERPVQDSGDRQLPDADATTNFWRSIWSVPVSHVEGDWIGDVEKACERIHQMEPVTISTLDVSSAVRRLPNWKSAGPDGLHNFWLKWLHSSHACLASHFQSSLETGTLPDFITTGETHLLYKSGSSTDPKNYRPITCLPTIYKLLTSILRKKISLHIQHNSIMYISQNGCRNEARGTKEQLLIDTTISEQVRRNRKDLSTCWIDYKKAYDSVPHTWLLRVLELYKIDATLCTFLRTCMTKWNTVLFYSGCRQGLGNNVPIQIKRGIFQGDSFSPLWFCLALNPLSTLLECSGLGYRLKRHGQVISHLLYMDDLKLFAPTKSQLLVLLKETETFSNSIKMEFGVDKCAVMHVKRGKVVESDELQLSDTIKLRCLSPSDTYKYLGMSQALCIAETDMKQQLRDRFFARLKKVLNSLLTGGNKVRAYNGWVMPVLMYSFGILRWTQTELETLDRKVRTLLTAHRMHHPRSSVMRLYIPRKSGGRGFLSAKTLHNREVYNLREYFLSVDADIHRDVVSVDVGLTPLCLGKENWRKPIIHTIDDRKEVWKSKELHGRFYRTLNGPDVDTLASVSWLRFGDLFGETEGFVFAIMDEVVMTKNYRKYILKDGTVDICRACHCPGESLRHIVSGCSRLANGEYLHRHNQVARIVHQQLALKYHLVDAEVPYYKYVPDPVLENSSVTLYWDRSIITDRTIVANKPDIVVIDRSERRAMIIDITIPHDENLVKAEKDKQTKYLDLAHEVVDMWHVDSAIIVPIVLSVNGLIPKSLYQHLRRLSLDSWIIGLMQKAVLLDTARIVRRFLSLEP

SEQ ID NO: 30316 - protein, 974 aa, Schrankia costaestrigalis
MEPDKRPRLPRLPTHKKNIALVCALDSLLSNYFDNSENLSDPHSILYCGAVTACRVAHIRFPTDDIATRLRPTVPAWQCRIERRIAEARALIGKLICFRSGNTRPRVMRFVTRAFADTNIDRRDYILHVTERIDFLKQKVYAWANRIKRFKKRMERYTQNRAFQRDERWVYRNWERPVQDSGDRQLPDADATTNFWRSIWSVPVSHVEGDWIGDVEKACERIHQMEPVTISTLDVSAVRRLPNWKSAGPDGLHNFWLKWLHSSHACLASHFQSSLETGTLPDFITTGETHLLYKSGSSTDPKNYRPITCLPTIYKLLTSILRKKISLHIQHNSIMYISQNGCRNEARGTKEQLLIDTTISEQVRRNRKDLSTCWIDYKKAYDSVPHTWLLRVLELYKIDATLCTFLRTCMTKWNTVLFYSGCRQGLGNNVPIQIKRGIFQGDSFSPLWFCLALNPLSTLLECSGLGYRLKRHGQVISHLLYMDDLKLFAPTKSQLLVLLKETETFSNSIKMEFGVDKCAVMHVKRGKVVESDELQLSDTIKLRCLSPSDTYKYLGMSQALCIAETDMKQQLRDRFFARLKKVLNSLLTGGNKDRAYNGWVMPVLMYSFGILRWTQTELETLDRKVRTLLTAHRMHHPRSSVMRLYIPRKSGGRGFLSAKTLHNREVYNLREYFLSVDADIHRDVVSVDVGLTPLCLGKENWRKPIIHTIDDRKEVWKSKELHGRFYRTLNGPDVDTLASVSWLRFGDLFGETEGFVFAIMDEVVMTKNYRKYILKDGTVDICRACHCPGESLRHIVSGCSRLANGEYLHRHNQVARIVHQQLALKYHLVDAEVPYYKYVPDPVLENSSVTLYWDRSIITDRTIVANKPDIVVIDRSERRAMIIDITIPHDENLVKAEKDKQTKYLDLAHEVVDMWHVDSAIIVPIVLSVNGLIPKSLYQHLRRLSLDSWIIGLMQKAVLLDTARIVRRFLSLEP

SEQ ID NO: 30317 - protein, 1197 aa, Vanessa atalanta
MLTRARQRAHNNPSPDSPLSSASQAQDPTQGSNLVSAIASSSSDEYFSPPMSPTPVRRAGRRRPPTGLGARGQPASNGVPAFGGGVQRMRWTQPINENVMRAYYGATEGGTNLTVYRVRMLSLFQALEPAINVSAQRLSDQVRVILRNNRLSDTVLDRIRSEMSNSDVTSAPSQPVVEGPLPATPQGSDHDDEGEGDMAITTSKYSDQLRSALGDAIREYRNTSAELRPRLPRLPMTKRNRDLVCTLDSLLADYFESSENLEDTHSILFCAAVAACRVAGVTFEDTERATRPKAATPAWQSRIEKRINETRVLIGKLYCFKEGNTRPRVMRYVGRAFLGIGIIPQEYPSHVVERIDFLKQKVYAWASRIRRYRRRVDRYYLNRMFQNDQRWVYRTWERLDQGVSDGCRPNDDATSTFWRNIWSVPVDHIEGDWMREVRQACEPLEAMGEISIASEDVAAAVRSVPNWKSPGPDGLHSFWLKWLRSSHECLASQFQSALESGSLPQFLTTGVTHLLHKSGSATDPKNYRPITCLPTVYKLLTSILRDKINSHIQNNSILSVSQNGCRGGSQGTKELLLIDMIISQQVRRFRKSLSTCWIDYKKAYDSVPHTWLLRVLELYKLDTTLCSFLRSCMGQWRTVLRYPGCRTIHGNDEPIRIERGIFQGDSLSPLWFCLALNPLSTLLEGSRLGYRLRRGGKVISHLLYMDDLKLFAPSGSQLMELLKVTETFSNSIRMEFGVDKCAVMHVERGEIMESDGLQLSDSINFRSLSANESYKYLGVSEALGINVTDMKQSLQERFFGRLKKVLKSLLSGGNKVRAFNGWVMPVLMYSFGILKWTQKELDALDRRVRVLLTAYRMHHPRSSVMRLYIPRRCGGRGFLNAKTLHNREVYKLREYFLHTDLDMHRDVVTMDKGLTPLSLGKENWRKPVVLSTENRKGVWKSKELHGRFYRALHGPDVDFMASVSWLRFGNLFGETEGFVCAIMDEVIMTNNYRKYIVRDGTVDICRACHTPGESLRHIISGCSRLANGEYLHRHNQVAKIIHQQLALRYDLVVSEVPYYRYVPDPVLENGRITLYWDRSIITDRAVVANKPDIVVIDRSERRTIIVDVTIPHDENLVKAEKDKQIKYLDLAHEVVDMWDVDTAVIVPIVVSANGLMAKSLDQHLKRLSLGSWVKGLMQKAVLLGTARIVRKFLSLEP

SEQ ID NO: 30318 - protein, 1106 aa, Trichoplusia ni
MKWTRPMNENVMRAYYGATGGGTNLTAYRARMLSLFRTLEPDVDVSAQRLSDQVRVIQRNHRLDDATLDRLRSEVQTSPVVVTPSIAEAPAASALPANPADGGDDDGAITVSTQCSDHIRSTLEQAVLEYRSTPRDQRPRLPRLPMHNRNKALMGVLDSLLSSYFGNSEDLGDTHSLLYCAAVAACRVAGVTFRDNTAARPKQAAPAWQCRIEKRVAEARTLIAKLVAFRGGNTRPRVMRFVKRAFAGTNISPSEYTARVTERIDFFKQKVCAWASRIRRYKTRVDRFHQNRMFQRDQRWVYRSWEQLASEEGAGRLPDDVATNLFWRSIWSAPVTHSEGDWIRDVEQSCERIEEMGAIDISPQDVANAVRPLANWKAPGPDGLHNFWLKWLPSSHGCLASQFQSAVDSGVLPQFFTTGSTHLLHKTGSTTDPKNYRPITCLPTIYKLLTSILREKINDHIERFSIMSASQNGCRNGSRGTKELLLIDMTICQQVRRSKKGVSTCWIDYKKAYDSVPHAWLMRVLELYKINTTLRTFLKSCMGQWTTVLHYPGCRDIQKSGQLIRIERGIFQGDSLSPLWFCLALNPLSTLLENSRLGYSLRRGSQVISHLLYMDDLKLFASNKLQLMKLLKITESFSNSIRMEFGVDKCAVMHVKRGGIVESQGIQLSDSINLRSLSSTETYKYLGMSEALGINVADMKQSLQTRFFGRLNKVLKSSLSGGNKVRAFNGWVMPVIMYSFGILKWTQTELDALDRRVRTLLTANRMHHPRSLVMRLYIPRKCGGRGFLNAKTLHNREVCNLREYFLRVDVGMHRDVVAVDKGFTPLSLGKENWHKPVVLSVKDRKDVWQSKELHGRYYRTLHGADVDFLASVAWLRFGDLFGETEGFVCAIMDEVIMTNNYRKYIIKDGTVDICRACHCPGESLRHIVSGCSRLANGEYLHRHNQVARIIHQQLALKYKLVESEVPYYKYVPDPVLESGHITLYWDRSIITDRTIVANKPDIVVIDRSERRTMIVDITIPHDENLVKAEKEKQLKYLDLAHEVVDLWEVDSAIIVPIVVSANGLIAKSLDQHLRRLSLGVWVKGLIQKAVLLDTARIVRRFLSLEP

SEQ ID NO: 30319 - protein, 1200 aa, Spodoptera exigua
MLTRSKARARGASPPSPDSSLSSASPSPETRTTRSPVVAVASSSSDEYLSPLASPVPVRRQRRGRPPMGLGTRGQRAPGRVPAAGGCARRMKWSQAINENVMRAYYGATEGGTNLTAYRDRMLSLFQVLEPSVNVSAQRLSDQVRVIQRSRRLDDAALDRLRLETLHNRVVLTSSQPATQTPPVENATLATPGAAVEDDKVEQVSTQCNEILRNALEDAIHEYRFAPSELRPRLPRLPMCGKNRALVCALDSLLENYFESSENLYDTHSILYCGAIAACRVANVRFPNLDAAVRPKPAAPAWQCRIERRIDEARVLIGKLTCFREGNNRPRVMRFVRRAFVGTETSPHEYLTRVTERIDFLKQKIYAWANRIRRYKKRVERYTQNRMFQSDQRWVYRDWERSSQDVVNGQRPDDETTNSFWRNIWSVPVNHTEADWMCDVKRECETLPEMEEVVITSSDVANAACSVPNWKSPGPDGLHNFWLKSFTSSHDRLASQFRMALEAGSLPQFLTTGITHLLHKSGSYTEPKNYRPITCLPTVYKLFTSILRAKITKHIEKNAIMSVSQNGCRKGSRGTKELLLIDMVINQQVRRSRKDLSTCWIDYKKAYDSVPHTWLMRVLELYKINTTLRTFLQSCMRQWSTVLSYPGCKQIQRSEEPVRIVRGIFQGDSLSPLWFCLALNPLSTLLEASGLGYRLRRKGHVISHLLYMDDLKLFAPNKEELMELLKITKNFSSSIRMEFGVDKCAVMHVKRGGIVESESLELSDFTKLRSLSANDTYKYLGMSEGLGINGPHMKQSLQERFFGRLNKVLKSSLSGGNKVRAFNGWVMPVLMYSFGILKWTQTELDTLDRRVRTLLTANRMHHPRSSVMRLYIPRKCGGRGFLNAKTLHNREVCNLREHFLKVDEDMHREVVTVDKGFTPLSLAKENWCKPVVLSVNDRKAVWSSKELHGRFFRALHGPDIDFLASVAWLRFSNLFGETEGFVCAIMDEVILTNNYRKYIMKDGTVDICRACHSSGESIRHIISGCGRLANGEYLHRHNQVAKIIHQQLALKYRLVESEVPYYKYVPDPVLEKDHITLYWDRSIITDRTIVANKPDIVVVDRLARRTTIIDVAIPHDENLVKAEKDKQLKYLDLAHEVVDMWNVDSAIVVPIVVSANGLVPKSLDNHLKRLTLGGWIKGLIQKAVLLETARIVRRFLSLEP

SEQ ID NO: 30320 - protein, 1196 aa, Spodoptera frugiperda
MLTRARRKRGAPPPSPDSSLSSASPSPEPNHEPVTAVASSSSDEYFSPPTSPPPVRRPRRGRPPTGLGARGQQTPGRVPATGGCARRMKWSQTINENVMRAYYGATEGGTNLTAYRERMLSMFQVLEPSVNVSAQRLSDQVRVIQRNRRLDEAALDRLRSEALHNRVVPAPPQEMAQIPTVSQNVIPTTPAAGVEDDRVEQVSTQCNERLRSALEDAIREYRFAPLKPKLPRLPMCGRNRALVSALDSLLKTYFESSENLYDTHSILYCGAVAACRVANVRFSNLDAAVRPKPAVPAWQCRIERRISEARVLIGKLSCFREGNTRPRVMRFVRRAFVGTETSPHEYMSRVTERIDFLKQKVYAWANRIRRYKKRVERYTQNRMFQRDQRWVYRNWERSNQDVTDGRRPDDEATNTFWRNIWSVPVSHTDDDWICDVERRCETVPEMEEVIITSSDVSSAACSVPNWKSPGPDGLHNFWLKWYTSSHARLASQFQAALEAGSLPQFLTTGVTHLLHKSGSSTEPKNYRPITCLPTVYKLLTSILRTKITKHIEKHSIMSVSQNGCRKGSRGTKELLLIDMVVSQQVRRSRKNLSTCWIDYKKAYDSVPHTWLMRVLELYKIDATLRAFLQSCMRQWSTVLCYPGCRQIQGSEEPVRIVRGIFQGDSLSPLWFCLALNPLSTLLEASGLGYPLRRRGLVISHLLYMDDLKLFAPNNKQLMELLKITEKFSSSIRMEFGVDKCAVMHVKRGGIVESEGLELSDFTKLRALSANDTYKYLGMSEGLGINGPDMKQSLRERFFGRLNKVLKSSLSGGNKVRAYNGWVMPVLMYSFGILKWTQTELDTLDRRVRTLLTANRMHHPRSSIMRLYIPRKCGGRGLLNAKTLHNREVCNLREYFLKVNEGMHREVAAVDNGFTPLSLAKENWRKPVVLTVNDRKEVWQSKELHGRFFRALHGPSVDFLASVSWLRFSNLFGETEGFVCAIMDEVILTNNYRKYIIRDGTVDICRACHSPGESIRHIISGCGRLANGEYLHRHNQVAKIIHQQLALHYQLVEFEVPYYKYVPDPVLENGHITLYWDRSIITDRTIVANKPDIVVIDRQARRTMIIDITIPHDENLVKAEKDKQIKYLDLAHEVVDMWNVDSAIVVPIVVSANGLIPNSLENHLRRLGLGGWIKGLMQKAVLLETARIVRRFLSLEP

SEQ ID NO: 30321 - protein, 962 aa, Codatractus imalena
MTKRNRDLGCTLDSLLADYFESSENLKDTHSILFCAAVAACRVAGVTFEDTERATRPKLTVPAWQSRIEKRINETRVLIGKLYCFKEGNTRPRVMRFVGRAFLGTGISPQEYPSHVVERIDFLKQKVYAWASRIRRYRRRVERYNLNRKFQSDQRGVYRTWERLDQGVSDGRRPDDDATNTFWRNIWSVPVVHTEGGWIRDVEQACRPLEVMEKISIASEDVANAVRSVSNWKSPGPDGLHNFWLKWLRSSHECLASQFQSALESGSLPQFLTTGITHLLHKTGSTTDPKNYRPITCLPTVYKLLTSILKDKIDRHIQNNAIMSVSQNGCRGGSRGTKELLLIDMTISQQVRRSRKSLSTCWIDYKKAYDSVPHTWLLRVLELYKLNTTLCSFLGSCMRQWRTVLRYPGCRTIRENDEPIRIERGIFQGDSLSPLWFCLALNPLSTLLESSRLGYRLRRGGKVISHLLYMDDLKLFASSGSQLMELLKVTETFSNSIRMEFGVDKCAVMHVERGEIVESDGIQLSDSINFRSLSANESYKYLGMSEALGIDGNDMKQSLRERFFGRLTKVLKSLLSGGNKVRAFNGWVMPVLVYSFGILKWTQSELDALDRKVRVLLTAYRMHHPRSSVMRLYIPRRCGGRGFLNAKTLHNREVYKLREYFLHTDLDMHRDVVATDKGLTPLSLGKENWRKPVVLSTENRKEVWKSKELHGRFYRALHGPDVDFMASVSWLRFGNLFGETEGFVCAIMDEVIMTNNYRKYIVKDGTVDICRACHCPGESLRHVISGCSRLANGEYLHRHNQVAKIIHQQLALRYGLVESEVPYYRYVPDPVLENGRVTLYWDRSIITDRTVVANKPDIVVIDRSERRTIIVDVTIPHDENLVKAEKDKQIKYLDLAHEVVDMWDVDTAVIVPIVVTANGLMAKSLDQHLKRLSLGSWVKGLMQKAVLLGTARIVRKFLSLEP

SEQ ID NO: 30322 - protein, 1121 aa, Eilema sororculum
MIALIPVIIIIMMHRMRWTNSINENVMRAYFAATEGGTNLSAYRTRMLPLFRALEPSINVSAQRLSDQVRVIQRNRMLNETVLETLRLECLRNICVTPTPVPVPASTVELNDDTCVAPDDTPIPVSIQYNEEIKEALECALREYRSMPVHVRPRLPRLPIHRRNIALVSALDSLLPRYLENSENLGDTHSILYCTAVTACRMAGTKFPIKDPAIRPKSAIPAWQCRIERRVTEARVLIGKLICFRSGNTRPRVMRYVTRAFAGTDISPQDYTSRVTERIDFLKQKVYAWANRIRRYKKRVDRYTVNRMFQRDQRWVYRSWERTEESVDDVRRPDAEVTNAFWRSIWSVPVSHTEGDWMHEVEKACETIPEMEEINIDAIDVDCAVRSLSNWKSPGPDGLHNFWLKWLRSSHVVLASQFQSAVESGTLPAFMTTGVTHLLHKTGSTLEPNNYRPITCLPTVYKLLTSILRAKINNHINNNSIMCASQNGCRNGARGTKELLLIDMAISQQARRNRKDLTACWIDYKKAFDSVPHTWLLRVLELYKVNTTLCTFLRSCMGQWRTVLFYPGCRQALGGGVPITIERGIFQGDSLSPLWFCLALNPLSTLLVNSGLGYRLRREGQMVSHLFYMDDLKLFAHTNPQLIALLKVTETFSNSIKMAFGVDKCAVIHVKRGRVVESEGIQLSDSTNLRSLLVTVTYKYLGMSQTLCINEADMKQMLQERFFGRLKKVLNSLLSGGNKVRACNSWVMPLLMYSFGILKWTQTELDTIDRKVRAQLTAFRMHHPRSSVMRLYIPRKCGGRGFLNAKTLHNREVCNLRDYFLKSNVDMHRDVVNVDAGLTPLGLAKENWRRPTIVSTDSRREVWQSKELHGRFYRALHRPEVDLLASVSWLRFSDFFGETEGFVCAIADEVIKTNNYRKYIMRDGTIDICRACHQPGESLRHITSGCSRLANGEYLHRHNQVARIIHQRLALKYNLVEVEVPYYRYVPEPVLENSHITLYWDRSIITDRTVVANKPDIVVIDRSERRALIVDVTIPHDENLVKAEKDKQVKYLDLAHEVVDMWSVDSAIIVPIVVSVNGLIAKSLDQHLKRLGLDGWVKSQMQKAVLLDTARIVRKFLSLEP

SEQ ID NO: 30323 - protein, 912 aa, Eilema depressum
MNNTTTRPNSGKPRWQCRIECRIAEARALIGKLICFRSGNTRPRVMRFVNRAFSGTGISPRDYAARVIERIDFLKQKVYAWANRIKRYKKRCDRYTLNRTFQRDERWVYRSWERPDLVDDVHLPDIDATNTFWRNIWSVPVAHTEGDWMREVKRSCEAIETMEPVIITEDDIACVVRSLPNWKAAGPDGLHNFWLKWLRSSHVRLASQFQSALESGSLPNFMTTGVTHLLFKSGSAVDPRNYRPITCLPTVYKLLTSVLRVKITNHITGNSILSYSQNGCRSGARGTKEHLIIDAAINQQVRRNRKDMATCWIDYKKAYDSVPHTWLLRVLELYKVDTTLCTFLKACMGQWRTALRYPGCRHIRDDGELIKIERGIFQGDSLSPLWFCLALNPLSTLLEDSGLGYCLRRGGQVISHLLYMDDLKLYAPNSLRLMELLKVTENFSNSIRMEFGVDKCAVMQVKRGGIVESEGIELSDSTKLRSLSANDTYKYLGMSQALGINEAGMRQSLRERFFCRLKKVLNSLLSGGNKVRAYNDWVIPVLTYSFGILRWTQTELDALDRRVRTLLTAYRMHHPRSSVMRLYIPRKCGGRGFLNVKNLHNREIYNLREYFLKVDVDVHRDVVAVDNGLTPLALAKENWRKPAILSIDDRKEVWRSKELHGRFYRALYGPDIDLKASVSWLRFGDLFGETEGFVCAITDEVVMTNNYRRYILKDGTVDICRACHRPGESLRHIISGCSRLANGEYLHRHNLVARIIHQQLALKYKLVDSEVPYYRYVPDPVLDDGRVTLYWDRSIITDRTILANKPDIVVIDRSERRAIIVDITIPHDENLVKAEKDKQIKYLDLAREVVDMWAVDSAIVVPIVVSAHGLIAKSLDQHLKRLALDSWIKGLMQKAVLLDTARIVRRFLSLEP

SEQ ID NO: 30324 - protein, 1191 aa, Trichoplusia ni
MLTRRRAARLPSPGSSPSSASQLPPGRGPAPAVAVASSSSDEYYSPPTSPTPVRRPGRRRPPSSLAPSGQPASNRAPAPGGVVQRMKWTRPMNENVMRAYYGATGGGTNLTAYRARMLSLFRALEPDVDVSAQRLSDQVRVIQRNHRLDDATLDRLRSEVQTSPVVVTPSIAEAPAASALPANPADGEDDDGAITVSTQCSDHIRSTLEQAVLEYRSTPRDQRPRLPRLPMHNRNKALMGVLDSLLSSYFGNSEDLGDTHSLLYCAAVAACRVAGVTFRDNTAARPKQAAPAWQCRIEKRVAEARTLIAKLVAFRGGNTRPRVMRFVKRAFAGTNISPSEYTARVTERIDFFKQKVCAWASRIRRYKTRVDRFHQNRMFQRDQRWVYRSWEQPASEEGAGRLPDDVATNLFWRSIWSAPVTHSEGDWIRDVEQSCERIEEMGAIDISPQDVANAVRPLANWKAPGPDGLHNFWLKWLPSSHGCLASQFQSAVDSGVLPQFFTTGSTHLLHKTGSTTDPKNYRPITCLPTIYKLLTSILREKINDHIERFSIMSASQNGCRNGSRGTKELLLIDMTICQQVRRSKKGVSTCWIDYKKAYDSVPHAWLMRVLELYKINTTLRTFLKSCMGQWTTVLHYPGCRDIQKSGQLIRIERGIFQGDSLSPLWFCLALNPLSTLLENSRLGYSLRRGSQVISHLLYMDDLKLFASNKLQLMKLLKITESFSNSIRMEFGVDKCAVMHVKRGGIVESQGIQLSDSINLRSLSSTETYKYLGMSEALGINVADMKQSLQTRFFGRLNKVLKSSLSGGNKVRAFNGWVMPVIMYSFGILKWTQTELDALDRRVRTLLTANRMHHPRSSVMRLYIPRKCGGRGFLNAKTLHNREVCNLREYFLRVDVGMHRDVVAVDKGFTPLSLGKENWHKPIVLSVKDRKDVWQSKELHGRYYRTLHGADVDFLASVAWLRFGDLFGETEGFVCAIMDEVIMTNNYRKYIIKDGTVDICRACHCPGESLRHIVSGCSRLANGEYLHRHNQVARIIHQQLALKYKLVESEVPYYKYVPDPVLESGHITLYWDRSIITDRTIVANKPDIVVIDRSERRTMIVDITIPHDENLVKAEKEKQLKYLDLAHEVVDLWEVDSAIIVPIVVSANGLIAKSLDQHLRRLSLGVWVKGLIQKAVLLDTARIVRRFLSLEP

SEQ ID NO: 30325 - protein, 1196 aa, Spodoptera frugiperda
MLTRARRRRGAPPPSPDSSLSSASPSPEPNHEPVTAVASSSSDEYFSPPTSPPPVRRPRRGRPPTGLGARGQQTPGRVPAAGGCARRMKWTQTINENVMRAYYGATEGGTNLTAYRERMLSMFQVLEPSVNVSAQRLSDQVRVIQRNRRLDEAALDRLRSEALRNRVVPAPPQEVVQTPTASQNVTPTTPAAGVEDDRVEQVSTQCNERLRSALEDAIREYRFAPLKPKLPRLPMCGRNRALVSALDSLLKTYFESSENLYDTHSILYCGAVAACRVANVRFSNLDAAVRPKPAVPAWQCRIERRISEARVLIGKLSCFRDGNTRPRVMRFVRRAFVGTETSPHEYMSRVTERIDFLKQKIYAWANRIRRYKKRVERYTQNRMFQRDQRWVYRNWERSNQDVTDGRRPDDEATNTFWRNIWSVPVSHTEDDWICDVERRCETVPEMEEVIITSSDVSSAACSVPNWKSPGPDGLHNFWLKWFTSSHSRLASQFQAALEAGSLPQFLTTGVTHLLHKSGSSTEPKNYRPITCLPTVYKLLTSILRTKITKHIEKHSIMSVSQNGCRKGSRGTKELLLIDMVVSQQVRRSRKNLSTCWIDYKKAYDSVPHTWLMRVLELYKIDATLRAFLQSCMRQWSTVLCYPGCRQIQGSEEPVRIVRGIFQGDSLSPLWFCLALNPLSTLLEASGLGYPLRRRGLVISHLLYMDDLKLFAPNNKQLMELLKITEKFSSSIRMEFGVDKCAVMHVKRGGIVESEGLELSDFTKLRALSANDTYKYLGMSEGLGINGPDMKQSLRERFFGRLNKVLKSSLSGGNKVRAYNGWVMPVLMYSFGILKWTQTELDTLDRRVRTLLTANRMHHPRSSIMRLYIPRKCGGRGLLNAKTLHNREVCNLREYFLKVNEGMHREVAAMDNGFTPLSLAKENWRKPVVLSVNDRKEVWHSKELHGRFFRALHGPSVDFLASVSWLRFSNLFGETEGFVFAIMDEVILTNNYRKYIIKDGTVDICRACHSPGESIRHIISGCGRLANGEYLHRHNQVAKIIHQQLALHYQLVEFEVPYYKYAPDPVLENGHITLYWDRSIITDRTIVANKPDIVVIDRQARRTMIIDITIPHDENLVKAEKDKQIKYLDLAHEVVDMWNVDSAIVVPIVVSANGLIPNSLDNHLRRLGLGGWIKGLMQKAVLLETARIVRRFLSLEP

SEQ ID NO: 30326 - protein, 991 aa, Eilema sororculum
MDTTLWSMCCLIEIYCSIIFIDLICLHWNVNFDEVIIIIIIDSLLPKYLENSENLGDTHSILYCTAVAACRMAGAKFPIKDPAIRPKPAIPAWQCRIERRVAEARVLIGKLICFRSGNTRPRVMRYVTRAFAGTNISPQDYTSRVTERIDFLKQKVCAWANRIRRYKKRVDRYTVNRMFQRDQRWVYRSWEQTDESVDDVRRPDAEATNAFWRSIWSVPVSHTEGDWMREVERACETIPEMEEIYIDATDVDCAVRSLSNWKSPGPDGLHNFWLKWLRSSHVVLASQFQSAIESGTLPAFMTTGVTHLLHKTGSTLEPNNYRPITCLPTVYKLLTSILRAKINNHINNNSIMCASQNGCRNGARGTKELLLIDMTISQQARRNRKDLVACWIDYKKAFDSVPHTWLLRVLELYKVNTTLCTFLRSCMGQWRTVLLYPGCRQALGSGEPITIERGIFQGDSLSPLWFCLALNPLSTLLVNSGLGYRLRREGQMVSHLFYMDDLKLFAHTNPQLIALLKVTETFSNSIKMAFGVDKCAVIHVKRGRVVESEGIQLSDSTNLRSLLVTETYKYLGMSQALCINEVGMKQMLQERFFGRLKKVLNSLLSGGNKVRACNSWVMPLLMYSFGILKWTQTELDTIDRKVRTQLTAFRMHHPRSSVMRLYIPRKCGGRGFLNAKTLHNREVYNLRDYFLKSNVDMHRDVVNVDTGLTPLGLAKENWRRPTIVGTDSRREVWQSKELHGRFYRALHGPEVDLLASVSWLRFSDLFGETEGFVCAIADEVIKTNNYRKYIMRDGTIDICRACHQPGESLRHITSGCSRLANGEYLHRHNQVARIIHQRLALKYNLVEVEVPYYRYVPEPVLENSHITLYWDRSIITDRTVVANKPDIVVIDRSERRALIVDVTIPHDENLVKAEKDKQVKYLDLAHEVVDMWSVDSAIIVPIVVSVNGLIAKSLDQHLKRLGLDGWVKGQMQKAVLLDTARIVRKFLSLEP

SEQ ID NO: 30327 - protein, 1163 aa, Vanessa cardui
MSAAASSSSDEYFSPSTSPTPVRRAGRRRPPTGLGARGQPVSDGVPASGGGVQRMRWTQSINENVMRAYYGATEGGTNLTAYRVRMLSLFQALEPAINVSAQRLSDQVRVILRNNRLSDTVLDRIRSEMCNGGVTSAPSQPVVQGPLPATPQGPDHDDEGEGDMAITTSKYSDQLRSALEDAIREYRNTPAELRPRLPRLPMTKRNRDLVCTLDSLLADYFESSENLEDTHSILFCAAVAACRIAGVTFEDTERATRPKAAAPAWQSRIEKRINETRVLIGKLCCFKEGNTRPRVMRFVGRAFLGTGISPQEYPSHVVERIDFLKQKVYAWASRIRRYRRRVDRYYLNRMFQSDQRWVYRTWERLNQGVSDGCRPDDDATNTFWRNIWSVPVDHIEGDWMREVRQACEPLEAMGEISIASEDVAAAVRSVPNWKSPGPDGLHSFWLKWLRSSHECLASQFQSSLESGSLPQFLTTGVTHLLHKSGSATDPKNYRPITCLPTVYKLLTSILRDKINSHIENNSILSVSQNGCKGGSRGTKELLLIDMTISQQVRRSRKSLSTCGIDYKKAYDSVPHTWLLRVLELYKLDTTLCSFLRSCMGQWRTVLRYPGCRTIHSNDEPIRIERGIFQGDSLSPLWFCLALNPLSTLLERSRLGYRLRRGGKVIPHLLYMDDLKLFAPSDSQLVELLKVTETFSNSIRMEFGVDKCAVMHVKRGEIMESDGLQLSDSINFKSLAANESYKYLGMSEALGINVTDMKQSLQERFFGRLKKVLNSLLSGGNKVRAFNGWVMPVLMYSFGILKWTQKELDALDRRVRVLLTAYRMHHPRSSVMRLYIPRRCGGRGFLNAKSLHNREVYKLREYFLHTDLDMHRDVVTMDKGLTPLSLGKENWRKPVVLSTENRKEVWKSKELHGRFYRALHGPDVDFMASVSWLRFGNLFGETEGFVCAIMDEVIMTNNYRKYIVGDGTVDICRACHTSGESLRHIISGCSRLANGEYLHRHNQVAKIIHQQLALRYGLVVSEVPYYRYVPDPVLENGHITLYWDRSIITDRTVVANKPDIVVIDRSERRTIIVDITIPHDENLVKAEKDKQIKYLDLAHEVVDMWDVDTAVIVPIVVSVNGLMAKSLDQHLKRLSLGSWVKGLMQEAVLLGTARIVRKFLSLEP

SEQ ID NO: 30328 - protein, 1199 aa, Vanessa cardui
MLTRARQRAHNNPSPDPPLSSASQAQDPAQGNNLMSAAASSSSDEYFSPPTSPTPVRRAGRRRPPTGLGARGQPVSNGVPASGGGVQRMRWTQSINENVMRAYYGATEGGTNLTAYRVRMLSMFQALEPAINVSAQRLSDQVRVILRNNRLSDTVLDRIRSEQCNGGVTSAPSQPVVQGPLPAIPQGPCHDHDDEGEGDMAITTSKYSDQLRSALEDAIREYRDIPAELRPRLPRLPMTKRNRDLVCTLDSLLADYFESSENLEDTHSILFCAAVAACRVAGVTFEDTERATRPKTVAPAWQSRIEKRINETRVLIGKLCCFKEGNTRPRVMRFVGRAFLRTGISPQEYPSHVVERIDFLKQKVYAWASRIRRYRRRVDRYYLNRMFHSDQRWVYRTWERLDEGVSDGCRPDDDATNTFWRNIWSVPVDHIEGDWMREVRQACEPLEAMGEISIASEDVAAAVWSVPNWKSPGPDGLHSFWLKWLRSSHECLASQFQSALESGSLPQFLTTGVTHLLHKSGSATDPKNYRPITCLPTVYKLLTSILRDKINSHIENNTILSVSQNGCRGGSRGTKELLLIDMTISQQVRRSRKSLSTCWIDYKKAYDSVPHTWLLRVLELYKLDTTLCSFLRSCMGQWRTVLRYPGCRTIHSNDEPIRIERGIFQGDSLSPLWFCLALNPLSTLLESSRLGYRLRRGGKVISHLLYMDDLKLFAPSDSQLVELLKVTETFSNSIRMEFGVDKCAVMHVKRGEIVESDGLQLSDSINFKSLSANESYKYLGMSEALGINVTDMKQSLQERFFGRLKKVLKSLLSGGNKVRAFNGWVMPVLMYSFGILKWTQKELDALDRRVRVLLTTYRMHHPRSSVMRLYIPRRCGGRGFLNAKTLHNREVYKLREYFLHTDLDMHRDVVTIDKGLTPLSLGKENWRKPVVLSTENRKEVWKSKELHGRFYRALHGPDVDFMASVSWLRFGNLFGETEGFVCAIMDEVIMTNNYRKYIVRDGTVDICRACHTPGESLRHIISGCSRLANGEYLHRHNQVAKIIHQQLALRYGLVVSEVPYYRYVPDPVLENGHITLYWDRSIITDRTVVANKPDIVVIDRSERRTIIVDITIPHDENLVKAEKDKQIKYLDLAHEVVDMWGADTAVIVPIVVSANGLMAKSLDQHLKRLSLGSWVKGLMQKAVLLGTARIVRKFLSLEP

SEQ ID NO: 30329 - protein, 1199 aa, Schrankia costaestrigalis
MMITRAKARIAQATPPDSSLSSASQSVENVPDSVEASSSSSSDEFFSPPSSPTPVLRRGRGRPPIGLGSRAPQASNRVPAVGGNVHRMKWTSTINENVMRAYFVATEGGTNLTAYRDRMLSLFQELEPAVNVSTQRLSDQVRAIQRCHLLNDTVLERIRSDILSNLTISTPPPVTTQVNTIIPLSQPIELNSSETIDCEVTNVSIQYNDQLRSALECTIGEYRFMEPDKRPRLPRLPTHKKNIALVCALDSLLSNYFDNSENLSDAHSILYCGAVTACRVAHIRFPTDDIATRLRPTVPAWQCRIERRIAEARALIGKLICFRSGNTRPRVMRFVTRAFADTNIDRRDYILHVTERIDFLKQKVYAWANRIKRFKKRMEQYTQNRAFQRDERWVYRNWERPVQDSGDRQLPDADATTNFWRSIWSVPVSHVEGDWIGDVEKACERIHQMEPVTISTLDVSSAVRRLPNWKSAGPDGLHNFWLKWLHSSHACLASHFQSSLETGTLPDFITTGETHLLYKSGSSTDPKNYRPITCLPTIYKLLTSILRKKISLHIQHNSIMYISQNGCRNEARGTKEQLLIDTTISEQVRRNRKDLSTCWIDYKKAYDSVPHTWLLRVLELYKIDATLCTFLRTCMTKWNTVLFYSGCRQGLGNNVPIQIKRGIFQGDSFSPLWFCLALNPLSTLLECSGLGYRLKRHGQVISHLLYMDDLKLFAPTKSQLLVLLKETETFSNSIKMEFGVDKCAVMHVKRGKVVESDELQLSDTIKLRCLSPSDTYKYLGMSQALCIAETDMKQQLRDRFFARLKKVLNSLLTGGNKVRAYNGWVMPVLMYSFGILRWTQTELETLDRKVRTLLTAHRMHHPRSSVMRLYIPRKSGGRGFLSAKTLHNREVYNLREYFLSVDADIHRDVVSVDVGLTPLCLGKENWRKPIIHTIDDRKEVWKSKELHGRFYRTLNGPDVDTLASVSWLRFGDLFGETEGFVFAIMDEVVMTKNYRKYILKDGTVDICRACHCPGESLRHIVSGCSRLANGEYLHRHNQVARIVHQQLALKYHLVDAEVPYYKYVPDPVLENSSVTLYWDRSIITDRTIVANKPDIVVIDRSERRAMIIDITIPHDENLVKAEKDKQTKYLDLAHEVVDMWHVDCAIIVPIVLSVNGLIPKSFYQHLRRLSLDSWIIGLMQKAVLLDTARIVRRFLSLEP

SEQ ID NO: 30330 - protein, 1125 aa, Spodoptera exigua
MGLGTRGQRAPGRVPATGGCARRMKWSQSINENVMRAYYGATEGGTNLTAYRDRMLSLFQVLEPSVNVSAQRLSDQVRVIQRSCRLDDAALDRLRLETLHNRVVLTSSQSATQTPPVENATLATPVADVEDDKVEQVSTQCNERLRNALEDAIHEYRFAPSELRPKLPRLPMCGKNRALVYALDSLFENYFESSENLYDTHSILYCGAIAACRVANVRFPNLDAAVRPKPAAPAWQCRIERRIDEARVLIGKLTCFREGNNRPRVMRFVRRAFVGTETSPHEYLTRVTERIDFLKQKIYAWANRIRRYKKRVERYTQNRMFQSDQRWVYRDWERSSQDVVNGQRPDDETTNSFWRNIWSVPVNHTEADWMCDVKRECETLPEMEKVVITSSDLANAACSVPNWKSPGPDGLHNFWLKSFTSSHDRLASQFQMALEAGSLPQFLTTGITHLLHKSGSYTEPKNYRPITCLPTVYKLFTSILRAKITKHIEKNSIMSVSQNGCRKGSRGTKELLLIDMVISQQVRRSRKDLSTCWIDYKKAYDSVPHTWLMGVLELYKINTTLRTFLQSCMRQWSTVLSYPGCKQIQRSEEPVRIVRGIFQGDSLSPLWFCLALNPLSTLLEASGLGYRLRRKGHVISHLLYMDDLKLFAPNKEELMELLKITKNFSSSIRMEFGVDKCAVMHVKRGGIVESESLELSDFTKLRSLSANDTYKYLGMSEGLGINGPHMKQSLQERFFGRLNKVLKSSLSGGNKVRAFNGWVMPVLMYSFGILKWTQTELDTLDRRVRTLLTANRMHHPRSSVMRLYIPRKRGGRGFLNAKTLHNREVCNLREHFLKVDEDMHREVVTVDKGFTPLSLAKENWCKPVVLSVNDRKAVWSSKELHGRFFRALHGPDVDFLASVAWLRFSNLFGETEGFVCAIMDEVILTNNYRKYIMKDGTVDICRACHSPGESIRHIISGCGRLANGEYLHRHNQVAKIIHQQLALKYRLVESEVPYYEYVPDPVLEKDLIITDRTIVANKPDIVVVDRLARRTTIIDVAIPHDENLVKAEKDKQLKYLDLAHEVVDMWSVDSAIVVPIVVSANGLVPKSLDNHLKRLTLGGWIKGLIQKAVLLETARIVRRFLSLEP

SEQ ID NO: 30331 - protein, 1197 aa, Spodoptera frugiperda
MLTRARRCYAHPPSPDSSLSSASPSPEPNHEELPVTVVASSSSDEYFSPPTSPPPVRRPRRGRPPTGLGARGQQTLGRVPATGGCARRMKWTQTINENVMRAYYGATEGGTNLTAYRERMLSMFQVLEPSVNVSAQRLSDQVRVIQRNRRLDEAALDRLRSEALRNRVVPAPPQEVAQTPTASQNVTPTTPAAGVEDDRVEQVSTQCNERLRSALEDAIREYRFAPLKPKLPRLPMCGKNRALVSALDSLLKTYFESSENLYDTHSILYCGAVAACRVANVRFSNLDAAVRPKPAIPAWQCRIERRISEARVLIGKLSCFRDGNTRPRVMRFVRRAFVGTETSPHEYMSRVTERIDFLKQKVYAWANRIRRYKKRVERYTQNRMFQRDQRWVYRNWERSNQDVTDGQRPDDEATNTFWRNIWSVPVSHTEDDWICDVERGCETVPEMEEVIITSSDVSSAACSVPNWKSPGPDGLHNFWLKWFTSSHACLASQFQAALEAGSLPQFLTTGVTHLLHKSSSSTEPKNYRPITCLPTVYKLLTSILRTKITKHIEKHSIMSVSQNGCWKGSRGTKELLLIDMVVSQQVRRFRKNLSTCWIDYKKAYDSVPHAWLMRVLELYKIDATLRAFLQSCMRQWSTVLCYPGCRQIQGSEEPVRIVRGIFQGDSLSPLWFCLALNPLSTLLEASGLGYPLRRRGLVISHLLYMDDLKFFAPNNKQLMELLKITEKFSSSIRMEFGVDKCAVMHVKRGGIVESEGLELSDFTKLRTLSANDTYKYLGMSEGLGINGPDMKQSLRERFFGRLNKVLKSSLSGGNKVRAYNGWVMPVLMYSFGILKWTQTELDALDRRVRTLLTANRMHHPRSSIMRLYIPRKCGGRGLLNAKTLHNRVVCNLREYFLKVNEGMHREVTAVDNGFTPLSLAKENWRKPVVLSVNDRKEVWHSKELHGRFFRALHGPSVDFLASVSWLRFSNLFGETEGFVCAIMDEVILTNNYRKYIIKDGTVDICRACHSPGESIRHIISGCGRLANGEYLHRHNQVAKIIHQQLALHYQLVEFEVPYYKYAPDPVLENGHITLYWDRSIITDRTIVANKPDIVVIDRQARRAMIVDITIPHDENLVKAEKDKQIKYLDLAHEVVDMWSVDSAIIVPIVVSANGLIPNSLDNHLRRLGLGGWIKGLMQKAVLLETARIVRRFLSLEP

SEQ ID NO: 30332 - protein, 1111 aa, Spodoptera litura
MKWSQTINENVMRAYYGATEGGTNLTAYRERMLSMFQVLEPSVNVSAQRLSDQVRVIQRNCRLDEATLDRLRLEALRNRVVPAPPQLVAQTPVVSQCVTSTTPIVGVEDDRVEQVSTQCNERLRSALEDAVREYRLAPSDLRPKLPRLPMCRKNRALVSALDSLLKKYFESSENLYDTHSILYCGAVAACRVANVRFPNLDAAVRPKPAVPAWQYRIERRISEARVLIGKLSCFREGNTRPRVMRFVRRAFVGTETSPHEYLSRVTERIDFLKQKVYAWANRIRRYKKRVERYTQNRMFQRDQRWVYRDWERSNQDVADGRRPDDDATNTFWRNIWSVPVSHTEGDWMFDVKRRCETIPEMEEVEITSSDVASAACSVPNWKSPGPDGLHNFWIKWFKSSHVRLALHFQAALETGSLPQFLTTGVTHLLHKSGSSTEPKNYRPITCLPTVYKLLTSILRTKITKHIEQNSIMSVSQNGCREGSRGTKELLLIDMVVSQQVRRSRKDLSTCWIDYKKAYDSVPHTWLLKVLELYKIHASLRAFLESCMRQWSTVLCYPGCRQIQGNEEPVRIVRGIFQGDSLSPLWFCLALNPLSTLLEDSGLGYPLRRRGLVISHLLYMDDLKLFAPNKKQLMELLNITEKFSSSIRMEFGVDKCAVMHVKRGGIVESEGLELSDFTKLRSLSANDTYKYLGMSEGLGINGLDMKQSLQERFFGRLNKVLKSSLSGGNKVRAFNGWVMPVLMYSFGILKWTQTELDTLDRRVRTLLTANRMHHPRSSVMRLYIPRKCGGRGLLNAKTLHNREVCSLREYFLKVNEGMHREVAAVDNGFTPLSLAKENWRKPVVLSVNDRKEVWHSKELHGRFFRALHGPSVDFLASVSWLRFSNLFGETEGFVCAIMDEVILTNNYRKYIIKDGTVDICRACHSPGESIRHIISGCGRLANSEYLHRHNQVAKIIHQQLALHYRLVESEVPYYKYVPDPVLENDHITLYWDRSIITDRTIIANKPDIVVIDRQVRRTMIIDITIPHDENLVKAEKDKQIKYLDLAHEVVDMWNVDSAIIVPIVVSANGLIPNSLDNHLRRLALGSWVKGLIQKAVLLETARIVRRFLSLEP

SEQ ID NO: 30333 - protein, 1197 aa, Vanessa cardui
MLTRARQRAHNYPSPDPPLSSASQTQDPAQGSSLVSAAASSSSDEYFSPPTSPTPVRRAGRRRPPTGLGARGQPVSNRVPASGGGVQRMRWTQPINENVMRAYYGATKGGTNLTAYRVRMLSLFQALEPAVNVSAQRLSDQVRVILRNNRLSDTVLDRIRSETCNSGVTSGPSTPVVEEPLPTIPQGPEHDDEGGGDMAITKSKYSDHLRSALGDAIREYRNTPAELRPRLPRLPMTKRNRDLVCTLDSLLTDYFESSENLEDTHSILFCAAVAACRVAGVTFEDTERATRPKAVAPAWQSRIEKRINETRVLIGKLYCFKEGNTRPRVMRFVGRAFLGTGIGPQEYPSHVVERIDFLKQKVYAWASRIRRYRRRVDRYHLNRKFQSDQRWVYRTWERLDQDVSDECRPDDDATNTFWRNIWSVPVDHIEGDWMLEVRQACEPLEVMGKISIASEDVAAAVRSVSNWKSPGPDGLHNFWLKWLRSSHECLASQFQSALESGSLPQFLTTGVTHLLHKSGSATDPKNYRPITCLPTVYKLLTAILGDKINSHIQNNSILSVSQNGCRGGSRGTKELLLIDMTISQQVRRSRKSLSTCWIDYKKAYDSVPHTWLLRVLELYKLDTTLCSFLRSCMGQWRTVLRYPGCRTIHGNDEPIRIERGIFQGDSLSPLWFCLALNPLSTLLESSRLGYRLRRGGKVISHLLYMDDLKLFAPSDSQLMELLKVTETFSNSIRMEFGVDKCAVMHVKRGEIMESDGLQLSDSINFKSLSANESYKYLGMSEALGINVTDMKQSLQERFFGRLKKVLKSLLSGDNKVRAFNGWVMPVLMYSFGILKWTQKELDTLDRKVRVLLTAYRMHHPRSSVMRLYIPRRCGGRGFLNAKTLHNREVYKLREYFLHTDLDMHRDVITMDKGLTPLSLGKENWRKPVVLSTENRKEVWKCKELHGRFYRVLHGPDVDFMASVSWLRFGNLFGETEGFVCAIMDEVIMTNNYRKYIVRDGTVDICRACHTPGESLRHIISGCSRLANGEYLYRHNQVAKIIHQQLALRYGLVVSEVPYYRYVPDPVLENGHITLYWDRSIITDRTVVANKPDIVVIDRSERRMIIVDITIPHDENLVKAEKDKQIKYLDLAHEVVDMWDVDTAVIVPIVVSANGLMAKSLDQHLKRLSLGSWVKGLMQKAVLLGTARIVRKFLSLEP

SEQ ID NO: 30334 - protein, 1197 aa, Vanessa cardui
MLTRARQQAHNNPSPDPPLSSASQAQDPAQGSSLVSAAASSSSDEYFSPPTSPTPVRRAGRRRPPTGLGARGQPVSNRVPASGGGVQRMRWTQPINENVMRAYYGATKGGTNLTAYRVRMLSLFQALEPAVNVSAQRLSDQVRVILRNNRLSDTVLDRIRSETCNSGVTSGPSTPVVEEPLPAIPQGPEHDDEGGGDMAITKSKYSDHLRSALGDAIREYRNTPAELRPRLPRLPMTKRNRDLVCTLDSMLADYFESSENLEDTHSILFCAAVAACRVAGVTFEDTERATRPKAVAPAWQSRIEKRINETRVLIGKLYCFKEGNTRPRVMRFVGRAFLGTGISPQEYPSHVVERIDFLKQKVYAWASRIRRYRRRVDRYHLNRKFQSDQRWVYRTWERLDQDVSDGCRPDDDATNTFWRNIWSVPVDHIEGDWMLEVRQACEPLEVMGKISIASEDVAAAVRSVANWKSPGPDGLHNFWLKWLRSSHECLASQFQSALESGSLPQFLTTGVTHLLHKSGSATDPKNYRPITCLPTVYKLLTAILRDKINSHIQNNSILSVSQNGCRGGSRGTKELLLIDMTISQQVRRSRKSLSTCWIDYKKAYDSVPHTWLLRVLELYKLDTTLCSFLRSCMGQWRTVLRYPGCRTIHGNDEPIRIERGIFQGDSLSPLWFCLALNPLSTLLESSRLGYRLRRGGKVISHLLYMDDLKLFAPSDSQLMELLKVTETFSNSIRMEFGVDKCAVMHVKRGEIMESDGLQLSDSINFKSLSANESYKYLGMSEALGINVTDMKQSLRERFFGRLKKVLKSLLSGGNKVRAFNGWVMPVLMYSFGILKWTQKELDALDRKVRVLLTAYRMHHPRSSVMRLYIPRRCGGRGFLNAKTLHNREVYKLREYFLHTDLDMHRDVVTMDKGLTPLSLGKENWHKPVVLSTENRKEVWKSKELHGRFYRVLHGPDVDFMASVSWLRFGNLFGETEGFVCAIMDEVIMTNNYRRYIVRDGTVDICRACHTPGESLRHIISGCSRLANGEYLHRHNQVAKIIHQQLALRYGLVVSEVPYYKYVPDPVLENGHITLYWDRSIITDRTVVANKPDIVVIDRSERRTIIVDITIPHDENLVKAEKDKQIKYLDLAHEVVDMWDVDTAVIVPIVVSANGIMAKSLDQHLKRLSLDSWVKGLMQKAVLLGTARIVRKFLSLEP

SEQ ID NO: 30335 - protein, 1199 aa, Vanessa cardui
MLTRARQRAHNNPSPDPPLSSASQAQDPAQGNNLMSAAASSSSDEYFSPPTSPTPVRRAGRRRPPTGLGARGQPVSNGVPASGGGVQRMRWTQSINENVMRAYYGATEGGTNLTAYRVRMLSMFQALEPAINVSAQRLSDQVRVILRNNRLSDTVLDRIRSEQCNGGVTSAPSQPVVRGQLPAIPQGPCHDHDDEGEGDMAITTSKYSDQLRSALEDAIREYRDIPAEPRPRLPRLPMTKRNRDLVCTLDSLLADYFESSENLEDTHSILFCAAVAACRVAGVTFEDTKQATRPKTVAPAWQSRIEKRINETRVLIGKLCCFKEGNTRPRVMRFVGRAFLGTGISPQEYPSHVVERIDFLKQKVYAWASRIRRYRRRVDRYYLNRMFQSDQRWVYRTWERLDEGVSDGCRPDDEATNTFWRNIWSVPVDHIEGDWMREVRQACEPLEAMGEISIASEDVAAAVRSVPNWKSPGPDGLHSFWLKWLRSSHECLASQFQSALESGSLPQFLTTGVTHLLHKSGSATDPKNYRPITCLPTVYKLLTSILRDKINSHIENNTILSVSQNGCRGGSRGTKELLLIDMTISQQVRRSRKSLSTCWIDYKKAYDSVPHTWLLRVLELYKLDTTLCSFLRSCMGQWRTVLRYPGCRTIHSNDEPIRIERGIFQGDSLSPLWFCLALNPLSTLLESSRLGYRLRRGGKVISHLLYMDDLKLFAPSDSQLVELLKVTETFSNSIRMEFGVDKCAVMHVKRGEIVESDGLQLSDSINFKSLSANESYKYLGMSEALGINVTDMKQSLRERFFGRLKKVLKSLLSGGNKVRAFNGWVMPVLMYSFGILKWTQKELDALDRRVRVLLTTYRMHHPRSSVMRLYIPRRCGGRGFLNAKTLHNREVYKLREYFLHTDLDMHRDVVTIDKGLTPLSLGKENWRKPVVLSTENRKDVWKSKELHGRFYRALHGPDVDFMASVSWLRFGNLFGETEGFVCAIMDKVIMTNNYRKYIVRDGTVDICRACHTPGESLRHVISGCSRLANGEYLHRHNQVAKIIHQQLALRYGLVVSEVPYYRYVPDPVLENGHITLYWDRSIITDRTVVANKPDIVVIDRSERRTIIVDITIPHDENLVKAEKDKQIKYLDLAHEVVDMWDVDTAVIVPIVVSANGLMAKSLDQHLKRLSLGSWVKGLMQKAVLLGTARIVRKFLSLEP

SEQ ID NO: 30336 - protein, 1199 aa, Schrankia costaestrigalis
MMITRAKARIAQATPPDSSLSSASQTVENVPDSVEASSSSSSDEFFSPPSSPTPVLRRGRGRPPIGLGSRAPQASNRVPAVGGNVHRMKWTSTINENVMRAYFVATEGGTNLTAYRDRMLSLFQELEPAVNVSTQRLSDQVRAIQRCHLLNDTVLDRIRSDILSNLTISTPPPVTTQVNTIIPLSQPIELNSSETIDCEVTNVSIQYNDQLRSALECTIGEYRFMEPDKRPRLPRLPTHKKNIALVCALDSLLSNYFDNSENLSDAHSILYCGAVTACRVAHIRFPTDDIATRLRPTVPAWQCRIERRIAEARALIGKLICFRSGNTRPRVMRFVTRAFADTNIDRRDYILHVTERIDFLKQKVYAWANRIKRFKKRMERYTQNRAFQRDERWVYRNWERPVQDSGDRQLPDADATTNFWRSIWSVPVSHVEGDWIGDVEKACERIHQMEPVTISTLDVSSAVRRLPNWKSTGPDGLHNFWLKWLHSSHACLASHFQSSLETGTLPDFITTGETHLLYKSGSSTDPKNYRPITCLPTIYKLLTSILRKKISLHIQHNSIMYISQNGCRNEARGTKEQLLIDTTISEQVRRNRKDLSTCWIDYKKAYDSVPHTWLLRVLELYKIDATLCTFLRTCMTKWNTVLFYSGCRQGLGNNVPIQIKRGIFQGDSFSPLWFCLALNPLSTLLECSGLGYRLKRHGQVISHLLYMDDLKLFAPTKSQLLVLLKETETFSNSIKMEFGVDKCAVMHVKRGKVVESDELQLSDTIKLRCLSPSDTYKYLGMSQALCIAETDMKQQLRDRFFARLKKVLNSLLTGGNKVRAYNGWVMPVLMYSFGILRWTQTELETLDRKVRTLLTAHRMHHPRSSVMRLYIPRKSGGRGFLSAKTLHNREVYNLREYFLSVDADIHRDVVSVDVGLTPLCLGKENWRKPIIHTIDDRKEVWKSKELHGRFYRTLNGPDVDTLASVSWLRFGDLFGETEGFVFAIMDEVVMTKNYRKYILKDGTVDICRACHCPGESLRHIVSGCSRLANGEYLHRHNQVARIVHQQLALKYHLVDAEVPYYKYVPDPVLENSSVTLYWDRSIITDRTIVANKPDIVVIDRSERRAMIIDITIPHDENLVKAEKDKQTKYLDLAHEVVDMWHVDSAIIVPIVLSVNGLIPKSLYQHLRRLSLDSWIIGLMQKAVLLDTARIVRRFLSLEP

SEQ ID NO: 30337 - protein, 1106 aa, Trichoplusia ni
MKWTRPMNENVMRAYYGATGGGTNLTAYRARMLSLFRALEPDVDVSAQRLSDQVRVIQRNHRLDDATLDRLRSEVQTSPVVVTPSIAEAPAASALPANPADGGDDDGAITVSTQCSDHIRSTLEQAVLEYRSTPRDQRPRLPRLPMHNRNKALMGVLDSLLSSYFGNSEDLGDTHSLLYCAAVAACRVAGVTFRDNTAARPKQAAPAWQCRIEKRVAEARTLIAKLVAFRGGNTRPRVMRFVKRAFAGTNISPSEYTARVTERIDFFKQKVCAWANRIRRYKTRVDRFHQNRMFQRDQRWVYRSWEQPASEEGAGRLPDDVATNLFWRSIWSAPVTHSEGDWIRDVEQSCERIEEMGAIDISPQDVANAVRPLANWKAPGPDGLHNFWLKWLPSSHGCLASQFQSAVDSGVLPQFFTTGSTHLLHKTGSTTDPKNYRPITCLPTIYKLLTSILREKINDHIERFSIMSASQNGCRNGSRGTKELLLIDMTICQQVRRSKKGVSTCWIDYKKAYDSVPHAWLMRVLELYKINTTLRTFLKSYMGQWTTVLHYPGCRDIQKSGQLIRIERGIFQGDSLSPLWFCLALNPLSTLLENSRLGYSLRRGSQVISHLLYMDDLKLFASNKLQLMKLLKITESFSNSIRMEFGVDKCAVMHVKRGGIVESQGIQLSDSINLRSLSSTETYKYLGMSEALGINVADMKQSLQTRFFGRLNKVLKSSLSGGNKVRAFNGWVMPVIMYSFGILKWTQTELDALDRRVRTLLTANRMHHPRSSVMRLYIPRKCGGRGFLNAKTLHNREVCNLREYFLRVDVGMHRDVVAVDKGFTPLSLGKENWHKPIVLSVKDRKDVWQSKELHGRYYRTLHGADVDFLASVAWLRFGDLFGETEGFVCAIMDEVIMTNNYRKYIIKDGTVDICRACHCPGESLRHIVSGCSRLANGEYLHRHNQVARIIHQQLALKYKLVESEVPYYKYVPDPVLESGHITLYWDRSIITDRTIVANKPDIVVIDRSERRTMIVDITIPHDENLVKAEKEKQLKYLDLAHEVVDLWEVDSAIIVPIVVSANGLIAKSLDQHLRRLSLGVWVKGLIQKAVLLDTARIVRRFLSLEP

SEQ ID NO: 30338 - protein, 975 aa, Eilema sororculum
MPVHVRPRLPRLPIHRRNIALVSALDSLLPRYLENSENLGDTHSILYCTAVAACRMAGAKFPIKDPAIRPKSAIPAWQCRIERRVTEARVLIGKLICFRSGNTRPRVMRYVTRAFAGTDISPQDYTSRVTERIDFLKQKVYAWANRIRRYKKRVDRYTVNRMFQRDQRWVYRSWERTEESVDDVRRPDAEVTNAFWRSIWSVPVSHTEGDWMHEVERACETIPEMEEINIDAIDVDCAVRSLSNWKSPGPDGLHNFWLKWLRSSHVVLASQFQSAVESGTLPAFMTTGVTHLLHKTGSTLEPNNYRPITCLPTAYKLLTSILRAKINNHINNNSIMCASQNGCRNGARGTKELLLIDMAISQQARRNRKDLTACWIDYKKAFDSVPHTWLLRVLELYKVNTTLCTFLRSCMGQWRTVLFYPGCRQALDGGVPITIERGIFQGDSLSPLWFCLALNPLSTLLVNSGLGYRLRREGQMVSHLFYMDDLKLFAHTNPQLIALLKITETFSNSIKMAFGVDKCAVIHVKRGRVVESEGIQLSDSTNLRSLLVTETYKYLGMSQALCINEVDMKQMLQERFFGRLKKVLNSLLSGGNKVRACNSWVIPLLMYSFGILKWTRTELDTIDRKVRTQLTAFRMHHPRSSVMRLYIPRKCGGRGFLNAKTLHNREVCNLRDYFLKSNVDMHRDVVNVDTGLTPLGLAKENWRRPTIVSTDSRREVWQSKELHGRFYRALHRPEVDLLASVSWLRFSDLFGETEGFVCAIADEVIKTNNYRKYIMRDGTIDICRACHQPGESLRHITFGCSRLANGEYLHRHNQVARIIHQRLALKYNLVEFEVPYYRYVPEPVLENSHITLYWDRSIITDRTVVANKPDIVVIDRSERRALIVDVTIPHDENLVKAEKDKQVKYLDLAHEVVDMWSVDSAIIIPIVVSVNGLIAKSLDQHLKRLGLDGWVKGQMQKAVLLDTARIVRKFLSLEP

SEQ ID NO: 30339 - protein, 1198 aa, Eilema depressum
MLTRSQARKNASAPVTSPDSSLSSAAQPSPTEPAASSSSSSDEFFSPPTSPTPVRRPGRGRPPASLEPRRPPASNRAPAAGGNVRRMRWTTSINENVMRAYFAATGGGTNLAAYRDRMLLVFQGLEPTLNVSAQRLSDQVRAIQRCHLLDSSVLERIRSDLQNSDVIPPPPQAPLLTPRVQGFTQVTEPDSGDGELDNVAFSVSTQYNDLIRNTLECAIRDYRSMHYQIRPRLPRLPVHKRNIALVCALDSLLPIYLDNSENLGDTHSILYCAAIAACRVAGIRFPETNTTTRPNSGKPRWQCRIECRIAEARALIGKLICFRSGNTRPRVMRFVNRAFSGTGISPRDYAARVIERIDFLKQKVYAWANRIKRYKKRCDRYTLNRTFQRDERWVYRSWERPDLVDDVHLPDIDATNTFWRNIWSVPVAHTEGDWMREVKRSCEAIETMEPVIITEDDIACVVRSLPNWKAAGPDGLHNFWLKWLRSSHVRLASQFQSALESGSLPNFMTTGVTHLLFKSGSAVDPRNYRPITCLPTVYKLLTSVLRVKITNHITGNSILSYSQNGCRSGARGTKEHLIIDAAINQQVRRNRKDMATCWIDYKKAYDSVPHTWLLRVLELYKVDTTLCTFLKACMGQWRTALRYPGCRHIRDDGELIKIERGIFQGDSLSPLWFCLALNPLSTLLEDSGLGYCLRRGGQVISHLLYMDDLKLYAPNSLRLMELLKVTENFSNSIRMEFGVDKCAVMQVKRGGIVESEGIELSDSTKLRSLSANDTYKYLGMSQALGINEAGMKQSLRERFFCRLKKVLNSLLSGGNKVRAYNDWVIPVLTYSFGILRWTQTELDALDRRVRTLLTAYRMHHPRSSVMRLYIPRKCGGRGFLNVKNLHNREIYNLREYFLKVDVDVHRDVVAVDNGLTPLALAKENWRKPAILSIDDRKEVWRSEELHGRFYRALYGPDIDLKASVSWLRFGDLFGETEGFVCAITDEVVMTNNYRRYILKDGTVDICRACHRPGESLRHIISGCSRLANGEYLHRHNLVARIIHQQLALKYKLVDSEVPYCRYVPDPVLDDGRVTLYWDRSIITDRTILANKPDIVVIDRSERRAIIVDITIPHDENLVKAEKDKQIKYLDLAHEVVDMWAVDSAIVVPIVVSAHGLIAKSLDQHLKRLALDSWIKGLMQKAVLLDTARIVRRFLSLEP

SEQ ID NO: 30340 - protein, 1111 aa, Vanessa cardui
MRWTQSINENVMRAYYGATEGGTNLTAYRVRMLSMFQALEPTINVSAQRLSDQVRVILRNNRLSDTVLDRIRSEQCNGGVTSAPSQPVVQGPLPAIPQGPCHDHDDEGEGDMAITTSKYSDHLRSALEDAIREYRDIPAELRPRLPRLPMTKRNRDLVCTLDSLLADYFESSENLEDTHSILFCAAVAACRVAGVTFEDTERATRPKTVAPAWQSRIEKRINETRVLIGKLCCFKEGNTRPRVMRFVGRAFLGTGISPQEYPSHVVERIDFLKQKVYAWASRIRRYRRRVDRYYLNRMFQSDQRWVYRTWERLDEGVSDGCRPDDDATNTFWRNIWSVPVDHIEGDWMREVRQACEPLEAMGEISIASEDVAAAVRSVPNWKSPGPDGLHSFWLKWLRSSHECLASQFQSALESGSLPQFLTTGVTHLLHKSGSATDPKNYRPITCLPTVYKLLTSILRDKINSHIENNSILSVSQNGCRGGSRGTKELLLIDMTISQQVRRSRKSLSTCWIDYKKAYDSVPHTWLLRVLELYKLDTTLCSFLRSCMGQWRTVLRYPGCRTIHSNDEPIRIERGIFQGDSLSPLWFCLALNPLSTLLESSRLGYRLRRGGKVISHLLYMDDLKLFAPSDSQLVELLKVTETFSNSIRMEFGVDKCAVMHVKRGEIVESDGLQLSDSINFKSLSANESYKYLGMSEALGINVTDMKQSLQERFFGRLKKVLKSLLSGGNKVRAFNGWVMPVLMYSFGILKWTQKELDALDRRVRVLLTTYRMHHPRSSVMRLYIPRRCGGRGFLNAKTLHNREVYKLREYFLHTDLDMHRDVVTIDKGLTPLSLGKENWRKPVVLSTENRKEVWKSKELHGRFYRALHGPDVDFMASVSWLRFGNLFGETEGFVCAIMDEVIMTNNYRKYIVRDGTVDICRACHTPGESLRHIISGCSRLANGEYLHRHNQVAKIIHQQLALRYGLVVSEVPYYRYVPDPVLENGHITLYWDRSIITDRTVVANKPDIVVIDRSERRTIIVDITIPHDENLVKAEKDKQIKYLDLAHEVVDMWDVDTAVIVPIVVSANGLMAKSLDQHLKRLSLGSWVKGLMQKAVLLGTARIVRKFLSLEP

SEQ ID NO: 30341 - protein, 1196 aa, Lymantria monacha
MLTRSQTKAARPPPPGSSQSSASQPTASVPAASVTTEASSSSSSDEYFSPPTTPTPAPRRGRGRPPICLGPRGPPTSHRAPAAGGNVQRMKWTHSINENVMRAYFEATEGGIKLTAYRDRMLLLFQNLEPTINVTAQRLSDQVRAIQRCHLLDVATLDRLRLVSIQTCRVTPISTEISTIDTTQSVPPPYAEGEDATVSMDTQYNEEVRNALECAIREYRFIPHNIRPRLPRLPMHRKNRRLVGTLDSLLTSYLHTSDSISDTHSILYCVAVAACRIAGLKFLENESTIQQKKAKPAWQCRIECRICEARVLIGKLICFRAGNTRPKVMRYVRRAFLGTDIKPDEYNARVTERIDFLKQKVYAWASRIRRYKKRMNRYSVNRMFESDQKSVYRNWERPCLIVDNERLPDSEVTNTFWRSIWSVPVVHSEGDWMGDVKRACENIPQMENVLIDKDDVTCAVRSLSNWKSPGPDGLHNFWLKWLHSAHARLASHFQSALVSGTLPEFMTTGITHLLHKTGSTTEPCNYRPITCLPSVYKLLTSILSNKIAKHVQLNSVMSISQNGCRNGGRGTKELLLIDTAISQQVRRNRKDLSVCWIDYRKAFDSVPHTWLLRVLELYKINSLLCTFLKSCMGQWKTFLKYPMHRLNLGSSEPIYIRRGIFQGDSLSPLWFCLALNPLSILLEHSGLGCRLRRGGQIISHLLYMDDLKLFAPNNPQLVKLLKVTETFSSSIKMEFGVDKCAVMHVKHGGIVEVDRGQLFNTLQFGPLQVTDTYKYLGMSQALNINESDMKQALRERFFGRLKKVLNSLLSGGNKVRAYNAWVMPILMYSFGILKWTQTELDALDRKVRTLLTSHRMHHPRSSVMRLYIPRKCGGRGFLNAKTLHNREIYNLRDYFLKMTSGMHLDVVAVDNGLTPLGLAKENWHKPAVLSTKDRESVWQSKELHGRFYGALNASEVDFSASVTWLQFGNLFGETEGFVCAIADEVIKTNNYRKYILRDGTADICRACHLPGESLRHIVSGCSRLANGEYLHRHNQVARIIHQQLALLYRLVSTEVPYYRYIPQPVLENGRATLYWDRSIITDRTIVANKPDIVVIDRLQRRAMIVDVTVPHDGNLVKAEKDKQIKYQDLAHEIVDMWDVDTAIVVPIVISTNGLIAKSLAQHLKRLALGSWIGGLMQKAVLLDTARIVRKFLSLEP

SEQ ID NO: 30342 - protein, 1191 aa, Trichoplusia ni
MLTRRRAARLPSPGSSPSSASQLPPGRGPAPAVAVASSSSDEYYSPPTSPTPVRRPGRRRPPSSLAPSGQPASNRAPAPGGVVQRMKWTRPMNENVMRAYYGATGGGTNLTAYRARMLSLFRALEPDVDVSAQRLSDQVRVIQRNHRLDDATLDRLRSEVQTSPVVVTPSIAEAPAASALPANPADGGDDDGAITVSTQCSDHIRSTLEQAVLEYRSTPRDQRPRLPRLPMHNRNKALMGVLDSLLSSYFGNSEDLGDTHSLLYCAAVAACRVAGVTFRDNTAARPKQAAPAWQCRIEKRVAEARTLIAKLVAFRGGNTRPRVMRFVKRAFAGTNISPSEYIARVTERIDFFKQKVCAWASRIRRYKTRVDRFHQNRMFQRDQRWVYRSWEQPASEEGAGRLPDDVATNLFWRSIWSAPVTHSEGDWIRDVEQSCERIEEMGAIDISPQDVANAVRPLANWKAPGPDGLHNFWLKWLPSSHGCLASQFQSAVDSGVLPQFFTTGSTHLLHKTGSTTDPKNYRPITCLPTIYKLLTSILREKINDHIERFSIMSASQNGCRNGSRGTKELLLIDMTICQQVRRSKKGVSTCWIDYKKAYDSVPHAWLMRVLELYKINTTLRTFLKSCMGQWTTVLHYPGCRDIQKSGQLIRIERGIFQGDSLSPLWFCLALNPLSTLLENSRLGYSLRRGSQVISHLLYMDDLKLFASNKLQLMKLLKITESFSNSIRMEFGVDKCAVMHVKRGGIVESQGIQLSDSINLRSLSSTETYKYLGKSEALGINVADMKQSLQTRFFGRLNKVLKSSLSGGNKVRAFNGWVMPVIMYSFGILKWTQTELDALDRRVRTLLTANRMHHPRSSVMRLYIPRKCGGRGFLNAKTLHNREVCNLREYFLRVDVGMHRDVVAVDKGFTPLSLGKENWHKPVVLSVKDRKDVWQSKELHGRYYRTLHGADVDFLASVAWLRFGDLFGETEGFVCAIMDEVIMTNNYRKYIIKDGTVDICRACHCPGESLRHIVSGCSRLANGEYLHRHNQVARIIHQQLALKYKLVESEVPYYKYVPDPVLESGHITLYWDRSIITDRTIVANKPDIVVIDRSERRTMIVDITIPHDENLVKAEKEKQLKYLDLAHEVVDLWEVDSAIIVPIVVSANGLIAKSLDQHLRRLSLGVWVKGLIQKAVLLDTARIVRRFLSLEP

SEQ ID NO: 30343 - protein, 1196 aa, Spodoptera frugiperda
MLTRARRTRGAPPPSPDSSLSSASPSPEPNHEPVTAVASSSSDEYFSPPTSPPPVRRPRRGRPPTGLGARGQQTPGRVPAAGGCARRMKWTQTINENVMRAYYGATEGGTNLTAYRERMLSMFQVLEPSVNVSAQRLSDQVRVIQRNRRLDEAALDRLRSEALRNRVVPAPPQEVVQTPTASQNVTPTTPAAGVEDDRVEQVSTQCNERLRSALEDAIREYRFAPLKPKLPRLPMCGRNRALVSALDSLLKTYFESSENLYDTHSILYCGAVAACRVANVRFSNLDAAVRPKPAVPAWQCRIERRISEARVLIGKLSCFRDGNTRPRVMRFVRRAFVGTETSPHEYMSRVTERIDFLKQKVYAWANRIRRYKKRVERYTQNRMFQRDQRWVYRNWERSNQDVTDGRRPDDEATNTFWRNIWSVPVSHTEDDWICDVERRCETVPEMEEVIITSSDVSSAACSVPNWKSPGPDGLHNFWLKWFTSSHARLASQFQAALEAGSLPQFLTTGVTHLLHKSGSSTEPKNYRPITCLPTVYKLLTSILRTKITKHIEKHSIMSVSQNGCRKGSRGTKELLLIDMVVSQQVRRSRKNLSTCWIDYKKAYDSVPHTWLMRVLELYKIDATLRAFLQSCMRQWSTVLCYPGCRQIQGSEEPVRIVRGIFQGDSLSPLWFCLALNPLSTLLEASGLGYPLRRRGLVISHLLYMDDLKLFAPNNKQLMELLKITEKFSSSIRMEFGVDKCAVMHVKRGGIVESEGLELSDFTKLRALSANDTYKYLGMSEGLGINGPDMKQSLRERFFGRLNKVLKSSLSGGNKVRAYNGWVMPVLMYSFGILKWTQTELDTLDRRVRTLLTANRMHHPRSSIMRLYIPRKCGGRGLLNAKTLHNREVCNLREYFLKVNEGMHREVAAVDNGFTPLSLAKENWRKPVVLSINNRKEVWHSKELHGRFFRALHGPSVDFLASVSWLRFSNLFGETEGFVFAIMDEVILTNNYRKYIIKDGTVDICRACHSPGESIRHIISGCSRLANGEYLHRHNQVAKIIHQQLALHYQLVEFEVPYYKYAPDPVLENGHITLYWDRSIITDRTIVANKPDIVVIDRQARRTMIIDITIPHDENLVKAEKDKQIKYLDLAHEVVDMWNVDSAIVVPIVVSANGLIPNSLDNHLRRLGLGGWIKGLMQKAVLLETARIVRRFLSLEP

SEQ ID NO: 30344 - protein, 1061 aa, Spodoptera frugiperda
MSFLCHFISFIFYLYIYVILCPSNVNVLFFISFLIQNMYLKNLIIIKNNHQPTTPAAGVEDDRVEQVSTQCNERLRSALEDAIREYRFAPLKPKLPRLPMCGRNRALVSALDSLLKTYFESSENLYDTHSILYCGAVAACRVANVRFSNLDAAVRPKPAVPAWQCRIERRISEARVLIGKLSCFRDGNTRPRVMRFVRRAFVGTETSPHEYMSRVTERIDFLKQKIYAWANRIRRYKKRVERYTQNRMFQRDQRWVYRNWERSNQDVTDGRRPDDEATNTFWRNIWSVPVSHTEDDWICDVERRCETVPEMEEVIITSSDVSSAACSVPNWKSPGPDGLHNFWLKWFTSSHARLASQFQAALEAGSLPQFLTTGVTHLLHKSGSSTEPKNYRPITCLPTVYKLLTSILRTKITKHIEKHSIMSVSQNGCRKGSRGTKELLLIDMVVSQQVRRSRKNLSTCWIDYKKAYDSVPHTWLMRVLELYKIDATLRAFLQSCMRQWSTVLCYPGCGQIQGSEEPVRIVRGIFQGDSLSPLWFCLALNPLSTLLEASGLGYPLRRRGLVISHLLYMDDLKLFAPNNKQLMELLKITEKFSSSIRMEFGVDKCAVMHVKRGGIVESEGLELSDFTKLRALSANDTYKYLGMSEGLGINGPDMKQSLRERFFGRLNKVLKSSLSGGNKVRAYNGWVMPVLMYSFGILKWTQTELDTLDRRVRTLLTANRMHHPRSSIMRLYIPRKCGGRGLLNAKTLHNREVCNLREYFLKVNEGMHREVAAMDNGFTPLSLAKENWRKPVVLSVNDRKEVWHSKELHGRFFRALHGPSVDFLASVSWLRFSNLFGETEGFVFAIMDEVILTNNYRKYIIKDGTVDICRACHSPGESIRHIISGCGRLANGEYLHRHNQVAKIIHQQLALHYQLVEFEVPYYKYAPDPVLENGHITLYWDRSIITDRTIVANKPDIVVIDRQARRTMIIDITIPHDENLVKAEKDKQIKYLDLAHEVVDMWNVDSAIVVPIVVSANGLIPNSLDNHLRRLGLGGWIKGLMQKAVLLETARIVRRFLSLEP

SEQ ID NO: 30345 - protein, 1199 aa, Vanessa cardui
MLTRARQRAHNNPSPDPPLSSASQAQDPAQGNNLMSAAASSSSDEYFSPPTSPTPVRRAGRRRPPTGLGARGQPVSNGVPASGGGVQRMRWTQSINENVMRAYYGATEGGTNLTAYRVRMLSMFQALEPAINVSAQRLSDQVRVILRNNRLSDTVLDRIRSEQCNGGVTSAPSQPVVQGPLPAIPQGPCHDHDDEGEGDMAITTSKYSDQLRSALEDAIREYRDIPAELRPRLPRLPMTKRNRDLVCTLDSLLADYFESSENLEDTHSILFCAAVAACRVAGVTFEDTERATRPKTVAPAWQSRIEKRINETRVLIGKLCCFKEGNTRPRVMRFVGRAFLGTGISPQEYPSHVVERIDFLKQKVYAWASRIRRYRRRVDRYYLNRMFQSDQRWVYRTWERLDEGVSDGCRPDDDATNTFWRNIWSVPVDHIEGDWMREVRQACEPLEAMGEISIASEDVAAAVRSVPNWKSPGPDGLHSFWLKWLRSSHECLASQFQSALESGSLPQFLTTGVTHLLHKSGSATDPKNYRPITCLPTVYKLLTSILRDKINSHIENNTILSVSQNGCRGGSRGTKELLLIDMTISQQVRRSRKSLSTCWIDYKKAYDSVPHTWLLRVLELYKLDTTLCSFLRSCMGQWRTVLRYPGCRTIHSNDGPIRIERGIFQGDSLSPLWFCLALNPLSTLLESSRLGYRLRRGGKVISHLLYMDDLKLFAPSDSQLVELLKVTETFSNSIRMEFGVDRCAVMHVKRGEIVESDGLQLSDSINFKSLSANESYKYLGMSEALGINVTDMKQSLQERFFGRLKKVLKSLLSGGNKVRAFNGWVMPVLMYSFGILKWTQKELDALDRRVRVLLTTYRMHHPRSSVMRLYIPRRCGGRGFLNAKTLHNREVYKLREYFLHTDLDMHRDVVTIDKGLTPLSLGKENWRKPVVLSTENRKEVWKSKELHGRFYRALHGPDVDFMASVSWLRFGNLFGETEGFVCAIMDEVIMTNNYRKYIVRDGTVDIYRACHTPGESLRHIISGCSRLANGEYLHRHNQVAKIIHQQLALRYGLVVSEVPYYRYVPDPVLENGHITLYWDRSIITDRTVVANKPDIVVIDRSERRTIIVDITIPHDENLVKAEKDKQIKYLDLAHEVVDMWDVDTAVIVPIVVSANGLMAKSLDQHLKRLSLGSWVKGLMQKAVLLGTARIVRKFLSLEP

SEQ ID NO: 30346 - protein, 1134 aa, Vanessa cardui
MGLGARGQPVSNGVPASGGGVQRMRWTQSINENVMRAYYGATEGGTNLTAYRVRMLSMFRALEPAINVSAQRLSDQVRVILRNNRLSDTVLDRIRSEQCNGGVTSAPSQPVVQGTLPAIPQGPCHDHDDEGEGDMAITTSKYSDQLRSALEDAIREYRDIPAELRPRLPRLPMTKRNRDLVCTLDSLLADYFESSENLEDTHSILFCAAVAACRVAGVTFEDIERATRPKTVAPAWQSRIEKRINETRVLIGKLCCFKEGNTRPRVMRFVGRAFLGTGISPQEYPSHVVERIDFLKQKVYAWASRIRRYRRRVDRYYLNRMFQSDQRWVYRTWERLDQGVSDGCRPDDDATNTFWRNIWSVPVDHIEGDWMREVRQACEPLEAMGEISIASEDVAAAVRSVPNWKSPGPDGLHSFWLKWLRSSHECLASQFQSALESGSLPQFLTTGVTHLLHKSGSATDPKNYRPITCLPTVYKLLTSILRDKINSHIENNTILSVSQNGCRGGSRGTKELLLIDMTISQQVRRSRKSLSTCWIDYKKAYDSVPHTWLLRVLELYKLDTTLCSFLRSCMGQWRTVLRYPGCRTIHSNDEPIRIERGIFQGDSLSPLWFCLALNPLSTLLESSRLGYRLRRGGKVISHLLYMDDLKLFAPSDSQLVELLKVTETFSNSIRMEFGVDKCAVMHVKRGEIVESDGLQLSDSINFKSLSANESYKYLGMSEALGINVTDMKQSLQERFFGRLKKVLKSLLSGGNKVRAFNGWVMPVLMYSFGILKWTQKELDALDRRVRVLLTTYRMHHPRSSVMRLYIPRRCGGRGFLNAKTLHNREVYKLREYFLHTDLDMHRDVVTIDKGLTPLSLGKENWRKPVVLSTENRKEVWKSKELHGRFYRALHGPDVDFMASVSWLRFGNLFGETEGFVCAIMDEVIMTNNYRKYIVRDGTVDICRACHTPGESLRHIISGCSRLANGEYLHRHNQVAKIIHQQLALRYGLVVSEVPYYRYVPDPVLENGHITLYWDRSIITDRTVVANKPDIVVIDRSERRTIIVDITIPHDENLVKAEKDKQIKYLDLAHEVVDMWDVDTAVIVPIVVSANGLMAKSLDQYLKRLSLGSWVKGLMQKAVLLGTARIVRKFLSLEP

SEQ ID NO: 30347 - protein, 1197 aa, Vanessa atalanta
MLTRARQRAHNNPSPDSPLSSASQAQDPTQGSNLVSAIASSSSDEYFSPPMSPTPVRRAGRRRPPTGLGARGQPASNGVPAFGGGVQRMRWTQPINENVMRAYYGATEGGTNLTAYRVRMLSLFQALEPAINVSAQRLSDQVRVILRNNRLSDTVLDQIRSEMSNSDVTSAPSQPVVEGPLPATPQGSDHDDEGEGDMAITTSKYSDQLRSALGDAIREYRNTSAELRPRLPRLPMTKRNRDLVCTLDSLLADYFESSENLEDTHSILFCAAVAACRVAGVTFEDTERATRPKAAAPAWQSRIEKRINETRVLIGKLYCFKEGNTRPRVMRYVGRAFLGTDIIPQEYPSHVVERIDFLKQKVYAWASRIRRYRRRVDRYYLNRMFQNDQRWVYRTWERLDQGVSDGCRPNDDATSTFWRNIWSVPVDHIEGDWMREVRQACEPLEAMGEISIASEDVAAAVRSVPNWKSPGPDGLHSFWLKWLRSSHECLASQFQSALESGSLPQFLTTGVTHLLHKSGSATDPKNYRPITCLPTVYKLLTSILRDKINSHIQNNSILSVSQNGCRGGSQGTKELLLIDMIISQQVRRFRKSLSTCWIDYKKAYDSVPHTWLLRVLELYKLDTTLCSFLRSCMGQWRTVLRYPGCRTIHGNDEPIRIERGIFQGDSLSPLWFCLALNPLSTLLEGSRLGYRLRRGGKVISHLLYMDDLKLFAPSGSQLMELLKVTETFSNSIRMEFGVDKCAVMHVERGEIMESDGLQLSDSINFRSLSANESYKYLGVSEALGINVTDMKQSLQERFFGRLKKVLKSLLSGGNKVRAFNGWVMPVLMYSFGILKWTQKELDALDRRVRVLLTAYRMHHPRSSVMRLYIPRRCGGRGFLNAKTLHNREVYKLREYFLHTDLDMHRDVVTMDKGLTPLSLGKENWRKPVVLSTENRKGVWKSKELHGRFYRALHGPDVDFMASVSWLRFGNLFGETEGFVCAIMDEVIMTNNYRKYIVRDGTVDICRACHTPGESLRHIISGCSRLANGEYLHRHNQVAKIIHQQLALRYDLVVSEVPYYRYVPDPVLENGRITLYWDRSIITDRAVVANKPDIVVIDRSERRTITVDVTIPHDENLVKAEKDKQIKYLDLAHEVVDMWDVDTAVIVPIVVSANGLMAKSLDQHLKRLSLGSWVKGLMQKAVLLGTARIVRKFLSLEP

SEQ ID NO: 30348 - protein, 1081 aa, Eilema sororculum
MIIIIIIITLFQALEPTINTSAQRLSDQVRVIQRNRMLNETVLETLRLECLRNICVTPAPAPAPASTAGINDVTYVAPDDTPIPVSIQYNEEIKEALECALREYRSMPIHVRPRLPRLPIHRRNIALVSALDSLLPRYLENSENLGDTHSILYCTAVAACRMAGAKFPIKDPAIRPKPAIPAWQCRIERRVAEARVLIGKLICFRSGNTRPRVMRYVTRAFAGTDISPQDYTSRVTERIDFLKQKVYAWANRIRRYKKRVDRYTVNCMFQRDQRWVYRSWERTEESVDDVRRPDAEATNAFWRSIWSVPVSHTEGDWMREVERACETIPEMEEINIDAIDVDCAVRSLSNWKSPGPDGLHNFWLKWLRSSHVVLASQFQSAVESGTLPAFMTTGVTHLLHKTGSTLDPNNYRPITCLPTVYKLLTSILRAKINNHINNNSIMCASQNGCRNGARGTKELLLIDMTISQQARRNRKDLAACWIDYKKAFDSVPHTWLLRVLELYKVNTTLCAFLRSCMGQWRTVLFYPGCRQALGSGVPITIERGIFQGDSLSPLWFCLALNPLSTLLVNSGLGYRLRREGQMVSHLFYMDDLKLFAHTNPQLIALLKVTETFSNSIKMAFGVDKCAVIHVKRGRVVESEGIQLSDSTNLRSLLVTETYKYLGMSQTLCINEADMKQMLQERFFGRLKKVLNSLLSGGNKVRACNSWVMPLLMYSFGILKWTQTELDTIDRKVRAQLTAFRMHHPRSSVMRLYIPRKCGGRGFLNAKTLHNREVCNLRDYFLKSNVDMHRDVVNVDSGLTPLGLAKENWRRPTIVSTDSRREVWQSKELHGRFYRALHRPEVDLLASVSWLRFSDLFGETEGFVCAIADEVIKTNNYRKYIMRDGTIDICRACHQPGESLRHITSGCSRLANGEYLHRHNQVARIIHQRLALKYNLVEVEVPYYRYVPEPVLENSHITLYWDRSIITDRTVVANKPDIVVIDRSERRALIVDVTIPHDENLVKAEKDKQVKYLDLAHEVVDMWSVDSAIIVPIVVSVNGLIAKSLDQHLKRLGLDGWVKGQMQKAVLLDTARIVRKFLSLEP

SEQ ID NO: 30349 - protein, 1192 aa, Eilema sororculum
MLTRAQAKRHRNAPTTSPDSSLSSAAQRPAVEPAASSSSSSDEFFSPPTSPTPVRRPGRGRPPTCLGPRRPPASSGAPATGGDVHRMRWTTSINENVMRAYFAATEGGTNLSAYRTRMLPLFQALEPSINTSAQRLSDQVRVIQRNRMLNETVLETLRLECLRNICVTPAPAPAPASTAERNDDTRVAPDDTPIPVSIQYNEEIKEALECALREYRSMPVHVRPRLPRLPIHRRNIALVIALDSLLPRYLENSENLGDTHSILYCTAVAACRMAGAKFPIKDPAIRPKFTIPAWQCRIERRVAEARVLIGKLICFRSGNTRPRVMRYVTRAFAGTDISPQDYTSRVTERIDFLKQKVCAWANRIRRYKKRVDRYTVNRMFQRDQRWVYRSWERTDESVDDVRRPDAEATNAFWRSIWSVPVSHTEGDWMREVERACETIPEMEEIYIDATDVDCAVRSLSNWKSPGPDGLHNFWLKWLRSSHVVLASQFQSAIESGTVPAFMTTGVTHLLHKTGSTLEPNNYRPITCLPTVYKLLTSILRAKINNHINNNSIMCASQNGCRNGARGTKELLLIDMAISQQARRNRKDLTACWIDYKKAFDSVPHTWLLRVLELYKVNTTLCTFLRSCMRQWRMVLFYPGCRQALGGGVPITIERGIFQGDSLSPLWFCLALNPLSALLVNSGLGYRLRREGQVVSHLFYMDDLKLFAHTNPQLIALLKVTETFSNSIKMAFGVDKCAVIHVKRGRVVESEGIQLSDSTNLRSLLVTETYKYLGMSQALCINEVDMKQLLQERFFGRLKKVLNSLLSGGNKVRACNSWVMPLLMYSFGILKWTQTELDTIDRKVRTQLTAFRMQHPRSSVMRLYIPRKCRGRGFLNAKTLHNREVCNLRDYFLKSNVDMHRDVVNVDTGLTPLGLAKENWRRPTIVSTDSRREIWQSKELHGRFYRALHRPEVDLLASVAWLRFSDLFGETEGFVCAIADEVIKTNNYRKYIMRDGTIDICRACHQPGESLRHITSGCSRLANGEYLHRHNQVARIIHQRLALKYNLVEVEVPYYRYVPEPVQENSHITLYWDRSIITDRTVVANKPDIVVIDRSERRALIVDVTIPHDENLVKAETDKQVKYLDLAHEVVDMWSVDSAIIVPIVVSVNGLIAKSLDQHLKRLGLDGWVKGQMQKAVLLDTARIVRKFLSLEP

SEQ ID NO: 30350 - protein, 974 aa, Eilema depressum
MHYQIRPRLPRLPVHKRNIALVCALDSLLPIYLDNSENLGDTHSILYCAAIAACRVAGIRFPETNTTTRPNSGKPRWQCRIECRIAEARALIGKLICFRSGNTRPRVMRFVNRAFSGTGISPRDYAARVIERIDFLKQKVYAWANRIKRYKKRCDRYTLNRTFQRDERWVYRSWERPDLVDDVHLPDIDATNTFWRNIWSVPVAHTEGDWMREVKRSCEAIETMEPVIITEDDIACVVRSLPNWKAAGPDGLHNFWLKWLRSSHVRLASQFQSALESGSLPNFMTTGVTHLLFKSGSAVDPRNYRPITCLPTVYKLLTSVLRVKITNHITGNSILSYSQNGCRSGARGTKEHLIIDAAINQQVRRNRKDMATCWIDYKKAYDSVPHTWLLRVLELYKVDTTLCTFLKACMGQWRTALRYPGCRHIRDDGELIKIERGIFQGDSLSPLWFCLALNPLSTLLEDSGLGYCLRRGGQVISHLLYMDDLKLYAPNSLRLMELLKVTETFSNSIRMEFGVDKCAVMQVKRGGIVESEGIELSDSTKLRSLSANDTYKYLGMSQALGINEAGMKQSLRERFFCRLKKVLNSLLSGGNKVRAYNDWVIPVLTYSFGILRWTQTELDALDRRVRTLLTAYRMHHPRSSVMRLYIPRKCGGRGFLNVKNLHNREIYNLREYFLKVDVDVHRDVVAVDNGLTPLALAKENWRKPAILSIDDRKEVWRSKELHGRFYRALYGPDIDLKASVSWLRFGDLFGETEGFVCAITDEVVMTNNYRRYILKDGTVDICRACHRPGESLRHIISGCSRLANGEYLHRHNLVARIIHQQLALKYKLVDSEVPYYRYVPDPVLDDGRVTLYWDRSIITDRTILANKPDIVVIDRSERRAIIVDITIPHDENLVKAEKDKQIKYLDLAREVVDMWAVDSAIVVPIVVSAHGLIAKSLDQHLKRLALDSWIKGLMQKAVLLDTARIVRRFLSLEP

SEQ ID NO: 30351 - protein, 1199 aa, Vanessa cardui
MLTRARQRAHNNPSPDPPLSFASQAQDPAQGNNLMSAAASSSSDEYFSPPTSPTPVRRAGRRRPPTGLGARGQPVSNGVPASGGGVQRMRWTQSINENVMRAYYGATEGGTNLTAYRVRMLSMFQALEPAINVSAQRLSDQVRVIVRNNRLSDTVLDRIRSEQCNGGVTSAPSQPVVQGPLPAIPQGPCHDHDDEGEGDMAITTSKYSDQLRSALEDAIREYRDIPAELRPRLPRLPMTKRNRDLVCTLDSLLADYFESSENLEDTHSILFCAAVAACRVAGVTFEDTERAIRPKTVAPAWQSRIEKRINETRVLIGKLCCFKEGNTRPRVMCFVGRAFLGTGISPQEYPSHVVERIDFLKQKVYAWASRIRRYRRRVDRYYLNRMFHSDQRWVYRTWERLNEGVSDGCRPDDDATNTFWRNIWSVPVDHIEGDWMREVRQACEPLEAMGEISIASEDVAAAVRSVPNWKSPGPDGLHSFWLKWLRSSHECLASQFQSALESGSLPQFLTTGVTHLLHKSGSATDPKNYRPITCLPTVYKLLTSILRDKINSHIENNTILSVSQNGCRGGSRGTKELLLIDMTISQQVRRSRKSLSTCWIDYKKAYDSVPHTWLLRVLELYKLDTTLCSFLRSCMGQWRTVLRYPGCRTIHSNDEPIRIERGIFQGDSLSSLWFCLALNPLSTLLESSRLGYRLRRGGKVISHLLYMDDLKLFAPSDSQLVELLKVTETFSNSIRMEFGVDKCAVMHVKRGEIVESDGLQLSDSINFKSLSANESYKYLGMSEALGINVTDMKQSLQERFFGRLKKVLKSLLSGGNKVRAFNGWVMPVLMYSFGILKWTQKELDALDRRVRVLLTTYRMHHPRSSVMRLYIPRRCGGRGFLNAKTLHNREVYKLREYFLHTDLDMHRDVVTIDKGLTPLSLGKENWRKPVVLSTENRKEVWKSKELHGRFYRALHGPDVDFMASVSWLRFGNLFGETEGFVCAIMDEVIMTNNYRKYIVRDGTVDICRACHTPGESLRHIISGCSRLANGEYLHRHNEVAKIIHQQLALRYGLVVSEVPYYRYVPDPVLENGHITLYWDRSIITDRTVVANKPDIVVIDRSERRTIIVDITIPHDENLVKAEKDKQIKYLDLAHEVVDMWGVDTAVIVPIVVSANGVMAKSLDQHLKRLSLGSWVKGLMQKAVLLGTARIVRKFLSLEP

SEQ ID NO: 30352 - protein, 962 aa, Vanessa cardui
MTKRNRDLVCTLDSLLTDYFGGSENLEDTHSILFCAAVAACRVAGVTFEDTERATRPEAVAPAWQSRIEKRINETRVLIGKLCCFKEGNTRPRVMRFVGRAFLGTGISPQEYPSHVVERIDFLKQKVYAWASRIRRYRRRVDRYYLNRMFQSDQRWVYRTWERLDEGVSDGCRPDDDATNTFWRNIWSVPVDHIEGDWMREVRQACEPLEAMGEISIASEDVAAAVRSVPNWKSPGPDGLHSFWLKWLRSSHECLASQFQSALESGSLPQFLTTGVTHLLHKSGSATDPKNYRPITCLPTVYKLLTSILRDKINSHIENNTILSVSQNGCKGGSRGTKELLLIDMTISQQVRRSRKSLSTCWIDYKKAYDSVPHTWLLRVLELYKLDTTLCSFLRSCMGQWRTVLRYPGCRTIHSNDEPIRIERGIFQGDSLSPLWFCLALNPLSTLLESSRLGYRLRRGGKVISHLLYMDDLKLFAPSDLQLVELLKVTETFSNSIRMEFGVDKCAVMHVKRGEIVESDGLQLSDSINFKSLSANASSKYLGMSEALGINVTDMKQSLQERFFGRLKKVLKSLLSGGNKVRAFNGWVMPVLMYSFGILKWTQKELDALDRRVRVLLTTYRMHHPRSSVMRLYIPRRCGGRGFLNAKTLHNREVYKLREYFLHTNLDMHRVVVTIDKGLTPLSLGKENWRKPVVLSTENRKEVWKSKELHGRFYRALHGPDVDFMASVSWLRFGNLFGETEGFVCAIMDEVIMTNNYRKYIVRDGTVDICRACHTPGESLRHIISGCSRLANGEYLHRHNQVAKIIHQQLALRYGLVVSEVPYYSYVPDPVLENGHITLYWDRSIITDRTVVANKPDIVVIDRSERRTIIVDITIPHDENLVKAEKDKQIKYLDLAHEIVDMWDVDTAVIVPIVVSANGLMAKSLDQHLKRLSLGSWVKGLMQKAVLLGTARIVRKFLSLEP

SEQ ID NO: 30353 - protein, 1197 aa, Vanessa cardui
MLTRARQRAHNNPSPDPPLSSASQAQDPAQGSSLVSAAASSSSDEYFSPPTSPTPVRRAGRRRPPTGLGARGQPVSNRVPASGGGVQRMRWTQPINENVMRAYYGATKGGTNLTAYRVRMLSLFQALEPAVNVSAQRLSDQVRVILRNNRLSDTVLDRIRSETYNSDVTSGPSTPVVEEPLPAIPQGPEHDDEGGGDMAITKSKYSDHLRSALGDAIREYRNTPAELRPRLPRLPMTKRNRDLVCTLDSLLADYFESSENLEDTHSILFCAAVAACRVAGVTFEDTERATRPKAVASAWQSRIEKRINETRVLIGKLYCFKEGNTRPRVMRFVGRAFLGTGIGPQEYPSHVVERIDFLKQKVYAWASRIRRYRRRVDRYHLNRKFQSDQRWVYRTWERLDQDVSDGCRPDDDATNTFWRNIWSVPVDHIEGDWMLEVRQACEPLEVMGKISIASEDVAAAVRSVANWKSPGPDGLQNFWLKWLRSSHECLASQFQSALESGSLPQFLTTGVTHLLHKSGSATDPKNYRPITCLPTVYKLLAAILRDKINSHIQNNSILSVSQNGCRGGSRGTKELLLIDMTISQQVRRSRKSLSTCWIDYKKAYDSVPHTWLLRVLELYKLDTTLCSFLRSCMGQWRTVLRYPGCRKIHGNDEPIRIERGIFQGDSLSPLWFCLALNPLSTLLESSRLGYRLRRGGKVISHLLYMDDLKLFAPSDSELMELLKVTETFSNSIRMEFGVDKCAVMHVKRGEIMESDGLQLSDSINFKSLSANESYKYLGMSEALGINVTDMKQSLQERFFGRLKKVLKSLLSGGNKVRAFNGWVMPVLMYSFGILKWTQKELDALDRKVRVLLTAYRMHHPRSSVMRLYIPRRCGGRGFLNAKTLHNREVYKLREYFLHTDLDMHRDVVTMDKGLTPLSLGKENWHKPVVLSTENRKEVWKSKELHGRFYRALHGPDVDFMASVTWLRFGNLFGETEGFVCAIMDEVIMTNNYRRYIVRDGTVDICRACHTPGESLRHIISGCSRLANGEYLHRHNQVAKIIHQQLALRYGLVVSEVPYYKYVPDPVLENGHITLYWDRSIITDRTVVANKPDIVVIDRSERRTIIVDITIPHDENLVKAEKDKQIKYLDLAHEVVDMWDVDTAVIVPIVVSANGLMAKSLDQNLKRLSLDSWVKGLIQKAVLLGTARIVRKFLSLEP

SEQ ID NO: 30354 - protein, 1080 aa, Vanessa cardui
MLSMFQALEPAINVSAQRLSDQVRVILRNNRLSDTVLDRIRSEQCNGGVTSAPSQPVVQGPLPAIPQGPCHDHDDEGEGDMAITTSKYSDQLRSALEDAIREYRDIPAELRPRLPRLPMTKRNRDLVCTLDSLLADYFESSENLEDTHSILFCAAVAACRVAGVTFEDTERATRPKTVAPAWQSRIEKRINETRVLIGKLCCFKEGNTRPRVMRFVGRAFLGTGISPQEYPSHVVERIDFLKQKVYAWASRIRRYRRRVDRYYLNRMFHSDQRWVYRTWERLDEGVSDGCRPDDDATNIFWRNIWSVPVDHIEGDWMREVRQACEPLEAMGEISIASEDVAAAVRSVPNWKSPGPDGLHSFWLKWLRSSHECLASQFQSALESGSLPQFLTTGVTHLLHKSGSATDPKNYRPITCLPTVYKLLTSILRDKINSHIENNTILSVSQNGCRGGSRGTKELLLIDMTISQQVRRSRKSLSTCWIDYKKAYDSVPHTWLLRVLELYKLDTTLCSFLRSCMGQWRTVLRYPGCRTIHSNDEPIRIERGIFQGDSLSPLWFCLALNPLSTLLESSRLGYRLRRGGKVISHLLYMDDLKLFAPSDSQLVELLKVTETFSNSIRMEFGVDKCAVMHVKRGEIVESDRLQLSDSINFKSLSANESYKYLGMSEALGINVTDMKQSLRERFFGRLKKVLKSLLSGGNKVRAFNGWVMPVLMYSFGILKWTQKELDALDRRVRVLLTTYRMQHPRSSVMRLYIPRRCGGRGFLNAKTLHNREVYKLREYFLHTDLDMHRDVVTMDKGLTPLSLGKENWRKPVVLSTENRKEVWKSKELHGRFYRALHGPDVDFMASVSWLRFGNLFGETEGFVCAIMDEVIMTNNYRKYIVRDGTVDICRACHTPGESLRHIISGCSRLANGEYLHRHNQVAKIIHQQLALRYGLVVSEVPYYRYVPDPVLENGHITLYWDRSIITDRTVVANKPDIVVIDRSERRTIIVDITIPHDENLVKAEKDKQIKYLDLAHEVVDMRDVDTAVIVPIVVSANGLMAKSLDQHLKRLSLGSWVKGLMQKAVLLGTARIVRKFLSLEP

SEQ ID NO: 30355 - protein, 1198 aa, Schrankia costaestrigalis
MITRAASRRALLTPPDSSLSSASQTVQNVPDSVEASSSSSSDEFFSPPSSPTPALRRGRGRPPIGLGSRAPQASNRVPAAGGNVHRMKWTSSINENVMRAYFVATEGGTNLTAYRDRMLSLFQELEPAVNVSTQRLSDQVRAIQRCHLLNATVLDRFRSDILSNLTISTPPSVTTQVNTIIPLSQPTELNSFETIDCEVTNVSIQYNDQLRSALECAIREYRFMDPGRRPRIPRLPTHKQNIVLVCALDSLLLNYFDNSENLGDAHSILYCGAVAACRVAHIKFPVDDIATRLRPTVPAWQCRIERRIAEARALIGKLICFRLGNTRPRVMRFVTRAFSETNIDRRDYMIHVTERIDFLKQKVYAWANRIKRFKKRMQRYTQNRAFQKDERWVYRNWERPVLGSVDMQLPDADATNDFWRSIWSVPVNHTEGDWIGDVEKACEHIHQMEPVVITTEDVTCAVRRLPNWKSAGPDGLHNFWLKWLHSSHACLASHFQLSLETGTLPDFITTGVTHLLYKSGSSTDPKNYRPITCLPTIYKLLTSILRKKISLHIQENSIMCISQNGCRNEARGTKEQLLIDTTISEQVRRNRKDLSTCWIDYKKAYDSVPHTWLLRVLELYKIDATLCTFLRTCMTKWNTVLFYSGCRLGLGNEVPIQIKRGIFQGDSLSPLWFCLALNPLSTLLECSGLGYRLKRHGQVISHLLYMDDLKLFAPTKSQLLVLLKETETFSNSIKMEFGVDKCAVMHVKRGKVVESDELQLSDSIKLRCLSPSDTYKYLGMSQALCITETDMKQQLRDRFFARLKKVLNSLLTGGNKVRAYNSWVMPVLMYSFGILKWTHTELEALDRKVRTLLTAHRMHHPRSSVMRLYIPRKSGGRGYLSAKTLHNREVYNLREYFLTVDADIHRDVVSVDVGLTPLCLAIENWRKPIIQTIDDRKEIWKSKELHGRFYRALNGPDVDTLLSVSWLQFGDLFGETEGFVFAIMDDVVMTKNYRKYILKDGTVDICRACHCPGESLRHIVSGCSRLANGEYLHRHNQVARIVHQQLALKYHLVDAEVPYYMYVPDPVLENSSVTLYWDRSIITDRTIVANKPDIVVIDRSERRAMIIDITIPHHENLVKAEKDKQTKYLDLAHEVVDMWSVDSAIIVPIVLSVNGLIPKSLYQHLRRLSLDSWIIGLMQKAVLLDTARIVRRFLSLEP

SEQ ID NO: 30356 - protein, 1197 aa, Vanessa atalanta
MLTRARQRAHNNPSPDSPLSSASQAQDPTQGTNLVSAIASSSSDEYFSPPMSPTPVRRAGRRRPPTGLGARGQPASNGVPAFGGGVQRMRWTQPINENVMRAYYGATEGGTNLTAYRVKMLSLFQALEPAINVSAQRLSDQVRVILRNNRLSDTVLDRIRSEVSNSDVTSAPSQPVVEGPLPATPQGSDHVDEGEGDMAITTSKYSDQLRSALGDAIREYRNTSAELRPRLPRLPMTKRNRDLVCTLDSLLADYFESSENLEDTHSILFCAAVAACRVAGVTFEDTERATRPKAAAPAWQSRIEKRINETRVLIGKLYCFKEGNTRPRVMRYVGRAFLGTGIIPQEYPSHVVERIDFLKQKVYAWASRIRRYRRRVDRYYLNRMFQNDQRWVYRTWERLDQGVSDGCRPDDDATSTFWRNIWSVPVDHIEGDWMREVRQACEPLEAMGEISIASEDVAAAVRSVPNWKSPGPDGLHSFWLKWLRSSHECLASQFQSALESGSLPQFLTTGVTHLLHKSGSATDPKNYRPITCLPTVYKLLTSILRDKINSHIQNNSILSVSQNGCRGGSQGTKELLLIDMIISQQVRRFRKSLSTCWIDYKKAYDSVPHTWLLRVLELYKLDTTLCSFLKSCMGQWRTVLRYPGCRTIHGNDEPIRIERGIFQGDSLSPLWFCLALNPLSTLLEGSRLGYRLRRGGKVISHLLYMDDLKLFAPSGSQLMELLKVTETFSNSIRMEFGVDKCAVMHVERGEIMESDGLQLSDSINFRSLSANESYKYLGVSEALGINVTDMKQSLQERFFGRLKKVLKSLLSGGNKVRAFNGWVMPVLMYSFGILKWTQKELDALDRRVRVLLTAYRMHHPRSSVMRLYIPRRCGGRGFLNAKTLHNREVYKLREYFLHTDLDMHRDVVTMDKGLTPLSLGKENWRTPVVLSTENRKGVWKSKELHGRFYRALHGPDVDFMASVSWLRFGNLFGETEGFVCAIMDEVIMTNNYRKYIVRDGTVDICRACHTPGESLRHIISGCSRLANGEYLHRHNQVAKIIHQQLALRYDLVVSEVPYYRYVPDPVLENGRITLYWDRSIITDRAVVANKPDIVVIDRSERRTIIVDVTIPHDENLVKAEKDKQIKYLDLAHEVVDMWDVDTAVIVPIVVSANGLMAKSLDQHLKRLSLGSWVKGLMQKAVLLGTARIVRKFLSLEP

SEQ ID NO: 30357 - protein, 1196 aa, Lymantria monacha
MLTRSQTKAARLPPPGSSQSSASQPTASVPAASVTTEASSSSSSDEYFSPPTTPTPAPRRGRGRPPICLGPRGSPTSHRAPAAGGNVQRMKWTHSINENVMRAYFEATEGGIKLTAYRDRMLLLFQNLEPTINVTAQRLSDQVRAIQRCHLLDVATLDRLRLVSIQTCRVTPISTEISTIDTTQSVPPPYAEGEDATVSMDTQYNEEVRNALECAIREYRFIPHNIRTRLPRLPMHRKNRRLVGTLDSLLTSYLHTSDSISDTHSILYCVAVAACRIAGLKFLENESTIQQKKAKPAWQCRIECRICEARVLIGKLICFRAGNTRPKVMRYVRRAFLGTDIKPDEYNARVTERIDFLKQKVYAWASRIRRYKKRMNRYSVNRMFESDQKSVYRNWERPCLIVDNERLPDAEVTNTFWRSIWSVPVVHSEGDWMGDVKRACENIPQMENVLIDKDDVTCAVRSLSNWKSPGLDGLHNFWLKWLHSAPARLASHFQSALVSGTLPEFMTTGITHLLHKTGSTTEPCNYRPITCLPSVYKLLTSILSNKIAKHVQLNSVMSISQNGCRNGGRGTKELLLIDTAISQQVRRNRKDLSVCWIDYRKAFDSVPHTWLLRVLELYKINSLLCTFLKSCMGQWKTFLKYPMHRLNLGSSEPIYIRRGIFQGDSLSPLWFCLALNPLSILLEHSGLGCRLRRGGQIISHLLYMDDLKLFAPNNPQLVKLLKVTETFSSSIKMEFGVDKCAVMHVKHGGIVEVDRGQLFNTLQFRPLQVTDTYKYLGMSQALNINESDMKQTLRERFFGRLKKVLNSLLSGGNKVRAYNAWVMPILMYSFGILKWTQTELDALDRKVRTLLTSHRMHHPRSSVMRLYIPRKCGGRGFLNAKTLHNREIYNLRDYFLKMTSGMHLDVVAVDNGLTPLGLAKENWHKPAVLSTKDRESIWQSKELHGRFYGALNASEVDFSASVTWLQFGNLFGETEGFVCAIADEVIKTNNYRKYILRDGTADICRACHLPGESLRHIVSGCSRLANGEYLHRHNQVARIIHQQLALLYRLVSTEVPYYRYIPQPVLENGRATLYWDRSIITDRTIVANKPDIVVIDRLQRRAMIVDVTVPHDGNLVKAEKDKQIKYQDLAHEIVDMWDVDTAIVVPIVISTNGLIAKSLAQHLKRLALGSWIGGLMQKAVLLDTARIVRKFLSLEP

SEQ ID NO: 30358 - protein, 868 aa, Spodoptera frugiperda
MRFVRRAFVGTETSPHEYMSRVTKRIDFLKQKVYAWANRIRRYKKRVERYTQNRMFQRDQRWVYRNWERSNQDVTDGRRPDDEATNTFWRNIWSVPVSHTEDDWICDVERRCETVPEMEEVIITSSDVSSAVCSVPNWKSPGPDGLHNFWLKWFTSSHARLASQFQAALEAGSLPQFLTTGVTHLLHKSGSSTEPKNYRPITCLPTVYKLLTSILRTKITKHIEKHSIMSVSQNGCRKGSRGTKELLLIDMVVSQQVRRSRKNLSTCWIDYKKAYDSVPHTWLMRVLELYKIDATLRAFLQSCMRQWSTVLCYPGCRQIQGSEEPVRIVRGIFQGDSLSPLWFCLALNPLSTLLEASGLGYPLRRRGLVISHLLYMDDLKLFAPNNKQLMELLKITEKFSSSIRMEFGVDKCAVMHVKRGGIVESEGLELSDFTKLRALSANDTYKYLGMSEGLGINGPDMKQSLRERFLGRLNKVLKSSLSGGNKVRAYNGWVMPVLMYSFGILKWTQTELDTLDRRVRTLLTANRMHHPRSSIMRLYIPRKCGGRGLLNAKTLHNREVCNLREYFLKVNEGMHREVAAVDNGFTPLSLAKENWRKPVVLSVNDRKEVWHSKELHGRFFRALHGPSVDFLASVSWLRFSNLFGETEGFVCAIMDEVILTNNYRKYIIKDGTVDICRACHSPGESIRHIISGCGRLANGEYLHRHNQVAKIIHQQLALHYQLVEFEVPYYKYAPDPVLENGHITLYWDRSIITDRTIVANKPDIVVIDRQARRTMIIDITIPHDENLVKAEKYKQIKYLDLAHEVVDMWNVDSAIVVPIVVSANGLIPNSLDNHLRRLGLGGWIKGLMQKAVLLETARIVRRFLSLEP

SEQ ID NO: 30359 - protein, 1038 aa, Spodoptera frugiperda
MLMTLRNRVVPAPPQEVAQTPTVSQNVTPTTPAAGVEDDRVEQVSTQCNERLRSALEDAIREYRFAPLKPKLPRLPMCGRNRALVSALDSLLKTYFESSENLYDTHSILYCGAVAACRVANVRFSNLDAAVRPKPAVPAWQCRIERRISEARVLIGKLSCFRDGNTRPRVMRFVRRAFVGTETSPHEYMSRVTERIDFLKQKIYAWANRIRRYKKRVERYTQNRMFQRDQRWVYRNWERSNQDVTDGRRPDDEATNTFWRNIWSVPVSHTEDDWICDVERRCETVPEMEEVIITSSDVSSAACSVPNWKSPGPDGLHNFWLKWFTSSHARLASQFQAALEAGSLPQFLTTGVTHLLHKSGSSTEPKNYRPITCLPTVYKLLTSILRTKITKHIEKHSIMSVSQNGCRKGSRGTKELLLIDMVVSQQVRRSRKNLSTCWIDYKKAYDSVPHTWLMRVLELYKIDATLRAFLQSCMRQWSTVLCYPGCRQIQGSEEPVRIVRGIFQGDSLSPLWFCLALNPLSTLLEASGLGYPLRRRGLVISHLLYMDDLKLFAPNNKQLMELLKITEKFSSSIRMEFGVDKCAVMHVKRGGIVESEGLELSDFTKLRALSANDTYKYLGMSEGLGINGPDMKQSLRERFFGRLNKVLKSSLSGGNKVRAYNGWVMPVLMYSFGILKWTQTELDTLDRRVRTLLTANRMHHPRSSIMRLYIPRKCGGRGLLNAKTLHNREVCNLREYFLKVNEGMHREVAAMDNGFTPLSLAKENWRKPVVLSVNDRKEVWHSKELHGRFFRALHGPSVDFLASVSWLRFSNLFGETEGFVFAIMDEVILTNNYRKYIIKDGTVDICRACHSPGESIRHIISGCGRLANGEYLHRHNQVAKIIHQQLALHYQLVEFEVPYYKYAPDPVLENGHITLYWDRSIITDRTIVANKPDIVVIDRQARRTMIIDITIPHDENLVKAEKDKQIKYLDLAHEVVDMWNVDSAIVVPIVVSANGLIPNSLDNHLRRLGLGGWIKGLMQKAVLLETARIVRRFLSLEP

SEQ ID NO: 30360 - protein, 868 aa, Spodoptera litura
MRFVRRAFVGTETSPHEYLSRVTERIDFLKQKVYAWANRIRRYKKRVERYTQNRMFQRDQRWVYRDWERSNQDVVDGRRPDDDATSTFWRNIWSVPVSHTEGDWMFDVKRRCETIPEMEEVEITSSDVASAACSVPNWKSPGPDGLHNFWIKWFKSSHVRLALHFQAALETGSLPQFLTTGVTHLLHKSGSSTEPKNYRPITCLPTVYKLLTSILRTKITKHIKQNSIMSVSQNGCREGSRGTKELLLIDMVVSQQVRRSRKDLSTCWIDYKKAYDSVPHTWLLKVLELYKIHASLRAFLESCMRQWSTVLCYPGCRQIQGNEEPVRIVRGIFQGDSLSPLWFCLALNPLSTLLEDSGLGYPLRRRGLVISHLLYMDDLKLFAPNKKQLMELLNITEKFSSSIRMEFGVDKCAVMHVKRGGIVESEGLELSDFTKLRSLSANDTYKYLGMSEGLGINGLDMKQSLQERFFGRLNKVLKSSLSGGNKVRAFNGWVMPVLMYSFGILKWTQTELDTLDRRVRTLLTANRMHHPRSSVMRLYIPRKCGGRGLLNAKTLHNREVCSLREYFLKVNEGMHREVAAVDNGFTPLSLAKENWRKPVVLSVNDRKAVWHSKELHGRFFRALHGPSVDFLASVSWLRFSNLFGETEGFVCAIMDEVILTNNYRKYIIKDGTVDICRACHSPGESIRHIISGCGRLANSEYLHRHNQVAKIIHQQLALHYRLVESEVPYYKYVPDPVLENDHITLYWDRSIITDRTIIANKPDIVVIDRQVRRTMIIDITIPHDENLVKAEKDKQIKYLDLAHEVVDMWNVDSAIIVPIVVSANGLIPNSLDNHLRRLALGSWVKGLIQKAVLLETARIVRRFLSLEP

SEQ ID NO: 30361 - protein, 978 aa, Spodoptera litura
MTKKLILWSFKLILYYNNIFNRALVSALDSLLKKYFESSENLYDTHSILYCGAVAACRVANVRFPNLDAAVRPKPAVPAWQYRIERRISEARVLIGKLFCFREGNTRPRVMRFVRRAFVGTETSPHEYLSRVTERIDFLKQKVYAWANRIRRYKKRVERYTQNRMFQRDQRWVYRDWERSNQDVVDGRRPDDDATSTFWRNIWSVPVSHTEGDWMFDVKRRCETIPEMEEVEITSSDVASAACSVPNWKSPGPDGLHNFWIKWFKSSHVRLALHFQAALETGSLPQFLTTGVTHLLHKSGSSTEPKNYRPITCLPTVYKLLTSILRTKITKHIEQNSIMSVSQNGCREGSRGTKELLLIDMVVSQQVRRSRKDLSTCWIDYKKAYDSVPHTWLLKVLELYKIHASLRAFLESCMRQWSTVLCYPGCRQIQGNEEPVRIVRGIFQGDSLSPLWFCLALNPLSTLLEDSGLGYPLRRRGLVISHLLYMDDLKLFAPNKKQLMELLNITEKFSSSIRMEFGVDKCAVMHVKRGGIVESEGLELSDFTKLRSLSANDTYKYLGMSEGLGINGLDMKQSLQERFFGRLNKVLKSSLSGGNKVRAFNGWVMPVLMYSFGILKWTQTELDTLDRRVRTLLTANRMHHPRSSVMRLYIPRKCGGRGLLNAKTLHNREVCSLREYFLKVNEGMHREVAAVDNGFTPLSLAKENWRKPVVLSVNDRKEIWHSKELHGRFFRALHGPSVDFLASVSWLRFSNLFGETEGFVCAIMDEVILTNNYRKYIIKDGTVDICRACHSPGESIRHIISGCGRLANSEYLHRHNQVAKIIHQQLALHYRLVESEVPYYKYVPDPVLENDHITLYWDRSIITDRTIIANKPDIVVIDRQVRRTMIIDITIPHDENLVKAEKDKQIKYLDLAHEVVDMWSVDSAIIVPIVVSANGLIPNSLDNHLRRLALGSWVKGLIQKAVLLETARIVRRFLSLEP

SEQ ID NO: 30362 - protein, 1199 aa, Vanessa cardui
MLTRARQRAHKNPSPDPPLSSASQAQDPAQGNNLMSAAASSSSDEYFSPPTSPTPVRRAGRRRPPTGLGARGQPVSNGVPASGGGVQRMRWTQSINENVMRAYYGATEGGTNLTAYRVRMLSMFQALEPAINVSAQRLSDQVRVILRNNRLSDTVLDRIRSEQCNGGVTSAPSQPVVQGPLPAIPQGPCHDHDDEGEGDMAITTSKYSDQLRSALEDAIREYRDIPAELRPRLPRLPMTKRNRDLVCTLDSLLADYFESSENLEDTHSILFCAAVAACRVAGFTFEDTERATRPKTVAPAWQSRIEKRINETRVLIGKLCCFKEGNTRPRVMRFVGRAFLGTGISPQEYPSHVVERIDFLKQKVYAWASRIRRYRRRVDRYYLNRMFQSDQRWVYRTWERLDQGVSDGCRPDDDTTNTFWRNIWSVPVDHIEGDWMREVRQACEPLEAMGEISIASEDVAAAVRSVPNWKSPGPDGLHSFWLKWLRSSHECLASQFQSALESGSLPQFLTTGVTYLLHKSGSATDPKNYRPITCLPTVYKLLTSILRDKINSHIENNTILSVSQNGCRGGSRGTKELLLIDMTISQQVRRSRKSLSTCWIDYKKAYDSVPHTWLLRVLELYKLDTTLCSFLRSCMGQWRTVLRYHGCRTIHSNDEPIRIERGIFQGDSLSPLWFCLALNPLSTLLESSRLGYRLRRGGKVISHLLYMDDLKLFAPSDSQLVELLKVTETFSNSIRMEFGVDKCAVMHVKRGEIVESDGLQLSDSINFKSLSANESYKYLGMSEALGINVTDMKQSLQERFFGRLKKVLKSLLSGGNKVRAFNGWVMPVLMYSFGILKWTQKELDALDRRVRVLLTTYRMHHPRSSVMRLYIPRRCGGRGFLNAKTLHNREVYKLREYFLHTDLDMHRDVVTIDKGLTPLSLGKENWRKPVVLSTENRKEVWKSKELHGRFYRALHGPDVDFMASVSWLRFGNLFGETEGFVCAIMDEVIMTNNYRKYIVRDGTVDICRACHTPGESLRHIISGCSRLANGEYLHRHNQVAKIIHQQLALRYGLVVSEIPYYRYVPDPVLENGHITLYWDRSIITDRTVVANKPDIVVIDRSERRTIIVDITIPHDENLVKAEKDKQIKYLDLAHEVVDMWDVDTAVIVPIVVSANGLMAKSLDQHLKRLSLGSWVKGLMQKAVLLGTARIVRKFLSLEP

SEQ ID NO: 30363 - protein, 1197 aa, Vanessa atalanta
MLTRARQRAHNNPSPDSPLSSASQAQDPTQGTNLVSAIASSSSDEYFSPPMSPTPVRRAGRRRPPTGLGARGQPASNGVPAFGGGVQRMRWTQPINENVMRAYYGATEGGTNLTAYRVRMLSLFQALEPAINVSAQRLSDQVRVILRNNRLSDTVLDRIRSEVSNSDVTSAPSQPVVEGPLPATPQGSDHVDEGEGDMAITTSKYSDQLRSALGDAIREYRNTSAELRPRLPRLPMTKRNRDLVCTLDSLLADYFESSENFEETHSILFYAAVAACRVAGVTFEDTERATRPKAAAPAWQSRIEKRINETRVLIGKLYCFKEGNTRPRVMRYVGRAFLGTGIIPQEYPSHVVERIDFLKQKVYAWASRIRRYRRRVDRYYLNRMFQNDQRWVYRTWERLDQGVSDGCRPDDDATSTFWRNIWSVPVDHIEGDWMREVRQACEPLEAMGEISIASEDVAAAVRSVPNWKSPGPDGLHSFWLKWLRSSHECLASQFQSALESGSLPQFLTTGVTHLLHKSGSATDPKNYRPITCLPTVYKLLTSILRDKINSHIQNNSILSVSQNGCRGGSQGTKELLLIDMIISQQVRRFRKSLSTCWIDYKKAYDSVPHTWLLRVLELYKLDTTLCSFLKSCMGQWRTVLRYPGCRTIHGNDEPIRIERGIFQGDSLSPLWFCLALNPLSTLLEGSRLGYRLRRGGKVISHLLYMDDLKLFAPSGSQLMELLKVTETFSNSIRMEFGVDKCAVMHVERGEIMESDGLQLSDSINFRSLSANESYKYLGVSEALGINVTDMKQSLQERFFGRLKKVLKSLLSGGNKVRAFNGWVMPVLMYSFGILKWTQKELDALDRRVRVLLTAYRMHHPRSSVMRLYIPRRCGGRGFLNAKTLHNREVYKLREYFLHTDLDMHRDVVTMDKGLTPLSLGKENWRKPVVLSTENRKGVWKSKELHGRFYRALHGPDVDFMASVSWLRFGNLFGETEGFVCAIMDEVIMTNNYRKYIVRDGTVDICRACHTPGESLRHIISGCSRLANGEYLHRHNQVAKIIHQQLALRYDLVVSEVPYYRYVPDPVLENGRITLYWDRSIITDRAVVANKPDIVVIDRSERRTIIVDVTIPHDENLVKAEKDKQIKYLDLAHEVVDMWDVDTAVIVPIVVSANGLMTKSLDQHLKRLSLGSWVKGLMQKAVLLGTARIVRKFLSLEP

SEQ ID NO: 30364 - protein, 1191 aa, Trichoplusia ni
MLTRRRAARLPSPGSSPSSASQLPPGRGPAPAIAVASSSSDEYYSPPTSPTPVRRPGRRRPPSSLAPSGQPASNRAPAPGGVVQRMKWTRPMNENVMRAYYGAIGGGTNLTAYRARMLSLFRTLEPDVDVSAQRLSDQVRVIQRNHRLDDATLDRLRSEVQTSPVVVTPSIAEAPAASALPANPADGGDDDGAITVSTQCSDHIRSTLEQAVLEYRSTPRDQRPRLPRLPMHNRNKALMGVLDSLLSSYFGNSEDLGDTHSLLYCAAVATCRVAGVTFRDNTAARPKQAAPAWQCRIERRVAEARTLIAKLVAFRGGNTRPRVMRFVKRAFAGTNISPSEYTARVTERIDFFKQKVCAWASRIRRYKTRVDRFHQNRMFQRDQRWVYRSWEQPASEEGAGRLPDDVATNLFWRSIWSAPVTHSEGDWIRDVEQSCERIEEMGAIDISPQDVANAVRPLANWKAPGPDGLHNFWLKWLPSSHGCLASQFQSAVDSGVLPQFFTTGSTHLLHKTGSTTDPKNYRPITCLPTIYKLLTSILREKINDHIERFSIMSASQNGCRNGSRGTKELLLIDMTICQQVRRSKKGVSKCWIDYKKAYDSVPHAWLMRVLELYKINTTLRTFLKSCMGQWTTVLHYPGCRDIQKSGQLIRIERGIFQGDSLSPLWFCLALNPLSTLLENSRLGYSLRRGSQVISHLLYMDDLKLFASNKLQLMKLLKITESFSNSIRMEFGVDKCAVMHVKRGGIVESQGIQLSDSINLRSLSSTETYKYLGMSEALGINVADMKQSLQTRFFGRLNKVLKSSLSGGNKVRAFNGWVMPVIMYSFGILKWTQTELDALDRRVRTLLTANRMHHPRSSVMRLYIPRKCGGRGFLNAKTLHNREVCNLREYFLRVDVGMHRDVVAVDKAFTPLSLGKENWHKPVVLSVKDRKDVWQSKELHGRYYRTLHGADVDFLASVAWLRFGDLFGETEGFVCAIMDEVIMTNNYRKYIIKDGTVDICRACHSSGESLRHIVSGCSRLANGECLHRHNQVARIIHQQLALKYKLVESEVPYYKYVPDPVLESGHITLYWDRSIITDRTIVANKPDIVVIDRSERRTMIVDITIPHDENLVKAEKEKQLKYLDLAHEVVDLWEVDSAIIVPIVVSANGLIAKSLDQHLRRLSLGVWVKGLIQKAVLLDTARIVRRFLSLEP

SEQ ID NO: 30365 - protein, 1199 aa, Spodoptera exigua
MLTRAKARARAAPPPSPDSSLSSASPSPETRTTRSPVIAVASSSSDEYFSPLASPAPERRQRRGRPPMGLGTRGQRAPGRVPATGGCARRMKWSQSMNENVMRAYYGATEGGTNLTAYRDRMLSLFQVLEPSVNVSAQRLSDQVRVIQRSRRLEDAALDRLRLETLHNRVVLTSSQSATQTPVENATLATPVADVEDDKVEQVSTQCNERLRNALEDAIHEYRFAPSELRPKLPRLPMCGKNRALVCALDSLLENYFESSENLYDTHSILYCGAIAACRVANVRFPNLDAAVRPKPAAPAWQCRIERRIDEARVLIGKLTCFREGNNRPRVMRFVRRAFVGTETSPHEYLTRVTERIDFLKQKIYAWANRIRRYKKRVERYTQNRMFQSDQRWVYRDWERSSQDVVNGQRPDDETTNSFWRNIWSVPVNHTEADWMCDVKRECETLPEMEKVVITSSNVANAACSVPNWKSPGPDGLHNFWLKSFSSSHDRLASQFQMALEAGSLPQFLTTGITHLLHKSGSYTEPKNYRPITCLPTVYKLFTSILRAKITKHIEKNSIMSVSQNGCRKGSRGTKELLLIDMVISQQVRRSRKDLSTCWIDYKKAYDSVPHTWFMRVLELYKINTTLRTFLQSCMRQWSTVLSYPGCKQIQRSEEPVRIVRGIFQGDSLSPLWFCLALNPLSTLLEASGLGYRLRRKGHVISHLLYMDDLKLFAPNKEELMELLKITKNFSSSIRMEFGVDKCAVMHVKRGGIVESESLELSDFTKLRSLSANDTYKYLGMSEGLGINGPHMKQYLQERFFGRLNKVLKSSLSGGNKVRAFNGWVMPVLMYSFGILKWTQTELDTLDRRVRTLLTANRMHHPRSSVMRLYIPRKRGGRGFLNAKTLHNREVCNLREHFLKVDEDMHREVVTVDKGFTPLSLAKENWCKPVVLSVNDRKTVWSSKELHGRFFRALHGPDVDFLASVAWLRFSNLFGETEGFVCAIMDEVILTNNYRKYIMKDGTVDICRACHSPGESIRHIISGCGRLANDEYLHRHNQVAKIMHQQLALKYRLVESEVPYYKYVPDPVLEKDHITLYWDRSIITDRTIVANKPDIVLVDRLARRTTIIDVAIPHDENLVKAEKDKQLKYLDLAHEVVDMWSVDSAIVVPIVVSANGLVPKSLDNHLKRLTLGGWIKGLIQKAVLLETARIVRRFLSLEP

SEQ ID NO: 30366 - protein, 1190 aa, Nascus phocus
MLTRARRQAHNTPSPDPPLSSASQALDPAPGSSLVSAAASSSSDEYFSPPTSPTPVRRAGRRRPPTGLGARGQPVSNRVPAPGGDVQRMRWTQSINENVMRAYYGATEGGTNLTAYRVRMLSLFQALEPAINVSAQRLSDQVRVILRNNRLSDTVLDRLRLEMCSSGVTSAPSQPVVQGPLPETPPGPVHDDERGGDTGIITSKYSDQLRSALEDAMREYRTTPAELRPRLPRLPMTKRNRDLVCTLDSLLADYFESSENLEDTHSILFCAAVAVCRVAGVTFEDTERATRPKPAVPAWQSRIEKRINETRVLIGKLYCFKEGNTRPRVMRFVGRAFLGTGISPQEYPSHVVERIDFLKQKVYAWASRIRRYRRRVDRYYLNRMFQSDQRWVYRTWERLDQGVSDGRRPDDDATNTFWRNIWSVPVDHFEGDWMQGVRQACEPLEAMGEISIASEDVAAAVRSVSNWKSPGPDGLHSFWLKWLRSSHECLASQFQSALESGSLPQFLTTGVTHLLHKSGSATDPKNYRPITCLPTVYKLLTSILRDKINTHIQNNSILSVSQNGCRGGSRGTKELLLIDMTISQQVRRFRKNLSTCWIDYKKAYDSVPHTWLLRVLELYKLDTTLCSFLRSCMGQWRTVLRYPGCRTIHGNDEPIRIERGIFQGDSLSPLWFCLALNPLSTLLESSRLGYRLRRGGKVISHLLYMDDLKLFASSGSQLMELLKVTETFSNSIRMEFGVDKCAVMHVERGRIVESEGIQLSDSINFRSLSADESYKYLGMSEALGINVTDMKQSLQERFFGRLKKVLKSLLSGGNKVRAFNGWVMPVLMYSFGILKWTQKELDALDRRVRVLLTAYRMHHPRSSVMRLYIPRRCGGRGFLNAKTLHNCEVYKLREYFLHTDLDMHRDVVATDKGLTPLSLGKENWRKPVVLSTENRKEVWKSKELHGRFYRALHGPDVDFMASVSWLRFGNLFGETEGFVCAIMDEVIMTNNYRKYIVRDGTVDICRACHTPGESLRHIISGCSRLANGEYLHRHNQVAKIIHQQLALRYGLVESEVPYYRYVPDPVLENGHITLYWDRTIITDRTVVANKPDIVVIDRSERRTIIVDVTIPHDENLVKAEKDKQIKYLDLAHEVVDMWDVDTAVIVPIVVTANGLMAKSLDQHLKRLSLGSWVKGLMQKAVLLGTARIVR

SEQ ID NO: 30367 - protein, 1200 aa, Spodoptera litura
MLTRARRRQGAPPPPPDSSLSSASPSPDPSSAGSPVTAVASSSSDDYFSPPTSPTPVRRPGRGRPPTGLGARGQQAPGRVPATGGCVRRMKWSQTINENVMRSYYGATEGGTNLTAYRERMLSIFQVLEPSINVSAQRLSDQVRVIQRNRRLDEAALDRLRLEALRNRVVPAPPQSVAQTPIVSQCVTPTTPIVGVEDDRVEQVSTQCNERLRSALEDAVREYRLAPSNLRPKLPRLPMCRKNRALVSALDSLLKKYFESSENLYDTHSILYCGAVAACRVANVRFPNLDAAVRPKPAVPAWQYRIERRISEARVLIGKLSCFREGNTRPRVMRFVRRAFVGTETSPHEYLSRVTERIDFLKQKVYAWANRIRRYKKRVERYTQNRMFQRDQRWVYRDWERSNQDVVDGRRPDDDATSTFWRNIWSVPVSHTEGDWMFDVKRRCETIPEMEEVEITSSDVASAACSVPNWKSPGPDGLHNFWIKWFKSSHVRLALHFQAALETGSLPQFLTTGVTHLLHKSGSSTEPKNYRPITCLPTVYKLLTSILRTKITKHIKKNSIMSVSQNGCREGSRGTKELLLIDMVVSQQVRRSRKDLSTCWIDYKKAYDSVPHTWLLKVLELYKIHASLRAFLESCMRQWSTVLCYPGCRQIQGNEEPVRIVRGIFQGDSLSPLWFCLALNPLSTLLEDSGLGYPLRRRGLVISHLLYMDDLKLFAPNKKQLMELLNITEKFSSSIRMEFGVDKCAVMHVKRGGIVESEGLELSDFTKLRSLSANDTYKYLGMSEGLGINGPDMKQSLQERFFGRLNRVLKSSLSGGNKVRAFNGWVMPVLMYSFGILKWTQTELDTLDRRVRTLLTANRMHHPRSSVMRLYIPRKCGGRGLLNAKTLHNREVCSLREYFLKVNEGMHREVAAVDNGFTPLSLAKENWRKPVVLSVNDRKEIWHSKELHGRFFRALHGPSVDFLASVSWLRFSNLFGETEGFVCAIMDEVILTNNYRKYIIKDGTVDICRACHSPGESIRHIISGCGRLANSEYLHRHNQVAKIIHQQLALHYRLVESEVPYYKYVPDPVLENDHITLYWDRSIITDRTIVANKPDIVVIDRQVRRTMIIDVTIPHDENLVKAEKDKQIKYLDLAHEVVDMWSVDSAIIVPIVVSANGLIPKSLDIHLRRLALGGWIKGLIQKAVLLETARIVRRFLSLEP

SEQ ID NO: 30368 - protein, 1201 aa, Spodoptera litura
MMLTRARSKQGAPPPPPDSSLSSASPSPDPSPAGSPVTAVASSSSDDYFSPPTSPTPVRRPGRGRPPTGLGARGQQAPGRVPATGGCVRRMKWSQTINENVMRSYYGATEGGTNLTAYRERMLSIFQVLEPSINVSAQRLSDQVRVIQRNRRLDEAALDRLRLEALRNRVVPAPPQSVAQTPIVSQCVTPTTPIVGVEDDRVEQVSTQCNERLRSALEDAVREYRLAPSNLRPKLPRLPMCRKNRALVSALDSLLKKYFESSENLYDTHSILYCGAVAACRVANVRFPNLDAAVRPKPAVPAWQYRIERRISEARVLIGKLSCFREGNTRPRVMRFVRRAFVGTETSPHEYLSRVTERIDFLKQKVYAWANRIRRYKKRVERYTQNRMFQRDQRWVYRDWERSNQDVADGRRPDDDATNTFWRNIWSVPVSHTEGDWMFDVKRRCETIPEMEEVEITSSDVASAACSVPNWKSPGPDGLHNFWIKWFKSSHVRLALHFQAALETGSLPQFLTTGVTHLLHKSGSSTEPKNYRPITCLPTVYKLLTSILRTKITKHIEQNSIMSVSQNGCREGSRGTKELLLIDMVVSQQVRRSRKDLSTCWIDYKKAYDSVPHTWLLKVLELYKIHASLRAFLESCMRQWSTVLCYPGCRQIQGNEEPVRIVRGIFQGDSLSPLWFCLALNPLSTLLEDSGLGYPLRRRGLVISHLLYMDDLKLFAPNKKQLMELLNITEKFSSSIRMEFGVDKCAVMHVKRGGIVESEGLELSDFTKLRSLSANDTYKYLGMSEGLGINGPDMKQSLQERFFGRLNKVLKSSLSGGNKVRAFNGWVMPVLMYSFGILKWTQTELDTLDRRVRTLLTANRMHHPRSSVMRLYIPRKCGGRGLLNAKTLHNREVCSLREYFLKVNEGMHREVAAVDNGFTPLSLAKENWRKPVVLSVNDRKEVWHSKELHGRFFRALHGPSVDFLASVSWLRFSNLFGETEGFVCAIMDEVILTNNYRKYIIKDGTVDICRACHSPGESIRHIISGCGRLANSEYLHRHNQVAKIIHQQLALHYRLVESEVPYYKYVPDPVLENDHITLYWDRSIITDRTIIANKPDIVVIDRQVRRTMIIDITIPHDENLVKAEKDKQIKYLDLAHEVVDMWNVDSAIIVPIVVSANGLIPNSLDDHLRRLALGSWVKGLIQKAVLLETARIVRRFLSLEP

SEQ ID NO: 30369 - protein, 1109 aa, Vanessa cardui
MRWTQPINENVMRAYYGATKGGTNLTAYRVRMLSLFQALEPAVNVSAQRLSDQVRVILRNNRLSDTVLDRIRSETCNSDVTSGPSTPVVEEPLPAIPQGPEHDDEGGGDMAITKSKYSDHLRSALGDAIREYRNTPAELRPRLPRLPMTKRNRDLVCTLDSLLADYFESSENLEDTHSILFCAAVAACRVAGVTFEDTERATRPKAVAPAWQSRIEKRINETRVLIGKLYCFKEGNTRPRVMRFVGRAFLGTGISPQEYPSHVVERIDFLKQKVYAWASRIRRYRRRVDRYHLNRKFQSDQRWVYRTWERLDQDVSDGCRPDVDATNTFWRNIWSVPVDHIEGDWMLEVRQACEPLEVMGKISIASEDVAAAVRSVANWKSPGPDGLHNFWLKWLRSSHECLASQFQSALESGSLPQFLTTGVTHLLHKSGSATDPKNYRPITCLPTVYKLLTAILRDKINSHIQNNSILSVSQNGCRGGSRGTKELLLIDMTISQQVRRSRKSLSTCWIDYKKAYDSVPHTWLLRVLELYKLDTTLCSFLRSCMGQWRTVLRYPGCRTIHGNDEPIRIERGIFQGDSLSPLWFCLALNPLSTLLESSRLGYRLRRGGKVISHLLYMDDLKLFAPSDSQLMELLKVTETFSNSIRMEFGVDKCAVMHVKRGEIMESDGLQLSDSINFKSLSANESYKYLGMSEALGINVTDMKQSLQERFFGRLKKVLKSLLSGGNKVRAFNGWVMPVLMYSFGILKWTQKELDALDRRVRVLLTAYRMHHPRSSVMRLYIPRRCGGRGFLNAKTLHNREVYKLREYFLHTDLDMHRDVVTMDKGLTPLSLGKENWHKPVVLSTENRKEVWKSKELHGRFYRALHGPDVDFMASVSWLRFGNLFGETEGFVCAIMDEVIMTNNYRRYIVRDGTVDICRACHTPGESLRHIISGCSRLANGEYLHRHNQVAKIIHQQLALRYGLVVSEVPYYKYVPDPVLENGHITLYWDRSIITDRTVVANKPDIVVIDRSERRTIIVDITIPHDENLVKAEKDKQIKYLDLAHEVVDMWDVDTAVIVPIVISANGLMAKSLDQHLKRLSLDSWVKGLMQKAVLLGTARIVRKFLSLEP

SEQ ID NO: 30370 - protein, 1196 aa, Lymantria monacha
MLTRSQTKAARPPPPGSSQSSASQPTASVPAASVTTEASSSSSSDEYFSPPTTPTPAPRRGRGRPPICLGPRGPPTSHRAPAAGGNVQRMKWTHSLNENVMRAYFEATEGGIKLTAYRDRMLLLFQNLEPTINVTAQRLSDQVRAIQRCHLLDVATLDRLRLVSIQTCRVTPISTEISTIDTTQSGPPPYAEGEDATVSMDTQYNEEVRNALECAIREYRFIPHNIRPRLPRLLMHRKNRRLVGTLDSLLTSYLHTSDSISDTHSILYCVAVAACRIAGLKFLENESTIQQKKAKPAWQCRIECRICEARVLIGKLICFRAGNTRPKVMRYVRRAFLGTDIKPDEYNARVTERIDFLKQKVYAWASRIRRYKKRMNRYSVNRMFESDQKSVYRNWERPCLIVDNERLPDAEVTNTFWRSIWSVPVVHSEGDWMGDVKRACENIPQMENVLIDKDDVTCAVRSLSNWKSPGPDGLHNFWLKWLHSAHARLASHFQSALVSGTLPEFMTTGITHLLHKTGSTTEPCNYRPITCLPSVYKLLTSILSNKIAKHVQLNSVMSISQNGCRNGGRGTKELLLIDTAISQQVRRNRKDLSVCWIDYRKAFDSVPHTWLLRVLELYKINSLLCTFLKSCMGQWKTFLKYPMHRLNLGSSEPIYIRRGIFQGDSLSPLWFCLALNPLSILLEHSGLGCRLRRGGQIISHLLYMDDLKLFAPNNPQLVKLLKVTETFSSSIKMEFGVDKCAVMHVKHGGIVEVDRGQLFNTLQFRPLQVTDTYKYLGMSQALNINESDMKQTLRERFFGRLKKVLNSLLSGGNKVRAYNAWVMPILMYSFGILKWTQTELDALDRKVRTLLTSHRMHHPRSSVMRLYIPRKCGGRGFLNAKTLHNREIYNLRDYFLKMTSGMHLDVVAVDNGLTPLGLAKENWHKPAVLSTKDRESIWQSKELHGRFYGALNASEVDFSASVTWLQFGNLFGETEGFVCAIADEVIKTNNYRKYILRDGTADICRACHLPGESLRHIVSGCSRLANGEYLHRHNQVARIIHQQLALLYRLVSTEVPYYRYIPQPVLENGRATLYWDRSIITDRTIVANKPDIVVIDRLQRRAMIVDVTVPHDGNLVKAEKDKQIKYQDLAHEIVDMWDVDTAIVVPIVISTNGLIAKSLAQHLKRLALGSWIGGLMQKAVLLDTARIVRKFLSLEP

SEQ ID NO: 30371 - protein, 868 aa, Spodoptera exigua
MRFVRRAFMGTETSPHEYLTRVTERIDFLKQKIYAWANRIRRYKKRVERYTQNRMFQSDQRWVYRDWERSSQDVVSGQRPDDETTNSFWRNIWSVPVNHTEADWICDVKRECETLPEMEEVVITSTDVANAACSVPNWKSPGPDGLHNFWLKSFTSSHDRLASQFQMALEAGSLPQFLTTGITHLLHKSGSYTEPKNYRPITCLPTVYKLFTSILRAKITKHIEKNSIMSVSQNGCRKGSRGTKELLLIDMVISQQVRRSRKDLSTCWIDYKKAYDSVPHTWLMRVLELYKINTTLRTFLQSCMRQWSTVLSYPGCKQIQRSEEPVRIVRGIFQGDSLSPLWFCLALNPLSTLLEASGLGYRLRRKGHVISHLLYMDDLKLFAPNKEELMELLKITKNFSSSIRMEFGVDKCAVMHVKRGGIVESESLELSDFTKLRSLSANDTYKYLGMSEGLGINGPHMKQSLQERFFGRLNKVLKSSLSGGNKVRAFNGWVMPVLMYSFGILKWTQTELDTLDRRVRTLLTANRMHHPRSSVMRLYIPRKCGGRGFLNAKTLHNREVCNLREHFLKVDEDMHREVVTVDKGFTPLSLAKENWCKPVVLSVNDRKAVWSSKELHGRFFRALHGPDIDFLASVAWLRFSNLFGETEGFVCAIMDEVILTNNYRKYIMKDGTVDICRACHSSGESIRHIISGCGRLANGEYLHRHNQVAKIIHQQLALKYRLVESEVPYYKYVPDPVLEKDHITLYWDRSIITDRTIVANKPDIVVVDRLARRTTIIDVAIPHDENLVKAEKDKQLKYLDLAHEVVDMWNVDSAIVVPIVVSANGLVPKSLDNHLKRLTLGGWIKGLIQKAVLLETARIVRKFLSLEP

SEQ ID NO: 30372 - protein, 1196 aa, Spodoptera frugiperda
MLTRARRTRGAPPPSPDSSLSSASPSPEPNHEPVTAVASSSSDEYFSPPTSPPPVRRTRRGRPPTGLGARGQQTPGRVPAAGGCARRMKWTQTINENVMRAYYGATEGGTNLTAYRERMLSMFQVLEPSVNVSAQRLSDQVRVIQRNRRLDEAALDRLRSEALRNRVVPAPPQEVVQTPTASQNVTPTTPAAGVEDDRVEQVSTQCNERLRSALEDAIREYRFAPLKPKLPRLPMCGRNRALVSALDSLLKTYFESSENLYDTHSILYCGAVAACRVANVRFSNLDAAVRPKPAVPAWQCRIERRISEARVLIGKLSCFRDGNTRPRVMRFVRRAFVGTETSPHEYMSRVTERIDFLKQKIYAWANRIRRYKKRVERYTQNRMFQRDQRWVYRNWERSNQDVTDGRRPDDEATNTFWRNIWSVPVSHTEDDWICDVERGCETVPEMEEVIITSSDVSSAACSVPNWKSPGPDGLHNFWLKWFTSSHARLASQFQAALEAGSLPQFLTTGVTHLLHKSGSSTEPKNYRPITCLPTVYKLLTSILRTKITKHIEKHSIMSVSQNGCRKGSRGTKELLLIDMVVSQQVRRSRKNLSTCWIDYKKAYDSVPHTWLMRVLELYKIDATLRAFLQSCMRQWSTVLCYPGCRQIQGSEEPVRIVRGIFQGDSLSPLWFCLALNPLSTLLEASGLGYPLRRRGLVISHLLYMDDLKLFAPNNKQLMELLKITEKFSSSIRMEFGVDKCAVMHVKRGGIVESEGLELSDFTKLRALSANDTYKYLGMSEGLGINGPDMKQSLRERFFGRLNKVLKSSLSGGNKVRAYNGWVMPVLMYSFGILKWTQTELDTLDRRVRTLLTANRMHHPRSSIMRLYIPRKCGGRGLLNAKTLHNREVCNLREYFLKVNEGMHREVAAMDNGFTPLSLAKENWRKPVVLSVNDRKEVWHSKELHGRFFRALHGPSVDFLASVSWLRFSNLFGETEGFVFAIMDEVILTNNYRKYIIKDGTVDICRACHSPGESIRHIISGCGRLANGEYLHRHNQVAKIIHQQLALHYQLVEFEVPYYKYAPDPVLENGHITLYWDRSIITDRTIVANKPDIVVIDRQARRTMIIDITIPHDENLVKAEKDKQIKYLDLAHEVVDMWNVDSAIVVPIVVSANGLIPNSLDNHLRRLGLGGWIKGLMQKAVLLETARIVRRFLSLEP

SEQ ID NO: 30373 - protein, 1109 aa, Spodoptera frugiperda
MKWTQTINENVMRAYYGATEGGTNLTAYRERMLSMFQVLEPSVNVSAQRLSDQVRVIQRNRRLDEAALDRLRSEALRNRVVPAPPQEVAQTPTASQNVTPTTPAAEVEDDRVEQVSTQCNERLRSALEDAIREYRFAPLKPKLPRLPMCGRNRALVSALDSLLKTYFESSENLYDTHSILYCGAVAACRVANVRFSNLDAAVRPKPAVPAWQCRIERRISEARVLIGKLSCFRDGNTRPRVMRFVRRAFVGTEISPHEYMSRVTERIDFLKQKIYAWANRIRRYKKRVERYTQNRMFQRDQRWVYRNWERSNQDVTDGRRPDDEATNTFWRNIWSVPVSHTEDDWICDVERRCETVPEMEEVIITSSDVSSAACSVPNWKSPGPDGLHNFWLKWFTSSHARLASQFQAALEAGSLPQFLTTGVTHLLHKSGSSTEPKNYRPITCLPTVYKLLTSILRTKITKHIENHSIMSVSQNGCRKGSRGTKELLLIDMVVSQQVRRSRKNLSTCWIDYKKAYDSVPHTWLMRVLELYKIDATLRAFLQSCMRQWSTVLCYPGCRQIQGSEEPVRIVRGIFQGDSLSPLWFCLALNPLSTLLEASGLGYPLRRRGLVISHLLYMDDLKLFAPNNKQLMELLKITEKFSSSIRMEFGVDKCAVMHVKRGGIVESEGLELSDFTKLRALSANDTYKYLGMSEGLGINGPDMKQSLRERFFGRLNKVLKSSLSGGNKVRAYNGWVMPVLMYSFGILKWTQTELDTLDRRVRTLLTANRMHHPRSSIMRLYIPRKCGGRGLLNAKTLHNREVCNLREYFLKVNEGMHREVAAMDNGFTPLSLAKENWRKPVVLSVNDRKEVWHSKELHGRFFRALHGPSVDFLASVSWLRFSNLFGETEGFVFAIMDEVILTNNYRKYIIKDGTVDICRACHSPGESIRHIISGCGRLANGEYLHRHNQVAKIIHQQLALHYQLVEFEVPYYKYAPDPVLENGHITLYWDRSIITDRTIVANKPDIVVIDRQARRTMIIDITIPHDENLVKAEKDKQIKYLDLAHEVVDMWNVDSAIVVPIVVSANGLIPNSLDNHLRRLGLGGWIKGLMQKAVLLETARIVRRFLSLEP

SEQ ID NO: 30374 - protein, 1197 aa, Spodoptera frugiperda
MLTRARRCYAHPPSPDSSLSSASPSPEPNHEELPVTVVASSSSDEYFSPPTSPPPARRPRRGRPPTGLGPRGQQTPGRVPAAGGCARRMKWSQTINENVMRAYYGATEGGTNLTAYRERMLSMFQVLEPSVNVSAQRLSDQVRVIQRNRRLDEAALDRLRSEALRNRVVPAPPQEVAQTPIASQNVTPTTPAAGVEDDRVEQVSTQCNERLRSALEDAIREYRFAPLKPKLPRLPMCGKNRALVSALDSLLKTYFESSENLYDTHSILYCGAVAACRVANVRFSNLDAAVRPKPAVPAWQCRIERRISEARVLIGKLSCFREGNTRPRVMRFVRRAFVGTETSPHEYMSRVTERIDFLKQKVYAWANRIRRYKKRVERYTQNRMFQRDQRWVYRNWERSNQDVTDGRRPDDEATNTFWRNIWSVPVSHTEDDWICDVERRCETVPEMEEVIITSSDVSSAACSVPNWKSPGPDGLHNFWLKWFTSSHSRLASQFQAALEAGSLPQFLTTGVTHLLHKSGSSTEPKNYRPITCLPTVYKLLTSILRTKITKHIEKHSIMSVSQNGCRKGSRGTKELLLIDMVVSQQVRRSRKNLSTCWIDYKKAYDSVPHTWLMRVLELYKIDATLRAFLQSCMRQWSTVLCYPGCRQIQGSEEPVRIVRGIFQGDSLSPLWFCLALNPLSTLLEASGLGYPLRRRGLVISHLLYMDDLKLFAPNNKQLMELLKITEKFSSSIRMEFGVDKCAVMHVKRGGIVESEGLELSDFTKLRALSANDTYKYLGMSEGLGINGPDMKQSLRERFFGRLNKVLKSSLSGGNKVRAYNGWVMPVLMYSFGILKWTQTELDTLDRRVRTLLTANRMHHPRSSIMRLYIPRKCGGRGLLNAKTLHNREVCNLREYFLKVNEGMHREVAAVDNGFTPLSLAKENWRKPVVLSVNDRKEVWHSKELHGRFFRALHGPSVDFLASVSWLRFSNLFGETEGFVCAIMDEVILTNNYRKYIIKDGTVDICRACHNPGESIRHIISGCGRLANGEYLHRHNQVAKIIHQQLALHYQLVEFEVPYYKYAPDPVLENGHITLYWDRSIITDRTIVANKPDIVVIDRQARRTMIIDITIPHDENLVKAEKDKQIKYLDLAHEVVDMWNVDSAIVVPIVVSANGLIPNSLDNHLRRLGLGGWIKGLMQKAVLLETARIVRRFLSLGP

SEQ ID NO: 30375 - protein, 1201 aa, Spodoptera litura
MMLTRARSKQGAPPPPPDSSLSSASPSPDPSPAGSPVTAVASSSSDDYFSPPTSPTPVRRPGRGRPPTGLGARGQQAPGRVPATGGCVRRMKWSQTINENVMRSYYGATEGGTNLTAYRERMLSIFQVLEPSINVSAQRLSDQVRVIQRNRRLDEAALDRLRLEALRNRVVPAPPQSVAQTPIVSQCVTPTTPIVGVEDDRVEQVSTQCNERLRSALEDAVREYRLAPSNLRPKLPRLPMCRKNRALVSALDSLLKKYFESSENLYDTHSILYCGAVAACRVANVRFPNLDAAVRPKPAVPAWQYRIERRISEARVLIGKLSCFREGNTRPRVMRFVRRAFVGTETSPHEYLSRVTERIDFLKQKVYAWANRIRRYKKRVERYTQNRMFQRDQRWVYRDWERSNQDVVDGRRPDDDATSTFWRNIWSVPVSHTEGDWMFDVKRRCETIPEMEEVEITSSDVASAACSVPNWKSPGPDGLHNFWIKWFKSSHVRLALHFQAALETGSLPQFLTTGVTHLLHKSGSSTEPKNYRPITCLPTVYKLLTSILRTKITKHIKKNSIMSVSQNGCREGSRGTKELLLIDMVVSQQVRRSRKDLSTCWIDYKKAYDSVPHTWLLKVLELYKIHASLRAFLESCMRQWSTVLCYPGCRQIQGNEEPVRIVRGIFQGDSLSPLWFCLALNPLSTLLEDSGLGYPLRRRGLVISHLLYMDDLKLFAPNKKQLMELLNITEKFSSSIRMEFGVDKCAVMHVKRGGIVESEGLELSDFTKLRSLSANDTYKYLGMSEGLGINGPDMKQSLQERFFGRLNRVLKSSLSGGNKVRAFNGWVMPVLMYSFGILKWTQTELDTLDRRVRTLLTANRMHHPRSSVMRLYIPRKCGGRGLLNAKTLHNREVCSLREYFLKVNEGMHREVAAVDNGFTPLSLAKENWRKPVVLSVNDRKAVWHSKELHGRFFRALHGPSVDFLASVSWLRFSNLFGETEGFVCAIMDEVILTNNYRKYIIKDGTVDICRACHSPGESIRHIISGCGRLANSEYLHRHNQVAKIIHQQLALHYRLVESEVPYYKYVPDPVLENDHITLYWDRSIITDRTIIANKPDIVVIDRQVRRTMIIDITIPHDENLVKAEKDKQIKYLDLAHEVVDMWNVDSAIIVPIVVSANGLIPNSLDNHLRRLALGSWVKGLIQKAVLLETARIVRRFLSLEP

SEQ ID NO: 30376 - protein, 1223 aa, Eilema sororculum
MFLQHKGRILRPGKEITPTNDCRWDVEHILYQRENFTLIIIIIIIIMSSLSPLSSAAQPPTVEPAASSSSSSDEFFSPPTSPTPVRRPGRGRPPTCLGPRRPPASNGAPATGGDVHRMRWTNSINENVMRAYFAATERGTNLSAYRTRMLPLFQALEPSINVSAQRLSDQVRVIQRNRMLNETVLETLRLECLRNICVTPAPVPVPASTVELNDDTCVAPDDTPIPVSIQYNEEIKEALECALREYRSMPVHVRPRLPRLPIHRRNIALVSALDSLLPRYLENSENLGDTHSILYCTAVAACRMAGAKFPIKDPAIRPKSAIPAWQCRIERRVTEARVLIGKLICFRSGNTRPRVMRYVTRAFAGTDISPQDYTSRVTERIDFLKQKVYAWANRIRRYKKRVDRYTVNRMFQRDQRWVYRSWERTEESVDDVRRPDAEVTNAFWRSIWSVPVSHTEGDWMHEVKRACETIPEMEEINIDAIDVDCAVRSLSNWKSPGPDGLHNFWLKWLRSSHVVLASQFQSAVESGTLPAFMTTGVTHLLHKTGSTLEPNNYRPITCLPTVYKLLTSILRAKINNHINNNSIMCASQNGCRNGARGTKELLLIDMAISQQARRNRKDLTACWIDYKKAFDSVPHTWLLRVLELYKVNTTLCTFLRSCMGQWRTVLFYPGCHQPLGGGVPITIERGIFQGDSLSPLWFCLALNPLSTLLVNSGLGYRLRREGQMVSHLFYMDDLKLFAHTNPQLITLLKITETFSNSIKMAFGVDKCAVIHVKRGRVVESEGIQLSDSTNLRSLLVTETYKYLGMSQALCINEADMKQMLQERFFGRLKKVLNSLLSGGNKVRACNSWVMPLLMYSFGILKWTQTELDTIDRKVRTQLTAFRMHHPRSSVMRLYIPRKCGGRGFLNAKTLHNREVCNLRDYFLKSNVDMHRDVVNVDTGLTPLGLAKENWRRPTIVSTDSRREVWQSKELHGRFYRALHRPEVDLLASVSWLRFSDLFGETEGFVCAIADEVIKTNNYRKYIMRDGTIDICRACHQPGESLRHITSGCSRLANGEYLHRHNQVARIIHQRLALKYNLVEFEVPYYRYVPEPVLENTHITLYWDRSIITDRTVVANKPDIVVIDRSERRALIVDVTIPHDENLVKAEKDKQVKYLDLAHEVVDMWSVDSAIIVPIVVSVNGLIAKSLDQHLKRLGLDGWVKGQMQKAVLLDTARIVRKFLSLEP

SEQ ID NO: 30377 - protein, 1198 aa, Eilema depressum
MLTRSQARKNASAPVTSPDSSLSSAAQPPPTEPAASSSSSSDEFFSPPTSPTPVRRPGRGRPPASLEPRRPPASNRAPAAGGNVRRMRWTTSINENVMRAYFAATGGGTNLTAYRDRMLLVFQGLEPTLNVSAQRLSDQVRAIQRCHLLDSSVLERIRSDLQNSDVIPPPPQAPLLAPRVQGFTQVTEPDSVDGELDNVAFSVSTQYNDLIRNTLECAIRDYRSMHYQIRPRLPRLPVHKRNIALVCALDSLLPIYLDNSENLGDTHSILYCAAIAACRVAGIRFPEGNTTTRPNSGKPRWQCRIECRIAEARALIGKLICFRSGNTRPRVMRFVNRAFSGTGISPRDYAARVIERIDFLKQKVYAWANRIKRYKKRCDRYTLNRTFQRDERWVYRNWERPDLVGDVHLPDIDATNTFWRNIWSVPVAHTEGDWMREVKRSCEAIEIMEPVIISEDDIACVVRSLPNWKAAGPDGLHNFWLKWLRSSHVRLASQFQSALESGSLPNFMTTGVTHLLYKSGSATDPKNYRPITCLPTVYKLLTSVLRVKIANHITGNSILSYSQNGCRSGARGTKEHLIIDMAVNQQVRRNRKDMATCWIYYKKAYDSVPHTWLLKVLELYKVDTTLCTFLKACMGQWRTALRYPGCRHIRDDGELIKIERGIFQGDSLSPLWFCLALNPLSTLLEDSGLGYCLRRGGQVISHLLYMDDLKLYAPNSLRLMELLKVTETFSNSIRMEFGVDKCAVIQVKRGGIVESEGIELSDSTKLRSLSANDTYKYLGMSQALGINEAGMKQSLRERFFCRLKKVLNSLLSGGNKVRAYNDWVIPVLTYSFGILRWTQTELEALDRRVRTLLTAYRMHHPRSSVMRLYIPRKCGGRGFLNVKNLHNREIYNLREYFLKVDVDVHRDVVAVDNGLTPLALAKENWRKPAILSIDDRKEVWRSKELHGRFYRALYGPDVDLKASVSWLRFGDLFGETEGFVCAITDEVVMTNNYRRYILKDGTVDICRACHRPGESLRHIISGCSRLANGEYLHRHNLVARIIHQQLALKYKLVDSEVPYYRYVPDPVLDDGRVTLYWDRSIITDRTILANKPDIVVIDRLERRAIIVDITIPHDENLVKAEKDKQIKYLDLAREVVDMWAVDSAIVVPIVVSAHGLIAKSLDQHLKRLALDSWIKSLMQKAVLLDTARIVRRFLSLEP

SEQ ID NO: 30378 - protein, 1198 aa, Eilema depressum
MLTRSQARKNASAPVTSPDSSLSSAAQPSPTEPAASSSSSSDEFFSPPTSPTPVRRPGRGRPPASLEPRRPPASNRAPAAGGNVRRMRWTTSINENVMRAYFAATGGGTNLTAYRDRMLLVFQGLEPTLNVSAQRLSDQVRAIQRCHLLDSSVLERIRSDLQNSDVIPPPPQAPLLTPRVQGFTQVTEPDSGDGELDNVAFSVSTQYNDLIRNTLECAIRDYRSMHYQIRPRLPRLPVHKRNIALVCALDSLLPIYLDNSENLGDTHSILYCAAIAACRVAGIRFPETNTTTRPNSGKPRWQCRIECRIAEARALIGKLICFRSGNTRPRVMRFVNRAFSGTGISPHDYAARVIERIDFLKQKVYAWANRIKRYKKRCDRYTLNRTFQRDERWVYRSWERPDLVDDVHLPDIDATNTFWRNIWSVPVAHTEGDWMREVKRSCEAIETMEPVIITEDDIACVVRSLPNWKAAGPDGLHNFWLKWLRSSHVRLASQFQSALESGSLPDFMTTGVTHLLFKSGSAVDPRNYRPITCLPTVYKLLTSVLRVKITNHITGNSILSYSQNGCRSGARGTKEHLIIDAAINQQVRRNRKDMATCWIDYKKAYDSVPHTWLLRVLELYKVDTTLCTFLKACMGQWRTALRYPGCRHIRDDGELIKIERGIFQGDSLSPLWFCLALNPLSTLLEDSGLGYCLRRGGQVISHLLYMDDLKLYAPNSLRLMELLKVTENFSNSIRMEFGVDKCAVMQVKRGGIVESEGIELSDSTKLRSLSANDTYKYLGMSQALGINEAGMKQSLRERFFCRLKKVLNSLLSGGNKVRAYNDWVIPVLTYSFGILRWTQTELDALDRRVRTLLTAYRMHHPRSSVMRLYIPRKCGGRGFLNVKNLHNREIYNLREYFLKVDVDVHRDVVAVDNGLTPLALAKENWRKPAILSIDDRKEVWRSKELHGRFYRALYGPDIDLKASVSWLRFGDLFGETEGFVCAITDEVVMTNNYRRYILKDGTVDICRACHRPGESLRHIISGCSRLANGEYLHRHNLVARIIHQQLALKYKLVDSEVPYYRYVPDPVLDDGRVTLYWDRSIITDRTILANKPDIVVIDRSERRAIIVDITIPHDENLVKAEKDKQIKYLDLAREVVDMWAVDSAIVVPIVVSAHGLIAKSLDQHLKRLALDSWIKGLMQKAVLLDTARIVRRFLSLEP

SEQ ID NO: 30379 - protein, 1197 aa, Vanessa cardui
MLTRARQRAHNYPSPDPPLSSASQTQDPAQGSSLVSAVASSSSDEYFSPPTSPTPVRRAGRRRPPTGLGARGQPVSNRVPASGGGVQRMRWTQPINENVMRAYYGATKGGTNLTAYRVRMLSLFQALEPAVNVSAQRLSDQVRVILRNNRLSDTVLDRIRSETCNSGVTSGPSTPVVEVPLPTIPQGLEHDDEGGGDMAITTSKYSDHLRSALGDAIREYRNTPAELRPRLPRLPMTKRNRDLVCTLDSLLTDYFGGSENLEDTHSILFCAVVAACRVAGVTFEDTERATRPKAVAPAWQSRIEKRINETRVLIGKLYCFKEGNTRPRVMRFVGRAFLGTGIGPQEYPSHVVERIDFLKQKVYAWASRIRRYRRRVDRYHLNRKFQSDQRWVYRTWERLDQDVNDGCRPDDDATNTFWRNIWSVPVDHIEGDWMLEVRQACEPLEVMGKISIASEDVAAAVRSVSNWKSPGPDGLHNFWLKWLRSSHECLASQFQSALESGSLPQFLTTGVTHLLHKSGSATDPKNYRPITCLPTVYKLLTAILRDKINSHIQNNSILSVSQNGCRGGSRGTKELLLIDMTISQQVRRSRKSLSTCWIDYKKAYDSVPHTWLLRVLELYKLDTTLCSFLRSCMGQWRTVLRYPGCRTIHGNDEPIRIERGIFQGDSLSPLWFCLALNPLSTLLESSRLGYRLRRGGKVISHLLYMDDLKLFAPSDSQLMELLKVTETFSNSIRMEFGVDKCAVMHVKRGEIMESDGLQLSDSINFKSLSANESYKYLGMSEALGINVTDMKQSLQERFFGRLKKVLKSLLSGGNKVRAFNGWVMPVLMYSFGILKWTQKELDALDRKVRVLLTAYRMHHPRSSVMRLYIPRRCGGRGFLNAKTLHNREVYKLREYFLHTDLDMHRDVVTMDKGLTPLSLGKENWRKPVVLSTENRKEVWKCKELHGRFYRVLHGPDVDFMASVSWLRFGNLFGETEGFVCAIMDEVIMTNNYRKYIVRDGTVDICRACHTPGESLRHIISGCSRLANGEYLYRHNQVAKIIHQQLALRYGLVVSEVPYYRYVPDPVLENGHITLYWDRSIITDRTVVANKPDIVVIDRSERRTIIVDITIPHDENLVKAEKDKQIKYLDLAHEVVDMWDVDTAVIVPIVVSANGLMAKSLDQHLKRLSLGSWVKGLMQKAVLLGTARIVRKFLSLEP

SEQ ID NO: 30380 - protein, 1199 aa, Schrankia costaestrigalis
MMITRAKARIAQATPPDSSLSSASQTVENVADSVEASSSSSSDEFFSPPSSPTPVLRRGRGRPPIGLGSRAPQASNRVPAVGGNVHRMKWTSTINENVMRAYFVATEGGTNLTAYRDRMLSLFQELEPAVNVSTQRLSDQVRAIQRCHLLNDTVLDRIRSDILSNLTISTPPPVTTQVNTIIPLSQPIELNSSETIDCEVTNVSIQYNDQLRSALECTIGEYRFMEPDKRPRLPRLPTHKKNIALVCALDSLLSNYFDNSENLSDAHSILYCGAVTACRVAHIRFPTDDIATRLRPTVPAWQCRIERRIAEARALIGKLICFRSGNTRPRVMRFVTRAFADTNIDRRDYILHVTERIDFLKQKVYAWANRIKRFKKRMERYTQNRAFQRDERWVYRNWERPVQDSGDRQLPDADATTNFWRSIWSVPVSHVEGDWIGDVEKACERIHQMEPVTISTLDVSSAVRRLPNWKSAGPDGLHNFWLKWLHSSHACLASHFQSSLETGTLPDFITTGETHLLYKSGSSTDPKNYRPITCLPTIYKLLTSILRKKISLHIQHNSIMYISQNGCRNEARGTKEQLLIDTTISEQVRRNRKDLSTCWIDYKKAYDSVPHTWLLRVLELYKIDATLCTFLRTCMTKWNTVLFYSGCRQGLGNNVPIQIKRGIFQGDSFSPLWFCLALNPLSTLLECSGLGYRLKRHGQVISHLLYMDDLKLFAPTKSQLLVLLKETETFSNSIKMEFGVDKCAVMHVKRGKVVESDELQLSDTIKLRCLSPSDTYKYLGMSQALCIAETDMKQQLRDRFFARLKKVLNSLLTGGNKVRAYNGWVMPVLMYSFGILRWTQTELETLDRKVRTLLTAHRMHHPRSSVMRLYIPRKSGGRGFLSAKTLHNREVYNLREYFLSVDADIHRDVVSVDVGLTPLCLGKENWRKPIIHTIDDRKEVWKSKELHGRFYRTLNGPDVDTLASVSWLRFGDLFGETEGFVFAIMDEVVMTKNYRKYILKDGTVDICRACHCPGESLRHIVSGCSRLANGEYLHRHNQVARIVHQQLALKYHLVDAEVPYYKYVPDPVLENSSVTLYWDRSIITDRTIVANKPDIVVIDRSERRAMIIDITIPHDENLVKAEKDKQTKYLDLAHEVVDMWHVDSAIIVPIVLSVNGLIPKSLYQHLRRLSLDSWIIGLMQKAVLLDTARIVRRFLSLEP

SEQ ID NO: 30381 - protein, 1197 aa, Vanessa atalanta
MLTRARQRAHNNPSPDSPLSSASQAQDPTQGTNLVSAIASSSSDEYFSPPMSPTPVRRAGRRRPPTGLGARGQPASNGVPAFGGGVQRMRWTQPINENVMRAYYGATEGGTNLTAYRVRMLSLFQALEPAINVSAQRLSDQVRVILRNNRLSDTVLDRIRSEVSNSDVTSAPSQPVVEGPLPATPQGSDHVDEGEGDMAITTSKYSDQLRSALGDAIREYRNTSAELRPRLPRLPMTKRNRDLVCTLDSLLADYFESSENLEDTHSILFCAAVAACRVAGVTFEDTERATRPKAAAPAWQSRIEKRINETRVLIGKLYCFKEGNTRPRVMRYVGRAFLGTGIIPQEYPSHVVERIDFLKQKVYAWASRIRRYRRRVDRYYLNRMFQNDQRWVYRTWERLDQGVSDGCRPDDDATSTFWRNIWSVPVDHIEGDWMREVRQACEPLEAMGEISIASEDVAAAVRSVPNWKSPGPDGLHSFWLKWLRSSHECLASQFQSALESGSLPQFLTTGVTHLLHKSGSATDPKNYRPITCLPTVYKLLTSILRDKINSHIQNNSILSVSQNGCRGGSQGTKELLLIDMIISQQVRRFRKSLSTCWIDYKKAYDSVPHTWLLRVLELYKLDTTLCSFLKSCMGQWRTVLRYPGCRTIHGNDEPIRIERGIFQGDSLSPLWFCLALNPLSTLLEGSRLGYRLRRGGKVISHLLYMDDLKLFAPSGSQLMELLKVTETFSNSIRMEFGVDKCAVMHVERGQIMESDGLQLSDSINFRSLSANESYKYLGVSEALGINVTDMKQSLQERFFGRLKKVLKSLLSGGNKVRAFNGWVMPVLMYSFGILKWTQKELDALDRRVRVLLTAYRMHHPRSSVMRLYIPRRCGGRGFLNAKTLHNREVYKLREYFLHTDLDMHRDVVTMDKGLTPLSLGKENWRTPVVLSTENRKGVWKSKELHGRFYRALHGPDVDFMASVSWLRFGNLFGETEGFVCAIMDEVIMTNNYRKYIVRDGTVDICRACHTPGESLRHIISGCSRLANGEYLHRHNQVAKIIHQQLALRYDLVVSEVPYYRYVPDPVLENGRITLYWDRSIITDRAVVANKPDIVVIDRSERRTIIVDVTIPHDENLVKAEKDKQIKYLDLAHEVVDMWDVDTAVIVPIVVSANGLMAKSLDQHLKRLSLGSWVKGLMQKAVLLGTARIVRKFLSLEP

SEQ ID NO: 30382 - protein, 1191 aa, Trichoplusia ni
MLTRRRAARLPSPGSSPSSASQLPPGRGPAPAVAVASSSSDEYYSPPTSPTPVRRPGRRRPPSSLAPSGQPASNRAPAPGGVVQRMKWTRPMNENVMRAYYGATGGGTNLTAYRARMLSLFRALEPDVDVSAQRLSDQVRVIQRNHRLDDATLDRLRSEVQTSPVVVTPSIAEAPAASALPANPADGGDDDGAITVSTQCSDHIRSTLEQAVLEYRSTPRDQRPRLPRLPMHNRNKALMGVLDSLLSSYFGNSEDLGDTHSLLYCAAVAACRVAGVTFRDNTAARPKQAAPAWQCRIEKRVAEARTLIAKLVAFRGGNTRPRVMRFVKRAFAGTNISPSEYTARVTERIDFFKQKVCAWANRIRRYKTRVDRFHQNRMFQRDQRWVYRSWEQPASEEGAGRLPDDVATNLFWRSIWSAPVTHSEGDWIRDVEQSCERIEEMGAIDISPQDVANAVRPLANWKAPGPDGLHNFWLKWLPSSHGCLASQFQSAVDSGVLPQFFTTGSTHLLHKTGSTTDPKNYRPITCLPTIYKLLTSILREKINDHIERFSIMSASQNGCRNGSRGTKELLLIDMTICQQVRRSKKGVSTCWIDYKKAYDSVPHAWLMRVLELYKINTTLRTFLKSCMGQWTTVLHYPGCRDIQKSGQLIRIERGIFQGDSLSPLWFCLALNPLSTLLENSRLGYSLRRGSQVISHLLYMDDLKLFASNKLQLMKLLKITESFSNSIRMEFGVDKCAVMHVKRGGIVESQGIQLSDSINLRSLSSTETYKYLGMSEALGINVADMKQSLQTRFFGRLNKVLKSSLSGGNKVRAFNGWVMPVIMYSFGILKWTQTELDALDRRVRTLLTANRMHHPRSSVMRLYIPRKCGGRGFLNAKTLHNREVCNLREYFLRVDVGMHRDVVAVDKGFTPLSLGKENWHKPIVLSVKDRKDVWQSKELHGRYYRTLHGADVDFLASVAWLRFGDLFGETEGFVCAIMDEVIMTNNYRKYIIKDGTVDICRACHCPGESLRHIVSGCSRLANGEYLHRHNQVARIIHQQLALKYKLVESEVPYYKYVPDPVLESGHITLYWDRSIITDRTIVANKPDIVVIDRSERRTMIVDITIPHDENLVKAEKEKQLKYLDLAHEVVDLWEVDSAIIVPIVVSANGLIAKSLDQHLRRLSLGVWVKGLIQKAVLLDTARIVRRFLSLEP

SEQ ID NO: 30383 - protein, 1200 aa, Spodoptera exigua
MLTRSKARARGASPPSPDSSLSSASPSPETRTTRSPVVAVASSSSDEYLSPLASPVPVRRQRRGRPPMGLGTRGQRAPGRVPAAGGCARRMKWSQTINENVMRAYYGATEGGTNLTAYRDRMLSLFQVLEPSVNVSAQRLSDQVRVIQRSRRLDDAALDRLRLETLHNRVVLTSSQPATKTRPVENATLATPGAAVEDDKVEQVSTQCNEILRNALEDAIHEYRFAPTELRPRLPRLPMCGKNRALVCALDSLLENYFESSENLYDTHSILYCGAIAACRVANVRFPNLDAAVRPKPAAPAWQCRIERRIDEARVLIGKLTCFREGNNRPRVMRFVRRAFVGTETSPHEYLTRVTERIDFLKQKIYAWANRIRRYKKRVERYTQNRMFQSDQRWVYRDWERSSQDVVNGRHPDDETTNSFWRNIWSVPVNHTEADWMCDVKRECETLPEMEEVVITSSDVANAACSVPNWKSPGPDGLHNFWLKSFTSSHDRLASQFQMALEAGSLPQFLTTGITHLLHKSGSYTEPKNYRPITCLPTVYKLFTSILRAKITKHIEKNSIMSVSQNGCRKGSRGTKELLLIDMVISQQVRRSRKDLSTCWIDYKKAYDSVPHTWLMRVLELYKINTTLRTFLQSCMRQWSTVLSYPGCKQIQRSEEPVRIVRGIFQGDSLSPLWFCLALNPLSTLLEASGLGYRLRRKGHVISHLLYMDDLKLFAPNKEELMELLKITKNFSSSIRMEFGVDKCAVMHVKRGGIVESESLELSDFTKLRSLSANDTYKYLGMSEGLGINGPHMKQSLQERFFGRLNKVLKSSLSGGNKVRAFNGWVMPVLMYSFGILKWTQTELDTLDRRVRTMLTANRMHHPRSSVMRLYIPRKCGGRGFLNAKTLHNREVCNLREHFLKVDEDMHREVVTVDKGFTPLSLAKENWCKPVVLSVNDRKAVWSSKELHGRFFRALHGPDIDFLASVAWLRFSNLFGETEGFVCAIMDEVILTNNYRKYIMKDGTVDICRACHSSGESIRHIISGCGRLANGEYLHRHNQVAKIIHQQLALKYRLVESEVPYYKYVPDPVLEKDHITLYWDRSIITDRTIVVNKPDIVVVDRLARRTTIIDVAIPHDENLVKAEKDKQLKYLDLAHEVVDMWNVDSAIVVPIVVSANGLVPKSLENHLKRLTLGGWIKGLIQKAVLLETARIVRRFLSLEP

SEQ ID NO: 30384 - protein, 1078 aa, Junonia stemosa
MLSLFQALEPAVNVSAQRLSDQVRVILRNKRLSDTALDRIRSEMCGSGVTSAPSQPVVQGPCPATPTGPNYDDVDGSDITIAVSKYSDQLRSALEDAMQEYRATPSELRPRLSRLPMNRRIRDLVGTLDSLLPNYFESSENLEDTHLILFCAAVAVCRVAGVALGSTEQATRPKPAVPAWQSRIEKRIDETRVLIGKLCCFKEGNTRPRVMRSVRRAFLGTGISPQEYPSHVVERIDFLKQKVYAWASRIRRYRRRVERYNLNRKFQSDQRRVYRTWERLDQGVDDGRRPDDDATNTFWRNIWSVPVDHIEGDWIREVRQTCEPLEAMGEISIASEDVAAAVRSIPNWKAPGPDGLHNYWLKWLRSSHGCLASQFQSALESGSLPQFLTTGITHLLHKTGSTTDPKNYRPITCLPTVYKLLTSILKDKIDRHIQNNAIMSVSQNGCRGGSRGTKELLLIDMTISQQVRRSRKSLSTCWIDYKKAYDSVPHTWLLRVLELYKIDTTLCSFLRSCMGQWRTVLRYPGCRTIRENEEPIRIERGIFQGDSLSPLWFCLALNPLSTLLESSGLGYRLRRGGKVISHLLYMDDLKLFAPSSSQLMELLKVTETFSNSIRMEFGVDKCAVMHVERGGIVESDGIQLSDSINFRSLSANESYKYLGMSEALGINGNDMKQSLRERFFGRLTKVLKSLLSGGNKVRAFNAWVMPVLVYSFGILKWTQSELDALDRKVRVLLTAYRMHHPRSSVMRLYIPRRCGGRGFLNAKTLHNREVNKLREYFLHTDLDMHRDVVATDKGLTPLSLGKENWRKPVVLSADNRKEVWKSKELHGRFYRALHGPDVDFMASVSWLRFGNLFGETEGFVCAIMDEVIMTNNYRKYIVKDGTADICRACHSPGESLRHVISGCSRLANGEYLHRHNQVAKIIHQQLALRYGLVESEVPYYRYVPDPVLENGRVTLYWDRSIITDRTVAANKPDIVVIDRSERRTIIVDITIPHDENLVKAEKDKQIKYLDLAHEVVDMWDVDSAVVVPIVVSANGLMAKSLDQHLQRLSLGSWVKGLLQKAVLLCTARIVRKFLSLEP

SEQ ID NO: 30385 - protein, 1197 aa, Vanessa tameamea
MLTRARQRAHNKPSSDPPLSSASQAQDPAKGSSLVSAIASSSSDEYFSPPTSPTPVRRAGRRRPPTGLGARGQPASNRVPASGGGVQRMRWTQPINENVMRAYYGATEGGINLTAYRVRMLSLFQALEPAINVSAQRLSDQVRIILRNNRLSDTVLDRIRSEMCNSGFTSAPSQPVVEGPLPATPQGPDHDDEGEGDMAITTSKYSDQLRSALADAIREYRNTPAELRPRLPRLPMTKRNRDLVCTLDSLLADYFESSENLEDTHSILFCAAVAACRVAGVTFEDTERAIRPKAAAPAWQSRIEKRINETRVLIGKLYCFKEGNTRPRVMRFVGRAFLGTGISSQEYPSHVMERIDFLKQKVYAWASRIRRYRRRVDRYYLNRIFQSDQRWVYRTWERLDQGVSDGYRPDDDTTNTFWRNIWSVPVDHIEGDWMREVRQACEPLEAMGEISIASEDVAAAVRSVPNWKSPGPDGLHSFWLKWLRSSHDCLASQFQSALESGSLPQFLTTGVTHLLHKSGSATDPKNYRPITCLPTVYKLLTSILRDKINSHIQNNNILSVSQNGCRGGSRGTKELLLIDMTISQQVRRFRKSLSTCWIDYKKAYDSVPHTWLLRVLELYKLDTTLCSFLRSCMGQWRTVLRYPGCRTIHGNDEPIRIERGIFQGDSLSPLWFCLALNPLSTLLEGSRLGYCLRRGGKVISHLLYMDDLKLFAPSGSQLMELLKVTETFSNSIRMEFGVDKCAVMHVERGEIMESDGLQLSDSINFRSLSANESYKYLGVSEALGINVTDMKQSLQKRFFGRLKKVLKSLLSGGNKVRAFNGWVMPVLMYSFGILKWTQKELDALDRRVRVLLTAYRMHHPRSSVMRLYIPRRCGGRGFLNAKTLHNSEVYKLREYFLHTDLDMHRDVVTMDKGLTPLSLGKENWRKPVVLSTENRKEVWKSKELHGRFYRALHGPDVDFIASVAWLRFGNLFGETEGFVCAIMDEVIMTNNYRKYIVRDGTADICRACHTPGESIRHIISGCSRLANGEYLHRHNQVAKIIHQQLALRYGLVVSEVPYYRYVPDPVLENSCITLYWDRSIITDRTVVANKPDIVVIDRSERRTIIIDVTIPHDENLVKAEKDKQIKYLDLAHEVVDMWDVDTAVIVPIVVSANGLMAKSLDQHLKRLSLGSWVKGLMQKAVLLGTARIVRKFLSLGP

SEQ ID NO: 30386 - protein, 1197 aa, Mythimna ferrago
MLTRSRARRPETHPTTSGSSLNSASQPPGPAPAVSPVIPEAAVASSSSDEYFSPPTTPPPARRRGRGRPPASLGPRGPPASDRVPAVGGSVQRMRWTSSINENVMRSYFGATEGGINLTAYRGRMLSLFQVLEPAVNVSDQRLSDQVRVIQRNRMLDDAVLDRLRLESQSSRATPSAAAQRQPSAAPRPDHVGDADDDAAISVSTQCNERLRGALEDAFREYRSIPPELRPRLPRLPMHKRNRALVCALDSQLSICFDSSEDLADTHSILYCAAVAACRVAHVKFPNCNRATRPAVPAWQCRIERRIGEARALIGKLICFREGNTRPRVMRFVRRAFSGTDISPRDYLPCVTERIDFLKQKIYAWANRIRRYKRRVERYTQNRTFQSNERWVYRAWEQPDQGVTDTRLPDDDAMCSFWRSIWSAPVSHTEGDWIREVERACDLLPEMGAITISPQNVARAVRPLPNWKSPGPDGLHNFWLKWFQRSHARLASQFQSALESGSLPLFLTTGITHLLHKSGSTADPKNYRPITCLPTVYKVLTSILRAKINSHIETNSIMSVSQNGCRNGSRGTKELLLIDIAISQQVRRSRKNLSACWIDYKKAYDSVPHTWLMRVLELYKVDATLRTFLMSCLGQWRTVLHYPGCRQIWENSEPIRIERGIFQGDSLSPLWFCLALNPLSTLLEGSGLGYRLKRGGQGISHLLYMDDLKLFAPNNLQLMELLKVTETFSSAIRMDFGVDKCAVIHVKRGEIMESEGIQLSDSIHLRSLSSTETYKYLGMSEALGINTDDVKQSLKERFFGRLNKVLNSLLSGSNKVRAFNGWVMPVLMYSFGILKWTQTELDALDRRVRTLLTANRMHHPRSSVMRLYIPRKCGGRGFLNAKSLHNREVCSLREYFLAVDVGMHRDVVAVDKGLTPLSLANENWRKPLVLDTNDRREVWQGKELHGRFYRALHGPDVDLLASVSWLRFGDLFGETEGFVFAIMDEVMMTNNYRKYIVKDGTVDICRACHRPGESIRHIISGCSRLANGDYLHRHNLVARIIHQQLALKYNLVESEVPYYRYVPDPVLDNGSITLYWDRSIITDRTIVANKPDIVVIDRLERRTMIVDIAVPHDENLVKAEKDKQIKYLDLAREVVDMWEVDRAIIVPIVVTANGLIAKSLEQHLRRLSLGSWIKGLIQKVVLLDTARIVRRFLSQEP

SEQ ID NO: 30387 - protein, 1107 aa, Mythimna ferrago
MRWTSSINENVMRSYFGATEGGINLTAYRGRMLSLFQVLEPAVNVSVQRLSDQVRVIQRNRMLDDAVLDRLRLESQSSRVSAATPSAAAQRQPSAAPRPDHVGDADDDAAISVSTQCNERLRGALEDAFREYRSIPPEVRPRLPRLPMHKRNRALVCALDSQLSICFDSSEDLADTHSILYCAAVAACRVAHVKFPNCNRATRPAVPAWQSRIERRIGEARALIGKLICFREGNTRPRVMRFVRRAFSGTDISPRDYLPCVTERIDFLKQKIYAWANRIRRYKRRVERYTQNRTFQSNERWVYRAWERPDQGVTDTRLPDDDAMCSFWRSIWSAPVSHTEGDWIREVERACDLLPEMGAITISPQDVARAVRPLPNWKSPGPDGLHNFWLKWFQGSHARLASQFQSALESGSLPQFLTTGITHLLHKSGSTAEPKNYRPITCLPTVYKVLTSILKAKINSHIETNSIMSVSQNGCRNGSRGTKELLLIDIAISQQVRRSRKNLSACWIDYKKAYDSVPHTWLMRVLELYKVDATLRTFLMSCMGQWRTVLHYPGCRQIWENSEPIRIERGIFQGDSLSPLWFCLALNPLSTLLEGSGLGYRLKRGGQVISHLLYMDDLKLFAPNNLQLMELLKVTETFSSAIRMDFGVDKCAVIHVKRGEIMESEGIQLSDSIHLRSLSSTETYKYLGMSEALDINTDDMKQSLKERFFGRLNKVLNSLLSGGNKVRAFNGWVMPLLMYSFGILKWTQTELDVLDRRVRTLLTANRMHHPRSSVMRLYIPRKCGGRGFLNAKSLHNREVCSLREYFLAVDVGMHRDVVAVDKGLTPLSLANENWRKPLVLDTNDRREVWQGKELHGRFYRALHGPDVDLLASVSWLRFGDLFGEIEGFVFAIMDEVMMTNNYRKYIVKDGTVDICRACHRPGESIRHIISGCSRLANGDYLHRHNLVARIIHQQLAPKYNLVESEVPYYRYVPDPVLDNGSITLYWDRSIITDRTIVANKPDIVVIDRLERRTMIVDIAVPHDENLVKAEKDKQIKYLDLAREVVDMWEVDKAIIVPIVVTANGLIAKSLEQHLRRLSLGSWIKGQIQKAVLLDTARIVRRFLSQEP

SEQ ID NO: 30388 - protein, 1075 aa, Eilema sororculum
MLPLFQALEPSVNTSAQRLSDQVRVIQRNHLLNETVLETLRQECLRNMCVTPAPAPAPASTTALNEDSHVTRDDTPIPVSIQYNEEIKEALEYALREYRSMPIHVRPRLPRLPIHRRNIALVSALDSLLPKYLENSENLGDTHSILYCTAVAACRMAGAKFPIKDPAIRPKPAIPAWQCRIERRVAEARVLIGKLICFRSGNTRPRVMRYVTRAFAGTNISPQDYTSRVTERIDFLKQKVCAWANRIRRYKKRVDRYTVNRMFQRDQRWVYRNWERTDESVDDVRRPDAEATNAFWRSIWSVPVSHTEGDWMREVERACEPIPEMEEIYIDATDVDCAVRSLSNWKSPGPDGLHNFWLKWLRSSHVVLASQFQSAVESGTLPVFMTTGVTHLLHKTGSTLEPNNYRPITCLPTVYKLLTSILRAKINNHINNNSIMCASQNGCRNGARGTKELLLIDMTISQQARRNRKDLAACWIDYKKAFDSVPHTWLLRVLELYKVNTTLCTFLRSCMGQWRTVLFYPGCRQALGSGEPITIERGIFQGDSLSPLWFCLALNPLSTLLVNSGLGYRLRREGQMVSHLFYMDDLKLFAHTNPQLIALLKVTETFSNSIKMAFGVDKCAVIHVKRGRVVESEGIQLSDSTNLRSLLVTETYKYLGMSQALCIKEVDMKQMLQERFFGRLKKVLNSLLSGGNKVRACNSWVMPLLMYSFGILKWTQTELDTIDRKVRTQLTAFRMHHPRSSVMRLYIPRKCGGRGFLNAKTLHNREVCNLRDYFLKSNVEMHRDVVNVDTGLTPLGLAKENWRRPTIVGTDSRREVWQSKELHGRFYRALHRPEVDLLASVSWLRFSDLFGETEGFVCAIADEVIKTNNYRKYIMRDGTIDICRACHQPGESLRHITSGCSRLANGEYLHRHNQVARIIHQRLALKYNLVEVEVPYYRYVPEPVLENSHITLYWDRSIITDRTVVANKPDIVVIDRSERRALIVDVTIPHDENLVKAEKDKQVKYLDLAHEVVDMWSVDSAIIVPIVVSVNGLIAKSLDQHLKRLGLDGWVKGQMQKAVLLDTARIVRKFLSLEP

SEQ ID NO: 30389 - protein, 1189 aa, Eilema sororculum
MLTRAQAKRNGSAPITSPDSSLSSAAQPPTVEPAASSSSSSDEFFSPPTSPTPVRRPGRGRPPTCLGPRRPPASNGAPATGGDVHRMRWTNSINENVMRAYFAATEGGTNLSAYRTRMLPLFQALEPSINVSAQRLSDQVRVNRMLNETVLETLRLECLRNICVTPAPVPVPASTVELNDDTCVAPDDTPIPVSIQYNEEIKEALECALREYRSMPVHVRPRLPRLPIHRRNIALVSALDSLLPRYLENSENLGDTHSILYCTAVAACRMAGAKFPIKDPAIRPKSAIPAWQCRIERRVTEARVLIGKLICFRSGNTRPRVMRYVTRAFAGTDISPQDYTSRVTERIDFLKQKVYAWANRIRRYKKRVDRYTVNRMFQRDQRWVYRSWERTEESVDDVRRPDAEVTNAFWRSIWSVPVSHTEGDWMHEVKRACETIPEMEEINIDAIDVDCAVRSLSNWKSPGPDGLHNFWLKWLRSSHVVLASQFQSAVESGTLPAFITTGVTHLLHKTGSTLEPNNYRPITCLPTVYKLLTSILRAKINNHINNNSIMCASQNGCRNGARGTKELLLIDMAISQQARRNRKDLTACWIDYKKAFDSVPHTWLLRVLELYKVNTTLCTFLRSCMGQWRTVLFYPGCRQALGGGVPITIERGIFQGDSLSPLWFCLALNPLSTLLVNSGLGYRLRREGQMVSHLFYMDDLKLFAHTNPQLITLLKITETFSNSIKMAFGVDKCAVIHVKRGRVVESEGIQLSDSTNLRSLLVTETYKYLGMSQALCINEVDMKQMLQERFFGRLKKVLNSLLSGGNKVRACNSWVMPLLMYSFGILKWTQTELDTIDRKVRTQLTAFRMHHPRSSVMRLYIPRKCGGRGFLNAKTLHNREVCNLRDYFLKSNVDMHRDVVNVDTGLTPLGLAKENWRRPTIVSTDSRREVWQSKELHGRFYRALHRPEVDLLASVSWLRFSDLFGETEGFVCAIADEVIKTNNYRKYIMRDGTIDICRACHQPGESLRHITSGCSRLANGEYLHRHNQVARIIHQRLALKYNLVEFEVPYYRYVPEPVLENTHITLYWDRSIITDRTVVANKPDIVVIDRSERRALIVDVTIPHDENLVKAEKDKQVKYLDLAHEVVDMWSVDSAIIVPIVVSVNGLIAKSLDQHLKRLGLDGWVKGQMQKAVLLDTARIVRKFLSLEP

SEQ ID NO: 30390 - protein, 1197 aa, Vanessa cardui
MLTRARQRAHNYPSPDPPLSSASQAQDPAQGSSLVSAAASSSSDEYFSPPTSPTPVRRAGRRRPPTGLGARGQPVSNRVPASGGGVQRMRWTQPINENVMRAYYGATKGGTNLTAYRVRMLSLFQALEPAVNVSAQRLSDQVRVILRNNRLSDTVLDRIRSETCNSDVTSGPSTPVVEEPLPAIPQGPEHDDEGGGDMAITKSKYSDHLRSALGDAIREYRNTPAELRPRLPRLPMTKRNRDLVCTLDSLLADYFESSENLEDTHSILFCAAVTACRVACVTFEDTERATRPKAVAPAWQSRIEKRINETRVLIGKLYCFKEGNTRPRVMRFVGRAFLGTGIGPQEYPSHVVERIDFLKQKVYAWASRIRRYRRRVDRYHLNHKFQSDQRWVYRTWERLDQDVSDGCRPDDDATNTFWRNIWSVPVDHIEGDWMLEVRQACEPLEVMGKISIASEDVAAAVRSVANWKSPGPDGLHNFWLKWLRSSHECLASQFQSALESGSLPQFLTTGVTHLLHKSGSATDPKNYRPITCLPTVYKLLTAILRDKINSHIQNNSILSVFQNGCRGGSRGTKELLLIDMTISQQVRRSRKSLSTCWIDYKKAYDSVPHTWLLRVLELYKLDTTLCSFLRSCMGQWRTVLRYPGCRTIHGNDEPIRIERGIFQGDSLSPLWFCLALNSLSTLLESSRLGYRLRRGGKVISHLLYMDDLKLFAPSDSQLMELLKVTETFSNSIRMEFGVDKCAVMHVKRGEIMESDGLQLSDSINFKSLSANESYKYLGMSEALGINVTDMKQSLQERFFDRLKKVLKSLLSGGNKVRAFNGWVMPVLMYSFGILKWTQKELDALDRKVRVLLTAYRMHHPRSSVMRLYIPRRCGGRGFLNAKTLHNREVYKLREYFLHTDLDMHRDVVTMDKGLTPLSLGKENWHKPVVLSTENRKEVWKSKELHGRFYRALHGPDVDFMASVSWLRFGNLFGETEGFVCAIMDEVIMTNNYRRYIVRDGTVDICRACHTPGESLRHIISGCSRLANGEYLHRHNQVAKIIHQQLALRYGLVVSEVPYYKYVPDPVLENGHITLYWDRSIITDRTVVANKPDIVVIDRSERRTIIVDITVPHDENLVKAEKDKQIKYLDLAHEVVDMWDVDTAVIVPIVVSANGLMAKSLDQHLKRLSLGSWVKGLMQKAVLLGTARIVRKFLSLEP

SEQ ID NO: 30391 - protein, 1199 aa, Vanessa cardui
MLTRARQRAHKNPSPDPPLSSASQAQDPAQGNNLMSAGASSSSDEYFSPPTSPTPVRRAGRRRPPTGLGARDQPVSNGVPASGGGVQRMRWTQSINENVMRAYYGATEGGTNLTAYRVRMLSMFQALEPAINVSAQRLSDQVRVILRNNRLSDTVLDRIRSEQCNGGVTSAPSQPVVQGPLPAIPQGPCHDHDDEGEGDMAITTSKYSDQLRSALEDAIREYRDIPAELRPRLPRLPMTKRNRDLVCTLDSLLADYFESSENLEDTHSILFCAAVAACRVAGVTFEDTERATRPKTVAPAWQSRIEKRINETRVLIGKLCCFKEGNTRPRVMRFVGRAFLGTGISPQEYPSHIVERIDFLKQKVYAWASRIRRYRRRVDRYYLNRMFQSDQRWVYRTWERLDQGVSDGCRPDDDATNTFWRNIWSVPVDHIEGDWMREVRQACEPLEAMGEISIASEDVAAAVRSVPNWKSPGPDGLHSFWLKWLRSSHECLASQFQSALESGSLPQFLTTGVTHLLHKSGSATDPKNYRPITCLPTVYKLLTSILRDKINSHIENNTILSVSQNGCRGGSRGTKELLLIDMTISQQVRRSRKSLSTCWIDYKKAYDSVPHTWLLRVLELYKLDTTLCSFLRSCMGQWRTVLRYPGCRTIHSNDEPIRIERGIFQGDSLSPLWFCLALNPLSTLLESSRLGYRLRRGGKVISHLLYMDDLKLFAPSDSQLVELLKVTETFSNSIRMEFGVDKCAVMHVKRGEIVESDGLQLSDSINFKSLSANESYKYLGMSEALGINVTDMKQSLQERFFGRLKKVLKSLLSGGNKVRAFNGWVMPVLMYSFGILKWTQKELDALDRRVRVLLTTYRMHHPRSSVMRLYIPRRCGDRGFLNAKTLHNREVYKLREYFLHTDLDMHRDVVTIDKGLTPLSLGKENWRKPVVLSTENRKEVWKSKELHGRFYRALHGPDVDFMASVSWLRFGNLFGETEGFVCAIMDEVIMTNNYRKYIVRDGTVDICRACHTPGESLRHIISGCSRLANGEYLHRHNQVAKIIHQQLALRYGLVVSEVPYYRYVPDPVLENGHITLYWDRSIITDRTVVANKPDIVVIDRSERRTIIVDITIPHDENLVKAEKDKQIKYLDLAHEVVDMWDVDTAVIVPIVVSANGLMAKSLDQHLKRLSLGSWVKGLMQKAVLLGTARIVRKFLSLEP

SEQ ID NO: 30392 - protein, 1191 aa, Trichoplusia ni
MLTRRRAARLPSPGSSPSSASQLPPGRGPAPAVAVASSSSDEYYSPPTSPTPVRRPGRRRPPSSLAPSGQPASNRAPAPGGVVQRMKWTRPMNENVMRAYYGATGGGTNLTAYRARMLSLFRALEPDVDVSAQRLSDQVRVIQRNHRLDDATLDRLRSEVQTSPVVVTPSIAEAPAASALPANPADGGDDDGAITVSTQCSDHIRSTLEQAVLEYRSTPRDQRPRLPRLPMHNRNKALMGVLDSLLSSYFGNSEDLGDTHSLLYCAAVTACRVAGVTFRDNTAARPKQAAPAWQCRIEKRVAEARTLIAKLVAFRGGNTRPRVMRFVKRAFAGTNISPSEYTARVTERIDFFKQKVCAWANRIRRYKTRVDRFHQNRMFQRDQRWVYRSWEQPASEEGAGRLPDDVATNLFWRSIWSAPVTHSEGDWIRDVEQSCERIEEMGAIDISPQDVANAVRPLANWKAPGPDGLHNFRLKWLPSSHGCLASQFQSAVDSGVLPQFFTTGSTHLLHKTGSTTDPKNYRPITCLPTIYKLLTSILREKINDHIERFSIMSASQNGCRNGSRGTKELLLIDMTICQQVRRSKKGVSTCWIDYKKAYDSVPHAWLMRVLELYKINTTLRTFLKSCMGQWTTVLHYPGCRDIQKSGQLIRIERGIFQGDSLSPLWFCLALNPLSTLLENSRLGYSLRRGSQVISHLLYMDDLKLFASNKLQLMKLLKITESFSNSIRMEFGVDKCAVMHVKRGGIVESQGIQLSDSINLRSLSSTETYKYLGMSEALGINVADMKQSLQTRFFGRLNKVLKSSLSGGNKVRAFNGWVMPVIMYSFGILKWTQTELDALDRRVRTLLTANRMHHPRSSVMRLYIPRKCGGRGFLNAKTLHNREVCNLREYFLRVDVGMHRDVVAVDKGFTPLSLGKENWHKPIVLSVKDRKDVWQSKELHGRYYRILHGADVDFLASVAWLRFGDLFGETEGFVCAIMDEVIMTNNYRKYIIKDGTVDICRACHCPGESLRHIVSGCSRLANGEYLHRHNQVARIIHQQLALKYKLVESEVPYYKYVPDPVLESGHITLYWDRSIITDRTIVANKPDIVVIDRSERRTMIVDITIPHDENLVKAEKEKQLKYLDLAHEVVDLWEVDSAIIVPIVVSANGLIAKSLDQHLRRLSLGVWVKGLIQKAVLLDTARIVRRFLSLEP

SEQ ID NO: 30393 - protein, 1199 aa, Spodoptera exigua
MLTRAKARARAAPPPSPDSSLSSASPSPETRTTRSPVIAVASSSSDEYFSPLASPAPERRQRRGRPPMGLGTRGQRAPGRVPATGGCARRMKWSQSMNENVMRAYYGATEGGSNLTAYRDRMLSLFQVLEPSVNVSAQRLSDQVRVIQRSRRLDDAALDRLRLETLHNRVVLTSSQSATQTPVENATLATPVADVEDDKVEQVSTQCNERLRNALEDAIHEYRFAPSELRPKLPRLPMCGKNRALVCALDSLLENYFESSENLYDTHSILYCGAIAACRVANVRFPNLDAAVRPKPAAPAWQCRIERRIDEARVLIGKLTCFGEGNNRPRVMRFVRRAFVGTETSPHEYLTRVTERIDFLKQKIYAWANRIRRYKKRVERYTQNRMFQSDQRWVYRDWERSSQDVVNGQRPDDETTNSFWRNIWSVPVNHTEADWMCDVKRECETLPEMEKVVITSSDVANAACSVPNWKSPGPDGLHNFWLKSFSSSHDRLASQFQMALEAGSLPQFLTTGITHLLHKSGSYTEPKNYRPITCLPTVYKLFTSILRAKITKHIEKNSIMSVSQNGCRKGSRGTKELLLIDMVISQQVRRSRKDLSTCWIDYKKAYDSVPHTWLMRVLELYKINTTLRTFLQSCMRQWSTVLSYPGCKQIQRSEEPVRIVRGIFQGDSLSPLWFCLALNPLSTLLEASGLGYRLRRKGHVISHLLYMDDLKLFAPNKEELMELLKITKNFSSSIRMEFGVDKCAVMHVKRGGIVESESLELSDFTKLRSLSANDTYKYLGMSEGLGINGPHMKQSLQERFFGRLNKVLKSSLSGGNKVRAFNGWVMPVLMYSFGILKWTQTELDTLDRRVRTLLTANRMHHPRSSVMRLYIPRKRGGRGFLNAKTLHNREVCNLREHFLKVDEDMHREVVTVDKGFTPLSLAKENWCKPVVLSVNDRKTVWSSKELHGRFFRALHGPDVDFLASVAWLRFSNLFGETEGFVCAIMDEVILTNNYRKYIMKDGTVDICRACHSPGESIRHIISGCGRLANGEYLHRHNQVAKIIHQQLALKYRLVESEVPYYKYVPDPVLEKDHITLYWDRSIITDRTIVANKPDIVLVDRLARRTTIIDVTIPHDENLVKAEKDKQLKYLDLAHEVVEMWSVDSAIVVPIVVSANGLVPKSLDNHLKRLTLGGWIKGLIQKAVLLETARIVRRFLSLEP

SEQ ID NO: 30394 - protein, 1084 aa, Spodoptera frugiperda
MIMTQRLSDQVSAQRLSDQVSAQRLSDQVRVIQRNRRLDEAALDRLRSEALRNRVVPAPPQEVVQTPTVSQNVTPTTPAAGVEDDRVEQVSTQCNERLRSALEDAIREYRFAPLKPKLPRLPMCGKNRALVSALNSLLKTYFESSENLYDTHSILYCGAVAACRMANVRFSNLDAAVRPKPAVPAWQCRIERRISEARVLIGKLSCFREGNTRPRVMRFVRRAFVGTETSPHEYMSRVTERIDFLKQKVYAWANRIRRYKKRVERYTQNRMFQRDQRWVYRNWERSNQDVTDGRRPDDEATNTFWRNIWSVPVSHTEDDWICDVERKCETVPEMEEVIITSSDVSSAACSVPNWKSPGPDGLHNFWLKWFTSSHARLASQFQAALEAGSLPQFLTTGVTHLLHKSGSSTEPKNYRPITCLPTVYKLLTSILRTKITKHIEKYSIMSVSQNGCRRGSRGTKELLLIDMVVSQQVRRSRKNLSTCWIDYKKAYDSVPHTWLMRVLELYKIDATLRAFLQSCMKQWSTVLCYPGCRQIQGSEEPVRIVRGIFQGDSLSPLWFCLALNPLSTLLEASGLGYPLRRRGLVISHLLYMDDLKLFAPNNKQLMELLKITEKFSSSIRMEFGVDKCAVMHVKRGGIVESEGLELSDFTKLRALSANDTYKYLGMSEGLGINGPDMKQSLRERFFGRLNKVLKSSLSGGNKVRAYNGWVMPVLMYSFGILKWTQTELDTLDRRVRTLLTANRMHHPRSSIMRLYIPRKCGGRGLLNAKTLHNREVCNLREYFLKVNEGMHREVAAVDNGFTPLSLAKENWRKPVVLSVNDRKEVWHSKELHGRFFRALHGPSVDFLASVSWLRFSNLFGETEGFVCAIMDEVILTNNYRKYIIKDGTVDICRACHSPGESIRHIISGCGRLANGEYLHRHNQVAKIIHQQLALQYQLVEFEVPYYKYVPDPVLENGHITLYWDRSIITDRTIVANKPDIVVIDRQARRTMIIDITIPHDENLVKAEKDKQIKYLDLAHEVVDVWNVDSAIIVPIVVSANGLIPNSLDNHLRRLGLGGWIKGLMQKAVLLETARIVRRFLSLEP

SEQ ID NO: 30395 - protein, 974 aa, Eilema depressum
MHYQIRPRLPRLPVHKRNIALVCALDSLLPIYLDNSENLGDTHSILYCAAIAACRVAGIRFPETNTTTRPNSGKPRWQCRIECRIAEARALIGKLICFRSGNTRPRVMRFVNRAFSGTGISPRDYAARVIERIDFLKQKVYAWANRIKRYKKRCDRYTLNRTFQRDERWVYRSWERPDLVDDVHLPDIDATNTFWRNIWSVPVAHTEGDWMREVKRSCEAIETMEPVIITEDDIACVVRSLPNWKAAGPDGLHNFWLKWLRSSHVRLASQFQSALESGSLPNFMTTGVTHLLFKSGSAVDPRNYRPITCLPTVYKLLTSVLRVKITNHITGNSILSYSQNGCRSGARGTKEHLIIDAAINQQVRRNRKDMATCWIDYKKAYDSVPHTWLLRVLELYKVDTTLCTFLKACMGQWRTALHYPGCRHIRDDGELIKIERGIFQGDSLSPLWFCLALNPLSTLLEDSGLGYCLRRGGQVISHLLYMDDLKLYAPNSLRLMELLKVTENFSNSIRMEFGVDKCAVMQVKRGGIVESEGIELSDSTKLRSLSANDTYKYLGMSQALGINEAGMKQSLRERFFCRLKKVLNSLLSGGNKVRAYNDWVIPVLTYSFGILRWTQTELDALDRRVRTLLTAYRMHHPRSSVMRLYIPRKCGGRGFLNVKNLHNREIYNLREYFLKVDVDVHRDVVAVDNGLTPLALAKENWRKPAILSIDDRKEVWRSKELHGRFYRALYGPDIDLKASVSWLRFGDLFGETEGFVCAITDEVVMTNNYRRYILKDGTVDICRACHRPGESLRHIISGCSRLANGEYLHRHNLVARIIHQQLALKYKLVDSEVPYYRYVPDPVLDDGRVTLYWDRSIITDRTILANKPDIVVIDRSERRAIIVDITIPHDENLVKAEKDKQIKYLDLAREVVDMWAVDSAIVVPIVVSAHGLIAKSLDQHLKRLALDSWIKGLMQKAVLLDTARIVRRFLSLEP

SEQ ID NO: 30396 - protein, 1197 aa, Vanessa cardui
MLTRARQQAHNNPSPDPPLSSASQAQDPAQGNNLMSAAASSSSDEYFSPPTSPTPVRRAGRRRPPTGLGARGQPVSNGVPASGGGVQRMRWTQSINENVMRAYYGATEGGTNLTAYRVRMLSLFQALEPAINVSAQRLSDQVRVILRNNRLSDTVLDRIRSEKCNGGVTSAPSQPVVQGSLPATPQGPDHDDEGEGDMAIATSKYSDQLRSALKDAIREYRNIPAELRPRLPRLPMTKRNRDLVCTLNSLLSDYFESSENLEDTHSILFCAAVATCRVAGVTFEDTERATRPKTVAPAWQSRIEKRINETRVLIGKLCCFKEGNTRPRVMRFVERAFLGTGISPQEYPSHVVERNDFLKQKVYAWASRIRRYRRRVDRYYLNRMFQSDQRWVYRTWERLDQGVSDGCRPDDDATNTFWRNIWSVPVDHIEGDWMREVRQACEPLEAMGEISIASEDVAAAVRSVPNWKSPGPDGLHSFWLKWLRSSHECLASQFQSALESGSLPQFLTTGVTHLLHKSGSATDPKNYRPITCLPTVYKLLTSILRDKINSHIENNTILSVSQNGCRGGSRGTKELLLIDMTISQQVRRSRKSLSTCWIDYKKAYDSVPHTWLLRVLELYKLDTTLCSFLRSCMGQWRTVLRYPGCRTIHSNDEPIRIERGIFQGDSLSPLWFCLALNPLSTLLESSRLGYRLRRGGKVISHLLYMDDLKLFAPSDSQLVELLKVTETFSNSIRMEFGVDKCAVMHVKRGEIVESDGLQLSDSINFKSLSANESYKYLGMSEALGINVTDMKQSLQERFFGRLKKVLKSLLSGGNKVRAFNGWVMPVLMYSFGILKWTQKELDALDRRVRVLLTAYRMHHPRSSVMRLYIPRRCGGRGFLNAKTLHNREVYKLREYFLHTDLDMHRDVVTMDKGLTPLSLGKENWRKPVVLSTENRKEVWKSKELHGRFYRALHGPDVDFMASVSWLRFGNLFGETEGFVCAIMDEVIMTNNYRKYIVRDGTVDICRACHTPGESLRHIISGCSRLANGEYLHRHNQVAKIIHQQLALRYGLVVSEVPYYRYVPDPVLENGHITLYWDRSIITDRTVVANKPDIVVIDRSERRTIIVDITIPHDENLVKAEKDKQIKYFDLAHEVVDMWDVDTAVIVPIVVSANGLMAKSLDQHLKRLSLGSWVKGLMQKAVLLGTSRIVRKFLSLEP

SEQ ID NO: 30397 - protein, 1197 aa, Vanessa cardui
MLTRARQRAHNYPSPDPPLSSASQTQDPAQGSSLVSAVASSSSDEYFSPPTSPTPVRRAGRRRPPTGLGARGQPVSNRVPASGGGVQRMRWTQPINENVMRAYYGATKGGTNLTAYRVRMLSLFQALEPAVNVSAQRLSDQVRVILRNNRLSDTVLDRIRSETCNSGVTSGPSTPVVEEPLPTIPQGPEHDDEGGGDMAITTSKYSDHLRSALGDAIREYRNTPAELRPRLPRLPMTKRNRDLVCTLDSLLTDYFESSENLEDTHSILFCAAVAACRVAGVTFEDTERATRPKAVAPAWQSRIEKRINETRVLIGKLYCFKEGNTRPRVMRFVGRAFLGTGIGPQEYPSHVVERIDFLKQKVYAWASRIRRYRRRVDRYHLNRKFQSDQRWVYRTWERLDQDVSDECRPDDDATNTFWRNICSVPVDHIEGDWMLEVRQACEPLEVMGKISIASEDVAAAVRSVSNWKSPGPDGLHNFWLKWLRSSHECLASQFQSALESGSLPQFLTTGVTHLLHKSGSATDPKNYRPITCLPTVYKLLTAILGDKINSHIQNNSILSVSQNGCRGGSRGTKELLLIDMTISQQVRRSRKSLSTCWIDYKKAYDSVPHTWLLRVLELYKLDTTLCSFLRSCMGQWRTVLRYPGCRTIHGNDEPIRIERGIFQGDSLSPLWFCLALNPLSTLLESSRLGYRLRRGGKVISHLLYMDDLKLFAPSDSQLMELLKVTETFSNSIRMEFGVDKCAVMHVKRGEIMESDGLQLSDSINFKSLSANESYKYLGMSEALGINVTDMKQSLQERFFGRLKKVLKSLLSGGNKVRAFNGWVMPVLMYSFGILKWTQKELDTLDRKVRVLLTAYRMHHPRSSVMRLYIPRRCGGRGFLNAKTLHNREVYKLREYFVHTDLDMHRDVVTMDKGLTPLSLGKENWRKPVVLSTENRKEVWKCKELHGRFYRVLHGPDVDFMASVSWLRFGNLFGETEGFVCAIMDEVIMTNNYRKYIVRDGTVDICRACHTPGGSLRHIISGCSRLANGEYLYRHNQVAKIIHQQLALRYGLVVSEVPYYRYVPDPVLENGHITLYWDRSIITDRTVVANKPDIVVIDRSERRTIIVDITIPHDENLVKAEKDKQIKYLDLAHEVVDMWDVDTAVIVPIVVSANGLMAKSLDQHLKRLSLGSWVKGLMQKAVLLGTARIVRKFLSLEP

SEQ ID NO: 30398 - protein, 975 aa, Schrankia costaestrigalis
MDPGRRPRIPRLPTHKQNIALVCALDSLLLNYFDNSENLGDAHSILYCGAVAACRVAHIKFPVDDIATRLRPTVPAWQCRIERRIAEARALIGKLICFRSGNTRPRVMRFVTRAFSETNIDRRDYMLHVTERIDFLKQKVYAWANRIKRFKKRMERYTQNRAFQKDERWVYRNWERPVLGSVDMQLPDADATNDFWRSIWSVPVNHTEGAWIGDVEKACEHIHQMEPVVITTEDVTCAVRRLPNWKSAGPDGLHNFWLKWLHSSHACLASHFQSSLETGTLPDFITTGVTHLLYKSGSSTDPKNYRPITCLPTIYKLLTSILRKKISLHIQENSIMCISQNGCRNEARGTKEQLLIDTTISEQVRRNRKDLFTCWIDYKKAYDSVPHTWLLRVLELYKIDATLCTFLRTCMTKWNTVLFYSGCRLGLGNEVPIQIKRGIFQGDSLSPLWFCLALNPLSTLLECSGLGYRLKRHGQVISHLLYMDDLKLFAPTKSQLLVLLKETETFSNSIKMEFGVDKCAVMHVKRGKVVESDELQLSDSIKLRCLSPSDTYKYLGMSQALCITETDMKQQLRDRFFARLKKVLNSLLTGGNKVRAYNSWVMPVLMYSFGILKWTQTELEALDRKVRTLLTAHRMHHPRSSVMRLYIPRKSGGRGYLSAKTLHNREVYNLREYFLTVDADIHRDVVSVDVGLTPLGLGKENWRKPIIQTIDDRKEIWKSKELHGRFYRALNGPDVDTLSSVSWLRFGDLFGETEGFVFAIMDEVVMTKNYRKYILKDGTVDICRACHCPGESLRHIVSSCSRLANGEYLHRHNQVARIVHQQLALKYHLVDAEVPYYKYVPDPVLENSSVTLYWDRSIITDRTIVANKPDIVVIDRSERRAMIIDITIPHDENLVKAEKDKQTKYLDLAHEVVDMWNVDSAIIVPIVLSVNGLIPKSLYQHLRRLSLDSWIIGLMQKAVLLDTARIVRRFLSLEP

SEQ ID NO: 30399 - protein, 869 aa, Lymantria monacha
MAKKRCLQGGSMGLRAASSVTPDRFGGVRRPWPTTKKKKKKKRYKKRMNRYSVNRMFESDQKSVYRNWKRPCLIVDDERLPDAEVTNTFWRSIWSEPVVHSEGNWMGDVKRACENIPQMENVLIDKDDVTCAVRSLSNWKSPGPDGLHNFWLKWLHSAHARLASHFQSALVSGTLPEFMTTGITHLLHKTGSTTEPCNYRPITCLPSVYKLLTSILSNKIAKHVQLNSVMSISQNGCRNGGRGTKELLLIDTAISQQVRRNRKDLSVCWIDYRKAFDSVPHTWLLRVLELYKINSLLCTFLKSCMGQWKTFLKYPMHRLNLGSSEPIYIRRGIFQGDSLSPLWFCLALNPLSILLEHSGLGCRLRRGGQIISHLLYMDDLKLFAPNNPQLVKLLKVTETFSSSIKMEFGVDKCAVMHVKHGGIVEVDRGQLFNTLQFRPLQVTDTYKYLGMSQALNINESDMKQALRERFFGRLKKVLNSLLSGGNKVRAYNAWVMPILMYSFGILKWTQTELDALDRKVRTLLTSHRMHHPRSSVMRLYIPRKCGGRGFLNAKTLHNREIYNLRDYFLKMTSGMHLDVVAVDNGLTPLGLAKENWHKPAVLSTKDRESIWQSKELHGRFYGALNASEVDFSASVTWLQFGNLFGETEGFVCAIADEVIKTNNYRKYILRDGTADICRACHLPGESLRHIVSGCSRLANGEYLHRHNQVARIIHQQLALLYRLVSIEVPYYRYIPQPVLENGRATLYWDRSIITDRTIVANKPDIVVIDRLQRRAMIVDVTVPHDGNLVKAEKDKQIKYQDLAHEIVDMWDVDTAIVVPIVISPNGLIAKSLAQHLKRLALGSWIGGLMQKAVLLDTARIVRKFLSLEP

SEQ ID NO: 30400 - protein, 1200 aa, Spodoptera exigua
MLTRSKARARGASPPSPDSSLSSASPSPETRTTRSPVVAVASSSSDEYLSPLASPVPVRRQRRGRPPMGLGTRGQRAPGRVPAAGGCARRMKWSQTINENVMRAYYGATEGGTNLTAYRDRMLSLFQVLEPSVNVSAQRLSDQVRVIQRSRRLDDAALDRLRLETLHNRVVLTSSQPATKTRPVENATLATPGAAVEDDKVEQVSTQCNEILRNALEDAIHEYRFAPTELRPRLPRLPMCGKNRALVCALDSLLENYFESSENLYDTHSILYCGAIAACRVANVRFPNLDAAVRPKPAAPAWQCRIERRIDEARVLIGKLTCFREGNNRPRVMRFVRRAFVGTETSPHEYLTRVTERIDFLKQKIYAWANRIRRYKKRVERYTQNRMFQSDQRWVYRDWERSSQDVVNGRHPDDETTNSFWRNIWSVPVNHTEADWMCDVKRECETLPEMEEVVITSSDVANAACSVPNWKSPGPDGLHNFWLKSFTSSHDRLASQFQMALEAGSLPQFLTTGITHLLHKSGSYTEPKNYRPITCLPTVYKLFTSILRAKITKHIEKNSIMSVSQNGCRKGSRGTKELLLIDMVISQQVRRSRKDLSTCWIDYKKAYDSVPHTWLMRVLELYKINTTLRTFLQSCMRQWSTVLSYPGCKQIQRSEEPVRIVRGIFQGDSLSPLWFCLALNPLSTLLEASGLGYRLRRKGHVISHLLYMDDLKLFAPNKEELMELLKITKNFSSSIRMEFGVDKCAVMHVKRGGIVESESLELSDFTKLRSLSANDTYKYLGMSEGLGINGPHMKQSLQERFFGRLNKVLKSSLSGGNKVRAFNGWVMPVLMYSFGILKWTQTELDTLDRRVRTMLTANRMRHPRSSVMRLYIPRKCGGRGFLNAKTLHNREVCNLREHFLKVDEDMHREVVTVDKGFTPLSLAKENWCKPVVLSVNDRKAVWSSKELHGRFFRALHGPDIDFLASVAWLRFSNLFGETEGFVCAIMDEVILTNNYRKYIMKDGTVDICRACHSSGESIRHIISGCGRLANGEYLHRHNQVAKIIHQQLALKYRLVESEVPYYKYVPDPVLEKDHITLYWDRSIITDRTIVANKPDIVVVDRLARRTTIIDVAIPHDENLVKAEKDKQLKYLDLAHEVVDMWNVDSAIVVPIVVSANGLVPKSLDNHLKRLTLGGWIKGLIQKAVLLETARIVRRFLSLEP

SEQ ID NO: 30401 - protein, 1197 aa, Spodoptera frugiperda
MLTRARRRYAHPPSPDSSLSSASPSPEPNHEELPVTVVASSSSDEYFSPPTSPPPARRPRRGRPPTGLGARGQQTPGRVPATGGCARRMKWSQTINENVMRAYYGATEGGTNLTAYRERMLSMFQVLEPSVNVSAQRLSDQVRVIQRNRRLDEAALDRLRSEALRNRVVPAPPQEVAQTPTVSQNVTPTTPAAGVEDDRVEQVSTQCNERLRSALEDAIREYRFAPLKPKLPRLPMCGKNRALVSALDSLLKTYFESSENLYDTHSILYCGAVAACRVANVRFSNLDAAVRPKPAVPAWQCRIERRISEARVLIGKLSCFRDGNTRPRVMRFVRRAFVGTETSPHEYMSRVTERIDFLKQKVYAWANRIRRYKKRVERYTQNRMFQRDQRWVYRNWERSNQDVTDGRRPDDEATNTFWRNIWSVPVSHTEDDWICDVERRCETVPEMEEVIITSSDVSSAACSVPNWKSPGPDGLHNFWLKWFTSSHARLASQFQAALEAGSLPQFLTTGVTHLLHKSGSSTEPKNYRPITCLPTVYKLLTSILRTKITKHIEKHSIMSVSQNGCRKGSRGTKELLLIDMVVSQQVRRFRKNLSTCWIDYKKAYDSVPHTWLMRVLELYKIDATLRAFLQSCMRQWSTVLCYPGCRQIQGSEEPVRIVRGIFQGDSLSPLWFCLALNPLSTLLEASGLGYPLRRRGLVISHLLYMDDLKLFAPNNKQLMELLKITEKFSSSIRMEFGVDKCAVMHVKRGGIVESEGLELSDFTKLRTLSANDTYKYLGMSEGLGINGPDMKQSLRERFFGRLNKVLKSSLSGGNKVRAYNGWVMPVLMYSFGILKWTQTELDALDRRVRTLLTANRMHHPRSSIMRLYIPRKCGGRGLLNAKTLHNREVCNLREYFLKVNEGMHREVAAVDNGFTPLSLAKENWRKPVVLSVNDRKEVWHSKELHGRFFRALHGPSVDFLASVSWLRFSNLFGETEGFVCAIMDEVILTNNYRKYIIKDGTVDICRACHSPGESIRHIISGCGRLANGEYLHRHNQVAKIIHQQLALHYQLVEFEVPYYKYVPDPVLENGHITLYWDRSIITDRTIVANKPDIVVIDRQARRAMIVDITIPHDENLVKAEKDKQIKYLDLAHEVVDMWSVDSAIIVPIVVSANGLIPNSLDNHLRRLGLGGWIKGLMQKAVLLETARIVRRFLSLEP

SEQ ID NO: 30402 - protein, 1197 aa, Spodoptera frugiperda
MLTRARRRYAHPPSPDSSLSSASPSPEPNHEELPVTVVASSSSDEYFSPPTSPPPARRPRRGRPPTGLGARGQQTPGRVPATGGCARRMKWSQTINENVMRAYYGATEGGTNLTAYRERMLSMFQVLEPSVNVSAQRLSDQVRVIQRNRRLDEAALDRLRSEALRNRVVPAPPQEVAQTPTVSQNVTPTTPAAGVEDDRVEQVSTQCNERLRSALEDAIREYRFAPLKPKLPRLPMCGKNRALVSALDSLLKTYFESSENLYDTHSILYCGAVAACRVANVRFSNLDAAVRPKPAVPAWQCRIERRISEARVLIGKLSCFRDGNTRPRVMRFVRRAFVGTETSPHEYMSRVTERIDFLKQKVYAWANRIRRYKKRVERYTQNRMFQRDQRWVYRNWERSNQDVTDGRRPDDEATNTFWRNIWSVPVSHTEDDWICDVERRCETVPEMEEVIITSSDVSSAACSVPNWKSPGPDGLHNFWLKWFTSSHARLASQFQAALEAGSLPQFLTTGVTHLLHKSGSSTEPKNYRPITCLPTVYKLLTSILRTKITKHIEKHSIMSVSQNGCRKGSRGTKELLLIDMVVSQQVRRSRKNLSTCWIDYKKAYDSVPHTWLMRVLELYKIDATLRAFLQSCMRQWSTVLCYPGCRQIQGSEEPVRIVRGIFQGDSLSPLWFCLALNPLSTLLEASGLGYPLRRRGLVISHLLYMDDLKLFAPNNKQLMELLKITEKFSSSIRMEFGVDKCAVMHVKRGGIVESEGLELSDFTKLRTLSANDTYKYLGMSEGLGINGPDMKQSLRERFFGRLNKVLKSSLSGGNKVRAYNGWVMPVLMYSFGILKWTQTELDALDRRVRTLLTANRMHHPRSSIMRLYIPRKCGGRGLLNAKTLHNREVCNLREYFLKVNEGMHREVAAVDNGFTPLSLAKENWRKPVVLSVNDRKEVWHSKELHGRFFRALHGPSVDFLASVSWLRFSNLFGETEGFVCAIMDEVILTNNYRKYIIKDGTVDICRACHSPGESIRHIISGCGRLANGEYLHRHNQVAKIIHQQLALHYQLVEFEVPYYKYVPDPVLENGHITLYWDRSIITDRIIVANKPDIVVIDRQARRAMIVDITIPHDENLVKAEKDKQIKYLDLAHEVVDMWSVDSAIIVPIVVSANGLIPNSLDNHLRRLGLGGWIKGLMQKAVLLETARIVRRFLSLEP

SEQ ID NO: 30403 - protein, 868 aa, Spodoptera litura
MRFVRRAFVGTETSPHEYLSRVTERIDFLKQKVYAWANRIRRYKKRVERYTQNRMFQRDQRWVYRDWERSNQDVADGRRPDDDATNTFWRNIWSVPVSHTEGDWMFDVKRRCETIPEMEEVEITSSDVASAACSVPNWKSPGPDGLHNFWIKWFKSSHVRLALHFQAALETGSLPQFLTTGVTHLLHKSGSSTEPKNYRPITCLPTVYKLLTSILRTKITKHIEQNSIMSVSQNGCREGSRGTKELLLIDMVVSQQVRRSRKDLSTCWIDYKKAYDSVPHTWLLKVLELYKIHASLRAFLESCMRQWSTVLCYPGCRQIQGNEEPVRIVRGIFQGDSLSPLWFCLALNPLSTLLEDSGLGYPLRRRGLVISHLLYMDDLKLFAPNKKQLMELLNITEKFSSSIRMEFGVDKCAVMHVKRGGIVESEGLELSDFTKLRSLSANDTYKYLGMSEGLGINGLDMKQSLQERFFGRLNKVLKSSLSGGNKVRAFNGWVMPVLMYSFGILKWTQTELDTLDRRVRTLLTANRMHHPRSSVMRLYIPRKCGGRGLLNAKTLHNREVCSLREYFLKVNEGMHREVAAVDNGFTPLSLAKENWRKPVVLSVNDRKEVWHSKELHGRFFRALHGPSVDFLASVSWLRFSNLFGETEGFVCAIMDEVILTNNYRKYIIKDGTVDICRACHSPGESIRHIISGCGRLANSEYLHRHNQVAKIIHQQLALHYRLVESEVPYYKYVPDPVLENDHITLYWDRSIITDRTIIANKPDIVVIDRQVRRTMIIDITIPHDENLVKAEKDKQIKYLDLAHEVVDMWNVDSAIIVPIVVSANGLIPNSLDNHLRRLALGSWVKGLIQKAVLLETARIVRRFLSLEP

SEQ ID NO: 30404 - protein, 1216 aa, Schrankia costaestrigalis
MFIRLKTNQILYHTHLFLWWKPKNIIIIIIIIILYSLSSASQTVENVPDSVEASSSSSSDEFFSPPSSPTPVLRRGRGRPPIGLGSRAPQASNRVPAVGGNVHRMKWTSTINENVMRAYFVATEGGTNLTAYRDRMLSLFQELEPAVNVSTQRLSDQVRAIQRCHLLNDTVLDRIRSDILSNLTISTPPPVTTQVNTIIPLSQPIELNSSETIDCEVTNVSIQYNDQLRSALECTIGEYRFMEPDKRPRLPRLPTHKKNIALVCALDSLLSNYFDNSENLSDAHSILYCGAVTACRVAHIRFPTDDIATRLRPTVPVWQCRIERRIAEARALIGKLICFRSGNTRPRVMRFVTRAFADTNIDRRDYILHVTERIDFLKQKVYAWANRIKRFKKRMERYTQNRAFQRDERWVYRNWERPVQDSGDRQLPDADATTNFWRSIWSVPVSHVEGDWIGDVEKACERIHQMEPVTISTLDVSSAVRRLPNWKSAGPDGLHNFWLKWLHSSHACLASHFQSSLETGTLPDFITTGETHLLYKSGSSTDPKNYRPITCLPTIYKLLTSILRKKISLHIQHNSIMYISQNGCRNEARGTKEQLLIDTTISEQVRRNRKDLSTCWIDYKKAYDSVPHTWLLRVLELYKIDATLCTFLRTCMTKWNTVLFYSGCRQGLGNNVPIQIKRGIFQGDSFSPLWFCLALNPLSTLLECSGLGYRLKRHGQVISHLLYMDDLKLFAPTKSQLLVLLKETETFSNSIKMEFGVDKCAVMHVKRGKVVESDELQLSDTIKLRCLSPSDTYKYLGMSQALCIAETDMKQQLRDRFFARLKKVLNSLLTGGNKVRAYNGWVMPVLMYSFGILRWTQTELETLDRKVRTLLTAHRMHHPRSSVMRLYIPRKSGGRGFLSAKTLHNREVYNLREYFLSVDADIHRDVVSVDVGLTPLCLGKENWRKPIIHTIDDRKEVWKSKELHGRFYRTLNGPDVDTLASVSWLRFGDLFGETEGFVFAIMDEVVMTKNYRKYILKDGTVDICRACHCPGESLRHIVSGCSRLANGEYLHRHNQVARIVHQQLALKYHLVDAEVPYYKYVPDPVLENSSVTLYWDRSIITDRTIVANKPDIVVIDRSERRAMIIDITIPHDENLVKAEKDKQTKYLDLAHEVVDMWHVDSAIIVPIVLSVNGLIPKSLYQHLRRLSLDSWIIGLMQKAVLLDTARIVRRFLSLEP

SEQ ID NO: 30405 - protein, 1191 aa, Trichoplusia ni
MLTRRRAARLPSPGSSPSSASQLPPGRGPAPAVAVASSSSDEYYSPPTSPTPVRRPGRRRPPSSLAPSGQPASNRAPAPGGVVQRMKWTRPMNENVMRAYYGATGGGTNLTAYRARMLSLFRALEPDVDVSAQRLSDQVRVIQRNYRLDDATLDRLRSEVQTSPVVVTPSIAEAPAASALPANPADGGDDDGAITVSTQCSDHIRSTLEQAVLEYRSTPRDQRPRLPRLPMHNRNKALMGVLDSLLSSYFGNSEDLGDTHSLLYCAAVAACRVAGVTFRDNTAARPKQAAPAWQCRIEKRVAGARTLIAKLVAFRGGNTRPRVMRFVKRAFAGTNISPSEYTARVTERIDFFKQKVCAWASRIRRYKTRVDRFHQNRMFQRDQRWVYRSWEQPASEEGAGRLPDDVATNLFWRSIWSAPVTHSEGDWIRDVEQSCERIEEMGAIDISPQDVANAVRPLANWKAPGPDGLHNFWLKWLPSSHGCLASQFQSAVDSGVLPQFFTTGSTHLLHKTGSTTDPKNYRPITCLPTIYKLLTSILREKINDHIERFSIMSASQNGCRNGSRGTKELLLIDMTICQQVRRSKKGVSTCWIDYKKAYDSVPHAWLMRVLELYKINTTLRTFLKSCMGQWTTVLHYPGCRDIQKSGQLIRIERGIFQGDSLSPLWFCLALNPLSTLLENSRLGYSLRRGSQVISHLLYMDDLKLFASNKLQLMKLLKITESFSNSIRMEFGVDKCAVMHVKRGGIVESQGIQLSDSINLRSLSSTETYKYLGMSKALGINVADMKQSLQTRFFGRLNKVLKSSLSGGNKVRAFNGWVMPVIMYSFGILKWTQTELDALDRRVRTLLTANRMHHPRSSVMRLYIPRKCGGRGFLNAKTLHNREVCNLREYFLRVDVGMHRDVVAVDKGFTPLSLGKENWHKPIVLSVKDRKDVWQSKELHGRYYRTLHGADVDFLASVAWLRFGDLFGETEGFVCAIMDEVIMTNNYRKYIIKDGTVDICRACHCPGESLRHIVSGCSRLANGEYLHRHNQVARIIHQQLALKYKLVESEVPYYKYVPDPVLESGHITLYWDRSIITDRTIVANKPDIVVIDRSERRTMIVDITIPHDENLVKAEKEKQLKYLDLAHEVVDLWEVDSAIIVPIVVSANGLIAKSLDQHLRRLSLGVWVKGLIQKAVLLDTARIVRRFLSLEP

SEQ ID NO: 30406 - protein, 1109 aa, Spodoptera frugiperda
MKWTQTINENVMRAYYGATEGGTNLTAYRERMLSMFQVLEPSVNVSAQRLSDQVRVIQRNRRLDEAALDRLRSEALRNRVVPAPPQEVAQTPTASQNVTPTTPAAGVEDDRVEQVSTQCNERLRSALEDAIREYRFAPLKPKLPRLPMCGRNRALVSALDSLLKTYFESSENLYDTHSILYCGAVAACRVANVRFSNLDAAVRPKPAVPAWQCRIERRISEARVLIGKLSCFRDGNTRPRVMRFVRRAFVGTETSPHEYMSRVTERIDFLKQKIYAWANRIRRYKKRVKRYTQNRMFQRDQRWVYRNWERSNQDVTDGRRPDDEATNTFWRNIWSVPVSHTEDDWICDVERRCETVPEMEEVIITSSDVSSAACSVPNWKSPGPDGLHNFWLKWFTSSHARLASQFQAALEAGSLPQFLTTGVTHLLHKSGSSTEPKNYRPITCLPTVYKLLTSILRTKITKHIEKHSIMSVSQNGCRKGSRGTKELLLIDMVVSQQVRRSRKNLSTCWIDYKKAYDSVPHTWLMRVLELYKIDATLRAFLQSCMRQWSTVLCYPGCRQIQGSEEPVRIVRGIFQGDSLSPLWFCLALNPLSTLLEASGLGYPLRRRGLVISHLLYMDDLKLFAPNNKQLMELLKITEKFSSSIRMEFGVDKCAVMHVKRGGIVESEGLELSDLTKLRALSANDTYKYLGMSEGLGINGPDMKQSLRKRFFGRLNKVLKSSLSGGNKVRAYNGWVMPVLMYSFGILKWTQTELDTLDRRVRTLLTANRMHHPRSSIMRLYIPRKCGGRGLLNAKTLHNREVCNLREYFLKVNEGMHREVAAVDNGFTPLSLAKENWRKPVVLSVNDRKEVWHSKELHGRFFRALHGPSVDFLASVSWLRFSNLFGETEGFVCAIMDEVILTNNYRKYIIKDGTVDICRACHSPGESIRHIISGCGRLANGEYLHRHNQVAKIIHQQLALQYQLVEFEVPYYKYVPDPVLENGHITLYWDRSIITDRTIVANKPDIVVIDRQARRTMIIDITIPHDENLVKAEKDKQIKYLDLAHEVVDMWNVDSAIVVPIVVSANGLIPNSLDNHLRRLGLGGWIKGLMQKAVLLETARIVRRFLSLEP

SEQ ID NO: 30407 - protein, 868 aa, Spodoptera litura
MRFVRRAFVGTETSPHEYLSRVTERIDFLKQKVYAWANRIRRYKKRVERYTQNRMFQRDQRWVYRDWERSNQDVVDGRRPDDDATSTFWRNIWSVPVSHTEGDWMFDVKRRCETIPEMEEVEITSSDVASAACSVPNWKSPGPDGLHNFWIKWFKSSHVRLALHFQAALETGSLPQFLTTGVTHLLHKSGSSTEPKNYRPITCLPTVYKLLTSILRTKITKHIEQNSIMSVSQNGCREGSRGTKELLLIDMVVSQQVRRSRKDLSTCWIDYKKAYDSVPHTWLLKVLELYKIHASLRAFLESCMRQWSTVLCYPGCRQIQGNEEPVRIVRGIFQGDSLSPLWFCLALNPLSTLLEDSGLGYPLRRRGLVISHLLYMDDLKLFAPNKKQLMELLNITEKFSSSIRMEFGVDKCAVMHVKRGGIVESEGLELSDFTKLRSLSANDTYKYLGMSEGLGINGLDMKQSLQERFFGRLNKVLKSSLSGGNKVRAFNGWVMPVLMYSFGILKWTQTELDTLDRRVRTLLTANRMHHPRSSVMRLYIPRKCGGRGLLNAKTLHNREVCSLREYFLKVNEGMHREVAAVDNGFTPLSLAKENWRKPVVLSVNDRKEVWHSKELHGRFFRALHGPSVDFLASVSWLRFSNLFGETEGFVCAIMDEVILTNNYRKYIIKDGTVDICRACHSPGESIRHIISGCGRLANSEYLHRHNQVAKIIHQQLALHYRLVESEVPYYKYVPDPVLENDHITLYWDRSIITDRTIIANKPDIVVIDRQVRRTMIIDITIPHDENLVKAEKDKQIKYLDLAHEVVDMWNVDSAIIVPIVVSANGLIPNSLDNHLRRLALGSWVKGLIQKAVLLETARIVRRFLSLKP

SEQ ID NO: 30408 - protein, 1197 aa, Vanessa tameamea
MLTRARQRAHNKPSSDPPLSSASQTQDPAQGSSLVSAIASSSSDEYFSPPTSPTPVRRAGRRRPPTGLGARGQPASNRVPASGGGVQRMRWTQPINENVMRAYYRATEGGTNLTAYRVRMLSLFRALEPAINVSAQRLSDQVRIILRNNRLSDTVLDRIRSEMCNSGFTSAPSQPVVEGPLPATPQGPDHDDVGEGDMAITTSKYSDQLRSALADAIREYRNTPAELRPRLPRLPMTKRNRDLVCTLDSLLADYFESSEDLEDTHSILFCAAVAACRVAGVTFEDTERATRPKAATPAWQSRIEKRINKTRVLIGKLYCFKEGNTRPRVMRFVGRAFLGTGISPQEYPSHVVERIDFLKQKVYAWASRIRRYRRRVDRYYLNRMFQSDQRWVYRTWERLDQGVSDGCRPDDDATNTFWRNIWSVPVDHIEGDWMREVRQACEPLEAMGEISIASEDVAAAVRSVPNWKSPGPDGLHSFWLKWLRSSHDCLASQFQSALESGSLPQFLTTGVTHLLHKSGSATDPKNYRPITCLPTVYKLLTSILRDKINSYIQNNSILSVSQNGCRGGSRGTKELLLIDMTISQQVRRFRKSLSTCWIDYKKAYDSVPHTWLLRVLELYKLDTTLCSFLRSCMGQWRTVLRYPGCRTIHGNDEPIRIERGIFQGDSLSPLWFCLALNPLSTLLEGSRLGYCLRRGGKVISHLLYMDDLKLFAPSGSQLMELLKVTETFSNSIRMEFGVDKCAIMHVERGEIMESDGLQLSDSINFRSLSANESYKYLGVSEALSINVTDMKQSLQEHFFGRLKKVLKSLLSGGNKVRAFNGWVMPVLMYSFGILKWTQKELDALDRRVRVLLTAYRMHHPRSSVMRLYIPRRCGGRGFLNAKTLHNREVYKLREYFLHTDLDMHRDVVTMDKGLTPLSLGKENWRKPVVLSTENRKGVWKSKELHGRFYRALHGPDVDFIASVSWLRFGNLFGETEGFVCAIMDEVIMTNNYRKYIVRDGTVDICRACHTPGESLRHIISGCSRLANGEYLHRHNQVAKIIHQQLALRYGLVVSEVPYYRYVPDPVLENGCITLYWDRSIITDRTVVANKPDIVVIDRSERRTIIVDVTIPHDENLVKAEKDKQIKYLDLAHEVVDMWDVDTAVIVPIVVSANGLMAKSLDQHLKRLSLGSWVKGLMQKAVLLSTARIVRKFLSLGP

SEQ ID NO: 30409 - protein, 1198 aa, Eilema depressum
MLTRSQARKNASAPVTSPDSSLSSAAQPSPTEPAASSSSSSDEFFSPPTSPTPVRRPGRGRPPASLEPRRPPASNRAPAAGGNVRRMRWTTSINENVMRAYFAATGGGTNLTAYRDRMLLVFQGLEPALNVSAQRLSDQVRAIQRCHLLDSSVLERIRSDLQNSDVIPPPPQAPLLTPRVQGFTQVTEPDSGDGELDNVAFSVSTQYNDLIRNTLECAIRDYRSMHYQIRPRLPRLPVHKRNIALVCALDSLLPIYLDNSENLGDTHSILYCAAIAACRVAGIRFPETNTTTRPNSGKPRWQCRIECRIAEARALIGKLICFRSGNTRPRVMRFVNRAFSGTGISPRDYAARVIERIDFLKQKVYAWANRIKRYKKRCDRYTLNRTFQRDERWVYRSWERPDLVDDVHLPDIDATNTFWRNIWSVPVAHTEGDWMREVKRSCEAIETMEPVIITEDDIACVVRSLPNWKAAGPDGLHNFWLKWLRSSHVRLASQFQSALESGSLPNFMTTGVTHLLFKSGSAVDPRNYRPITCLPTVYKLLTSVLRVKITNHITGNSILSYSQNGCRSGARGTKEHLIIDAAINQQVRRNRKDMATCWIDYKKAYDSVPHTWLLRVLELYKVDTTLCTFLKACMGQWRTALRYPGCRHIRDDGELIKIERGIFQGDSLSPLWFCLALNPLSTLLEDSGLGYCLRRGGQVISHLLYMDDLKLYAPDSLRLMELLKVTENFSNSIRMEFGVDKCAVMQVKRGGIVESEGIELSDSTKLRSLSANDTYKYLGMSQALGINEAGMKQSLRERFFCRLKKVLNSLLSGGNKVRAYNDWVIPVLTYSFGILRWTQTELDALDRRVRTLLTAYRMHHPRSSVMRLYIPRKCGGRGFLNVKNLHNREIYNLREYFLKVDVDVHRDVVAVDNGLTPLALAKENWRKPAILSIDDRKEVWRSKELHGRFYRALYGPDIDLKASVSWLRFGDLFGETEGFVCAITDEVVMTNNYRRYILKDGTVDICRACHRPGESLRHIISGCSRLANGEYLHRHNLVARIIHQQLALKYKLVDSEVPYYRYVPDPVLDDGRVTLYWDRSIITDRTILANKPDIVVIDRSERRAIIVDITIPHDENLVKAEKDKQIKYLDLAREVVDMWAVDSAIVVPIVVSAHGLIAKSLDQHLKRLALDSWIKGLMQKAVLLDTARIVRRFLSLEP

SEQ ID NO: 30410 - protein, 1197 aa, Vanessa cardui
MLTRARQQAHNNPSPDPPLSSASQAQDPAQGSSLVSAAASSSSDEYFSPPTSPTPVRRAGRRRPPTGLGARGQPVSNRVPASGGGVQRMRWTQPINENVMRAYYGATKGGTNLTAYRVRMLSLFQALEPAVNVSAQRLSDQVRVILRNNRLSDTVLDRIRSETCNSDVTSGPSTPVVEEPLPAIPQGPEHDDEGGGVMAITKSKYSDHLRSALGDAIREYRNTPAELRPRLPRLPMTKRNRDLVCTLDSLLADYFESSENLEDTHSILFCAAVAACRVAGVTFEDTERATRPKAVAPAWQSRIEKRINETRVLIGKLYCFKEGNTRPRVMRFVGRAFLGTGISPQEYPFHVVERIDFLKQKVYAWASRIRRYRRRVDRYHLNRKFQSDQRWVYRTWERLDQDVSDGCRPDDDATNTFWRNIWSVPVDHIEGDWMLEVRQACEPLEVMGKISIASEDVAAAVRSVANWKSPGPDGLHNFWLKWLRSSHECLASQFQSALESGSLPQFLTTGVTHLLHKSGSATDPKNYRPITCLPTVYKLLTAILRDKINSHIQNNSILSVSQNGCRGGSRGTKELLLIDMTISQQVRRSRKSLSTCWIDYKKAYDSVPHTWLLRVLELYKLDTTLCSFLRSCMGQWRTVLRYPGCRTIHGNDEPIRIERGIFQGDSLSPLWFCLALNPLSTLLESSRLGYRLRRGGKVISHLLYMDDLKLFAPSDSQLMELLKVTETFSNSIRMEFGVDKCAVMHVKRGEIMESDGLQLSDSINFKSLSANESYKYLGMSEALGINVTDMKQSLQERFFGRLKKVLKSLLSGGNKVRAFNGWVMPVLMYSFGILKWTQKELDALDRKVRVLLTAYRMHHPRSSVMRLYIPRRCGGRGFLNAKTLHNREVYKLREYFLHTDLDMHRDVVTMDKGLTPLSLGKENWHKPVVLSTENRKEVWKSKELHGRFYRALHGPDVDFMASVSWLRFGNLFGETEGFVCAIMDEVIMTNNYRRYIVRDGTVDICRACHTPGESLRHIISGCSRLANGEYLHRHNQVAKIIHQQLALRYGLVVSEVPYYKYVPDPVLENGHITLYWDRSIITDRTVVANKPDIVVIDRSERRTIIVDITIPHDENLVKAEKDKQIKYLDLAHEVVDMWDVDTAVIVPIVVSANGLMAKSLDQHLKRLSLDSWVKGLMQKAVLLGTARIVRKFLSLEP

SEQ ID NO: 30411 - protein, 1197 aa, Vanessa cardui
MLTRARQQAHNNPSPDPPLSSASQAQDPAQGSSLVSAAASSSSDEYFSPPTSPTPVRRAGRRRPPTGLGARGQPVSNRVPASGGGVQRMRWTQPINENVMRAYYGATKGGTNLTAYRVRMLSLFQALEPAVNVSAQRLSDQVRVILRNNRLSDTVLDRIRSETCNSGVTSGPSTPVVEEPLPAIPQGPEHDDEGGGDMAITKSKYSDHLRSALGDAIREYRNTPAELRPRLPRLPMTKRNRDLVCTLDSLLADYFESSENLEDTHSILFCAAVAACRVAGVTFEDTERATRPKAVAPAWQSRIEKRINETRVLIGKLYCFKEGNTRPRVMRFVGRAFLGTGISPQEYPSHVVERIDFLKQKVYAWASRIRRYRRRVDRYHLNRKFQSDQRWVYRTWERLDQDVSDGCRPDDYATNTFWRNIWSVPVDHIEGDWMLEVRQACEPLEVMGKISIASEDVAAAVRSVANWKSPGPDGLHNFWLKWLRSSHECLASQFQSALESGSLPQFLTTGVTHLLHKSGSATDPKNYRPITCLPTVYKLLTAILRDKINSHIQNNSILSVSQNGCRGGSRGTKELLLIDMTISQQVRRSRKSLSTCWIDYKKAYDSVPHTWLLRVLELYKLDTTLCSFLRSCMGQWRTVLRYPGCRTIHGNDEPIRIERGIFQGDSLSPLWFCLALNPLSTLLESSRLGYRLRRGGKVISHLLYMDDLKLFAPSDSQLMELLKVTETFSNSIRMEFGVDKCAVMHVKRGEIMESDGLQLSDSINFKSLSANESYKYLGVSEALGINVTDMKQSLQERFFGRLKKVLKSLLSGGNKVRAFNGWVMPVLMYSFGILKWTQKELDALDRKVRVLLTAYRMHHPRSSVMRLYIPRRCGGRGFLNAKTLHNREVYKLREYFLHTDLDMHRDVVTMDKGLTPLSLGKENWHKPVVLSTENRKEVWKSKELHGRFYRALHGPDMDFMASVSWLRFGNLFGETEGFVCAIMDEVIMTNNYRRYIVRDGTVDICRACHTPGESLRHIISGCSRLANGEYLHRHNQVAKIIHQQLALRYGLVVSEVPYYKYVPDPVLENGRITLYWDRSIITDRTVVANKPDIVVIDRSERRTIIVDITIPHDENLVKAEKDKQIKYLDLAHEVVDMWDVDTAVIVPIVVSANGLMAKSLDQHLKRLSLDSWVKGLMQKAVLLGTARIVRKFLSLEP

SEQ ID NO: 30412 - protein, 985 aa, Schrankia costaestrigalis
MYAFQRTGSPIDPSIMEKRNIIIIFFFFFFFFFSLDSLLLNYFDNSENLGDAHSILYCGAVAACRVAHIKCPVDDIATRLRPTVPAWQCRIERRIAEARALIGKLICFRSGNTRPRVMRFVTRAFSETNVDRRDYMLHVTERIDFLKQKVYAWANRIKRFKKRMERYTQNRAFQKDERWVYRNWERPVVGSVDMQLPDADATNDFWRSIWSVPVNHTEGGWIGDVEKACERIHQMEPVIITTEDVTCAVRRLPNWKSAGPDGLHNFWLKWLHSSHACLASHFQSSLETGTLPDFITTGVTHLLYKSGSSTDPKNYRPITCLPTIYKLLTSILRKKISLHIQKNSIMCISQNGCRNEARGTKEQLLIDTTISEQVRRNRKDLSTCWIDYKKAYDSVPHTWLLRVLELYKIDATLCTFLRTCMTKWNTVLFYSGCRQGLGNEVPIQIKRGIFQGDSLSPLWFCLALNPLSTLLECSGLGYRLKRHGQVISHLLYMDDLKLFAPTKSQLLVLLKETETFSNSIKMEFGVDKCAVMHVKRGKVVESDELQLSDSIKLRCLSPSDTYKYLGMSQALCIAETDMKQQLRDRFFARLKKVLNSLLTGGNKVRAYNSWVMPVLMYSFGILKWTQTELEALDRKVRTLLTAHRMHHPRSSVMRLYIPRKSGGRGFLSARTLHNREVYNLREYFLTVDADIHKDVVSVDVGLTPLCLAKENWRKPIIQTIDDRKEIWKSKELHGRFYRALNGPDVDTLSSVSWLRFGDLFGETEGFVFAIMDEVVMTKNYRKYILKDGTVDICRACHCPGESLRHIVSGCSRLANGEYLHRHNQVARIVHQQLALKYHLVDAEVPYYKYVPDPVLENSSVTLYWDRSIITDRTIVANKPDIVVIDRSERRAMIIDVTVPHDENLVKAEKDKQTKYLNLAHEVVDMWNVDSAIIVPIVLSVNGLIPKSLYQHLRRLDLGSWIIGLMQKAVLLDTARIVRRFLSLEP

SEQ ID NO: 30413 - protein, 1196 aa, Lymantria monacha
MLTRSQTKAARPPPPGSSQSSASQPTASVPAASVTTEASSSSSSDEYFSPPTTPTPAPRRGRGRPPICLGPRGPPTSHRAPAAGGNVQRMKWTHSINENVMRAYFEATEGAIKLTAYRDRMLLLFQNLEPTINVTAQRLSDQVRAIQRCHLLDVATLDRLRLVSIQTCRVTPISTEISTIDTTQSVPPPYAEGEDATVSMDTQYNEEVRNALECALREYRFIPHNIRPRLPRLPMHRKNRRLVGTLDSLLTSYLHTSDSISDTHSILYCVAVAACRIAGLKFLENESTIQQKKAKPAWQCRIECRICEARVLIGKLICFRAGNTRPKVMRYVRRAFLGTDIKPDEYNARVTERIDFLKQKVYAWASRIRRYKKRMNRYSVNRMFESDQKSVYRNWERPCLIVDNERLPDAEVTNTFWRSIWSVPVVHSEGDWMGDVKRACENIPQMENVLIDKDDVTCAVRSLSNWKSPGPDGLHNFWLKWLHSAHARLASHFQSALVSGTLPEFMTTGITHLLHKTGSTTEPCNYRPITCLPSVYKLLTSILSNKIAKHVQLNSVMSISQNGCKNGGRGTKELLLIDTAISQQVRRNRKDLSVCWIDYRKAFDSVPHTWLLRVLELYKINSLLCTFLKSCMGQWKTFLKYPMHRLNLGSSEPIYIRRGIFQGDSLSPLWFCLALNPLSILLEHSGLGCRLRRGGQIISHLLYMDDLKLFAPNNPQLVKLLKVTETFSSSIKMEFGVDKCAVMHVKHGGIVEVDRGQLFNTLQFRPLQVTDTYKYLGMSQALNINESDMKQTLRERFFGRLKKVLNSLLSGGNKVRAYNAWVMPILMYSFGILKWTQTELDALDRKVRTLLTSHRMHHPRSSVMRLYIPRKCGGRGFLNAKTLHNREIYNLRDYFLKMTSGMHLDVVAVDNGLTPLGLAKENWHKPAVLSTKDRESIWQSKELHGRFYGALNASEVDFSASVTWLQFGNLFGETEGFVCAIADEVIKTNNYRKYILRDGTADICRACHLPGESLRHIVSGCSRLANGEYLHRHNQVARIIHQQLALLYRLVSTEVPYYRYIPQPVLENGRATLYWDRSIITDRTIVANKPDIVVIDRLQRRAMIVDVTVPHDGNLVKAEKDKQIKYQDLAHEIVDMWDVDTAIVVPIVISTNGLIAKSLAQHLKRLALGSWIGGLMQKAVLLDTARIVRKFLSLEP

SEQ ID NO: 30414 - protein, 1199 aa, Spodoptera exigua
MLTRAKARARAAPPPSPDSSLSSASPSPETRTTRSPVIAVASSSSDEYFSPLASPAPERRQRRGRPPMGLGTRGQRAPGRVPATGGCARRMKWSQSMNENVMRAYYGATEGGTNLTAYRDRMLSLFQVLEPSVNVSAQRLSDQVRVIQRSRRLDDAALDRLRLETLHNRVVLTSSQSATQTPVENATLATPVADVEDDKVEQVSTQCNERLRNALEDAIHEYRFAPSELRPKLPRLPMCGKNRALVCALDSLLENYFESSENLYDTHSILYCGAIAACRVANVRFPNLDAAVRPKPAAPAWQCRIERRIDEARVLIGKLTCFREGNNRPRVMRFVRRAFVGTETSPHEYLTRVTERIDFLKQKIYAWANRIRRYKKRVERYTQNRMFQSDQRWVYRDWERSSQDVVNGQRPDDETTNSFWRNIWSVPVNHTEADWMCDVKRECETLPEMEKVVITSSDVANAACSVPNWKSPGPDGLHNFWLKSFSSSHDRLASQFQMALEAGSLPQFLTTGITHLLHKSGSYTEPKNYRPITCLPTVYKLFTSILRANITKHIEKNSIMSVSQNGCRKGSRGTKELLLIDMVISQQVRRSRKDLSTCWIDYKKAYDSVPHTWLMRVLELYKINTTLRTFLQSCMRQWSTVLSYPGCKQIQRSEEPVRIVRGIFQGDSLSPLWFCLALNPLSTLLEASGLGYRLRRKGHVISHLLYMDDLKLFAPNKEELMELLKITKKFSSSIRMEFGVDKCAVMHVKRGGIVESESLELSDFTKLRSLSANDTYKYLGMSEGLGINGPHMKQSLQERFFGRLNKVLKSSLSGGNKVRAFNGWVIPVLMYSFGILKWTQTELDTLDRRVRTLLTANRMHHPRSSVMRLYIPRKRGGRGFLNAKTLHNREVCNLREHFLKVDEDMHREVVTVDKGFTPLSLAKENWCKPVVLSVNDRKTVWSSKELHGRFFRALHGPDVDFLASVAWLRFSNLFGETEGFVCAIMDEVILTNNYRKYIMKDGTVDICRACHSPGESIRHIISGCGRLANGEYLHRHNQVAKIIHQQLALKYRLVESEVPYYKYVPDPVLEKDHITLYWDRSIITDRTIVANKPDIVLVDRLARRTTIIDVAIPHDENLVKAEKDKQLKYLDLAHEVVDMWSVDSAIVVPIVVSANGLVPKSLDNHLKRLTLGGWIKGLIQKAVLLETARIVRRFLSLEP

SEQ ID NO: 30415 - protein, 1201 aa, Spodoptera litura
MMLTRARSKQGAPPPPPDSSLSSASPSPDPSPAGSPVTAVASSSSDDYFSPPTSPTPVRRPGRGRPPTGLGARGQQAPGRVPATGGCVRRMKWSQTINENVMRSYYGATEGGTNLTAYRERMLSIFQVLEPSINVSAQRLSDQVRVIQRNRRLDEAALDRLRLEALRNRVVPAPPQSVAQTPIVSQCVTPTTPIVGVEDDRVEQVSTQCNERLRSALEDAVREYRLAPSNLRPKLPRLPMCRKNRALVSALDSLLKKYFESSENLYDTHSILYCGAVAACRVANVRFPNLDAAVRPKPAVPAWQYRIERRISEARVLIGKLSCFREGNTRPRVMRFVRRAFVGTETSPHEYLSRVTERIDFLKQKVYAWANRIRRYKKRVERYTQNRMFQRDQRWVYRDWERSNQDVADGRRPDDDATNTFWRNIWSVPVSHTEGDWMFDVKRRCETIPEMEEVEITSSDVASAACSVPNWKSPGPDGLHNFWIKWFKSSHVRLALHFQAALETGSLPQFLTTGVTHLLHKSGSSTEPKNYRPITCLPTVYKLLTSILRTKITKHIEQNSIMSVSQNGCREGSRGTKELLLIDMVVSQQVRRSRKDLSTCWIDYKKAYDSVPHTWLLKVLELYKIHASLRAFLESCMRQWSTVLCYPGCRQIQGNEEPVRIVRGIFQGDSLSPLWFCLALNPLSTLLEDSGLGYPLRRRGLVISHLLYMDDLKLFAPNKKQLMELLNITEKFSSSIRMEFGVDKCAVMHVKRGGIVESEGLELSDFTKLRSLSANDTYKYLGMSEGLGINGLDMKQSLQERFFGRLNKVLKSSLSGGNKVRAFNGWVMPVLMYSFGILKWTQTELDTLDRRVRTLLTANRMHHPRSSVMRLYIPRKCGGRGLLNAKTLHNREVCSLREYFLKVNEGMHREVAAVDNGFTPLSLAKENWRKPVVLSVNDRKEVWHSKELHGRFFRALHGPSVDFLASVSWLRFSNLFGETEGFVCAIMDEVILTNNYRKYIIKDGTVDICRACHSPGESIRHIISGCGRLANSEYLHRHNQVAKIIHQQLALHYRLVESEVPYYKYVPDPVLENDHITLYWDRSIITDRTIIANKPDIVVIDRQVRRTMIIDITIPHDENLVKAEKDKQIKYLDLAHEVVDMWNVDSAIIVPIVVSANGLIPNSLDNHLRRLALGSWVKGLIQKAVLLETARIVRRFLSLEP

SEQ ID NO: 30416 - protein, 1197 aa, Vanessa tameamea
MLTRARQRAHKNPSPDPPLSSASQAQDPAQGSSLVSASASSSSDEYFSPPTSPTPVRRAGRRRPPTSLGARGQPASNGVPASGGGVQCMRWTQSINENVMRAYYGATEGGTNLTAYRVRMLSLFQALEPAINVSAQRLSDQVRVILRNNRLSDTVLDRIRSEMCNSGFTSAPSQPVVEGPLPATPQGPDHDDEDEGDMAITTSKYSDQLRSALGDAIREYRNTPAELRPRLPRLPMTKRNKDLVCTLDSLLADYFESSEDLEDTHSILFCAAVAACRVAGVTFEDTERATRPKAATPAWQSRIEKRINKTRVLIGKLYCFKEGNTRPRVMRFVGRAFLGTGISPQEYPSYVVERIDFLKQKVYAWASRIRRYRRRVDRYYLNRMFQSDQRWVYRTWERLDQGVSDGCRPDDDATNIFWRNIWSVPVDHIEGDWMREVRQACEPLEAMGEISIASEDVAAAVRSVPNWKSPGPDGLHSFWLKWLRSSHDCLASQFQSALESGSLPQFLTTGVTHLLHKSGSATDPKNYRPITCLPTVYKLLTSILRDKINSHIQNNSILSVSQNGCRGGSRGTKELLLIDMTISQQVRRFRKSLSTCWIDYKKAYDSVPHTWLLRVLELYKLDTTLCSFLRSCMGQWRTVLRYPGCRTIHSNDEPIRIERGIFQGDSLSPLWFCLALNPLNTLLECSRLGYCLWRGGKVISHLLYMDDLKLFAPSGSQLMELLKVTETFSNSIGMEFGVDKCAVMHVKRGEIMESDGLQLSDSINFRSLSANESYKYLGVSEALGINVTDMKQSLQERFFGRLKKVLKSLLSGGNKVRAFNGWVMPVLMYSFGILKWTQKELDALDRRVRVLLTAYRMHHPRSSVMRLYIPRRCGGRGFLNAKTLHNREVYKLREYFLHTDLDMHRDVVTMDKGLTPLSLGKENWRKPVVLSTENRKGVWKSKELHGRFYRALHGPGVDFMASVSWLRFGNLFGETEGFVCAIMDEVIMTNNYRKYIVRDGTVDICRACHTPGESLRHIISGCSRLANGEYLHRHNQVAKIIHQQLALRYGLVVSEVPYYRYVPDPVLENGRITLYWDRSIITDRTVVANKPDIVVIDRSERRTIIVDVTIPHDENLVKAEKDKQIKYLDLAHEVVDMWDVDTAIIVPIVVSANGLMAKSLDQHLKRLSLGGWVKGLMQKAVLLGTARIVRKFLSLGP

SEQ ID NO: 30417 - protein, 1197 aa, Mythimna ferrago
MLTRSRARRPETHPTTSGSSLNSASQPPGPAPAVSPVIPEAAVASSSSDEYFSPPTTPPPARRRGRGRPPASLGPRVPPASDRVPAVGGSVQRMRWTSSINENVMRSYFGATEGGINLTAYRGRMLSLFQVLEPAVNVSVQRLSDQVRVIQRNRMLDDAVLDRLRLESQSSRATPSAAAQRQPSAAPRPDHVGDADDDAAISVSTQCNERLRGALEDAFREYRSIPPELRPRLPRLPMHKRNRALVCALDSQLSICFDSSEDLADTHSILYCAAVAACRVAHVKFPNCNRATRPAVPAWQCRIERRIGEARALIGKLICFREGNTRPRVMRFVRRAFSGTDISPRDYLPCVTERIDFLKQKIYAWANRIRRYKRRVERYTQNRTFQSNERWVYRAWERPDQGVTDTRLPDDDAMCSFWRSIWSAPVSHTEGDWIREVERACDLLPEMGAITISPQDVARAVRPLPNWKSPGPDGLHNFWLKWFQRSHARLASQFQSALESGSLPLFLTTGITHLLHKSGSTAEPKNYRPITCLPTVYKVLTSILRAKINSHIETNSIMSISQNGCRNGSRGTKELLLIDIAISQQVRRSRKNLSACWIDYKKAYDSVPHTWLMRVLELYKVDATLRTFLMSCMGQWRTVLHYPGCRQIWENSEPIRIERGIFQGDSLSPLWFCLALNPLSTLLEGSGLGYRLKRGGLVISHLLYMDDLKLFAPNNLQLMELLKVTETFSSAIRMDFGVDKCAVIHVKRGEIMESEGIQLSDSIHLRSLSSTETYKYLGMSEALGINTDDVKQSLKERFFGRLNKVLNSLLSGGNKVRAFNGWVMPVLMYSFGILKWTQTELDTLDRRVRTLLTANRMHHPRSSVMRLYIPRKCGGRGFLNAKSLHNREVCSLREYFLAVDVGMHRDVVAVDKGLTPLSLANENWRKPLVLDTNDRREVWQGKELHGRFYRALHGPDVDLLASVSWLRFGDLFGETEGFVFAIMDEVMMTNNYRKYIVKDGTVDICRACHRPGESIRHIISGCSRLANGDYLHRHNLVARIIHQQLALKYNLVESEVPYYRYVPDPVLDNGSITLYWDRSIITDRTIVANKPDIVVIDRLERRTMIVDIAVPHDENLVKAEKDKQIKYLDLAREVVDMWEVDRAIIVPIVVTANGLIAKSLEQHLRRLSLGSWIRGLIQKAVLLDTARIVRRFLSQEP

SEQ ID NO: 30418 - protein, 1028 aa, Eilema sororculum
MCVTPAPAPAPASTTALNEDSHVTRDDTPIPVSIQYNEEIKEALEYALREYRSMPIHVRPRLPRLPIHRRNIALVSALDSLLPKYLENSENLGDTHSILYCTAVAACRMAGAKFPIKDPAIRPKPAIPAWQCRIERRVAEARVLIGKLICFRSGNTRPRVMRYVTRAFAGTNISPQDYTSRVTERIDFLKQKVCAWANRIRRYKKRVDRYTVNRMLQRDQRWVYRNWERTDESVDDVRRPDAEATNAFWRSIWSVPVSHTEGDWMREVERACEPIPEMEDIYIDATDVDCAVRSLSNWKSPGPDGLHNFWLKWLRSSHVVLASQFQSAVESGTLPVFMTTGVTHLLHKTGSTLEPNNYRPITCLPTVYKLLTSILRAKINNHINNNSIMCASQNGCRNGARGIKELLLIDMTISQQARRNRKDLAACWIDYKKAFDSVPHTWLLRVLELYKVNTTLCTFLRSCMGQWRTVLFYPGCRQALGSGEPITIERGIFQGDSLSPLWFCLALNPLSTLLVNSGLGYRLRREGQMVSHLFYMDDLKLFAHTNPQLIALLKVTETFSNSIKMAFGVDKCAVIHVKRGRVVESEGIQLSDSTNLRSLLVTETYKYLGMSQALCIKEVDMKQMLQERFFGRLKKVLNSLLSGGNKVRACNSWVMPLLMYSFGILKWTQTELDTIDRKVRTQLTAFRMHHPRSSVMRLYIPRKCGGRGFLNAKTLHNREVCNLRDYFLKSNVEMHRDVVNVDTGLTPLGLAKENWRRPTIVGTDSRREVWQSKELHGRFYRALHRPEVDLLASVSWLRFSDLFGETEGFVCAIADEVIKTNNYRKYIMRDGTIDICRAYHQPGESLRHITSGCSRLANGEYLHRHNQVARIIHQRLALKYNLVEVEVPYYRYVPEPVLENSHITLYWDRSIITDRTVVANKPDIVVIDRSERRALIVDVTIPHDENLVKAEKDKQVKYLDLAHEVVDMWSVDSAIIVPIVVSVNGLIAKSLDQHLKRLGLDGWVKGQMQKAVLLDTARIVRKFLSLEP

SEQ ID NO: 30419 - protein, 1197 aa, Vanessa cardui
MLTRARQQAHNNPSPDPPLSSASQAQDPAQGSSLVSAAASSSSDEYFSPPTSPTPVRRAGRRRPPTGLGARGQPVSNRVPASGGGVQRMRWTQPINENVMRAYYGATKGGTNLTAYRVRMLSLFQALEPAVNVSAQRLSDQVRVILRNNRLSDTVLDRIRSETCNSDVTSGPSTPVVEEPLPAIPQGPEHDDEGGGDMAITKSKYSDHLRSALGDAIREYRNTPAELRPRLPRLPMTKRNRDLVCTLDSLLADYFESSENLEDTHSILFCAAVAACRVAGVTFEDTERATRPKAVAPAWQSRIEKRINETRVLIGKLYCFKEGNTRPRVMRFVGRAFLGTGISPQEYPSHVVERIDFLKQKVYAWASRIRRYRRRVDRYHLNRKFQSDQRWVYRTWERLDQDVSDGCRPDDDATNTFWRNIWSVPVDHIEGDWMLEVRQACEPLEVMGKISIASEDVAAAVRSVANWKSPGPDGLHNFWLKWLRSSHECLASQFQSALESGSLPQFLTTGVTHLLHKSGSATDPKNYRPITCLPTVYKLLTAILRDKINSHIQNNIILSVSQNGCRGGSRGTKELLLIDMTISQQVRRSRKSLSTCWIDYKKAYDSVPHTWLLRVLELYKLDTTLCSFLRSCMGQWRTVLRYPGCRTIHGNDEPIRIERGIFQGDSLSPLWFCLALNPLSTLLESSRLGYRLRRGGKVISHLLYMDDLKLFAPSDSQLMELLKVTETFSNSIRMEFGVDKCAVMHVKRGEIMESDGLQLSDSINFKSLSANESYKYLGMSEALGINVTDMKQSLQERFFGRLKKVLKSLLSGGNKVRAFNGWVMPVLMYSFGILKWTQKELDALDRKVRVLLTAYRMHHPRSSVMRLYIPRRCGGRGFLNAKTLHNREVYKLREYFLHTDLDMHRDVVTMDKGLTPLSLGKENWHKPVVLSTENRKEVWKSKELHGRFYRALHGPDVDFMASVSWLRFGNLFGETEGFVCAIMDEVIMTNNYRRYIVRDGTVDICRACHTPGESLRHIISGCSRLANGEYLHRHNQVAKIIHQQLALRYGLVVSEVPYYKYVPDPVLENGHITLYWDRSIITDRTVVANKPDIVVIDRSERRTIIVDITIPHDENLVKAEKDKQIKYLDLAHEVVDMWDVDTAVIVPIVVSANGLMAKSLDQHLKRLSLDSWVKGLMQKAVLLGTARIVRKFLSLEP

SEQ ID NO: 30420 - protein, 1000 aa, Vanessa cardui
MAITTSKYSDHLRSALGDAIREYRNTPAELRPRLPRLPMTKRNRDLVCTLDSLLTDYFESSENLEDTHSILFCAAVAACRVAGVTFEDTERATRPKAVAPAWQSRIEKRINETRVLIGKLYCFKEGNTRPRVMRFVGRAFLGTGIGPQEYPSHVVERIDFLKQKVYAWASRIRRYRRRVDRYHLNRKFQSDQRWVYRTWERLDQDVSDGCRPDDDATNTFWRNIWSVPVDHIEGDWMLEVRQACEPLEVMGKISIASEDVAAAVRSVSNWKSPGPDGLHNFWLKWLRSSHECLASQFQSALESGSLPQFLTTGVTHLLHKSGSATDPKNYRPITCLPTVYKLLTAILGDKINSHIQNNSILSVSQNGCRGGSRGTKELLLIDMTISQQVRRSRKSLSTCWIDYKKAYDSVPHTWLLRVLELYKLDTTLCSFLRSCMGQWRTVLRYPGCRTIHGNDEPIRIERGIFQGDSLSPLWFCLALNPLSTLLESSRLGYRLRRGGKVISHLLYMDDLKLFAPSDSQLMELLKVTETFSNSIRMEFGVDKCAVMHVKRGEIMESDGLQLSDSINFKSLSANESYKYLGMSEALGINVTDMKQSLQERFFGRLKKVLKSLLSGGNKVRAFNGWVMPVLMYSFGILKWTQKELDTLDRKVRVLMTAYRMHHPRSSVMRLYIPRRCGGRGFLNAKTLHNREVYKLREYFLHTDLDMHRDVVTMDKGLTPLSLGKENWRKPVVLSTENRKEVWKCKELHGRFYRVLHGPDVDFMASVSWLRFGNLFGETEGFVCAIMDEVIMTNNYRKYIVRDGTVDICRACHTPGESLRHIISGCSRLANGEYLYRHNQVAKIIHQQLALRYGLVVSEVPYYRYVPDPVLENGHITLYWDRSIITDRTVVANKPDIVVIDRSERRTIIVDITIPHDENLVKAEKDKQIKYLDLAHEVVDMWDVDTAVIVPIVVSANGLMAKSLDQHLKKLSLGSWVKGLMQKAVLLGTARIVRKFLSLEP

SEQ ID NO: 30421 - protein, 868 aa, Vanessa cardui
MRFVGRAFLGTGIGPQEYPSHVVERIDFLKQKVYAWASRIRRYRRRVDRYNLNRKFQSDQRWVYRTWERLDQDVSDGCRPDDDATNTFWRNIWSVPVDHIEGDWMLEVRQACEPLEVMGKISIASEDVAAAVRSVANWKSPGPDGLHNFWLKWLRSSHECLASQFQSALESGWLPQFLTTGVTHLLHKSGSATDPKNYRLITCLPTVYKLLTAILRDKINSHIQNNSILSVSQNGCRGGSRGTKELLLIDMTISQQVRRSRKSLSTCWIDYKKAYDSVPHTWLLRVLELYKLDTTLCSFLRSCMGQWRTVLRYPGCRTIQGNDEPIRIERGIFQGDSLSPLWFCLALNPLSTLLESSRLGYRLRRGGKVISHLLYMDDLKLFAPSDSQLMELLKVTETFSNSIRMEFGVDKCAVMHVKRGEIMESDGLQLSDSINFKSLSANESYKYLGMSEALGINVTDMKQSLQERFFGRLKKVLKSLLSGGNKVRAFNGWVMPVLMYSFGILKWTQKELDALDRKVRVLLTAYRMHHPRSSVMRLYIPRRCGGRGFLTAKTLHNREVYKLREYFLHTDLDMHRDVVTMDKGLTPLSLGKENWHKPVVLSTENRKEVWKSKELHGRFYRALHGPDVDFMASVSWLRFGNLFGETEGFVCAIMDEVIMTNNYRRYIVRDGTVDICRACHTPGESLRHIISGCFRLANGEYLHRHNQVAKIIHQQLALRYGLVVSEVPYYKYVPDPVLENGHITLYWDRSIITDRTVVANKPDIVVIDRSERRTIIVDITIPHDENLVKAEKDKQIKYLDLAHEVVDMWDVDTAVIVPIVVSANGLMAKSLDQHLKRLSLDSWVKGLMQKAVLLGTARIVRKFLSLEP

SEQ ID NO: 30422 - protein, 1199 aa, Schrankia costaestrigalis
MMITRAKARIAQATPPDSSLSSASQTVENVPDSVEASSSSSSDEFFSPPSSPTPVLRRGRGRPPIGLGSRAPQASNRVPAVGGNVHRMKWTSTINENVMRAYFVATEGGTNLTAYRDRMLSLFQELEPAVNVSTQRLSDQVRAIQRCHLLNDTVLDRIRSDILSNLTISTPPPVTTQVNTIIPLSQPIELNSSETIDCEVTNVSIQYNDQLRSALECTIGEYRFMEPDKRPRLPRLPTHKKNIALVCALDSLLSNYFDNSENLSDAHSILYCGAVTACRVAHIRFPTDDIATRLRPTVPVWQCRIERRIAEARALIGKLICFRSGNTRPRVMRFVTRAFADTNIDRRDYILHVTERIDFLKQKVYAWANRIKRFKKRMERYTQNRAFQRDERWVYRNWERPVQDSGDRQLPDADATTNFWRSIWSVPVSHVEGDWIGDVEKACERIHQMEPVTISTLDVSSAVRRLPNWKSAGPDGLHNFWLKWLHSSHACLAFHFQSSLETGTLPDFITTGETHLLYKSGSSTDPKNYRPITCLPTIYKLLTSILRKKISLHIQHNSIMYISQNGCRNEARGTKEQLLIDTTISEQVRRNRKDLSTCWIDYKKAYDSVPHTWLLRVLELYKIDATLCTFLRTCMTKWNTVLFYSGCRQGLGNNVPIQIKRGIFQGDSFSPLWFCLALNPLSTLLECSGLGYRLKRHGQVISHLLYMDDLKLFAPTKSQLLVLLKETETFSNSIKMEFGVNKCAVMHVKRGKVVESDELQLSDTIKLRCLSPSDTYKYLGMSQALCIAETDMKQQLRDRFFARLKKVLNSLLTGGNKVRAYNGWVMPVLMYSFGILRWTQTELETLDRKVRTLLTAHRMHHPRSSVMRLYIPRKSGGRGFLSAKTLHNREVYNLREYFLSVDADIHRDVVSVDVGLTPLCLGKENWRKPIIHTIDDRKEVWKSKELHGRFYRTLNGPDVDTLASVSWLRFGDLFGETEGFVFAIMDEVVMTKNYRKYILKDGTVDICRACHCPGESLRHIVSGCSRLANGEYLHRHNQVARIVHQQLALKYHLVDAEVPYYKYVPDPVLENSSVTLYWDRSIITDRTIVANKPDIVVIDRSERRAMIIDITIPHDENLVKAEKDKQTKYLDLAHEVVDMWHVDSAIIVPIVLSVNGLIPKSLYQHLRRLSLDSWIIGLMQKAVLLDTARIVRRFLSLEP

SEQ ID NO: 30423 - protein, 1183 aa, Spodoptera frugiperda
MLTRARRRRGAPPPSPDSSLSSASPSPEPNHEPVTAVASSSSDEYFSPPTSPPPVRRPRRGRPPTGLGARGQQTPGRVPAAGGCARRMKWTQTINENVMRAYYGATEGGTSLTAYRERMLSMFQVLEPSVNVSAQRLSDQVRVIQRNRRLDEAALDRLRSEALRNRVVPAPPQEVVQTPTMSQNVTPTTPAAGVEDDRVEQVSTQCNERLRSALEDAIREYRFAPLKPKLPRLPMCGRNRALVSALDSLLKTYFESSENLYDTHSILYCGAVAACRVANVRFSNLDAAVRPKPAVPAWQCRIERRISEARVLIGKLSCFREGNTRPRVMRFVRRAFVGTETSPHEYMSRVTERIDFLKQKIYAWANRIRRYKKRVERYTQNRMFQRDQRWVYRNWERSNQDVTDGRRPDDEATNTFWRNIWSVPVSHTEDDWICDVERRCETVPEMEEVIITSSDVSSAACSVPNWKSPGPDGLHNFWLKWFTSSHARLASQFQAALEAGSLPQFLTTGVTHLLHKSGSSTEPKNYRPITCLPTVYKLLTSILRTKITKHIEKHSIMSVSQNGCRKGSRGTKELLLIDMVVSQQVRRSRKNLSTCWIDYKKAYDSVPHTWLMRVLELYKIDATLRAFLQSCMRQWSTVLCYPGCRQIQGSEEPVRIVRGIFQGDSLSPLWFCLALNPLSTLLEASGLGYPLRRRGLVISHLLYMDDLKLFAPNNKQLMELLKITEKFSSSIRMEFGVDKCAVMHVKRGGIVESEGLELSDLTKLRALSANDTYKYLGMSEGLGINGPDMKQSLRERFFGRLNKVLKSSLSGGNKVRAYNGWVMPVLMYSFGILKWTQTELDTLDHPRSSIMRLYIPRKCGGRGLLNAKTLHNHEVCNLREYFLKVNEGMHREVAAVDNGFTPLSLAKENWRKPVVLSVNDRKEVWHSKELHGRFFRALHGPSVDFLASVSWLRFSNLFGETEGFVCAIMDEVILTNNYRKYIIKDGTVDICRACHSPGESIRHIISGCGRLANGEYLHRHNQVAKIIHQQLALQYQLVEFEVPYYKYVPDPVLENGHITLYWDRSIITDRTIVANKPDIVVIDRQARRTMIIDITIPHDENLVKAEKDKQIKYLDLAHEVVDMWNVDSAIVVPIVVSANGLIPNSLDNHLRRLGLGGWIKGLMQKAVLLETARIVRRFLSLEP

SEQ ID NO: 30424 - protein, 1189 aa, Trichoplusia ni
MLTRRRAARLPSPDSSPSSASQLPPDRGPAPAVAVASSSSDEYYSPPTSPTPVRRQGRRLPPSSLAPSGQPASNRAPAPGGVVQRMKWTRPMNENVMRAYYGATGGGTNLTAYRARMLSLFQTLEPDVDVSAQRLSDQVRVIQRNHRLDDATLDRLRSEMQTSPVVGTPSITEAPAASALPANPADGGDDDGAITVSIQCSDHIRSTLEHSVREYQSTPRDQRPRLPRLPMHNRNKALMGVLDSLLSSYFGNSEDLSDTHSLLYCAAVAACRVAGVTFRDNTAAWPKQAAPAWQCRIEKRVAEARTLIAKLVVFRGGNTRPRVMRFVKRAFAGTNISLSEYTARVTERIDFFKQKVCAWASRIRRYKTRVDRFHQNRMFQRDQRWVYRSWEQPASEEGAGRLPDEVATNLFWRSIWSAPVTHSEGDWIRDVEQSCERIEEMGAIDISPQDVANAVRPLANWKAPGPDGLHNFWLKWLTSSHGCLASQFQSAVDSGVLPQFLTTGSTHLLHKTGSTTDPKNYRPITCLPTIYKLLTSILREKINDHIERFSIMSASQNGCRNGSRGTKELLLIDMTICQQVRRSKKGVSTCWIDYKKAYDSVPHAWLMRVLELYKINTTLRTFLKSCMGQWTTVLHYPGCRDIQKSGQLIRIERGIFQGDSLSPLWFCLALNPLSTLLENSRLGYSLRRGSQVISHLLYMDDLKLFASNKLQLMKLLKITESFSNSIRMEFGVDKCAVMHVKRGEIVESQGIQLSDSINLRSFSSTETYKYLGMSEALGINVADMKQSLRTRFFGRLNKVLKSSLSGGNKVRAFNGWVMPVIMYSFGILKWTQTELDALDRRVRTLLTANRMHHPRSSVMRLYIPRKCGGRGFLNAKTLHNREVCNLREYFLRVDVGMHRDVVAVDKGFTPLSLGKENWHKPVVLSVKDRKDVWQSKELHGRYYRTLHGADVDFLASLAWLRFGDLFGETEGFVCAIMDEVIMTNNYRKYIIKDVDICRACHCPGESLRHIVSGCSRLANGEYLHRHNQVARIIHQQLALKYKLVEYEVPYYKYVPDPVLESGHITLYWDRSIITDRTIVANRPDIVVIDRSERRTMIVDITIPHDENLVKAEKEKQLKYLDLAHEVVDLWEVDSAIIVPIVVSANGLIAKSLDQHLRRLSLGVWVKGLIQKAVLLDTARIVRRFLSLEP

SEQ ID NO: 30425 - protein, 865 aa, Vanessa cardui
MRFVGRAFLGTGIGPQEYPSHVVERIDFLKQKVYAWASRIRRYRRRVDRYHLNRKFQSDQRWVYRTWERLDQDVSDGCRPDDDATNTFWRNIWSVPVDHIEGDWMLEVRQACEPLEVMGKISIASEDVAAAVRSVANWKSPGPDGLHNFWLKWLRSSHECLASQFQSALESGSLPQFLTTGVTHLLHKSGSATDPKNYRPITCLPTVYKLLTAILRDKINSHIQNNSILSVSQNGCRGGSRGTKELLLIDMTISQQVRRSRKSLSTCGIDYKKAYDSVPHTWLLRVLELYKLDTTLCSYLRSCMGQWRTVLRYPGCRTIHDNDEPIRIERGIFQGDSLSPLWFCLALNPLSTLLESSRLGYRLRRGGKVISHLLYMDDLKLFAPSDSQLMELLKVTETFSNSIRMEFGVDKCAVMHVKRGEIMESDGLQLSDSINFKSLSANESYKYLGMSEALSINVTDMKQSLRERFFGRLKKVLKSLLSGGNKVRAFNGWVLMYSFGILKWTQKELDALDRKVRVLLTAYRMHHPRSSVMRWYIPRRCGGRGFLNAKTLHNREVYKLREYFLHTDLDMHRDVVTMDKGLTPLSLGKENWHKPVVLSTENRKEVWKSKELHGRFYRTLHGPDVDFMASVSWLRFGNLFGETEGFVCAIMDEVIMTNNYRRYIVRDSTVDICRACHTPGESLRHIISGCSRLANGEYLHRHNQVAKIIHQQLALRYGLVVSEVPYYKYVPDPVLENGHITLYWDRSIITDRTLVANKPDIVVIDRSERRTIIVDITIPHDENLVKAEKDKQIKYLDLAHEVVDKWDVDTAVIVPIVVTANGLMAKSLDQHLKRLSLGSWVKGLMQKAVLLGTARIVRKFLSLEP

SEQ ID NO: 30426 - protein, 1138 aa, Trichoplusia ni
MLTRRRAARLPSPGLSPSSASQLPPGRGPAPAVAVASSSSDEYYSPPTSPTPVRRPGRRRPPSSLAPSGQPASNRAPAPGGVVQRMKWTRLMNENVMRAYYGATGGGTNLTAYRARMLSLFRALEPDVDVSAQRLSDQVRVIQRNHRLDDATLDRLRSEVQTSPVVVTPSIAEAPAASALPANPADGGDDDGAITVSTQCSDHIRSTLEQAVLEYRSTPRDQRPRLPRLPMYNRNKALMGVLDSLLSSYFGNSEDLGDTHSLLYCAAVAACRVAGVTFRDNTAARPKQAAPAWQCRIEKRVAEARTLIAKLVAFRGGNTRPRVMRFVKRAFAGTNISPSEYTARVTERIDFFKQKVCAWASRIRRYKTRVDRFHQNRMFQRDQRWVYRSWEQPASEEGAGRLPDDVATNLFWRSIWSAPVTHSEGDWIRDVEQSCERIEEMGAIDISPQDVANAVRPLANWKAPGPDGLHNFWLKWLPSSHGCLASQFQSAVDSGLLPQFFTTGSTHLLHKTGSTTDPKNYRPITCLPTIYKLLTSILREKINDHIERFSIMSASQNGCRNGSRGTKELLLIDMTICQQVRRSKKGVSTCWIDYKKAYDSVPHAWLMRVLELYKINTTLRTFLKSCMGQWTTVLHYPGCRDIQKSGQLIRIERGIFQGDSLSPLWFCLALNPLSTLLENSRLGYSLRRGSQVISHLLYMDDLKLFASNKLQLMKLLKITESFSNSIRMEFGVDKCAVMHVKRGGIVESQGIQLSDSINLRSLSSTETYKYLGMSEALGINVADMKQSLQTRFFGRLNKVLKSSLSGGNKVRGFNGWVMPVIMYSFGILKWTQTELDALDRRVRTLLTANRMHHPRSSVMRLYIPRKCWGRGFLNAKTLHNREVCNLGHYYRTLHGADVDFLASVAWLRFGDLFGETEGFVCAIMDEVIMTNNYRKYIIKDGTVDICRACHCPGESLRHIVSGCSRLANGEYLHRHNQVARIIHQQLALKYKLVESEVPYYKYVPDPVLESGHITLYWDRSIITDRTIVANKPDIVVIDRSERRTIIVDITIPHDENLVKAEKEKQLKYLDLAHEVVDLWEVDSAIIVPIVVSANGLIAKSLDQHLRRLSLGVWVKGLIQKAVLLDTARIVRMFLSLEP

SEQ ID NO: 30427 - protein, 1189 aa, Eilema sororculum
MLTRAQANRSRSAPTTSPDSSLSSAAQPPAVEPAASSSSSSDEFFSPPTSPTPERRPGRGRPPTCLGPRRPPASNRAPATGGNMHRMRWTNSINENVMRAYFAATEGGTNLSAYRTRMLPLFQALEPTINTSAQRLSDQVRVIQRNRMLNETVLEALRLECLRNICVTPAPAPAPASTAGINHVTYVAPDDTPIPVSIQYNEEIKEALECALREYRSMPVHVRPRLPRLPIHRRNIALVSALDSLLPRYLENSENLGDTHSILYCTAVAACRMAGAKFPIKDPAIRPKPVIPAWQCRIERRVAEARVLIGKLICFRSGNTRPRVMRYVTRAFAGTDISSQDYASRVTERIDFLKQKVYAWANRIRRYKKRVDRYTLNCMFQRDQRWVYRSWERTEESVDDVRRPDAEATNAFWRSIWSVPVSHTEGDWMREVERACETIPEMEEINIDAIDVNCAVRSLSNWKSPGPDGLHNFWLKWLRSSHVVLASQFQSAVESGTLPAFMTTGVTHLLHKTGSTLEPNNYRPITCLPTVYKLLTSILRAKINNHINNNSIMCASQNGCRNGARGTKELLLIDMTISQQARRNRKDLAACWIDYKKAFDSVPHAWLLRVLELYKVNTTLCTFLRSCMGQWRTVLFYPGCRQALGSGVPITIERGIFQGDSLSPLWFCLALNPLSTLLVNSGLGYRLRREGQMVSHLFYMDDLKLFAHTNPQLIALLKITETFSNSIKMAFGVDKCAVIHVKRGRVVESEGIQLSDSTNLRSLLVTKYLGMSQALCINEADMKQMLQDRFFGRLKKVLNSLLSGGNKVRACNSWVMPLLMYSFGILKWTQTELDTIDRKVRAQLTAFRMHHPRSSVMRLYIPRKCGGRGFLNAKTLHNREVCNLRDYFLKSNVEMHRDVVNVDTGLTPLGLAKENWHRPTIVSTDSRREVWQSKELHGRFYRALHRPEVDLLASVSWLRFSDLFGETEGFVCAIADEVIKTNNYRKYIMRDGTIDICRACHQPGESLRHITSGCSRLANGEYLHRHNQVARIIHQRLALKYNLVEVEVPYYRYVPEPVLENSHITLYWDRSIITDRTVVANKPDIVVIDRSERRALIVDVTIPHDENLVKAEKDKQVKYLDLAHEVVDMWSVDSAIIVPIVVSVNGLIAKSLDQHLKRLGLDGWVKGQMQRAVLLDTARIVRRFLSLEP

SEQ ID NO: 30428 - protein, 1075 aa, Mamestra brassicae
MITRAAARRAHPPPPGSSLSSASPTPDIGSQVSPVVAVASSSSDEYFSPPTSPTPVRRQGRGRPPRSLGSRGQPALSRVPAAGGCVQRMRWTQSMNENVMRAYYGSTEGGTNLTAYRVRMLSLFQDLEPTVNVSAQRLSDQVRVIQHNCRLDDAALERLRSEVLSNLIISTPTQTVVQAPASGAITPRPNNGSDEVDDRVVTVSSQCNDRLRSALEDALREYRLTPTELRPRLPRLPMHKKNRALVCALDSLLQNIFESSESLVDTHSILFCGAVAACRIANVKFPSCDEAIRPKPAAPAWQCRIERRIDEARALIGKLYCFREGNTRPRVMRFVRRAFSGTGISPREYTFRVTERIDFLKQKVCAWANRIRLYKRRVDRYSQNRMFQSDERLVYRAWERPEQSVTDVYRPDDVATSTFWRSIWSVPICHAEGGWMRDVERVCEAIPQMEKITITTLDIAKAVRPLPNWKSPGPDGLHNFWLKWYSSSHALLASQFQSSLESGSLPQFLTTGITHLLHKTGSPAEPKNYRPITCLSTVYKLLTSILRAKINEHIESNSIMSASQNGCRKGSRGTKELLLIDMAISQQVRRSRKDLSTCWIDYKKAYDSVPHTWLMKVLELYKIDATLRTFLESCMRQWKTVLRYPGCQPIQGSDEPVWIKRGIFQGDSLSPLWFCLALNPLSTLLEDSGLGYRLRRGGQAISHLLYMDDLKLFAPNNLRLMELLKVTETFSSAIRMEFGVDKCAVMHVKKWEIMESEGIQLSDSIQVRSLSSTESYKYLGMSEALGINGTDMKQSLRERFFGRLKKVLNSLLSGGNKVRAFNGWVMPVLMYTFGILKWTQTELDALDRRVRTLLTANRMHHPRSSVMRLYIPRKCGGRGFLNAKTLHNREMCSLREYFLKADVGMHRDVVAVDKGLTPLSMAKENWRKPVILTTDDRKEVWKGKELHGRFYRALYGSDVDFSASVAWLRFGDLFGETEGFVCAIMDEVILTNNYRKHIMKDGTVDVCRACHRPGESIRHIISGCSRLANGEYLHRHNQVARIIHQQLALKYKLNLLYGNIKYIFDIFLFIYFDVS

SEQ ID NO: 30429 - protein, 1202 aa, Griposia aprilina
MLTRSARTRARPPPPDSSLSSASPPPVSSPIVSAVTTTVAVVASSSSDEYFSPPTSPTPVHRQGRGRPPRSLGLRGHPAPSRVPAAGGCVQRMKWTQSMNENVMRAYYRSTEGGTNLTAYRDRMLSLFQELEPTINVSAQRLSDQVRVIQRSHRLDDAALDRLRSELNNHIISTPAQTAVQASTIDEIQPRSNHGVEVEDDRVASVSSQCNARLRSALEDAFREYRSTPTELRPRLPRLPMHKKNRALVCALDSQLKNVFESSENLIDTHSILYCAAVAACRLANVRFPNCDGATRPKPAVPAWQCRIKRRIDGARVLIGKLHCFREGNNRPRVMRFVRRAFSGTGISPREYMSHATERIDFLKQKVCAWASRIRRYKRRVDRYTQNRMFQSDERWVYRAWERPEQNVTDECRPDDATTSTFWRSIWSVPVCHVEADWMRDVGRACETVPEMDAVLITPLDVARAVRPLPNWKSPGPDGLHNFWLKWLISSHACLASQYQSSLESGSLPQFLTTGVTHLLHKSGSPTDPKNYRPITCLSTVYKLLTSILRAKINTHIESNSIMSASQNGCRNGSRGTKELLLIDMAISQQVRRSHRDLSTCWIDYKKAYDSVPHTWLMRVLELYKIDTTLRTFLRSCMGQWRTVLRYPGCRQIQANDEPVWIKRGIFQGDSLSPLWFCLALNPLSTLLEDSGLGYRLRKDGQVISHLLYMDDLKLFAPNKLQLMELLKVTETFSSTIRMEFGVDKCAVMHVKRGEVMEPEGIQLSDSIHLRSLSSSESYKYLGMSEALGINVADMKQSLRERFFGRLKKVLISLLSGGNKVRAFNGWVMPVLMYSFGILKWTQTELDALDRRVRTLLTANRMHHPRSSVMRLYIPRKCGGRGFLNAKTLHNREVCSLREYFLKAEVGMHRDVVAVDKGLTPLSMAKENWRKPVVLTTDDRKEVWQSKELHGRFYRALHEPGVDFLASVSWLRFGDLFGETEGFVCAIMDEVILTNNYRRHIMKDGTVDMCRACHRPGESIRHIVSGCSRLANGEYLHRHNQVARIIHQQLALKYKLVDSEVPYYKYVPDPVLENDHITLYWDRSIITDRTIVANKPDIVVIDRLARRTMIIDITIPHDENLVKAEKEKQIKYLDLAHEVVEMWNVSSAVIVPIVVSANGLMAKSLDQHLSRLSLDGWVKGLIQKAVLLDTARIVRRFLSLEP

SEQ ID NO: 30430 - protein, 1079 aa, Atethmia centrago
MLTRSAARARPPPPDSSLSSASPPPVPSPTVSVVTTPAAVVASSSSDEYFSPPTSPTPVRRQGRGRPPKSLGLRGQLALSRVPAAGGCVQRMRWTQSMNENVMRAYYGSTEGGTNLTAYRVRMLSLFQKLEPTVNVSAQRLSDQVRVIQRNHRLDDAALDRLRSEVLSNHIVSTPAQTATHATIINAIPPRSNHDVEEEDDSVATVSSQCKCVRLRSALEDAFCEYRSTPTELRPRLPRLPMHKKNRALVCTLDSLLKDFFESSEDLVDTHSILYCAAVAACRLANVKFPNCDGATRPKPAVPAWQCRIERRIDGARVLIGKLYCFREGNTRPRVMRFVRRAFSGTGISPREYMSRVTERIDFLKQKVCAWASRIRRYKRRVDRYTQNHMFQSDERWVYRAWERPEQNETDVCRPDDATTTAFWRSIWSVPVCHAEADWMRDVERVCETIPEMEVVIITPSDIARAIRPLPNWKSPGPDGLHNFWLKWLTSSHTCLASQFQSSLESGSLPQFLTTGITHLLHKSGSPAEPKNYRPITCLSTVYKLLTSILRAKINTHIDSNSIMSASQNGCRNGSRGTKELLLIDMAISQQVRRFRKDLSTCWIDYKKAYDSVPHTWLMRVLEFYKIDTTLRTFLESCMGQWRTVLRYPGCRQIQGNDEPVWIKRGIFQGDSLSPLWFCLALNPLSTLLEDSGLGYRLRRGGQVISHLLYMDDLKIFAPNKLQLMELLKVTETFSSAIRMEFGVDKCAVMHVKRGEIMESEGIQLSDSIHLRSLYSPESYKYLGMSEALGINVTDMKQSLKERFFGRLKKVLISPLSGGNKVRAFNGWVMPVLMYSFGILKWTQTELDALDRRVRTLLTANRMHHPRSSVMRLYIPRKCGGRGFLNAKTLHNREICSLREYFLKTEVGMHRDVVAVDKGLTPLSMAKENWCKPVILTTDDRKEIWQNKELHGRFYRALHEPDVDFLASVSWLRFGDLFGETEGFVCAIMDEVILTNNYRRHIMKDGTVDVCRACHRPGESIRHIISGCSRLANGEYLHRHNQVARIIHQQLALKYKLVNSEVPYYKYAPDPVLENDHVS

SEQ ID NO: 30431 - protein, 1074 aa, Noctua janthe
MLTRRRAKLHETHPPSPGSSLSSASHSPGRATSVSAASPVAAVASSSSDEFFSPPSTPPPPRRRGRGRPPAGLGPRGQQATNRVPAAGGNVSRIRWTQSMNENVMRAYYGSTEGGTNLTAYRVRMLSLFQVLEPIVNVSAQRLSDQVRVIQRNHMLDDAALDRLRSEVLSNRIVLTPAQTAVQASAIDATPPRPNPAVVEEDDRVAMVSSQCNDRLRSALEDALREYRSTPTKLRPRLPRLPMHNKNRALVCALDSQLKNIFESSENLVDTHSILYCGAVAACRLANVKFPNYDVAIRPKPAVPTWQRRIECRIDEARVLIGKLHCFREGNTRPRVMRFVRRAFSGTGISPQEYMSRVTERIDFLKQKVYAWANRIRRYKRRVDRYSQNRIFQSDERWVYRAWERPEQNMTDVCRPDDAATSSFWRSIWSVPVCHTEADWIRDVERTCEPIPEMEPILITPIDIARAVRPLPNWKSPGPDGLHNFWLKWLSSSHTCLASQFQSSLESGSLPQFLTTGVTHLLHKSGSPAEPKNYRPITCLSTVYKLLTSILRVKINTHIDKNFIMSASQNGCRNRSRGTKELLLIDMAISQQVRRSLKDLSTCWIDYKKAYDSVPHTWLTRVLELYKIDATLRAFLESCMGQWRTVLRYPGCRQIQGNDEPVWIKRGIFQGDSLSPLWFCLALNPLSTLLEDSGLGYRLRRGGQVISHLLYMDDLKLMELLKVTETFSNAIRMEFGVDKCAVMYVKRGEIMESEGIQLSDSIHLRSLSSSESYKYLGMSESLGINVTDMKQSLRERFFGRLNKVLNSLLSGGNKVRAFNGWVMPVLMYSFGVLKWTQTELDALDRRVRTLLTANRMHHPRSSVMRLYIPRKCGGRGFLNAKTLHNREICSLREYFFKTELGMHRDVVAVDKGLTPLSMAKENWRKPVVLTTDDRKEVWQGKELHGRFYRALHGPDVDFLASVSWLRFGDLFGETEGFVCAIMDEVMLTNNYRKYIMKDGTVDVCRACHRPGESIRHIISGCSRLANGEYLHRHNQVARIIHQQLALKYKLVESEVPYYKYVPDPVLEKDHVTLY

SEQ ID NO: 30432 - protein, 1201 aa, Noctua janthe
MITRAAYRRTRLTTPDSSLSSASPPPDPGSPVSPAAAVASSSSDEYFSPPTSPTPVRRQGRGRPPKSLGLRGHPAPSRVPAAGGCVQRMRWTQTINENVMRAYYGSTEGGTNLTAYRVRMLSLFQVLEPIVNVSAQRLSDQVRVIQRNHMLDDAALDRLRSEVLSNRIVLTPAQTAVQASTIDATPPRSNPAVVEEDDRVAMVSSQCNDRLRSALEDALREYRSTPTKLRSRLPRLPMHNKNRALVCALDSQLKNIFESSENLVDTHSILYCGAVAACRLANVKFPNYDVAIRPKPAVPTWQRRIECRIDEARVLIGKLHCFREGNTRPRVMRFVRRAFSGTGISPQEYMSRVTERIDFLKQKVYAWANRIRRYKRRVDRYSQNRIFQSDERWVYRAWERPEQNMTDVCRPDDAATNSFWRSIWSVPVCHTEADWMRDVERACEPIPEMEPILITSIDIARAVRPLPNWKSPGPDGLHNFWLKWLSSSHTCLASQFQSSLESGSLPQFLTTGVTHLLHKSGSPAEPKNYRPITYLSTVYKLLTSILRVKINTHIDKNFIMSASQNGCRNGSRGTKELLLIDMAISQQVRRSRKDLSTCWIDYKKAYDSVPHTWLMRVLELYKIDATLRAFLESCMGQWRTVLRYPGCRQIQGNDEPVWIKRGIFQGDSLNPLWFCLALNPLSILLEDSGLGYRLRRGGQVISHLLYMDDLKLIAPNKLRLMELLKVTETFSNAIRMEFGVDKCAVMYVKRGEIMESEGIQLSDSIHLRSLSSSESYKYLGMSESLGINVTDMKQSFRERFFGRLNKVLNSLLSGGNKVRAFNGWVMPVLMYSFGVLKWTQTELDALDRRVRTLLTANRMHHPRSSVMRLYIPRKCGGRGFLNAKTLHNREICSLREYFLKTEVGMHLDVVAVDKGLTPLSMAKENWRKPVVLTTDDRKEVWQGKELHGRFYRALHGPDVDFLASVSWLRFGDLFGETEGFVCAIMDEVMLTNNYRKYTSIMKDGTVDVCRACHRPGESIRHIISGCSRLANGEYLHRHNQVARIIHQQLALKCKLVESVVPYYKYVPDPVLEKDHVTLYWDRSIITDRTIVANKPDIVVIDRLARRVMIVDVTIPHDENLVKAEKEKQIKYLDLAHEVVDMWNVNSAIIVPIVVTANGLIAKSLDDHLSRLSLGGWIKGLIQKAVLLDTARIVRRFLSLEP

SEQ ID NO: 30433 - protein, 1062 aa, Noctua janthe
MLTRRRAKLHETHPPSPGSSLSSASHSPGRATSVSAASPVAAVASSSSDEFFSPPSTPPPPRRRGRGRPPASLGPRGQQATNRVPAAGGNVSRIRWTQSMNENVMRAYYGSTEGGTNLTAYRVRMLSLFQVLEPIVNVSAQRLSDQVRVIQRNHMLDDAALDRLRSEVLSNRIVLTPAQTAVQASAIDATPPRSNPAVVEEDDRVAMVSSQCNDRLRSALEDALREYRSTPTKLRPRLPRLPMHNKNRALVCALDSQLKNIFESSENLVDTHSILYCGAVAACRLANVKFPNYDVAIRSKPAVPTWQRRIECRIDEARVLIGKLYCFREGNTRPRVMRFVRRAFSGTGISPQEYMSRVTERIDFLKQKVYAWANRIRRYKRRVDRYSQNRIFQSDERWVYRAWERPEQNMTDVCRPDDAATSSFWRSIWSVPVCHTEADWIRDVERTCEPIPEMEPILITPIDIARAVRPLPNWKSPGPDGLHKFWLKWLSSSHTCLASQFQSSLESGSLPQFLTTGVTHLLHKSGSPTEPKNYRPITCLSTVYKLLTSILRVKINTHIDKNFIMSASQNGCRNRSRGKKELLLIDMAISQQVRRSRKDLSTCWIDYKKAYDSVPHTWLMRVLELYKIDATLRAFLESCMGQWRTVLRYPGRRQIQGNDEPVWIKRGIFQGDSLSPLWFCLALNPLSTLLEDSGLGYRLRRGGQVISHLLYMDDLKLFAPNKLRLMELLKVTETFSNAIRMEFGVDKCAVMYVKRGEIMESEGIQLSDSIHLRSLSSSESYKYLGMSESLGINVTDMKQSLRERFFGRLNKVLNSLLSGGNKVRAFNGWVMPVLMYSFGVLKWTQTELDALDRRVRTLLTANRMHHPRSSVMRLYIPRKCGGRGFLNAKTLHNHEICSLREYFLKTEVGMHRDVVAVDKGLTPLSMAKENWRKPVVLTTDDRKEVWQGKELHGRFYRALHGPDVDFLASVSWLRFGDLFGETEGFVCAIMDEVMLTNNYRKYIMKDGTVDVCRACHRPGESIRHIISGCSRLANGEYLHRHNQVARIIYQQLALKYKLVESE

SEQ ID NO: 30434 - protein, 1063 aa, Noctua fimbriata
MITRAAYRRARLPPPDPSLSSASPPPESSPIVSAVTPAVAVASSSSDEYFSPPTSPTPVRRQGRGRPPRSLGLRGHPAPSRVPAAVGCVQRMRWTHSINENVMRAYYGSTEGGTNLTAYRVGMLSLFQVLEPTVNVSAQRLSDQVRVIQRNHMLDDAVLDRLRSEVLSNRIVLTPAQTAVQASVIDATPPRFNPAVVEEDDRVAVVSSQCNDRLRSALEDALREYRSTPTELRPRLPRLPMHNKNRALVCALDSQLENIFESSENLVDTHSILYCGAVAACRLANVKFSNCDVATRPKPAVPAWQRRIERRIDGARVLIGKLHCFREGNTRPRVMRFVRRAFSGTEISPQEYMCRVTERIDFLKQKVYAWANRIRRYKRRVDRYSQNRMFQSDERWVYRAWERPELNMTDVCRPDDAATSSFWRSIWSVPVCHTEADWMRDVERVCEPIPEMEPILITPLDIARAVRPLPNWKSPGPDGLHNFWLKWLSSSHTCLASQFQSSLESGSLPQFLTTGVTHLLHKSGSPAEPKNYRPITCLSTVYKLLTSILRAKINTHIDKNSIMSASQNGCRNGSRGTKELLLIDMAISQQVRRSRKDLSTCWIDYKKAYDSVPHTWLMRVLELYKIDATLRAFLESCMGQWRTVLRYPGCRQIQGNDEPVWIKRGIFQGDSLSPLWFCLALNPLSTLLEDTGLGYRLRRGGQVISHLLYMDDLKLFAPNKLQLMELLKVTETFSSAIRMEFGVDKCAVMYVKRGEIMESEGIQLSDFIHLRSLSSSESYKYLGMSEALGINVTDMKQSLKERFFGRLNKVLHSLLSGGNKVRAFNGWVMPVLMYSFGVLKWTQTELDALDRRVRTLLTANRMHHPRSSVMRLYIPRKCGGRGFLNAKSLHNREMCSLREYFLKVEVGMHRDVVAVDKGLTPLSMAKENWRKPEVLTTDDRKEVWQGKELHGRFYRALHGPDVDFLASVSWLRFGDLFGETEGFVCAIMDEVMLTNNYRKYIMKDGTVDVCRACHRPGESIRHIISGCSRLANGEYLHRHNQVARIIHQQLALKYKLVESEVPY

SEQ ID NO: 30435 - protein, 1203 aa, Noctua fimbriata
MITRSRAKQLQEAHTPSPGSSLSSASQPPRRATSVSTVSPVAAVASSSSDEFFSPPSTPPPSPRRRGRGRPPAGLGPRGQPAPNRVPAAGGNVSRMRWTQSINEQVMRAYYGATEGGTNLTAYRVGMLSLFQVLEPTVNVSAQRLSDQVRVIQRNHMLDDAVLDRLRSEVLSNRIVLTPAQTAVQASVIDATPPRFNPAVVEEDDRVAVVSSQCNDRLRSALEDALREYRSTPTELRPRLPMHNKNRALVCALDSQLENIFESSENLVDTHSILYCGAVAACRLANVKFPNCDVATRPKPAVPAWQRRIERRIDGARVLIGKLHCFREGNTRPRVMRFVRRAFSGTGISPQEYMSRVTERIDFLKQKVYAWANRIRRYKRRVDRYSQNRMFQSDERWVYRAWERPELNMTDVCRPDDAATSSFWRSIWSVPVCHTEADWMRDVERVCEPIPEMEPILITPLDIARAVRPLPNWKSPGPDGLHNFWLKWLSSSHTCLASQFQSSLESGSLPQFLTTGVTHLLHKSGSPAEPKNYRPITCLSTVYKLLTSILRAKINTHIDKNSIMSASQNGCRNGSRGTKELLLIDMAISQQVRRSRKDLSTCWIDYKKAYDSVPHTWLMRVLELYKIDATLRAFLESCMGQWRTVLRYPGCRQIQGNDEPVCIKRGIFQGDSLSPLWFCLALNPLSTLLEDSGLGYRLRRGGQVISHLLYMDDLKLFAPNKLQLMELLKVTETFSSAIRMEFGVDKCAVMYVKRGEIMESEGIQLSDFIHLRSLSSSESYKYLGMSEALGINVTDMKQSLKERFFGRLNKVLHSLLSGGNKVRAFNGWVMPVLMYSFGVLKWTQTELDALDRRVRTLLTANRMHHPRSSVMRLYIPRKCGGRGFLNAKSLHNREMCSLREYFLKVEVGMHRDVVAVDKGLTPLSMAKENWRKPEVLTTDDRKEVWQGKELHGRFYRALHGPDVDFLASVSWLRFGDLFGETEGFVCAIMDEVMLTNNYRKYIMKDGTVDVCRACHRPGESIRHIISGCSRLANGEYLHRHNQVARIIHQQLALKYKLVESEVPYYKYVPDPVLEKNHVTLYWDQSIITDRTIVANKPDIVVIDRSARRVMIVDVTIPHDENLVKAEKEKQIKYLDLAHEVVDMWHVNSAIIVPIVVTANGLIAKSLDDHLSKLSLGGWIKGLIQKAVLLDTARIVRRFLSLEP

SEQ ID NO: 30436 - protein, 1200 aa, Xestia c-nigrum
MITRAASRRRARLPSPDSSLSSASPPPDPGSPVSTVAAVASSSSDEYFSPPTSPTPVRRAGRGRPPRSLGLRGQQAPSRVPATGGCVQRMRWTQSMNENAMRAYYGSTEGGTNLTAYRVRMLSLFQDLEPAVNVSAQRLSDQVRVIQRNHMLDDAALDRLRSEVLSNRIILTPAQTAVQASAIDATPPRSNPVVVEEDGRVATVSSQCNDRLRSALEDALREYRSTPTELRPRLPRLPMHKKNRALVCALDSQLKNVFESSEDLVDTHSILFCGAVAACRLANVKFPNCDLATRPKPAVPVWQRRIERRIDGARVLIGKLYCFREGNTRPRVMRFVRRAFSGTEISPQEYMSRVTERIDFLKQKVYAWASRIRRYKRRVDRYSQNRMFQCDERWVYRAWERPDQNVTDVCHPGDAATSSFWRSIWSVPVCHSEADWMRDVERVCEPIPEMAPVVITSLDIARAVRPLPNWKSPGPDGLHNFWLKWLGSSHTCLASQFQSSLESGSLPQFLTTGVTHLLHKSGSPTEPQNYRPITCLSTVYKLLTSILRTKINTHIDNNSIMSASQNGCRNGSRGTKELLLIDMAISQQVRRSRKDLSTCWIDYKKAYDSVPHSWLMRVLELYKIDATLCTFLKSCMGQWRTVLRYPGCRQIQGNDESVWIKRGIFQGDSLSPLWFCLALNPLSTLLENSGLGYQLRKDGQVISHLLYMDDLKLFAPNKLRLMELLKVTETFSNAIRMEFGVDKCAVMYVKRGEIMESEGLQLSDSIHLRSLSSYESYKYLGMSEALGINVTDMKQSLRERFFGRLKKVLNSLLSGGNKVRAFNGWVMPVLMYSFGILKWTQTELDALDRRVRTLLTENRMHHPRSSVMRLYIPRKCGGRGFLNAKTLHNREVCSLREYFLKAEVGMHRDVVAVDKGLTPLSMAKENWRKPVILTTDDRKKEWQGKVLHGRFYRALHGPDVDFLASVSWLRFGDLFGETEGFVCAIMDEVMLTNNYRKYIMKDGTVDVCRACHCPGESIRHIISGCSRLANGEYLHRHNQVARIIHQQLALKFKLVESEVPYYKYVPDPVLVKDHITLYWDQSIITDRTIVANKPDIVVIDRSARRVMIIDVTIPHDENLVKAEKEKQIKYLDLAHEVRDMWNMNSVIIVPIVVTANGLIAKSLDEHLSRLSLGGWIKGLIQKAVLLDTARIVRRFLSLQP

SEQ ID NO: 30437 - protein, 1200 aa, Xestia c-nigrum
MITRAASRRRARLPSPDSSLSSASPPPDPGSPVSTVAAVASSSSDEYFSPPTSPTPVRRAGRGRPPRSLGLRGQQAPSRVPATGGCVQRMRWTQSMNENAMRAYYGSTEGGTNLTAYRVRMLSLFQDLEPAVNVSAQRLSDQVRVIQRNHMLDDAALDRLRSEVLSNRIILTPAQTAVQASAIDATPPRSNPAVVEEDGRVATVSSQCNDRLRSALEDALREYRSTPTELRPRLPRLPMHKKNRALVCALDSQLKNVFESSEDLVDTHSILFCGAVAACRLANVKFPNCDLATRPKPAVPVWQRRIERRIDGARVLIGKLYCFREGNTRPRVMRFVRRAFSGTEISPQEYMSRVTERIDFLKQKVYAWASRIRRYKQRVDRYSQNRMFQCDERWVYRAWERPDQNVTDVCHPGDAATSSFWRSIWSVPVCHSEADWMRDVERVCEPIPEMAPVVITSLDIARAVRPLPNWKSPGPDGLHNFWLKWLGSSHTCLASQFQSSLESGSLPQFLTTGVTHLLHKSGSPTEPQNYRPITCLSTVYKLLTSILRTKINTHIDNNSIMSASQNGCRNGSRGTKELLLIDMAISQQVRRSRKDLSTCWIDYKKAYDSVPHSWLMRVLELHKIDATLCTFLKSCMGQWRTVLRYPGCRQIQGNDESVWIKRGIFQGDSLSPLWFCLALNPLSTLLENSGLGYQLRKDGQVISHLLYMDDLKLFAPNKLRLMELLKVTETFSNAIRMEFGVDKCAVMYVKRGEIMESEGLQLSDSIHLRSLSSSESYKYLGMSEALGINVTDMKQSLRERFFGRLKKVLNSLLSGGNKVRAFNGWVMPVLMYSFGILKWTQTELDALDRRVRTLLTENRMHHPRSSVMRLYIPRKCGGRGFLNAKTLHNREVCSLREYFLKAEVGMHRDVVAVDKGLTPLSMAKENWRKPVVLTTDDRKKEWQGKVLHGRFYRALHGPDVDFLASVSWLRFGDLFGETEGFVCAIMDEVMLTNNYRKYIMKDGTVDVCRACHCPGESIRHIISGCSRLANGEYLHRHNQVARIIHQQVALKFKLVESEVPYYKYVPDPVLVKDHITLYWDQSIITDRTIVVNKPDIVVIDRSARRVMIIDVTIPHDENLVKAEKEKQIKYLDLAHEVRDMWNMNSVIIVPIVVTANGLIAKSLDEHLSRLSLGGWIKGLIQKAVLLDTARIVRRFLSLQP

SEQ ID NO: 30438 - protein, 968 aa, Ochropleura plecta
MRWTSFINANVMRAYYGSTEGGTNLTAYRVRMLSLFQDLEPTINVSAQRLSDQVRVIQRNHLLDDAALDRLRSEVLSNRVILTTPQTAVQASAIDVTQPRSNPAVVEEDDRVATVSSQCNDRLRSALEDALRDYRSTPAELRPRLPRLPMHKKNRALVCALDSQLKNLFESSEDLVDTHSILYCGAVAVCRLANVKFPNCDVATRPKPSVPAWQCRIERRIDEARALIGKLYCFREGNTRPRVMRFVRRAFSGTGISPQEYMSRTTERIDFLKQKVYAWANRIQRYKRRVDRYSQNRMFRSDERWVYRAWERPEQSVTDVCRPDDVATSSFWHSIWSVRVCHTEAGWMRDVERVCETIPEMEPILITSLDIASAVRPLPNWKSPGPDGLHNFWLKWLSSSHTRLASQFQSCLESGSLPQFLTTGVTHLLYKSGSPAEPKNYRPITCLSTVYKLLTSILRAKINSHIVKNSIISASQNGCRNGSRGTKELLLIDMAISQQVRRSRKDLSTCWIDYKKAYDSVPHTWLKRVLELYKIDTTLRTFLESCMGQWRTVLRYPGCRQIQGNDEPVWIKRGIFQGDSLSPLWFCLALNPLSTLLEDSGLGYRLRRGGQVISHLFYMDDLKLFAPNKLRLMELLKVTETFSNAIRMEFGVDKCAVMYVKRGEIMESEGIHLSDSIHLRSLSSSESYKYLGMSEALGINVADMKQLLRERFFGRLKKVLKSLLSGGNKVRAFNSWVMPVLMYSFGILKWTQTELDALDRRVRTLLTANRMHHPRSSVMRLYIPRKCGGRGFLNAKTLHNREVCSLREYFLKTDVGMHRDVVAVDKGLTPLSMAKENWRKPVVLTTDYRKEVWQGKELHGRFYKALHGPDVDFLASVSWLRFGDLFGETEGFVCAIMDEVMLTNNYRKYIMKDGTVDVCRACHRPGESIRHIISGCSRLANGEYLHRHNQVARIIHQQLALKYNLVES

SEQ ID NO: 30439 - protein, 1051 aa, Xestia xanthographa
MLSLFQDLEPTVNVSAQRLSDQVRVIQRNHRLDDAALDRLRSEVLSNLIILTPTQTAVQVSAVNVTLPRSNPAVVEEDDRVATVSSQCNDRLRSALEDALREYRSTPTELRPRLPRLPMHKKNRALVCALDSQLKNIFKSSEDLVDTHSILFCGAVAACRLANVKFPNCDATRPKPAVPAWQRRIERRIDEARVLIGKLYCFREGNTRPRVMRFVRRAFSGTEISPQEYMSRVTERIDFLKQKVYAWANRIRRYKRRVDRYSQIFLSGLKIRLAWERSEQNMTNVCRPDDVATSSFWRSIWSVPVCHTEADWMRDVERVCEPIPEMEPIFITPLDVARAVRPLPNWKSPGPDGLHNFWLKWFSSSHTCLASQFQSSLESGSLPQFLTTGVTHQLLHKSGSPVEPKNYRPITCLSTIYKLLTSILRVKINTHIDKNSIMSASQNGCRNGSRGTKELLLIDMAISQQVRRSRKDLSTCWIDYKKAYDSVPHTWLMRVLELYKIDTTLRTFLESCMGQWRTVLRYPGCRQIQGSDEPVWIKRGIFQGDSLSPLWFCLALNPLSTLLENSGLGCRLRKDGQVISHLLYMDDLKLFAPNKLRLMELLKVTETFSSAIRMEFGVDKCAVMYVKRGEIMESEGLQLSDPIHLRSLSSSETYKYLGMSEALGINITDMKQSLKERFFGRLRKVLNSLLSGGKKVRAFNGWVMPVLMYSFGILKWTQTELDALDRRVRTLLTESRMHHPRSSVMRLYIPRKCGGRGFLNAKTLHNREVCSLREYFLKAEVGMHRDVVAVDKGLTPLSMAKENWHKPEVLTTDDRKEVWQGKELHGRFYRALHGPDVDFLASVSWLRFGDFFGETEGFVCAIMDEVMLTNNYRKYIMKDGTVDVCRACHLPGESIRHIISGCSRLANGEYLHRHNQVARIIHQQLALKYKLVESEVPYYKCVPDPVLEKDHVTLYWDRSIITDRTIVANKPDIVIIDRSARRVMLIDVTIPHDENLVKAEKEKQIKYLDLAHGVRDMWNMDSVIIVPIVVTANGLIAKSFDDHLSKLSLGG

SEQ ID NO: 30440 - protein, 1150 aa, Xestia xanthographa
MKWTQAMNENVMRAYYGSTEGGTNLTAYRARMLSLFQDLEPTVNVSVQRLSDQVRVIQRNHRLDDAALDLLRSEVLSNLIILTPTQTAVQVSAINVTLPRSNPAVVEEDDRVATVSSQCNDRLRSALEDALREYRSTPTELRPRLPRLPMHKKNRGLVCALDSQLKNIFKSSEDLVDTHSILFCGAVAACRLANVKFPNCDVATRPKPAVPAWQRRVERRIDEARVLIGKLYCFREGNTRPRVMRFVRRAFSGTEISPQEYMSRVTERIDFLKQKVYAWANRIRRYKRRVDRYSQNRMFQSDERWVYRAWERSEQNMTNVCRPDDVATSSFWRSIWSVPVCHTEADWMRDVERVCEPIPEMEPIFITPLDVARAVRPLPNWKSPGPDGLHNFWLKWFSSSHTCLAPQFQTSLESGSLPQFLTTGVTHLLHKSGSPAEPKNYRPITCLSTIYKLLTSILRVKINTHIDKNSIMSASQNGCRNGSRGTKELLLIDMAISQQVRRSRKDLSTCWIDYKKAYDSVPHTWLMRVLELYKIDTTLRTFLESCMGQWRTVLRYPGCRQIQGSDEPVWIKRGIFQGDSLSPLWFCLALNPLSTLLENSGLGCRLRKDGQVISHLLYMDDLKLFAPNKLRLMELLKVTETFSSAIRMEFGVDKCAVMYVKRGEIMESEGLQLSDPIHLRSLSSSETYKYLGMSEALGINITDMKQSLKEHFFGRLRKVLNSLLSGGNKVRAFNGWVMPILMYSFGILKWTQTELDALDRRVRTLLTESQMHHPRSSVMRLYIPRKCGGRGFLNAKTLHNREVCSLREYFLKVEVGMHRDVVAVDKGLTPLSMAKENWHKPEVLTTDDRKEVWQGKELHGRFYRALHGPDVDFLASVSWLRFGDLFGETEGFVCAIMDEVMLTNNYRKYIMKDGTVDVCRACHLPGESIRHIISGCSRLANGEYLHRHNQVARIIHQQLALKYKLVESEVPYYKYVPDPVLKKDHVTLYWDRSIITDRTIVANKPDIVMIDRSARRVMIIDVTIPHDENLVKAEKEKQIKYLDLAHEVRDMWNMNSVIIVPIVVTANGLIAKSFDDHLSKLSLGGWIKGLIQKAVLLDTARIVRRFLSLQSLPPLAWTLLPTPGGPLFFYIFKCFFLCFYFKKYLRNVIK

SEQ ID NO: 30441 - protein, 1082 aa, Noctua fimbriata
MITRAAYRRARLPPPDPSLSSASPPPESSPIVSAVTPAVAVASSSSDEYFSPPTSPTPVRRQGRGRPPRSLGLRGHPAPSRVPAAGGCVQRIRWTHSINENVMRAYYGSTEGGTNLTAYRVGMLSLFQVLEPTVNVSAQRLSDQVRVIQRNHMLDDAVLDRLRSEVLSNRIVLTPAQTAVQASVIDATPPRFNPAVVEEDDRVAVVSSQCNDRLRSALEDALREYRSTPTELRPRLPRLPMHNKNRALVCALDSQLENIFESSENLVDTHSILYCGAVAACRLANVKFPNCDVATRPKPAVPAWQRRIERRIDGARVLIGKLHCFREGNTRPRVMRFVRRAFSGTGISPQEYMSRVTERIDFLKQKVYAWANRIRRYKRRVDRYSQNRMFQSDERWVYRAWERPEQNMTDVCRPDDAATSSFWRSIWSVPVCHTEAVWMRDVEQVCEPIPEMEPILITPLDVARAVRPLPNWKSPGPDGLHNFWLKWLSSSHTCLASQFQSSLESGSLPQFLTTGVTHLLHKSGSPAEPKNYRPITCLSTVYKLLTSILRAKINTHIDKNSIMSASQNGCRNGSRGTKELLLIDMAISQQVRRSRKDLSTCWIDYKKAYDSVPHTWLMRVLELYKIDATLRAFLESCMGQWRTVLRYPGCRQIQGNDEPVWIKRGIFQGDSLSPLWFCLALNPLSTLLEDSGLGYRLRRGGQVISHLLYMDDLKLFAPNKLRLMELLKVTETFSSAIRMEFGVDKCAVMYVKQGEIMESEGIQLSDSIHLRTLSSTESYKYLGMSEALGINVTDMKQSLKERFFGRLNKVLHSLLSGGNKVRAFNGWVMPVLMYAFGVLKWTQTELDALDRRVRTLLTANRMHHPRSSVMRLYIPRKCGGRGFLNAKSLHNREMCSLREYFLKVEVGMHRDVVAVDKGLTPLSMAKENWRKPEVLTTDDRKEVWQGKELHGRFYRALHGPDVDFLASVSWLRFGDLFGETEGFVCAIMDEVMLTNNYRKYIMKDGTVDVCRACHRPGKSIRHIISGCSRLANGEYLHKHNQVARIIHQQLALKYKLVESEVPYYKYVPDPVLEKNHVTLYWD

SEQ ID NO: 30442 - protein, 1209 aa, Noctua fimbriata
MITRAAYRRARLTTPDSPLSSASPPPDPGSPVLPAAAVASSSSDEYFSPPTSPTPVRRQGRGRPPRSLGLRGHPAPSRVPAAGGCVQRMRWTLSINENVMRAYYGSTEGGTNLTAYRVRMLSLFQVLEPTVNVSAQRLSDQVRVIQRNHMLDDAVLDRLRSEVLSNRVILTPAQTAVQASVIDATPPRFNPAVVEEDDRVAVVSNQCNDRLRSALEDALREYRSTPTELRPRLPRLPMHNKNRALVCALDSQLKNIFESSENLVDTHSILYCGAVAACRLANVKFPNCDVATRPKPAVPAWQYRIERRIDGARVLIGKLHCFREGNTRPRVMRFVRRAFSGTGISPQEYMSRVTERIDFLKQKVYAWANRIRRYKRRVDRYSQNRMFQSDERWVYRAWERPELNMTDVCRPDDAATSSFWRSIWSVPVCHTEADWMRDVERVCEPIPEMEPILITPLDIARAVRPLPNWKSPGPDGLHNFWLKWLSSSHTCLASQFQSSLESGSLPQFLTTGVTHLLHKSGSPAEPKNYRPITCLSTVYKLLTSILRAKINTHIDKNSIMSASQNGCRNGSRGTKELLLIDMAISQQVRRSRKDLSTCWIDYKKAYDSVPHTWLMRVLELYKIDATLRAFLESCMGQWRTVLRYPGCRQIQGNDEPVWIKRGIFQGDSLSPLWFCLALNPLGTLLEDSGLGYRLRRGGQVISHLLYMDDLKLFAPNKLQLMELLKVTENFSSAIRMEFGVDKCAVMYVKQGEIMESEGIQLSDSIHLRTLSSTESYKYLGMSEALGINVTDMKQSLKERFFGRLNKVLHSLLSGGNKVRAFNGWVMPVLMYSFGVLKWTQTELDALDRRVRTLLTANRMHHPRSSVMRLYIPRKCGGRGFLNAKSLHNREMCSLREYFLKVEVGMHRDVVAVDKGLTPLSIAKENWRKPEVLTTDDRKEVWQGKELHGRFYRALHGPDVDFLASVSWLRFGDLFGETEGFVCAIMDEVMLTNNYRKYIMKDGTVDVCRACHRPGESIRHIISGCSRLANGEYLHRHNQVARIIHQQLALKYKLVESEVPYYKYGTSDSTSLYTSLYTVLEKDHVTLYWDQSIITDRTIVANKPDIVVIDRSARRVMIVDVTIPHDENLVKAEKEKQIKYLDLAHEVVGMWNVNSAIIVPIVVTANGLIAKSLDDHLSKLSLGGWIKGLIQKAVLLDTARIVRRFLSLEP

SEQ ID NO: 30443 - protein, 1200 aa, Xestia c-nigrum
MITRAASRRRARLPSPDSSLSSASPPPDPGSPVSTVAAVASSSSDEYFSPPTSPTPVRRAGRGRPPRSLGLRGQQAPSRVPATGGCVQRMRWTQSMNENTMRAYYGSTEGGTNLTAYRVRMLSLFQDLEPAVNVSAQRLSDQVRVIQRNHMLDDAALDRLRSEVLSNRIILTPAQTAVQASAIDATPPRSNPAVVEEDGRVATVSSQCNDRLRSALEDALREYRSTPTELRPRLPRLPMHKKNRALVCALDSQLKNVFESSEDLVDTHSILFCGAVAACRLANVKFPNCDLATRPKPAVPVWQRRIERRIDGARVLIGKLYCFREGNTRPRVMRFVRRAFSGTEISPQEYMSRVTERIDFLKQKVYAWASRIRRYKRRVDRYSQNRMFQCDERWVYRAWERPDQNVTDVCHPGDAATSSFWCSIWSVPVCHSEADWMRDVERVCEPIPEMAPVVITSLDIARAVRPLPNWKSPGPDGLHNFWLKWLGSSHTCLVSQFQSSLESGSLPQFLTTGVTHLVHKSGSPTEPQNYRPITCLSTVYKLLTSILRTKINTHIDNNSIMSASQNGCRNGSRGTKELLLIDMAISQQVRRSRKDLSTCWIDYKKAYDSVPHSWLMRVLELYKIDATLCTFLKSCMGQWRTVLRYPGCRQIQGNDESVWIKRGIFQGDSLSPLWFCLALNPLSTLLENSGLGYQLRKDGQVISHLLYMDDLKLFAPNKLRLMELLKVTETFSNAIRMEFGVDKCAVMYVKRGEIMESEGLQLSDSIHLRSLSSSESYKYLDMSEALGINVTDMKQSLRERFFGRLKKVLNSLLSGGNKVRAFNGWVMPVLMYSFGILKWTQTELDALDRRVRTLLTENRMHHPRSSVMRLYIPRKCGGRGFLNAKTLHNREVCSLREYFLKAEVGMHRDVVAVDKGLTPLSMAKENWRKPVVLTTDDRKKEWQGKVLHGRFYRALHGPDVDFLASVSWLRFGDLFGETEGFVCAIMDEVMLTNNYRKYIMKDGTVDVCRACHCPGESIRHIISGCSRLANGEYLHRHNQVARIIHQQLALKFKLVESEVPYYKYVPDPVLVKDHITLYWDQSIITDRTIVANKPDIVVIDRSARRVMIIDVTIPHDENLVKAEKEKQIKYLDLAHEVRDMWNMKSVIIVPIVVTANGLIAKSLDEHLSRLSLGGWIKGLIQKAVLLDTARIVRRFLSLQP

SEQ ID NO: 30444 - protein, 1067 aa, Ochropleura plecta
MLTRRRAQEQQALPSSPGSSLSSASQPPGRATRVSAVSPVAAVASSSSDEFFSPPSSPPPPPTRQRRGRGRPPAGLGSRGQQAPIRVPAAGGNVSRMRWTSFINANVMRAYYGSTEGGTNLTAYRVRMLSLFQDLEPTINVSAQRLSDQVRVIQRNHLLDDAALDRLRSEVLSNRVILTTPQTAVQASAIDVTQPRSNPAVVEEDDRVATVSSQCNDRLRSALEDALRDYRSTPAELRPRLPRLPMHKKNRALVCALDSQLKNLFESSEDLVDTHSILYCGAVAVCRLANVKFPNCDVATRPKPSVPAWQCRIERRIDEARALIGKLYCFREGNTRPRVMRFVRRAFSGTGISPQEYMSRTTERIDFLKQKVYAWANRIQRYKRRVDRYSQNRMFRSDERWVYRAWERPEQSVTDVCRPDDVATSSFWHSIWSVRVCHTEAGWMRDVERVCETIPEMEPILITSLDIASAVRPLPNWKSPGPDGLHNFWLKWLSSSHTRLASQFQSCLESGSLPQFLTTGVTHLLYKSGSPAEPKNYRPITCLSTVYKLLTSILRAKINSHIVKNSIISASQNGCRNGSRGTKELLLIDMAISQQVRRSRKDLSTCWIDYKKAYDSVPHTWLKRVLELYKIDTTLRTFLESCMGQWRTVLRYPGCRQIQGNDEPVWIKRGIFQGDSLSPLWFCLALNPLSTLLEDSGLGYRLRRGGQVISHLFYMDDLKLFAPNKLRLMELLKVTETFSNAIRMEFGVDKCAVMYVKRGEIMESEGIHLSDSIHLRSLSSSESYKYLGMSEALGINVADMKQLLRERFFGRLKKVLKSLLSGGNKVRAFNSWVMPVLMYSFGILKWTQTELDALDRRVRTLLTANRMHHPRSSVMRLYIPRKCGGRGFLNAKTLHNREVCSLREYFLKTDVGMHRDVVAVDKGLTPLSMAKENWRKPVVLTTDYRKEVWQGKELHGRFYKALHGPDVDFLASVSWLRFGDLFGETEGFVCAIMDEVMLTNNYRKYIMKDGTVDVCRACHRPGESIRHIISGCSRLANGEYLHRHNQVARIIHQQLALKYNLVESEVP

SEQ ID NO: 30445 - protein, 1111 aa, Agrotis ipsilon
MRWTQSINENVMRAYYGSTEGGTSLTAYRVRMLSLFQVLEPTLNVSAQRLSDQVRVIQRNHMLDDTVLDRLRSEVLSNRTILSPPQPTAPVSENRVPARSVITSVVEEDDAVVTVSSQCNERVRSALEDALREYRSTPIALRPRLPRLPMHKKNRALVCALNSLLKNLFESSEDLVDTHSILFCGAVAACRLANVKFPDSDGANRPKPAVPAWQCRIERRIGEARVLIGKLYCFREGNTRPRVMRFVTRAFSGTGIGPQEYMSRVTERIDFLKQKVCAWASRIRRYKRRVERYSQNRMFQSDERWVYRAWERPERNMTDLCRPDDSATSSFWRSIWSVPVGHAEDDWMRDVERVCENIPEMEPISITPSDVARAVRPLPNWKSPGPDGLHNFWLKWLSSSHTCLASQFQSSLETGSLPQFLTTGVTHLLHKSGSTTEPKNYRPITCLSTVYKLLTSILRVKINTHIETNSIMSSSQNGCRNGSRGTKELLLIDMAISQQVRRSRKDMSTCWIDYKKAYDSVPHTWLMRVLELYKIDATLRAFLGSCMGQWRTVLRYPGCRQIQANDEPVWIKRGIFQGDSLSPLWFCLALNPLSTLLEESGLGYRLRRGGQVISHLLYMDDLKLFAPNKLRLMELLKVTETFSSAIRMEFGVDKCAVMHVKRGEIMESEGIHLSDSIHLRSLSSSETYKYLGMSEALGIDVPDVKQSLRERFFGRLKKVLNSLLSGGNKVRAFNGWVMPVLMYSFGILKWTQTELDALDRRVRTLLTANRMHHPRSSVMRLYIPRKCGGRGFLNAKTLHNREVCSLREYFLKMELGMHRDVVAVDNGLTPLSMAKENWRKPVVLSTEDRNEVWQGKELHGRFYRALHGPDVDFLASVSWLRFGDLFGETEGFVCAIMDEVILTNNYRRHIIRDGTIDVCRACHRPGESIRHIVSGCSRLANGEYLHRHNLVARIIHQQLALKYSLVDSEVPYYRYVPDPVLEKDHVTMYWDLPIITDRTIVANKPDIVVIDRSARRAMIIDVTIPHDENLVKAEKDKQIKYLDLAREVVDMWNVSSAIIVPIVVTANGLMAKSLDEHLSRLSLGSWIKSQIQKAVLLDTARIVRRFLSLEP

SEQ ID NO: 30446 - protein, 1020 aa, Noctua fimbriata
MLTRAAARRARLPPPDPSLSSASPPPESSPIVSAVTPAVAVASSSSDEYFSPPTSPTPVRRQGRGRPPRSLGLRGHPAPSRVPAAGGCVQRMRWTHSINENVMRAYYGSTEGGTNLTAYRVELLSLFQVLEPTVNVSAQRLSDQVRVIQRNHMLDDAVLDRLRSEVLSNRIVLTPAQTAVQASVIDAAQPRFNPAVVEEDDRVAVVSSQCNDRLRSALEDALREYRSTPTELRPRLPRLPMHNENRALVCALDSQLENIFESSENLVDTHSILYCGAVAACRLANVKFPNCDVATRPKPAVPAWQRRIERRIDGARVLIGKLHCFREGNTQPRVMRFVRRAFSGTGISPQEYMSRVTERIDFLKQKVYAWANRIRRYKRRVDRYSQNRMFQSDERWVYRAWERPELNMTDVCRPDDAATSSFWRSIWSVPVCHTEADWMRDVERVCEPIPEMEPILITPLDIARAVRPLPNWKSPGLDGLHNFWLKWLSSSHTCLASQFQSSLESGSLPQFLTTGVTHLLHKSGSPAEPKNYRPITCLSTVYKLLTSILRAKINTHIDKNSIISASQNGCRNGSRGTKELLLIDMAISQQVRRSRKDLSTCWIDYKKAYDSVPHIWLMRVLELYKIDATLRAFLESCMGQWRTVLRYPGCRQIQGNDEPVWIKRGIFQGVSLSPLWFCLALNPLSTLLEDSGIDVTDMKQSLKEHFFGRLNKVLHSLLSGENKVRAFNGWVMPVLMYSFGVLKWTQTELDALDRRVRTLLTANRMHHPRSSVMRLYIPRKCGGRGFLNAKSLHNREMCSLREYFLKAEVGMHRDVVAVDKGLTPLSLAKENWHKPVVVTTDDRKEVWQGKELHGRFYRALHGPDVDFLASVSWLRFGDLFGETEGFVCAIMDEVMLTNNYRKYIMKDGTVDVCRACHRPGESIRHIIPGCSRLANGEYLHRHNQVARIIHQQLALKYKLVESEVPYYKYVPDPVLEKDHVTLYWDQSIITDRTIVANRPDIVVDRPISAPRNDSRCYHPA

SEQ ID NO: 30447 - protein, 1200 aa, Xestia c-nigrum
MITRAASRRRARLPSPDSSLSSASPPPDPGSPVSTVAAVASSSSDEYFSPPTSPTPVRRAGRGRPPRSLGLRGQQAPSRVPATGGCVQRMRWTQSMNENAMRAYYGSTEGGTNLTAYRVRMLSLFQDLEPAVNVSAQRLSDQVRVIQRNHMLDDAALDRLRSEVLSNRIILTPAQTAVQASAIDATPPRSNPAVVEEDGRVATVSSQCNDRLRSALEDALREYRSTPTELRPRLPRLPMHKKNRALVCALDSQLKNVFESSEDLVDTHSILFCGAVAACRLANVKFPNCDLATRPKPAVPVWQRRIERRIDGARVLIGKLYCFREGNTRPRVMRFVRRAFSGTEISPQEYMSRVTERIDFLKQKVYAWASRIRRYKRRVDRYSQNRMFQCDERWVYRAWERPDQNVTDVCHPGDAATSSFWRSIWSVPVCHSEADWMRDVERVCEPIPEMAPVVITSLDIARAVRPLPNWKSPGPDGLHNFWLKWLGSSHTCLASQFQSSLESGSLPQFLTTGVTHLLHKSGSPTEPQNYRPITCLSTVYKLLTSILRTKINTHIDNNSIMSASQNGCRNGSRGTKELLLIDMAISQQVRRSRKDLSTCWIDYKKAYDSVPHSWLMRVLELYKIDATLCTFLKSCMGQWRTVLRYPGCRQIQGNDESVWIKRGIFQGDSLSPLWFCLALNPLSTLLENSGLGYQLRKDGQVISHLLYMDDLKLFAPNKLRLMELLKVTETFSNAIRMEFGVDKCAVMYVKRGEIMESEGLQLSDSIHLRSLSSSESYKYLGMSEALGINVTDMKQSLRERFFGRLKKVLNSLLSGGNKVRAFNGWVMPVLMYSFGILKWTQTELDALDRRVRTLLTENRMHHPRSSVMRLYIPRKCGGRGFLNAKTLHNREVCSLREYFLKAEVGMHRDVVAVDKGLTPLSMAKENWRKPVVLTTDDRKKEWQGKVLHGRFYRALHGPDVDFLASVSWLRFGDLFGETEGFVCAIMDEVMLTNNYRKYIMKDGTVDVCRACHCPGESIRHIISGCSRLANGEYLHRHNQVARIIHQQLALKFKLVESEVPYYKYVPDPVLVKDHITLYWDQSIITDRTIVANKPDIVVIDRSARRVMIIDVTIPHDENLVKAEKEKQIKYLDLAHEVRDMWNMNSVIIVPIVVTANGLIAKSLDEHLSRLSLGGWIKGLIQKAVLLDTARIVRRFLSLQP

SEQ ID NO: 30448 - protein, 1111 aa, Xestia c-nigrum
MRWTQSMNENAMRAYYGSTEGGTNLTAYRVRMLSLFQDLEPAVNVSAQRLSDQVRVIQRNHMLDDAALDRLRSEVLSNRIILTPAQTAVQASAIDATPPRSNPAVVEEDGRVATVSSQCNDRLRSALEDALREYRSTPTELRPRLPRLPMHKKNRALVCALDSQLKKVFESSEDLVDTHSILFCGAVAACRLANVKFPNCDLATRPKPAVPVWQRRIERRIDGARVLIGKLYCFREGNTRPRVMRFVRRAFSGTEISPQEYMSRVTERIDFLKQKVYAWASRIRRYKRRVDRYSQNRMFQCDERWVYRAWERPDQNVTDVCHPGDAATSSFWRSIWSVPVCHSEADWMHEVERVCEPIPEMAPVVITSLDIARAVRPLPNWKSPGPDGLHNFWLKWLGSSHTCLASQFQSSLESGSLPQFLTTGVTHLLHKSGSPTEPQNYRPITCLSTVYKLLTSILRTKINTHIDNNSIMSASQNGCRNGSRGTKELLLIDMAISQQVRRSRKDLSTCWIDYKKAYDSVPHSWLMRVLELYKIDATLCTFLKSCMGQWRTVLRYPGCRQIQGNDESVWIKRGIFQGDSLSPLWFCLALNPLSTLLENSGLGYQLRKDGQVISHLLYMDDLKLFAPNKLRLMELLKVTETFSNAIRMEFGVDKCAVMYVKRGEIMESEGLQLSDSIHLRSLSSSESYKYLGMSEALGINVTDMKQSLRERFFGRLKKVLNSLLSGGNKVRAFNGWVMPVLMYSFGILKWTQTELDALDRRVRTLLTENRMHHPRSSVMRLYIPRKCGGRGFLNAKTLHNREVCSLREYFLKAEVGMHRDVVAVDKGLTPLSMAKENWRKPVILTTDDRKKEWQGKVLHGRFYRALHGPDVDFLASVSWLRFGDLFGETEGFVCAIMDEVMLTNNYRKYIMKDGTVDVCRACHCPGESIRHIISGCSRLANGEYLHRHNQVARIIHQQLALKFKLVESEVPYYKYVPDPVLVKDHITLYWDQSIITDRTIVANKPDIVVIDRSARRVMIIDVTIPHDENLVKAEKEKQIKYLDLAHEVRDMWNMNSVIIVPIVVTANGLIAKSLDEHLSKLSLGGWIKGLIQKAVLLDTARIVRRFLSLQP

SEQ ID NO: 30449 - protein, 868 aa, Xestia c-nigrum
MRFVRRAFSGTEISPQEYMSRVTERIDFLKQKVYAWASRIRRYKRRVDRYSQNRMFQCDERWVYRAWERPDQNVTDVCHPGDAATSSFWRSIWSVPVCHSEADWMRDVERVCEPIPEMAPVVITSLDIARAVRPLPNWKSPGPDGLHNFWLKWLGSSHTCLASQFQSSLESGSLPQFLTTGVTHLLHKSGSPTEPQNYRPITCLSTVYKLLTSILRTKINTHIDNNSIMSASQNGCRNGSRGTKELLLIDMAISQQVRRSRKDLSTCWIDYKKAYDSVPHSWLMRVLELYKIDATLCTFLKSCMGQWRTVLRYPGCRQIQGNDESVWIKRGIFQGDSLSPLWFCLALNPLSTLLENSGLGYQLRKDGQVISHLLYMDDLKLFAPNKLRLMELLKVTETFSNAIRMEFGVDKCAVMYVKRGEIMESEGLQLSDSIHLRSLSSSESYKYLGMSEALGINVTDMKQSLRERFFGRLKKVLNSLLSGGNKVRAFNGWVMPVLMYSFGILKWTQTELDALDRRVRTLLTENRMHHPRSSVMRLYIPRKCGGRGFLNAKTLHNREVCSLREYFLKAEVGMHRDVVAVDKGLTPLSMAKENWRKPVILTTDDRKKEWQGKVLHGRFYRALHGPDVDFLASVSWLRFGDLFGETEGFVCAIMDEVMLTNNYRKYIMKDGTVDVCRACHCPGESIRHIISGCSRLANGEYLHRHNQVARIIHQQLALKFKLVESEVPYYKYVPDPVLVKDHITLYWDQSIITDRTIVANKPDIVVIDRSARRVMIIDVTIPHDENLVKAEKEKQIKYLDLAHEVRDMWNMNSVIIVPIVVTANGLISKSLDEHLSRLSLGGWIKGLIQKAVLLDTARIVRRFLSLQP

SEQ ID NO: 30450 - protein, 977 aa, Xestia xanthographa
MRAYYGSTEGGTNLTAYRVRMLSLFQDLEPTVNVSAQRLSDQVRVIQRNHRLDDAALDRLRSEVLSNLIILTPTQTAVHTSVNNVTLPRSNPDVVEEDDRVATVSSQCNDRLRSALEDAFREYRFTPTELRPRLPRLPMHKKNRALVCALDSQLKNIFESSENLIDTHSILFCGAVAACRLANVKFPNCDVATRPKPAVPAWQCRIERRIDETRVLIGKLYCFREGNTRPRVMRFVRRAFSGTEISPQEYMSRVTERIDFLKQKVYAWANRIRRYKRRVDRYSQNRMFQSDERWVYRAWERPEQNMTDVCRPDDAATSSFWRSIWSVPVCHTESDWMRDVERVCEPIPEMEPILITPLDIAKAVRPLPNWKSPGPDGLHNFWLKWFSSSHTCLASQFQSSLESGSLPQFLTTGVTHLLHKSGSPAEPKNYRPITCLSTIYKLLTSILRVKINTHIDKNSIMSASQNGCRNGSRGTKELLLIDMAISQQVRRSRKDLSTCWIDYKKTYDSVPHTWLMRVLELYKIDTTLRAFLESCMGQWKTVLRSGCRQIQGSDEPVWIKRGIFQGDSLSPLWFCLALNPLSTFLENSGLGCRLRKDGQVISHLLYMDDLKLFAPNKLRLMELLKVTETFSSAIRMEFGVDKCAVMYVKRGEIMESEGLQLSDSIHLRSLSSSETYKYLGMSEALGINVTDMKQSLKERFFGRLRKVLNSLLSGGNKVRAFNGWVMPVLMYSFGILKWTQTELDALDRRVRTLLTETRMHHPRSSVMRLYIPRKCGGRGFLNAKTLHNREVCSLREYFLKAEVGMHRDVVAVDKGLTPLSMAKENWHKPEVLTTDDRKEVWQGKELHGRFYRALHGPDVDFLASVFWLRFGDLFGETEGFVCAIMDEVMLTNNYRKYIMRDGTVDVCRACHLPGESIRHIISGCSRLANGEYLHRHNQVARIIHQQLALKYKLVESEVTYYKYVPDPVLEKDHVTLY

SEQ ID NO: 30451 - protein, 1200 aa, Xestia c-nigrum
MITRAASRRRARLPSPDSSLSSASPPPDPGSPVSTVAAVASSSSDEYFSPPTSPTPVRRAGRGRPPRSLGLRGQQAPSRVPATGGCVQRMRWTQSMNENAMRAYYGSTEGGTNLTAYRVRMLSLFQDLEPAVNVSAQRLSDQVRVIQRNHMLDDAALDRLRSEVLSNRIILTPAQTAVQASAIDATPPRSNPAVVEEDGRVATVSSQCNDRLRSALEDALREYRSTPTELRPRLPRLPMHKKNRALVCALDSQLKKVFESSEDLVDTHSILFCGAVAACRLANVKFPNCDLATRPKPAVPVWQRRIERRIDGARVLIGKLYCFREGNTRPRVMRFVRRAFSGTEISPQEYMSRVTERIDFLKQKVYAWASRIRRYKRRVDRYSQNRMFQCDERWVYRAWERPDQNVTDVCHPGDAATSSFWRSIWSVPVCHSEADWMHEVERVCEPIPEMAPVVITSLDIARAVRPLPNWKSPGPDGLHNFWLKWLGSSHTCLASQFQSSLESGSLPQFLTTGVTHLLHKSGSPTEPQNYRPITCLSTVYKLLTSILRMKINTHIDNNSIMSASQNGCRNGSRGTKELLLIDMAISQQVRRSRKDLSTCWIDYKKAYDSVPHSWLMRVLELYKIDATLCTFLKSCMGQWRTVLRYPGCRQIQGNDESVWIKRGIFQGDSLSPLWFCLALNPLSTLLENSGLGYQLRKDGQVISHLLYMDDLKLFAPNKLRLMELLKVTETFSNAIRMEFGVDKCAVMYVKRGEIMESEGLQLSDSIHLRSLSSSESYKYLGMSEALGINVTDMKQSLRERFFGRLKKVLNSLLSGGNKVRAFNGWIMPVLMYSFGILKWTQTELDALDRRVRTLLTENRMHHPRSSVMRLYIPRKCGGRGFLNAKTLHNREVCSLREYFLKAEVGMHRDVVAVDKGLTPLSMAKENWRKPVILTTDDRKKEWQGKVLHGRFYRALHGPDVDFLASVSWLRFGDLFGETEGFVCAIMDEVMLTNNYRKYIMKDGTVDVCRACHCPGESIRHIISGCSRLANGEYLHRHNQVARIIHQQLALKFKLVESEVPYYKYVPDPVLVKDHITLYWDQSIITDRTIVANKPDIVVIDRSARRVMIIDVTIPHDENLVKAEKEKQIKYLDLAHEVRDMWNMNSVIIVPIVVTANGLIAKSLDEHLSKLSLGGWIKGLIQKAVLLDTARIVRRFLSLQP

SEQ ID NO: 30452 - protein, 1200 aa, Xestia c-nigrum
MITRAASRRRARLPSPDSSLSSASPPPDPGSPVSTVAAVASSSSDEYFSPPTSPTPVRRAGRGRPPRSLGLRGQQAPSRVPATGGCVQRMRWTQSMNENAMRAYYGSTEGGTNLTAYRVRMLSLFQDLEPAVNVSAQRLSDQVRVIQRNHMLDDAALDRLRSEVLSNRIILTPAQTAVQASAIDATPPRSNPAVVEEDGRVATVSSQCNDRLRSALEDALREYRSTPTELRPRLPRLPMHKKNRALVCALDSQLKNVFESSEDLVDTHSILFCGAVAACRLANVKFPNCDLATRPKPAVPVWQRRIERRIDGARVLIGKLYCFREGNTRPRVMRFVRRAFSGTEISPQEYMSRVTERIDFLKQKVYAWASRIRRYKRRVDRYSQNRMFQCDERWVYRAWEQPDQNVTDVCHPGDAATSSFWRSIWSVPVCHSEADWMRDVERVCEPIPEMAPVVITSLDIARAVRPLPNWKSPGPDGLHNFWLKWLGSSHTCLASQFQSSLESGSLPQFLTTGVTHLLHKSGSPTDPQNYRPITCLSTVYKLLTSILRTKINTHIDNNSIMSASQNGCRNGSRGTKELLLIDMAISQQVRRSRKDLSTCWIDYKKAYDSVPHSWLMRVLELYKIDATLCTFLKSCMGQWRTVLRYPGCRQIQGNDESVWIKRGIFQGDSLSPLWFCLALNPLSTLLENSGLGYQLRKDGQVISHLLYMDDLKLFAPNKLRLMELLKVTETFSNAIRMEFGVDKCAVMYVKRGEIMESEGLQLSDSIHLRSLSSSESYKYLGMSEALGINVTDMKQSLRERFFGRLKKVLNSLLSGGNKVRAFNGWVMPVLMYSFGILKWTQTELDALDRRVRTLLTENRMHHPRSSVMRLYIPRKCGGRGFLNAKTLHNREVCSLREYFLKAEVGMHRDVVAVDKGLTPLSMAKENWRKPVVLTTDDRKKEWQGKVLHGRFYRALHGPDVDFLASVSWLRFGDLFGETEGFACAIMDEVMLTNNYRKYIMKDGTVDVCRACHCPGESIRHIISGCSRLANGEYLHRHNQVARIIHQQLALKFKLVESEVPYYKYVPDPVLVKDHITLYWDQSIITDRTIVANKPDIVVIDRSARRVMIIDVTIPHDENLVKAEKEKQIKYLDLAHEVRDMWNMNSVIIVPIVVTANGLIAKSLDEHLSRISLGGWIKGMIQKAVLLDTARIVRRFLSLQP

SEQ ID NO: 30453 - protein, 1200 aa, Xestia c-nigrum
MITRAASRRALIPSPDSSLSSASPPPDPGSPVSPVAAVASSSSDEYFSPPTSPTPVRRAGRGRPPKGLGLRGQQAPSRVPATGGCVQRMKWTQLMNENVMRAYYGSTEGGTNLTAYRVRMLSLFQDLEPTVNASAQRLSDQVRVIQRNHLLDGAALDRLRSEVLSNRIILTPAQTAVQASSIDANPPRSNPAVVEEDDRVATVSSQCNDRLRSALEDALHEYRSTSAELRPRLPRLPMHKKNRALVCALDSQLKNVFESSEDLVDTHSILFCGAVAACRLANVKFPNCDLATRPKPAVPAWQRRIERRIDGARVLIGKLHCFREGNTRPRVMRFVRRAFSGTEISPQEYMSRVTERIDFLKQKVYAWASRIRRYKRRVDRYSQNRMFQSDERWVYRAWERPQQNMTDVCRPDDAATSSFWRSIWSVPVCHSEADWMRDVERVCEPIPTMEPILITPLDIARAVRPLPNWKSPGPDGLHNFWLKWFSSSHTCLASQFQSSLESGSLPQFLTTGITPGGFHKSGSPAEPKNYRPITCLSTVYKLLTSILRTKINTHVDSNSIMSASQNGCRNGSRGTKELLLIDMAISQQVRRARKDLSICWIDYKKAYDSVPHSWLKRVLELYKIDATLRTFLESCMGQWRTVLRYPGCRQIQGNDEPVWIKRGIFQGDSLSPLWFCLALNPVSTLLENSGLGYRLRKDGQVISHLLYMDDLKLFAPNKLQLMELLKVTETFSSAIGMEFGVDKCAVMYVKRGKIMGSEGLQLSDSIHLRSLSSSESYKYLGMSEALGINVTDMKQSLKERFFGRLKKVLNSLLSGGNKVRAFNGWVMPVLMYSFGILKWTQTELDALDRRVRTLLTENRMHHPRSSVMRLYIPRKCGGRGFLNAKTLHNREVCSLREYFLKVDVGMHRDVVAVDKGLTPLSMAKENWRKPVVLTTDDRKKEWQGKELHGRFYRALHGPDVDFLASVSWLRFGDLFGETEGFVCAIMDEVMLTNNYRKYIMKDGTVDVCRACHCPGESIRHIISGCSRLANGEYLHRHNQVVRIIHQQLALKFKLVESEVPYYKYVPDPVLVKDHVTLYWDQSIITDRTIVANKPDIVVIDRSARRVMIIDVTIPHDENLVKAEKEKQMKYLDLAHEVRDMWNMNSVIIVPIVVTANGLIAKSLDEHLSKLSLGGWIKGLIQKAVLLDTARIVRRFLSLQP

SEQ ID NO: 30454 - protein, 1200 aa, Xestia c-nigrum
MITRAASRRRARLPSPDSSLSSASPPPDPGSPVSTVAAVASSSSDEYFSPPTSPTPVRRAGRGRPPRSLGLRGQQAPSRVPATGGCVQRMRWTQSMNENAMRAYYGSTEGGTNLTAYRVRMLSLFQDLEPAVNVSAQRLSDQVRVIQRNHMLDDAALDRLRSEVLSNRIILTPAQTAVQASAIDATPPRSNPAVVEEDGRVATVSSQCNDRLRSALEDALREYRSTPTELRPRLPRLPMHKKNRALVCALDSQLKNVFEISEDLVDTHSILFCGAVAACRLANVKFPNCDLATRPKPAVPVWQRRIERRIDGARVLIGKLYCFREGNTRPRVMRFVRRAFSGTEISPQEYMSRVTERIDFLKQKVYAWASRIRRYKRRVDRYSQNRMFQCDERWVYRAWERPDQNVTDVCHPGDAATSSFWRSIWSVPVCHSEADWMRDVERVCEPIPEMAPVVITSLDIARAVRPLPNWKSPGPDGLHNFWLKWLGSSHTCLASQFQSSLESGSLPQFLTTGVTHLLHKSGSPTEPQNYRPITCLSTVYKLLTSILRTKINTHIDNNSIMSASQNGCRNGSRGTKELLLIDMAISQQVRRSRKDLSTCWIDYKKAYDSVPHSWLMRVLELYKIDATLCTFLKSCMGQWRTVLRYPGCRQIQGNDESVWIKRGIFQGDSLSPLWFCLALNPLSTLLENSGLGYQLRKDGQVISHLLYMDDLKLFAPNKLRLMELLKVTETFSNAIRMEFGVDKCAVMYVKRGEIMESEGLQLSDSIHLRSLSSSESYKYLGMSEALGINVTDMKQSLRERFFGRLKKVLNSLLSGGNKVRAFNGWVMPVLMYSFGILKWTQTELDALDRRVRTLLTENRMHHPRSSVMRLYIPRKCGGRGFLNAKTLHNREVCSLREYFLKAEVGMHRDVVAVDKGLTPLSMAKENWRKPVILTTDDRKKEWQGKVLHGRFYRALHGPDVDFLASVSWLRFGDLFGETEGFVCAIMDEVMLTNNYRKYIMKDGTVDVCRACHCPGESIRHIISGCSRLANDEYLHRHNQVARIIHQQLALKFKLVESEVPYYKYVPDPVLVKDHITLYWDQSIITDRTIVANKPDIVVIDRSARRVMIIDVTIPHDENLVKAEKEKQIKYLDLAHEVRDMWNMNSVIIVPIVVTANGLIAKSLDEHLSRLSLGGWIKGLIQKAVLLDTARIVRRFLSLQP

SEQ ID NO: 30455 - protein, 1142 aa, Xestia xanthographa
MNENVMRAYYGATEGGINLTAYRGQMLSLFQVLEPGVSASAQRLLDQVRVIQRNHMLDDTVLDRLRSESRSNLVMPASPLLAVQVQNVSSAPPRSDRDGEEDDNEVISVSTQCNAQLRSALESAFREYRSTPPELRPRLPRMHNKNKALVCALDSQLSNCFDSSKDLADTHSILYCGAIAACRVAHVKFPNNDRATRPKLAAPAWQCRIERRIGEARALIGKLICFREGNTRPRVMRFVRRAFSGTDISFRDYLARVTERIDSLKQKICAWASRIRRYKRRVERYTQNRTFQSDERWVYRAWERPDQGVTDTRLPDDNAMCSFWRSIWSVPVSHTEGDWTREVEQACNPIPEMGAIVISPQDVARAVRPLPNWKSPGPDGLHNFWIKWFQRSHACLASQFQSALESGSLPQFLTTGITHLLHKSGSAAEPKNYRPITCLLTVYKVLTSILRAKINQHIESNSIMSASQNGCRNGSRGTKELLLIDMAISQQVRRSRKNLSTCWIDYKKAYDSVPHTWLMRVLELYKVDATLRTFLMSCMGQWRTVLRYPGCRQIQGTSEPIRIERGIFQGDSLSPLWFCLALNPLSTLLERSGLGYLLRRDGQVISHLLYMDDLKLFAPNNLQLMKLLKVTETFSSAIRMEFGVDKCAVMHVKRGEIMESVGTQLSDSIHLRSLSSTETYKYLGMSEALGINTADMKQSLRERFFGRLNKVLGSLLSGGNKVRAFNGWVMPVLMYSFSILKWTQTELDALDRRVRTLLTANRMHHPRSSVMKLYIPRKCGGRGFLNAKALHNREVRVQSQRILPGSEMHRDMVSVDKGLTPLSLANENWRKPKVLNTNDRKEEWQSKELHGRFYRALHGPDVDFLASVSWLRFGDLFGETEGFVCAIMDEVMMTNNYRKYIVKDGTVDICRACHHPGESIRHIISGCSSLANGEYLHRHNLVARIIHPQLALKYNLVESEVPYYRYAPDPVLDNGNITLYWDRPITTDRTVVANRPDIVVIDRLERRTMIVDITVPHDENLVKAEKDKQFKYLDLAREVVDMWDVNTAVIVPIVVSANGLIAKSLNQHLRRLSLGSWIKGLIQKAVLLDTARKEVPLSRALTTGSSDPVPSAGGLLFFIFLNVFLSRFTKKYLKMLKTCEYK

SEQ ID NO: 30456 - protein, 1110 aa, Noctua pronuba
MRWTQSINEQVMRAYYGATEGGSNLTAYRGRMLSLFQVLEPAVSVSAQRLSDQVRVIQRNHMLDDTVLDRLRSESRSNPVTPASPMIAVQLQSVTSISPRSDRGGEEDDNEVISVSTRCNAQLRSALEGAFREYRSTPPELRPRLPRLPMHKKNKALMCALDSQLSNCFDSSKDLADTHSILYCGAVAACRVAHVKFPNNDTATRPKLAVPAWQCRIERRIGEARALIGKLICFREGNTRPRVMRFVRRAFSGTDISFRDYLTRVTERIDFLKQKICAWASRIRRYKRRVDRYTQNRTFQSDERWVYRAWERPDQGVTDTRLPDDDAMCSFWRSIWSVPVSHTEGDWTREVERACDPIPQMGAINISPQDVACAVRPLPNWKSPGPDGLHNFWIKWFQRSHARLASQFQSALESGSLPQFLTTGITHLLHKSGSTAEPKNYRPITCLPTVYKVLTSILRAKINHHIDSNSIMSASQNGCRNGSRGTKELLLIDMAISQQVRRTRRDLSTYWIDYKKAYDSVPHTWLMRVLELYKVDATLRTFLMSCMGHWRTVLRYPGCRQIHGNSEPIRIERGIFQGDSLSPLWFCLTLNPLSTLLEGSGLGYRLRRGGQVISHLLYMDDLKLFAPNNLQLMKLLKVTETFSSAIRMEFGVDKCAVMHVKRGEIMESVGTQLSDSIQLRSLSSTDTYKYLGMSEALGINTANMKQSLRERFFGRLNKVLSSLLSGGNKVRAFNGWVMPVLMYSFGILKWTQTELHALDRRVRALLTANRMHHPRSSVMRLYIPRKCGGRGFLNAKTLHNREVCSLREYFLEADVGMHRDVVSVDKGLTPLSLANENWRKPRVLDTNDRKEVWQGKLHGRFYRALHGPDVDFLASVSWLHFGDLFGETEGFVCAIMDEVMMTNNYRKYIVKDGTVDICRACHRPGESIRHIISGCSRLANGEYLHRHNLVARIIHQQLALKYNLVESEVPYYKYAPDPVLDNGNITLYWDRSIITDRTIVANKPDIVVIDRLERRAMIVDITVPHDENLVKAEKDKQFKYLDLAREVVDMWDVSTAVIVPIVVSANSLIAKSLNQHLRRLALGSWIKGLIQKAVLLDTARIVRRFLSQEP

SEQ ID NO: 30457 - protein, 1189 aa, Mamestra brassicae
MITRAAARRAHPPPPGSSLSSASPTPDIGSQVSPVVAVASSSSDEYFSPPTSPTPVRRQGRGRPPRSLGSRGQPALSRVPAAGGCVQRMRWTQSMNENVMRAYYGSTEGGTNLTAYRVRMLSLFQDLEPTVNVSAQRLSDQVRVIQHNCRLDDAALERLRSEVLSNLIISTPTQTVVQAPASGAITPRPNNGSDEVDDRVVTVSSQCNDRLRSALEDALREYRLTPTELRPRLPRLPMHKKNRALVCALDSLLQNIFESSESLVDTHSILFCGAVAACRIANVKFPSCDEAIRPKPAAPAWQCRIERRIDEARALIGKLYCFREGNTRPRVMRCVRRAFSGTGISPREYTFRVTERIDFLKQKVCAWANRIRRYKRRVDRYSQNRMFQSDERWVYRAWERPEQSVTDVYRPDDVATSTFWRSIWSVPICHAEGGWMRDVERVCEAIPQMEKNTITTLDIAKAVRPLPNWKSPGPDGLHNFWLKWYSSSHALLASQFQSSLDSGSLPQFLTTIITHLLHKTGSPAEPKNYRPITCLSTVYKLLTSILRAKINEHIESNSIMSASQNGCRKGSRGTKELLLIDMAISQQVRRSRKDLSTCWIDYKKAYDSVPHTCLMKVLELYKIDATLRTFLESCMRQWKTVLRYPGCQPIQGSDEPVWIKRGIFQGDSLSPLWFCLALNPLSTLLEDSGLGYRLRRGGQAISHLLYMDDLKLFAPNNLRLMELLKVTETFSSAIRMEFGVDKCAVMHVKKGEIMESEGIQLSDSIQVRSLSSTESYKYLGMSEALGINGTDMKQSLRERFFGRLKKVLNSLLSGGNKVRAFNGWVMPVLMYTFGILKWTQTELDALDRRVRTLLTANRMHHPRSSVMRLYIPRKCGGRGFLNAKTLHNREMCSLREYFLKADVGMHRDVVAVDKGLTPLSMAKENWRKPVILTTDNRKEVWKGKLHGRFYRALYGSDVDFSASVAWLRFGDLFGETEGFVCAIMDEVILTNNYRKHIMKDGTVDVCRACHRPGESIRHIISGCSRLANGEYLHRHNQVARIIHQQLALKYKLVDSEVPYYKYVPDPVLENDHVTLYWDRSIITDRTIVANKPDIVVIDRLARRTMIIDVTIPHDENLVKAEKEKQIKYLDLAHEVVDMWNVDSAVIVPIVITANGLMAKSFDDHLSKLALRGWIKGLIQKAVLLDTLVL

SEQ ID NO: 30458 - protein, 961 aa, Noctua janthe
MHKKNKALVCALDSQLSNCFDSSKDLTDTHSILYCGAVAACRVAHVKFPNNDRATRPKFAVPAWQCRIERRIGEARALIGKLICFREGNTRPRVMRFVKRAFSGTDVSFRDYLARVTERIDFLKQKICAWASRIRRYKRRVERYTQNRTFRSDERWVYRAWERPDQGVTDTRLPKDDAMCSFWRNIWSVPVSHTEGDWTREVERACDPIPEMGAIIISPQDVARAVRPLPNWKSPGPDGLHNFWIKWFQRSHVRLASQFQSALESGSLPQFLTTGITHLLHKSGSTAEPKNYRPITCLPTVYKVLTSILRAKINHHIDSHSIMSASQNGCRNGSRGTKELLLIDMAISQQVRRSRRDLSTCWIDYKKAYDSVPHTWLMKVLELYKVDATLRTFLMSCMGHWRTVLRYPGCRQIQGNSEPIKIERGIFQGDSLSPLWFCLALNPLSTLLEGSGLGYRLRRGGQVISHLLYMDDLKLFAPNNLQLMKLLKVTETFSSAIRMEFGVDKCAVMHVKRGEIMESVGTQLSDSIHLRSLSSTETYKYLGMSEVLGINTADMKQSLRDRFFGRLNKVLSSLLSGGNKVRAFNGWVMPVLMYSFGILKWTQTELDALDRRVRALLTANRMHHPRSSVMRLYILQKCGGRGFLNAKTLHNREVCSLREYFLEVDEGMHRDVVSVDKGFTPLSLANENWRKPRVLDTNDHKEVWQGKEFHGRFCRALHGPDVDFLASVSWLRFGDLFGETEGFVCAIMDEVMMTNNYRKYIVKDGTVDICRACHRPGESIRHIISGCSRLANGEYLHRHNLVARIIQQLALKYNLVESEVPYYKYAPDPVLDNGNITLYWDRSIITDRTIVANKPDIVVIDRLERRAMIVDITVPHDENLMKAEKDKQFKYLDLAREVVDMWDVSTAVIVPIVVSANGLIANSLDKHLRRLSLGSWIKGLIQKAVLLDTARIVRRFLSQEP

SEQ ID NO: 30459 - protein, 1107 aa, Mythimna ferrago
MRWTQSINENVMRSYFGATEGGTNLTAYRGRMLSLFQVLEPAVNVSAQRLSDQVRVIQRNRMLDDAVLDRLRLESRNGRVSPISPPAAVQRQPSVSPRPDHVGEDDDDGAISVSTQCNARLRSALEDAFREYRSIPPELRPRLPRLPMHRKNRALVCALDSQLSNCFDSSEDLTDTHSILYCAAAAACRVAHVKIPNNDRATRPAKPAWQCRIERRIGEARALIGKLICFREGNTRPRVMRFVRRAFSGTDISPRDYLPRITERIDFLKQKVYAWANRIRRYKRRVERYTQNHTFQSNERWVYKAWERPDQSVIDTRLPDDDAMYSFWRSIWSVPVNHTEGDWTREIERVCELIPEMGAINISPQDVARAVRPLPNWKSPGPDGLHNFWLKWFQSSHARLAFQFQSALESGSLPQFLTTGITHLLHKSGSTAEPKNYRPITCLPTVYKVLTSILRAKINNHIEINSIMSASQNGCRNGSRGTKELLLIDVAISQQVRRSRRDLSTCWIDYKKAYDSVPHTWLMRVLELYKVDATLRAFLMSCMGQWRTVLHYPGCRRVSENSEPLRIERGIFQGDSLSPLWFCLPLNPLSTLLEGSGLGYRLRREGQVISHLLYMDDLKLFASNNLQLMELLMVTETFSSAIRMEFGLDKCAVMHVKRGEIMESVGTQLSDSIHLRSLCSTETYKYLGMSEALGINAADVKQSLRERFFGRLNKVLNSLLSGGNKVRAFNGWVMPVLMYSFGILKWTQTELDALDRRVRTLLTANRMHHPRSSVMRLYIPRKCGGRGFLNAKTLHNREVCSLRGYFLETDVGMHRDVVAVDKGLTPLSLANENWRKPIVMDTNERKEVWKGKELHGRFYRALHGPDVDLLASVSWLRFGDLFGETEGFVFAIMDEVMMTNNYRKYIVKDGTVDICRACHRPGESIRHIISGCSHLANGDYLYRHNLVARIIHQQLALKYNLVESEVPYYRYVPDPVFENGSVTLYWDRSIITDRTIVANKPDIVVIDRLERRTMIVDIAVPHDENLVKAEKDKQTKYLDLAREVVDMWEVDRAIIVPIVVTANGLIAKSLDQHLRRLSLGSWIKGLIQKAVLLDTARIVRRFLSQEP

SEQ ID NO: 30460 - protein, 1200 aa, Mythimna ferrago
MLTRSRARSQIAQPTSSGSSLSSASQPPGPAPAVSPEIPVAAVASSSSDEYFSPPTTPPPARRRGRGRPPACLGPRGPPASDRVLAAGGSVQRMRWTQSINENVMRSYFGATEGGNNLTAYRGRMLSLFQVLEPAVNVSAQRLSDQVRVIQRNRMLDDAVLDRLRLESRNGRVSPISPPAAVQRQPSVSPRPDHVGEDDDDGAISVSTQCNARLRSALEDAFREYRSIPPELRPRLPRLPMHRKNRALVCALDSQLSNCFDSSEDLIDTHSILYCAAAAACRVAHVKIPNNDRATRPAKPAWQCRIERRIGEARALIGKLICFREGNTRPRVMRFVRRAFSGTDISPRDYLPRITERIDFLKQKVYAWANRIRRYKRRVERYTQNHTFQSNERWVYRAWERPDQSVIDTRLPDDDAMYSFWRSIWSVPVNHTEGDWTREIERVCELVPEMGAINISPQDVARAVRPLPNWKSPGPDGLHNFWLKWFQSSHARLAFQFQSALESGSLPQFLTTGITHLLHKSGSTAEPKNYRPITCLPTVYKVLTSILRAKINNHVETNSIMSASQNGCRNGSRGTKELLLIDVAISQQVRRSRRDLSTCWIDYKKAYDSVPHTWLMRVLELYKVDATLRAFLMSCMGQWRTVLHYPGCRRVSENSEPLRIERGIFQGDSLSPLWFCLALNPLSTLLEGSGLGYRLRREGQVISHLLYMDDLKLFASNNLQLMELLKVTETFSSAIRMEFGLDKCAVMHVKRGEIMESVGTQLSDSIHLRSLCSTESYKYLGMSEALGINAADVKQSLRERFFGRLNKVLKSLLSGGNRVRAFNGWVMPVLMYSFGILKWTQTELDALDRRVRTLLTANRMHHPRSSVMRLYIPRKCGGRGFLNAKTLHNREVCSLRKYFLETDVGMHRDVVAVDKGLTPLSLANENWRKPIVMDINERKEVWKGKELHGRFYRALHGPDVDLLASVSWLRFGDLFGETEGFVFAIMDEVMMTNNYRKYIVKDGTVDICRACHRPGESIRHIISGCSHLANGDYLHRHNLVARIIHQQLALKYNLVESEVPYYRYVPDPVLENGSVTLYWDRSIITDRTIVANKPDIVVIDRLERHTMIVDIAVPHDENLVKAEKDKQTKYLDLAREVVDMWEVDRAIIVPIVVTANGLIAKSLDQHLRRLSLGSWIKGLIQKAVLLDTARIVRRFLSQEP

SEQ ID NO: 30461 - protein, 1209 aa, Xestia xanthographa
MITRSRAKLHQEAHPPSPGSSLSSASQPPGRATPVSIVSPVAAVASSSSDEFFSPPSTPSPSPRRGSRRGRGRPPAGLGPRGQQAPSRVPAAGGNVSRIRWTQSMNENVMRAYYGATEGGINLTAYRGRMLSLFQVLEPGVSASAQRLSDQVRVIQRNHMLDDTVLDRLRSESRSNLVTPASPMIAVQQQNIPSAPPRSDYDGEEDRDEVISVSTQCNAQLRSALEGAFREYRSTPPELRPRLPRLPMHNKNKALMCALDSQLSNCFDSSKDLADTHSLLYCGAVAACRVAHVKFPNNDRATRPKLAVPAWQCRIERRIGEARALIGKLICFREGNTRPRVMRFVRRAFSGTNISFRDYLARVTERIDSLKQKICAWASRIRRYKRRVERYTQNRTFKSDERWVYRAWERPDQGVTDTRLPDDSVMYSFWRNIWSVPVSHTEGDWTREVEQACDPIPQMGAIIISPQDVARAVRPLPNWKSPGPDGLHNFWIKWFQRSHARLASQFQSALESGSLPQFLTTGITHLLHKSGSAAEPKNYRPITCLPTVYKVLTSILRAKINQHIDSNSIMSASQNGCRNGSRGTKELLLIDMAISQQVRRSRKNLSTCWIDYKKAYDSVPHTWLMRVLELYKIDATLRTFLMSCMGHWRTVLRYPGCRQIQGNSESIRIERGIFQGDSLSPLWFCLALNPLSTLLERSGLGYLLRRDGQVISHLLYMDDLKLFAPNNLQLMKLLKVTETFSSAIRMEFGVDKCAVMHVKRGEIMESEGTQLSDSIHLRSLSSTETYKYLGMSEALGINTADMKQSLRERFFDRLNKVLGSLLSGGNKVRAFNGWVMPVLMYSFGILKWTQTELDALDRRVRTLLTANRMHHPRSSVMRLYIPRKCGGRGFLNAKTLHNREVYSLREYFLEAEGEMHRDVVSVDKGLTPLSLANENWRKPKVLDTNDRRVEWQGKELHGRFYRALHGPDVDFLASVSWLRFGDLFGETEGFICAIMDEVMMTNNYRKYIVKDGTVDICRACHRPGESIRHIISGCSSLANGEYLHRHNLVARIIHQQLALKYNLVESEVPYYKYVPDPVLDNGHITLYWDRPITTDRTVVANRPDIVVIDRLERRAMIVDITIPHDENLVKAEKDKQFKYLDLAREVVDMWDVNTAVIVPIVVSANGLIAKSLDQHLRRLSLGSWIKGLIQKAVLLDTARIVRRFLSQEP

SEQ ID NO: 30462 - protein, 1228 aa, Omphaloscelis lunosa
MLTRSATRRAHPPPPDSSLSSASPPSIPNPTVNVVTTPAAAVASSSSDEYFSPPTSPTPVRRQGRGRPPAGLGLRGQQAPNRVPAAGGNVSRIRWTQSMNENVMRAYYGATEGGINLTAYRSRMLSLFQVLEPTINVSAQRLSDQVRVIQHNHRLDNATLDRLRLEMQNSFASNPPPSQNVVQAPAAVPLQANQHAEEEDGRAISADNLCNVELRSALEDAIREYRFTSPDLRPRLPRLPMNKRNRALVCALDALLPNFIESSANLCDTHSILYCTAVAACRIARVKFPNTDRSVRPKPVAPAWQCRIECRINEARVLIGKLICFREGNTRPRVMRFVRRAFSGTSISPREYVSHVTERIDFLKQKVYAWANRIRRYRRRVDRYTQNRMFQNDERWVYRTWERPTPNQGVTDTRLPDSDAMKAFWQSIWSVPVSHTEGDWMRVVEQACDPIPHMEAISITPLDVARAVRPLPNWKSPGPDGLHNFWLKWLQRSHTCLATQFQSSLDTGSLPLFFTTGVTHLLHKSGSTAEPKNYRPITCLPTIYKVLTSILRAKISHHINNNLIMSVSQNGCKNGSRGTKELLLIDMTISQQVRKSRKDLSTCWIDYKKAYDSVPHTWLMRVLELYKIDATLRTFLMSCMRQWRTVLLYPGCRQIRGIDEPIRIERGIFQGDSLSPLWFCLALNPLSTLLEDAGLGYRLRRGGQVISHLLYMDDLKLFAPNNLRLMELLKITETFSSAIRMEFGVDKSAVMHVKRGEIMESVGTQLADSIHLRSLSSTETYKYLGMSEALGINVTDMKQSLKERFFGRLNKVLNSLLSSGNKVRAFNGWVMPVLMYSFGILKWTQTELDALDRKVRTLLTANRMHHPRSSVMRLYIPRKCGGRGFLNAKTLHNREIYSLREYFLQTNVGMHRDVVAVDKGLTPLSLAKENWRKPAVLDTNDRKEIWQGKELHGRFFRALHGPDVNFLTSVSWLRFGDLFGETEGFVCAIMDEVIMTNNYRKYIVKDGTVDICRACHQPGESIRHIVSGCSRLANGEYLHRHNLVARIIHQQLALQYNLIESEVPYYRYVPDPVLENGHTTLYWDRSIITDRTIVANKPDIVVIDRRERRAMIVDIAVPHDENLVKAEKDKKIKYLDLAHEVIDMWDVDSAIIVPIIVTVNGLIAKSLDQHLRRLSLRGWIKGLIQKAVLLDTARIVRRFLSRALTTGILDPVPDADGPLFFIFSNVFF

SEQ ID NO: 30463 - protein, 1211 aa, Xestia xanthographa
MSPMLTRHRAKLQKEAHPPSPGSSLSSASQPPGRATPVSSVSPVAAVASSSSDEFFSPPSTPPPPPRGRRRGRGRPPAGLGPRGQQAPSRVPAAGGNVSRMRWTQSMNENVMRAYYGATEGGSNLTAYRSRMLSLFQVLEPAVSVEAQRLSDQVRVIQRNHMLDDTVLDRLRSESRSNLVTPASPMIAVQQQNIPSAPPRSNYDGEEDRDEVISVSTQCNAQLRSALEGAFREYRSTPPELRPRLPRLPMHNKNKALMCALDSQLSNCFDSSKDLTDTHSILYCGAVAACRVAHVKFPNNDGATRPKLAVPAWQCRIERRIGEARALIGKLICFREGNTRPRVMRFVRRAFSGTDISFRDYLARVTERIDSLKQKICAWASRIRRYKRRVERYTQNRAFQSDERWVYRAWERPDQGVTDTRLPDDSAMYSFWRNIWSVPVSHTEGDWTREVEQACDPIPEMGAIIISPQDVARAVRPLPNWKSPGPDGLHNFWIKWFQRSHARLASQFQSALESGSLPQFLTTGITHLLHKSGSAAEPKNYRPITCLPTVYKVLTSILRAKINQHIDSNSIMSASQNGCRNGSRGTKELLLIDMAISQQVRRSRKNLSTCWIDYKKAYDSVPHTWLMRVLELYKIDATLRTFLMSCMGHWRTVLRYPGCRQIQGNSEPIRIERGIFQGDSLSPLWFCLALNPLSTLLERSGLGYLLRRDGQVISHLLYMDDLKLFAPNNLQLMKLLKVTETFSSAIRMEFGVDKCAVMHVKRGEIMESEGTQLSDSIHLRSLSSTETYKYLGMSEALGINTADMKQSLRERFFGRLNKVLGSLLSGGNKVRAFNGWVMPVLMYSFGILKWTQTELDALDRRVRTLLTANRMHHPRSSVMRLYIPRKCGGRGFLSAKTLHNREVYSLREYFLEAEGEMHRDVVSVDKGLTPLSLANENWRKPKVLDTNDRKVEWQGKELHGRFYRALHGPDVDFLASVSWLRFGDLFGETEGFICAIMDEVMMTNNYRKYIVKDGTVDICRACHRPGESIRHIISGCSSLANGEYLHRHNLVARIIHQQLALKYNLVESEVPYYKYAPDPVLDNGHITLYWDRPITTDRTVVANRPDIVVIDRLERRTMIVDITIPHDENLVKAEKDKQFKYLDLAREVVDMWDVGTAVIVPIVVSANGLIAKSLDQHLRRLSLGSWIKGLIQKAVLLDTARIVRRFLSQEP

SEQ ID NO: 30464 - protein, 968 aa, Amphipyra berbera
MHRKNRALMCALDSLLSSYFDNSENLEDTHSILYCAAVAACRVAHAKFDNNDKTTRPKPAVPAWQCRIERRINEARALIGKLICFREGNTRPRVMRFVRRAFSGTDINPRDYMSRVTERIDFLKQKVYAWANRIRRYKRRVERYTQNRMFHSDERWVYRTWERPDHDVNDTHPPDNDVMNTFWRNIWSMPVTHTEGDWMQEVQRACEPIEEMGDITIVPQDVTSAVRPMANWKSPGPDGLHNFWIKWLRSSHARLASQFQSSLESGSLPEFLTTGVTHLLHKSGSTAEPKNYRPITCLPTVYKLLTSILRAKINSHIINNSIMSVSQNGCKNGSRGTKELLLIDMAISQQVRRSRKDLSTCWIDYKKACDSVPHTWLMRVLELYKVNTTLCAFLTSCMGQWRAVLHYPGCRQIQGRGEPIRIERGIFQGDSLSPLWFCLALNPLSTLLEGSGLGYRLRRGGQVISHLLYMDDLKLFAPNNLQLMKLLKVTETFSNSIRMEFGVDKCAVMHVKRGGIMESVGTQLSDSIHLNSTVEERDLSSTETYKYLGMSEALGINVADMKQSLRERFYGRLKKVLKSLLSGGNKVRAFNGWVMPVLMYSFGILKWTQTELDALDRRVRALLTAYRMHHPRSSVMRLYIPRKCGGRGFLNAKTLHKREVCSLREYFLQADVGMHRDVAAVDKGFTPLSLAKENWRKPVVLDTNGRREVWQSKELHGRFYRALHGPDVDFLASVAWLRFGDLFGETEGFVCAIMDEVMMTNNYRKYIVKDGTVDICRACHCPGESIRHIISGCSRLANGEYLHRHNLVARIIHQQLALKYNLVDAEVPYYKYVPDPVLENGHITLYWDRSIITDRTIVANKPDIVVIDRSERLTMIVDVTVPHDENLVKAEKDKEIKYQDLAHEVVDMWEVDSAVIVPIVVTANGLIAKSLDQHLMRLSLGSWVKGLIQKAVLLDTARIVRKFLSLRP

SEQ ID NO: 30465 - protein, 1211 aa, Xestia xanthographa
MSPMLTRHRAKLQKEAHPPSPGSSLSSASQPPGRATPVSSVSPVAAVASSSSDEFFSPPSTPPPPPRGRRRGRGRPPAGLGPRGQQAPSRVPAAGGNVSRMRWTQSMNENVMRAYYGATEGGSNLTAYRSRMLSLFQVLEPAVSVEAQRLSDQVRVIQRNHMLDDTVLDRLRSESRSNLVTPASPMIAVQQQNIPSAPPRSDYDGEEDRDEVISVSTQCNAQLRSALEGAFREYRSTPPELRPRLPRLPMHNKNKALMCALDSQLSNCFDSSKDLTDTHSILYCGAVAACRVAHVKFPNNDGATRPKLAVPAWQCRIERRIGEARALIGKLICFREGNTRPRVMRFVRRAFSGTDISFRDYLARVTERIDSLKQKICAWASRIRRYKRRVERYTQNRTFQSDERWVYRAWERLDQGVTDTRLPDDSAMYSFWRNIWSVPVSHTEGDWTREVEQACDPIPEMGAIIISPEDVARAVRPLPNWKSPGPDGLHNFWIKWFQRSHARLASQFQSALESGSLPQFLTTGITHLLHKSGSAAEPKNYRPITCLPTVYKVLTSILRAKINQHIDSNSIMSASQNGCGNGSRGTKELLLIDMAISQQVRRSRKNLSTCWIDYKKAYDSVPHTWLMRVLELYKIDATLRTFLMSCMGHWRTVLRYPGCRQIQGNSEPIRIEHGIFQGDSLSPLWFCLALNPLSTLLERSGLGYLLRRDGQVISHLLYMDDLKLFAPNNLQLMKLLKVTETFSSAIRMEFGVDKCAVMHVKRGEIMESEGTQLSDSIHLRSLSSTETYKYLGMSEALGINTADMKQSLRERFFGRLNKVLGSLLSGGNKVRAFNGWVMPVLMYSFGILKWTQTELDALDRRVRTLLTANRMHHPRSSVMRLYIPRKCGGRGFLSAKTLHNREVYSLREYFLETEGEMHRDVVSVDKGLTPLSLANENWRKPKVLDTNDRKVEWQGKELHGRFYRVLHGPDVDFLASVSWLRFGDLFGETEGFICAIMDEVMMTNNYRKYIVKDGTVDICRACHRPGESIRHIISGCSSLANGEYLHRHNLVARIIHQQLALKYNLVESEVPYYKYAPDPVLDNGHITLYWDRPITTDRTVVANRPDIVVIDRLERRTMIVDITIPHDENLVKAEKDKQFKYLDLAREVVDMWDVGTAVIVPIVVSANGLIAKSLDQHLRRLSLGSWIKGLIQKAVLLDTARIVRRFLSQEP

SEQ ID NO: 30466 - protein, 906 aa, Sesamia nonagrioides
MRFVRRAFSGTDISTRDYLFRVTERIDFFKQKIYAWANRIRRYRRRVERYSQNRNFHSDERRVYRAWERSDQGVTDKCLPDDDAMSSFWRNIWSVPVSHTEGVWTRNVERACDPIPEMGAITICPQDVARAVRPLPNWKSPGPDGLHNFWIKWFSRSHALLASQFQTALESGSLPQFLTTGITHLLHKSGSTAEPKNYRPITCLPTVYKVLTSILKAKINTHIDSNSIMSASQNGCGNGSRGTKELLLIDMVISQQVRRSRKDLSTCWIDYKKAYDSVPHTWLMRVLELYKVHATLRTFLLTCMAQWRTVLLYPGCRNIQRNSEPIRIERGIFQGDSLSPLWFCLALNPLSTLLENSGLGYRLKRDGQVISHLLYMDDLKLFAPNDLQLRELLKITQTFSSAIRMEFGVDKCAVMHVQRGEIVESVGTQRTGSINLRSLSAAETYKYLGMSEALGINVTDMKQSLKERFFGRLKKVLNSLLSGGNKVRAFNGWVMPALMYSFGILKWTQTELDALDQRVRTLLTANRLHHPRSSVMRLYISRKCGGRGFLNAKALHNREICSLREYFLKTDVGMHRDVVAVDKGLTPLSLAKENWRKPVVLETNDRMEVWQSKELHGRFFRALHGPDVDFQASVAWLRFGDLFGETEGFVCAIMDEVMMTNNYRRFIVKDGTVDICRACHRPGESIRHIISGCSRLANGEYLHRHNLVARIIHQQLALKYNLVESEVPYYRYVPDPVLENGHITLYWDRSIITDRTIVANKPDIVMVDRSERRAMIVDITIPHDENHVKAEKDKQIKYLDLAHEVVDMWEVDSAIIVPIVVTANGLIAKSLDQHLRRLSLGSWIKGLIQKAVLLDTARIVRKFLSALTAGSLDPVPDTGGLLFFIFLNVFVFFVQIFKNVNYMLEK

SEQ ID NO: 30467 - protein, 953 aa, Mamestra configurata
MLDDAVLDRLRLESRNSRVSAASPPAAVQIQSSVSPRPNNVGEDDDDGAISVSTQCNERLRSALEDAFREYRSTPPELRPRLPRLPMHNKNRALVCALDSQLANCFDSSEDLADTHSILYCAAAAACRVAHVKFPNSDRATRPAVPAWQCRIERRIGEARALIGKLICFREGNTRRRVMRFVRRAFSGTDTSPRDYLTRVTERIDFLKQKIYAWANRIRRYKRRVERYTQNRTFQSNERWVYRAWERPDQGVTDTRLPDDDVMCSFWRNIWSVPVSHTEGDWTREVERACDPIPEMGAITISPQDVARAVRPLPNWKSPGPDGLHNFWIKWFKRSHARLASQFQSALESGSLPQFLTTGITHLLHKSGSTAEPKNYRPITCLPTVYKVLTSILRAKINQHIETNSIMSASQNGCRNRSRGTKELLLIDVAISQQVRRSRRDLSTCWIDYKKAYDSVPHTWLMRVLELYKVDAVLRTFLMSCMGQWRTVLRYPGCRQIQANSDPIRIERGIFQGDSLSPLWFCLALNPLSTLLEGSGQGYRLRRGGQVISHLLYMDDLKLFAPNNLQLMKLLKVTETFSSAISMEFGVDKCAVMHVKRGEIMESVGTQLSDSIHLRSLSSTETYKYLGMSEALGINANDVKQSLKERFFGRLNKVLNSLLSGGNKVRAFNGWVMPVLMYSFGILKWTQTELDALDRRVRSLLTANRMHHPRSSVMRLYIPRKCGGRGFLNAKTLHNREICSLREFFLEADVGMHRDVVAVDKGLTALSLANENWRKPVVLDTNDRREVWQSKELHGRFYRVLHGPDVDFLASVAWLRFGDLFGETEGFFCAIMDEVMMTNNYRKYIMKDGTVDICRACHRPGESIRHIISGCSSLANGDYLHRHNLVARIIHQQLALKYNLVESEVPYYRYVPDPVLENGNCTLYWDRSIITDRTIVANKPDIVLIDRLERNDC

SEQ ID NO: 30468 - protein, 1205 aa, Noctua janthe
MLTRSRAKHQAHPPSPDSSLSSASQPPGRASIVSAVSPIAAVASSSSDEFFSPPSTPSPPRRRGRGRPPAGLRPRGQQAPNRVPAAGGNVSRMRWTQSINENVMRAYYGATEGGSNLTAYRGRMLSLFQVLEPGVSVSAQRLSDQVRVIQRNHMLDDTVLERLRFDSRSNLVIPASPMIAVQLQNVSSAPPRSERDGEEDDDEVISVSTQCNAQLRSALEGAFREYRSTPLELRPRLPRLPMHKKNKALVCALDSQLSNCFDSSKDLTDTHSILYCGAVAACRVAHVKFPNNDRATRPKFAVPAWQCRIERRVGEARALIGKLICFREGNTRPRVMRFVKRAFSGTDISFRDYLARVTERIDFLKQKICAWASRIRRYKRRVERYTQNRTFRSDERWVYRAWERPDQGVTDTRLPDDDAMCSFWRNIWSVPVSHTEGDWTREVERACHPIPEMGAIIISPQDKARAVRPLPNWKSPGPDGLHNFWIKWFQRSHVRLASQFQSALESGSLPQFLTTGITHLLHKSGSTAEPKNYRPITCLPTVYKVLTSILRAKINHHIDSNSIMSASQNGCRNGSRGTKELLLIDMAIRQQVHRSRRDLSTCWIDYKKAYDSVPHTWLMKVLELYKVDVTLRTFLMSCMGYWRTVLRYPGCRQIQGNSEPIKIERGIFQGDSLSPLWFCLALNPLSTLLEGSGLGYRLRRGGQVISHLLYMDDLTLFAPNNLQLMKLLKVTETFSSAIRMEFGVDKCAVMHVKRGEIMESVGTQLSDSIHLRSLSSTETYKYLGMSEALGINTADMKQSLRDLFFGRLNKVLSSLLSGGNKVRDFNGWVMPVLMYSYSFGILTWTQTELDALDRRVRALLTANRMHHPRSSVMRLYIPRKCGGRGFLNAKTLHNREICSLREYFLEVDEGMHRDVVSVDKGLTPLSLANENWRKPRVLDTNDRKEVWQGKELHGRFYRALHGPDVDFLASVSWLRFSDLFGETEGFVCAIMDEVMMTNNYRKYIVKDGTVDICRACHRPGESIRHIISGCSRLANGEYLHRHNLVARIIHQQLALKYNLVESEVPYYKYAPDPVLDNGNITLYWDRSIITDRTIVANKPDIVVIDRLERRAMIVDITVPHDENLVKAEKDKQFKYLDLAREVVDMWDVSTAVIVPIVVSANGLIANSLDKHLRRLSLGSWIKGLIQKAVLLDTARIVRRFLSQEP

SEQ ID NO: 30469 - protein, 953 aa, Mythimna ferrago
MEIIIIIIIINCFDSSEDLIDTHSILYCAAAAACRVAHVKIPNNDRATRPAKPAWQCRIERRIGEARALIGKLICFREGNTRPRVMRFVRRAFSGTDISPRDYLPRITERIDFLKQKVYAWANRIRRYKRRVERYTQNHTFQSNERWVYRAWERPDQSVIDTRLPDDDAMYSFWRSIWSVPVNHIEGDWTREIERVCELVPEVGAINISPQDVARAVRPLPNWKSPGPDGLHNFWLKWFQSSHARLAFQFQSALESGSLPQFLTTGITHLLHKSGSTAEPKNYRPITCLPTVYKVLTSILRAKINNHIETNSIMSASQNGCRNGSRGTKELLLIDVAISQQVRRSQRDLSTCWIDYKKAYDSVPHTWLMRVLELYKVDATLRAFLMSCMGQWRTVLHYPGCRRDSENSEPLRIERGIFQGDSLSPLWFCLALNPLSTLLEGSGLGYRLRREGQVISHLLYMDDLKLFASNNLQLMELLKVTETFSSAIRMEFGLDKCAVMHVKRGEIMESVGTQLSDSIHLRSLCSTETYKYLGMSEALGINAADVKQSLRERFFGRLNKVLKSLLSGGNKVRAFNGWVMPVLMYSFGILKWTQTELDALDRRVRTLLTANRMHHPRSSVMRLYIPRKCGGRGFLNAKTLHNREVCSLRKFFLETDVGMHRDVVAVDKGLTPLSLANENWRKPIVMDINERKEVWKGKELHGRFYRALHGPDVDLLASVSWLRFGDLFGETEGFVFAIMDEVMMTNNYRKYIVKDGTVDICRACHRPGESIRHIISGCSHLANGDYLHRHNLVARIIHQQLALKYNLVESEVPYYRYVPDPVLENGSVTLYWDRSIITDRTIVANKPDIVVIDRLERHTMIVDIAVPHDENLVKAEKDKQTKYLDLAREVVDMWEVDRAIIVPIVVTANGLIAKSLDQHLRRLSLGSWIKGLIQKAVLLDMARIVRRFLSQEP

SEQ ID NO: 30470 - protein, 1033 aa, Noctua fimbriata
MRAYYGATEGGSNLTAYRGRMHSLFQVLEPGVSVTAQRLSDQVRVIQRNHTLDDTVLDRLRSESRSNLITPASPMTAVQLQNVTNASPRSDRGGEGDDDEVISVSTQCNAQLRSALESVFREYRSTPPELRPRLPRLPMHKKNKALVCALDSQLSNCFDTSKDLADTHSILYCGAVAACRVAHVKFPNNDRAARQKLAVPAWQCRIERRIGEARALIGKLICFREGNTRPRVMRFVRRAFSGTDVSFRDYLARVTERIDFLKQNICAWESRIRRYMRRVERYTQNRTFQSDERWVYSAWERPDQGVTDTRLPDDDAMCSFWRSIWSVPVSHTKGDWIREVERTCDPIPEMGAIIISPQDVACAVRPLPNWKSPGPDGLHNFWIKWFQRSHVRLASQFQLALESGSLPQFLTIGITHLLHKSGSTAEPKNYRPITCLPTVYKVLTSILRAKINHHIDSNSIMSASQNGCRNGSRGTKELLLIDMAVSQQVRRSRRDLSTCWIDYKKAYDSVPHTWLMRVLELYKVDATLRTFLMSCMGHWRTVLRYPGCRQMQGNSEPIRIDRGIFQGDSLSPLWFCIALNPLSTLLEGSGLGYRLSSDGQVISHLLYMDDLKLYAPNNLQLMKLLKVTETFSSSIRMEFGVDKCAVMHVKQGEIMESVGTQLSDSIHLRSLSSTETYKYLGMSEALGINTADMKQSLREFGRLNKVLSSLLSGGNKVRAFNGWVMPVLMYSFGILKWNQTELDALDRVRVLLTANRMHHPRSSVMRLYIPRKCGGRGFLNAKTLHNREVCSLREYFLEVDVGMHRDVVSVDKGLTPLSLANEKWRKPRVLDTNDRKEVWQGKELHGRFYRALHGPDVDFLASVAWLRSGDLFGETEGFVCAIMDEVMMTNNYRKYIVKDGTVDICRACHRPGESIRHIISGCSRLANGEYLHRHNLVAKIIHQQLALKYNLVESEVPYYKYVPDPVLDDGNITLYWDRSIVTDRTIVANKPDIVVIDRLERRAMIVDITVPHDENLVKAEKDKKKKKDKKFNI

SEQ ID NO: 30471 - protein, 1103 aa, Mythimna ferrago
MRWTQSINENVMRSYFGATEGGTNLTAYRGRMLSLFQVLEPAVNVSAQRLSDQVRNRMLDDAVLDRLRLESRNGRVSPVSPPAAVQRQPSVSPRPYHVGEDDDDGAISVSTQCNVRLRSALEDAFWEYRSIPPELRPRLPRLPMHRKNRALVCALDSQLSNCFDSSEDLTDTHSILYCAAAAACRVAHVKIPNSDRATRPAKPAWQCRIERRIGEARALIGKLICFREGNTRPRVMRFVRRAFSETDISPRDYLPRITERIDFLRQKVYAWANRIRRYKRRVERYTQNRAFQSNERWVYRAWERPDQSVIDTRLPNDDAMYSFWRSIWSVPVNHTEGDWTRKVERECELLPEMGAVTISPQDVARAVRPLPNWKSPGPDGLHNFWLKWFKSSHARLASQFQSALESGSLPQFLTTGITHLLHKSGSTAEPKNYRPITCLPTVYKVLTSILTAKINSHIETNSIMSASQNGCRNGSRGTKELLLIDVAISQQVRRSRRDLSTCWIDYKKAYDSVPHTWLMRVLELYKIDVTLRTFLMSCMGQWRTVLHYPGCRRVSDNSEPLRIERGIFQGDSLSPLWFCLALNPLSTLLEGSGVGYRLRREGQVISHLLYMDDLKLFASNNLQLMELLKVTETFSSAIRMEFGLDKCAVMHVKRGEIMESVGTQLSDSIHLRSLCSTETYKYLGMSEALGINAADVKQSLRERFFGRLNKVLKSLLSGGNKVRAFNGWVMPVLMYSFGILKWTQTELDALDRRVRTLLTANRMHHPRSSVMRLYIPRKCGGRGFLNAKTLHNREVCSLRKYFLETDVGMHRDVVAMDKGLTPLSLANENWRKPIVMDINERKEVWKGKELHGRFYRALHGPDVDLLASVSWLRFGDLFGETEGFVFAIMDEVMMTNNYRKYIVKDGTVDICRACHRPGESIRHIISGCSHLANGDYLHRHNLVARIIHQQLALKYNLVESEVPYYRYVPDPVLENGSVTLYWDRSIITDRTIVANKPDIVVIDRLERRTMIVDIAVPHDENLVKAEKDKQTKYLDLAREVVDMWEVDRAIIVPIVVTANGLIAKSLDQHLRRLSLGSWIKGLIQKAVLLDTARIVRRFLSQEP

SEQ ID NO: 30472 - protein, 1196 aa, Mythimna impura
MLTRSRARSQNTHPTSSGSSLSSASQPPGPAPTVSPEIPVAAVASSSSDKYFSPPTTPPPARRRGRGRPPASLGPRGPPASDRVPAAGGSVQRMRWTSSINENVMRSYFGATEGGINLTTYRGRMLSLFQVLEPAVNVSVQRLSDQVRVIQRNRMLDDAVLDRLRLESQSSRVSPATPPAAVQRLPTASPRPDHVGDADDDAAISVSTQCNDRLRGALEDAFREYRSTPPGLRPRLPRLPMHKRNRALVCALDSQLSNCFDSSEDLTDTHSILYCAAVAACRVAHVKFPNCDRATRPAWQCRIEHRIGEARALIGKLICFREGNTRPRVMRFVRRAFSGTDISPRDYLPCVTERIDFLKQKIYAWANRIRRYKRRVERYTQNRTFQSNERWVYRDWERPDQGVTDTRLPDDDAMCSFWRSIWSAPVSHTEGDWIREVERACDLLPEMGAITISPQDVTRAVRPLPNWKSPGPDGLHNFWLKWFQRSHARLASQFQSALESGSLPQFLTTGITHLLYKSGSTAEPKNYRPITCLPTVYKVLTSILKAKINSHIETNSIMSASQNGCRNGSRGTKELLLIDVAISQQVRRSRKNLSACWIDYKKAYDSVSHTWLMRVLELYKVDATLRTFLMSCMGQWRTVLHYPGCRQIQENNEPIRIERGIFQGDSLSPLWFCLALNPLSTLLEGFGLGYRLKRGGQVISHLYMDDLKLFAPNNLQLVELLKVTETFSSAIRMEFGVGKCAVIHVKRGEIMESVGIQLSDSIHLRSLCSTETYKYLGMSQSLGINTDDVKQSLKERFFGRLNKVLNSLLSGGNKVRAFNGWVMPVLMYSFGILKWTQTELDALDRRVRTLLTANRMHHPRSSVMRLYIPRKCGGRSFLNAKTLHNREVCSLREYFLKTDVGMHRDVAAVDKGLTPLSLANVNWRKPIVLDTNVRREVWQSKELHGRFYRALHGPDVDLLASVSWLRFGDLFGETEGFVFAIIVEVMMTNNYRKYIVKDGTVDICRACHRPGESIRHIISGCSHLANGDYLHRHNLVARIIHQQLALKYNLVESEVPYYRYVPDPVLDNGNITLYWDRSIITDRTIVANKPDIVVIDRLERRTMIVDIAVPHDENLVKAEKDKQTKYLDLAREVVDMWEVDRAIIVPIVVTANGLIAKSLEQHLRRLSLGSWIEGFFFFFLLLIGSRLTTISPDGKR

SEQ ID NO: 30473 - protein, 1113 aa, Noctua fimbriata
MITRSRAKQLQEAHTPSPGSSLSSASQPPGRATSVSTVSPVAAVASSSSDEFFSPPSTPPPSPRRRGRGRPPAGLGPRGQPAPNRVPAAGGNVSRMRWTQSINEQVMRAYYGATEGGSNLTAYRGRMLSLFQVLEPGVSVSAQRLSDQVRVIQRNHMLDDTVLDRLRSESRSNLVTPASPMTAVQLQNVTIALPRSDHDGEGDDDEVISVSTQCNAQLRSALESAFREYRSTPPELRPRLPRLPMHKKNKALVCALDSQLSNCFDTSKDLADTHSILYCGAVAACRVAHVKFPNNDRATRPKLAVPAWQCRIERRIGEARALIGKLICFREGNTRPRVMRFVRRAFSGTDITFRDYLARVTERIDFLKQKICAWASRIRRYKRRVERYTQNRTFQSDERWVYRAWERPDQGVTDTRLPDDNAMCSFWRSIWSVPVSHTEGDWIREVERACDPIPEMGAIIISPQDVACAVRPLPNWKSPGPDGLHNFWIKWFQRSHVRLASQFQLALESVSLPQFLTTGITHLLHKSGSTAEPKNYRPITCLPTVYKVLTSILRAKINHHIDSNSIMSASQNGCRNGSRGTKELLLIDMAVSQQVRRSRRDLSTCWTDFKKAYDSVPHTWLMRVLELYKVDATLRTFLTSCMGHWRTVRTDKDRARYRDGQVISHLLYMDDLKLYAPNNLQLMKLLKVTETFSSSIRMEFGVDKCAVMHVKQGEIMESVGTQLSDSIHLRSLSSTETYKYLGMSEALGINTADMKQSLRERFFGRLNKVLSSLLSGGNKVRAFNGWVMPVLMYSFGILKWTQTELDALDRRVRVLLTANANRMHHPRSSVMRLYIPRKCGGRGFLNAQTLHNREVCSLREYFLEADVGMHRDVVSVDKGLTPLSLANENWRKPRVLDTNDRKEVLQGKELHGRFYRALHGPDVDFLASVAWLRFGDLFGETEGFVCAIMDEVMMTNNYRKYIVKDGTVDICRACHRPGESIRHIISGCSRLANGEYLHRHNLVAKIIHQQLALKYNLVESEVPYYKYVPDPVLDDGNNTLYWDRSIVTDRTIVANKPDIVVIDRLERRAMIVDITVPHDENLVKAEKDKLFKYLDLAHEVVDIWDVSAQSLCR

SEQ ID NO: 30474 - protein, 1200 aa, Mythimna ferrago
MLTRSRARQQQTHPTSSDSPFSSASQPPGPAPAVSPVIPVAAVASSSSDEYFSPPTTPPPARRRGRGRPPACLGPRGPPASGGVPAAGGSVQRMRWTQSINENVMRSYFGATEGGTNLTAYRGRMLSLFQVLEPAVNVSAQRLSDQVRVIQRNRMLDDAVLDRLRLESRNGRVSPVSPPAAVQLQPSVSPRPDHVGEDDDDGAISVSTQCNARLRSALEDAFREYRSIPPELRPRLPRLPMHRKNRALVCALDSQLSNCFDSSEDLTDTHSILYCAAAAACRLAHAKIPNSDRATRPVKPAWQCRIERRIGEARALIGKLICFREGNTRPRVMRFVRRAFSGTDVSPRDYLPRITERIDFLRQKVYAWANRIRRHKRRVERYTQNRAFQSNERWVYRAWERPDQSVIDTRLPDDDAMYSFWRSIWSVPVSHTEGDWTRGVERECELIPEMGAITISPQDVARAVRPLPNWKSPGPDGLHNFWLKWFKSSHARLASQFQSALESESLPQFLTTGITHLLHKSGSNAEPKNYRPITCLPTVYKVLTSILRAKINSHIETNSIMSASQNGCRNGSRGTKELLLIDVAISQQVRRSRRDLSTCWIDYKKAYDSVPHTWLMRVLELYKIDVTLRTFLMSCMGQWRTVLHYPGCRRVSENSEPLRIERGIFQGDSLSPLWFCLALNPLSTLLEGSGLGYRLRREGQVISHLLYMDDLKLFASNNLQLMELLKVTETFSSAIRMEFGLDKCAVMHVKRGEIMESVGTQLSDSIHLRSLSSTETYKYLGMSKALGINAADVKQSLRERFFCRLNKVLKSLLSGGNKVRAFNGWVMPVLMYSFGILKWTQTELDALDRRVRTLLTANRMHHPRSSVMRLYIPRKCGGRGFLNAKTLHNLEVCSLREYFLETDVGMHRDVVAVDKGLTPLSLANENWRKPIVMDTNERKEVWKGKELHGRFYRALHGPDVDLLASVSWLRFGDLFGETEGFVFAIMDEVMMTNNYRKYIVKDGTVDICRACHRPGESIRHIISGCSHLANGDYLHRHNLVARIIHQQLALKYNLVESEVPYYRYVPDPVLENGSVTLYWDRSIITDRTIVANKPDIVVIDRLERRTMIVDIAVPHDENLVKAEKDKQTKYLDLAREVVDMWEVDRAIIVPIVVTANGLIAKSLDQHLRRLSLGSWIKGLIQKAVLLDTARIVRRFLSQEP

SEQ ID NO: 30475 - protein, 1044 aa, Sesamia nonagrioides
MLDDTVLDRLRNEMQSSRIIAHQSQTAEIPPQPTNYADEGSNDRATNVSTQCNEELINALEAAIREYRFTPAEQRPRLPRLPMHNRNKALMAALDAQLSDYFDTCEDLTDTHSILYCAAVAACRVAHVKFPSDSRATRPKPVVPAWQRRIERRIGGARALIGKLICFREGNTRPRVMRFVRRAFAGTNISPQNYMARVTERIDFLKQKVYAWANRIRRYKRRVERYTQNRTFQSNERWVYRDWERPEQGVTDTCLPDDDAMCSFWRSIWSVPVSHTEGDWARDVERACDPIPEMGAITICPQDVACAVRPLPNWKSPGPDGLHNFWIKWFPRSHARLASQFQTALVSGSLPQFLTTGITHLLHKSGSNAEPKNYRPITCLPTVYKVLTSILKTKINKHIDSNSIMSASQNGCKSGSRGTKELLLIDMAISQQVRRSRKDLSTCWIDYRKAYDSVPHTWLMRVLELYKVDATLRTFLMSCMKTWRIVLRYPGCRNIQRNSEPIRIERGIFQGDSLSPLWFCLALNPLSTLLEDSGLGYRLRRGGQVISHLLYMDDLKLFAPNNSQLRELLKITETFSSSIRMEFGVDKCAVMHVKRGEIMESVGTQLTDSINLRALSASETYKYLGMSEALGINVTDMKQSLKERFFGRLKKVLNSLLSGGNKVRAFNGWVMPVLMYSFGILKWTQTELDALDQRVRTLLTANRLHHPRSSVMRLYIPRKCGGRGFLNAKTLHNREVCSLRDYFLVTDVGMHRDVVAADKGLTPLSLAKENWRKPVVLDTNDRMEVWKSKELHGRFFRALHGPDVDFQASVAWLRFGDLFGETEGFVFAIMDEVMMTNNYRRFIVKDGTVDICRACHRPGESIRHIISGCSRLANGEYLHRHNLVARIIHQQLALKYNLVESEVPYYRYTPDPVLENGYITLYWDRSIITDRTIVANKPDIVMVDRSERRAMIVDITIPHDENLVKAEKDKQIKYLDLAHEVVDMWEVDSAIIVPIVVTANGLIAKSLDQHLRRLSLGSWIKGLIQKAVLLDTARIVRKFLSLEP

SEQ ID NO: 30476 - protein, 1200 aa, Mythimna ferrago
MLTRSRAQQLNAQLTTSGPLLSSASQPPGPAPAVSPEIPVAAVASSSSDEYFSPPTTPPPARRRGRGRPPACLGPRGPPASDRVPAAGGSVQRMRWTQSINENVMRSYFGATEGGTNLTAYRGRMLSLFQVLEPAVNVSAQRLSDQVRVIQRNRMLDDAVLDRLRLESRNGRVSPVSPPAAVQRQPSVSPRPDHVGEDDDDGAISVSTQCNVRLRSALEDAFREYRSIPPELRPRLPRLPMHRKNRALVCALDSQLSNCFDSSEDLTDTHSILYCAAAAACRVAHVKIPNSDRATRPAKPAWQCRIERRIGEARALIGKLICFREGNTRPRVMRFVRRAFSGTDISPRDYLPRITERIDFLRQKVYAWANRIRRYKRRVERYTQNRAFQSNERWVYRAWERPDQSVIDTRLPDDDAMYSFWRSIWSVPVNHTEGDWTRKVERECELLPEMGAVTISPQDVARAVRPLPNWKSPGPDGLHNFWLKWFKSSHARLASQFQSALESGSLPQFLTTGITHLLHKSGSTAEPKNYRPITCLPTVYKVLTSILRAKINSHIETNSIMSASQNGCRNGSRGTKELLLIDVAISQQVRRSRRDLSTCWIDYKKAYDSVPHTWLMRVLELYKIDVTLRTFLMSCMGQWRTVLHYPGCRRVSENSEPLRIERGIFQGDSLSPLWFCLALNPLSTLLEGSGVGYRLRREGQVISHLLYMDDLKLFASNNLQLMELLKVTETFSSAIRMEFGLDKCAVMHVKRGEIMESVGTQLSDSIHLRSLCSTETYKYLGMSEALGINAADVKQSLRERFFGRLNKVLKSLLSGGNKVRAFNGWVMPVLMYSFGILKWTQTELDALDRRVRTLLTANRMHHPRSSVMRLYIPRKCGGRGFLNAKTLHNREVCSLRKYFLETDVGMHRDVVAVDKGLTPLSLANENWRKPIVMEINERKEVWKGKELHGRFYRALHGPDVDLLASVSWLRFGDLFGETEGFVFAIMDEVMMTNNYRKYIVKDGTVDICRACHRPGESIRHIISGCSHLANGDYLHRHNLVARIIHQQLALKYNLVESEVPYYRYVPDPVLENGSVTLYWDRSIITDRTIVANKPDIVVIDRLERRTMIVDIAVPHDENLVKAEKDKQTKYLDLAREVVDMWEVDRAIIVPIVVTANGLIAKSLDQHLRRLSLGSWIKGLIQKAVLLDTARIVRRFLSQEP

SEQ ID NO: 30477 - protein, 1216 aa, Mythimna ferrago
MLTRSRARSQIAQPTSSGSSLSSASQPPGPAPAVSPEIPAAAVASSSSDEYFSPPTTPPPARRRGRGRPPACLGLRGPPASDRVPAAGGSVQRMRWTESINENVMRSYFGATEGGTNLTAYRGRMLSLFQVLEPAVNVSAQRLSDQVRVIQRNRMLDDAVLDRLRLESRNGRVTPISPPAAVQRQPSVSPRPDHVGEDDDDGAISVSTQCNARLRSALEDAFREYRSIPPELRPRLPRLPMHRKNRALVCALDSQLSNCFDLTDTHSILYCAAAAACRVAHVKIPNSDRATRPAKPAWQCRIERRIGEARALIGKLICFREGNTRPRVMRFVRRAFSGTDISPRDYLPRITERIDFLRQKVYAWANRIRRYKRRVERYTQNRAFQSNERWVYRAWERPDQSVIDTRLPDDDAMYSFWRSIWSVPVSHTEGDWTREVERECELIPEMGAITISPQDVARAVRPLPNWKSPGPDGLHNFWLKWFKSSHARLASQFQSALESGSLPQFLTTGITHLLHKSGSTAEPKNYRPITCLPTVYKVLTSILRAKINSHIETNSIMSASQNGCRNGSRGTKELLLIDVAISQQVRRSRRDLSTCWIDYKKAYDSVPHTWLMRVLELYKIDVTQRAFLMSCMGQWRTVLHYPGCRRVSENSEPLRIERGIFQGDSLSPLWFCLALNPLSTLLEGSGLGYRLRREGQVISHLLYMDDLKLFASNNLQLMELLKVTETFSSAIRMEFGLDKCAVMHVKRGEIMESVGTQLSDSIHLRSLSSTETYKYLGMSEALGINAADVKQSLRERFFGRLNKVLKSLLSGGNKVRAFNGWVMPVLMYSFGILKWTQTELDALDRRVRTLLTANRMHHPRSSVMRLYIPRKCGGRGFLNAKTLHNREVCSLREYFLETDVGMHRDVVAVDKGLTPLSLANENWRKPIVMDTNERKEVWKGKELHGRFYRALHGPDVDLLASVSWLRFGDLFGETEGFVFAIMDEVMMTNNYRKYIVKDGTVDICRACHRPGESIRHIISGCSHLANGDYLHRHNLVARIIHQQLALKYNLVESEVPYYRYVPDPVLENGSVTLYWDRSIITDRTIVANKPDIVVIDRLERRTMIVDIAVPHDENLVKAEKDKQTKYLDLAREVVDMWEVDRAIIVPIVVTANGLIAKSLDQHLRRLSLGSWIKGLIQKAVLLDTARIVRRFLSQEPRPPAAWTLFPMPVGYYFLYF

SEQ ID NO: 30478 - protein, 1200 aa, Mythimna ferrago
MLTRSRAQQLNAQLTTSGPSLSSASQPPGPAPAVSPEIPVAAVASSSSDEYFSPPTTPPPARRRGRGRPPACLGPRRPPASDRVPAAGGSVQRMRWTQSINENVMRSYFGATEGGTNLTAYRGRMLSLFQVLEPAVNVSAQRLSDQVRVIQRNRMLDDAVLDRLRLESRNGRVSPVSPPAAVQRQPSVSPRPDHVGEDDDDGAISVSTQCNVRLRSALEDAFREYRSIPPKLRPRLPRLPMHRKNRALVCALDSQLSNCFDSSEDLTDTHSILYCAAAAACRVAHVKIPNSDRATRPAKPAWQCRIERRIGEARALIGKLICFREGNTRPRVMRFVRRAFSGTDISPRDYLPRITERIDFLRQKVYAWANRIRRYKRRVERYTQNRAFQSNERWVYRAWERPDQSVIDTRLPDDDAMYSFWRSIWSVPVNHTEGDWTRKVERECELLPEMGAVTISPQDVARAVRPLPNWKSPGPDGLHNFWLKWFKSSHARLASQFQSALESGSLPQFLTTGITHLLHKSGSTAEPKNYRPITCLPTVYKVLTSILRAKINSHIETNSIMSASQNGCRNGSRGTKELLLIDVAISQQVRRSRRDLSTCWIDYKKAYDSVPHTWLMRVLELYKIDVTLRTFLMSCMGQWRTVLHYPGCRRVSENSEPLRIERGIFQGDSLSPLWFCLALNPLSTLLEGSGVGYRLRREGQVISHLLYMDDLKLFASNNLQLMELLKVTETFSSAIRMEFGLDKCAVMHVKRGEIMESVGTQLSDSIHLRSLCSTETYKYLGMSEALGINAADVKQSLRERFFGRLNKVLKSLLSGGNKVRAFNGWVMPVLMYSFGILKWTQTELDALDRRVRTLLTANRMHHPRSSVMRLYIPRKCGGRGFLNAKTLHNREVCSLRKYFLETDVGMHRDVVAVDKGLTPLSLANENWRKPIVMEINERKEVWKGKELHGRFYRALHGPDVDLLASVSWLRFGDLFGETEGFVFAIMDEVMMTNNYRKYIVKDGTVDICRACHRPGESIRHIISGCSHLANGDYLHRHNLVARIIHQQLALKYNLVESEVPYYRYVPDPVLENGSVTLYWDRSIITDRTIVANKPDIVVIDRLERRTMIVDIAVPHDENLVKAEKDKQTKYLDLAREVVDMWEVDRAIIVPIVVTANGLIAKSLDQHLRRLSLGSWIKGLIQKAVLLDTARIVRRFLSQEP

SEQ ID NO: 30479 - protein, 1200 aa, Mythimna ferrago
MLTRSRAQQLNAQLTTSGPSLSSASQPPGPAPAVSPEIPVAAVASSSSDEYFSPPTTPPPARRRGRGRPPACLGPRGPPASDRVPAAGGSVQRMRWTQSINENVMRSYFGATEGGTNLTAYRGRMLSLFQVLEPAVNVSAQRLSDQVRVIQRNRMLDDAVLDRLRLESRNGRVSPVSPPAAVQRQPSVSPRPDHVGEDDDDGAISVSTQCNVRLRSALEDAFREYRSIPSELRPRLPRLPMHRKNRALVCALDSQLSNCFDSSEDLTDTHSILYCAAAAACRVAHVKIPNSDRATRPAKPAWQCRIERRIGEARALIGKLICFREGNTRPRVMRFVRRAFSGTDISPRDYLPRITERIDFLRQKVYAWANRIRRYKRRVERYTQNRAFQSNERWVYRAWERPDQSVIDTRLPDDDAMYSFWRSIWSVPVNHTEGDWTRKVERECELLPEMGAVTISPQDVARAVRPLPNWKSPGPDGLHNFWLKWFKSSHARLASQFQSALESGSLPQFLTTGITHLLHKSGSTAEPKNYRPITCLPTVYKVLTSILRAKINSHIETNSIMSASQNGCRNGSRGTKELLLIDVAISQQVRRSRRDLSTCWIDYKKAYDSVPHTWLMRVLELYKIDVTLRTFLMSCMGQWRTVLHYPGCRRVSENSEPLRIERGIFQGDSLSPLWFCLALNPLSTLLEGSGVGYRLRREGQVISHLLYMDDLKLFASNNLQLMELLKVTETFSSAIRMEFGLDKCAVMHVKRGEIMESVGTQLSDSIHLRSLCSTETYKYLGMSEALGINAADVKQSLRERFFGRLNKVLKSLLSGGNKVRAFNGWVMPVLMYSFGILKWTQTELDALDRRVRTLLTANRMHHPRSSVMRLYIPRKCGGRGFLNAKTLHNREVCSLRKYFLETDVGMHRDVVAVDKGLTPLSLANENWRKPIVMEINERKEVWKGKELHGRFYRALHGPDVDLLASVSWLRFGDLFGETEGFVFAIMDEVMMTNNYRKYIVKDGTVDICRACHRPGESIRHIISGCSHLANGDYLHRHNLVARIIHQQLALKYNLVESEVPYYRYVPDPVLENGSVTLYWDRSIITDRTIVANKPDIVVIDRLERRTMIVDIAVPHDENLVKAEKDKQTKYLDLAREVVDMWEVDRAIIVPIVVTANGLIAKSLDQHLRRLSLGSWIKGLIQKAVLLDTARIVRRFLSQEP

SEQ ID NO: 30480 - protein, 1107 aa, Mythimna ferrago
MRWTQSINENVMRSYFGATEGGTNLTAYRGRMLSLFQVLEPAVNVSAQRLSDQVRVIQRNRMLDDAVLDRLRLESRNGRVSPVSPPAAVQRQPSVSPRPDHVGEDDDDGAISVSTQCNVRLRSALEDAFREYRSIPPELRPRLPRLPMHRKNRALVCALDSQLSNCFDSSEDLTDTHSILYCAAAAACRVAHVKIPNSDRATRPAKPAWQCRIERRIGEARALIGKLICFREGNTRPRVMRFVRRAFSGTDISPRDYLPRITERIDFLRQKVYAWANRIRRYKRRVERYTQNRAFQSNERWVYRAWERPDQSVIDTRLPDDDAMYSFWRSIWSVPVNHTEGDWTRKVERECELLPEMGAVTISPQDVARAVRPLPNWKSPGPDGLHNFWLKWFKSSHARLASQFQSALESGSLPQFLTTGITHLLHKSGSTAEPKNYRPITCLPTVYKVLTSILRAKINSHIETNSIMSASQNGCRNGSRGTKELLLIDVAISQQVRRSRRDLSTCWIDYKKAYDSVPHTWLMRVLELYKIDVTLRTFLMSCMGQWRTVLHYPGCRRVSENSEPLRIERGIFQGDSLSPLWFCLALNPLSTLLEGSGVGYRLRREGQVISHLLYMDDLKLFASNNLQLMELLKVTETFSSAIRMEFGLDKCAVMHVKRGEIMESVGTQLSDSIHLRSLCSTETYKYLGMSEALGINAADVKQSLRERFFGRLNKVLKSLLSGGNKVRAFNGWVMPVLMYSFGILKWTQTELDALDRRVRTLLTANRMHHPRSSVMRLYIPRKCGGRGFLNAKTLHNREVCSLRKYFLETDVGMHRDVVAVDKGLTPLSLANENWRKPIVMEINERKEVWKGKELHGRFYRALHGPDVDLLASVSWLRFGDLFGETEGFVFAIMDEVMMTNNYRKYIVKDGTVDICRACHRPGESIRHIISGCSHLANGDYLHRHNLVARIIHQQLALKYNLVESEVPYYRYVPDPVLENGSVTLYWDRSIITDRTIVANKPDIVVIDRLERRTMIVDIAVPHDENLVKAEKDKQTKYLDLAREVVDMWEVDRAIIVPIVVTANGLIAKSLDQHLRRLSLGSWIKGLIQKAVLLDTARIVRRFLSQEP

SEQ ID NO: 30481 - protein, 1200 aa, Mythimna ferrago
MLTRSRAQQLNAQLTTSGPLLSSASQPPGPAPAVSPEIPVAAVASSSSDEYFSPPTTPPPARRRGRGRPPACLGPRGPPASDRVPAAGGSVQRMRWTQSINENVMRSYFGATEGGTNLTAYRGRMLSLFQVLEPAVNVSAQRLSDQVRVIQRNRMLDDAVLDRLRLESRNGRVSPVSPPAAVQRQPSVSPRPDHVGEDDDDGAISVSTQCNVRLRSALEDAFREYRSIPPELRPRLPRLPMHRKNRALVCALDSQLSNCFDSSEDLTDTHSILYCAAAAACRVAHVKIPNSDRATRPAKPAWQCRIERRIGEARALIGKLICFREGNTRPRVMRFVRRAFSGTDISPRDYLPRITERIDFLRQKVYAWANRIRRYKRRVERYTQNRAFQSNERWVYRAWERPDQSVIDTRLPDDDAMYSFWRSIWSVPVNHTEGDWTRKVERECELLPEMGAVTISPQDVARAVRPLPNWKSPGPDGLHNFWLKWFKSSHARLASQFQSALESGSLPQFLTTGITHLLHKSGSTAEPKNYRPITCLPTVYKVLTSILRAKINSHIETNSIMSASQNGCKNGSRGTKELLLIDVAISQQVRRSRRDLSTCWIDYKKAYDSVPHTWLMRVLELYKIDVTLRTFLMSCMGQWRTVLHYPGCRRVSENSEPLRIERGIFQGDSLSPLWFCLALNPLSTLLEGSGVGYRLRREGQVISHLLYMDDLKLFASNNLQLMELLKVTETFSSAIRMEFGLDKCAVMHVKRGEIMESVGTQLSDSIHLRSLCSTETYKYLGMSEALGINAADVKQSLRERFFGRLNKVLKSLLSGGNKVRAFNGWVMPVLMYSFGILKWTQTELDALDRRVRTLLTANRMHHPRSSVMRLYIPRKCGGRGFLNAKTLHNREVCSLRKYFLETDVGMHRDVVAVDKGLTPLSLANENWRKPIVMEINERKEVWKGKELHGRFYRALHGPDVDLLASVSWLRFGDLFGETEGFVFAIMDEVMMTNNYRKYIVKDGTVDICRACHRPGESIRHIISGCSHLANGDYLHRHNLVARIIHQQLALKYNLVESEVPYYRYVPDPVLENGSVTLYWDRSIITDRTIVANKPDIVVIDRLERRTMIVDIAVPHDENLVKAEKDKQTKYLDLAREVVDMWEVDRAIIVPIVVTANGLIAKSLDQHLRRLSLGSWIKGLIQKAVLLDTARIVRRFLSQEP

SEQ ID NO: 30482 - protein, 1206 aa, Noctua janthe
MLTRSRAKHQAHPPSPDSSLSSASQPPGRASIVSAVSPIAAVASSSSDEFFSPPSTPSPPRRRGRGRPPAGLGPRGQQAPNRVPAAGGNVSRMRWTQSINENVMRAYYGATEGGSNLTAYRGRMLSLFQVLEPGVSVSAQRLSDQVRVIQRNHMLDDTVLERLRFDSRSNLVIPASPMIAVQLQNVSSAPPRSEHDGEEDDDEVISVSTQCNAQLRGALEGAFREYRSTPPELRPRLPRLPMHKKNKALVCALDSQLSNCFDSSKDLADTHSILYCGAVAACRVAHVKFPNNDRATRPKFAVPAWQCRIERRIGKARALIGKLICFREGNTRPRVLRFVKRAFSGTDVSFRDYLARVTERIDFLKQKICAWASRIRRYKRRVERYTQNRTFRSDERWVYRAWERPDQGVTDTRLPDDDAMCSFWRNIWSVPVSHIEGDWTREVERACDSIPEMGAIIISPQDVARAVRPLPNWKSPGPDGPHNFWIKWFQRSHVRLASQFQSALESGSLPQFLTTGITHLFHKSGSTAEPKNYRPITCLPTVYKVLTSILRAKINHHIDSNSIMSASQNGCRNGSRGTKELLLIDMAISQQVRRSRRDLSTCWIDYKKAYDSVPHTWLMKVLELYKVDATLRTFLMSCMGHWRTVLRYPGCRQIQGNSEPIKIERGIFQGDSLSPLWFCLALNPLSTLLEGSGLGYRLRRGGQVISHLLYMDDLKLFAPNNLQLMKLLKVTETFSSAIRMEFGVDKCAVMHVKRGEIMESVGTQLSDSIHLRSLSSTETYKYLGMSEALGINTADMKQSLRDRFFGRLNKVLSSLLSGGNKVRAFNGWVMPVLMYSFGILKWTQTELDALDRRVRALLTANRMHHPRSSVMRLYIPRKCGGRGFLNAKTLHNREILVYSLREYFLEVDEGMHRDVVSVDKGLTPLSLANENWRKPRVLDTNDRKEVWQGKELHGRFYRALHGPDVDFLASVAWLRSGDLFGETEGFVCAIMDEVMMTNNYRRFIVKDGTVDILCRACHRPGESIRHIISGCSRLANGEYLHRDNLVARIIHQQLALKYNLVESEVPYYKYAPDPVLDNGNITLYWDRSIITDRTIVANKPDIVVIDRLERRAMIVDITVPHDENLVKAEKDKQFKYLDLAREVVDMWDVSTAVIVPIVVSANGLIANSLDKHLRRLSLGSWIKGLIQKAVLLDTARIVRRFLSQEP

SEQ ID NO: 30483 - protein, 950 aa, Mythimna ferrago
MSVFPDACGRLLRYHNNNNNKILYCAAAAACRVAHVKIPNSDRATRPAKPAWQCRIERRIGEARALIGKLICFREGNTRPRVMRFVRRAFSGTDISPRDYLPRITERIDFLRQKVYAWANRIRRYKRRVERYTQNRVFQSNERWVYRAWERPDQSVIDTRLPDDDAMYSFWRSIWSVPVNHTEGDWTQKVERECELLPEMGAVTISPQDVARAVRPLPNWKSPGPDGLHNFWLKWFKSSHARLASQFQSALESGSLPQFLTTGITHLLHKSGSTAEPKNYRPITCLPTVYKVLTSILRAKINSHIETNSIMSASQNGCRNGSRGTKELLLIDVAISQQVRRSRRDLSTCWIDYKKAYDSVPHTWLMRVLELYKIDVTLRTFLMSCMGQWRTVLHYPGCRRVSENSEPLRIERGIFQGDSLSPLWFCLALNPLSTLLEGSGVGYRLRREGQVISHLLYMDDLKLFASNNLQLMELLKVTETFSSAIRMEFGLDKCAVMHVKRGEIMESVGTQLSDSIHLRSLCSTETYKYLGMSEALGINAADVKQSLRERFFGRLNKVLKSLLSGGNKVRAFNGWVMPVLMYSFGILKWTQTELDTLDRRVRTLLTANRMHHPRSSVMRLYIPRKCGGRGFLNAKTLHNREVCSLRKYFLETDVGMHRDVVAVDKGLTPLFLANENWRKPIVMDINERKEVWKGKELHGRFYRALHGPDVDLLASVSWLRFGDLFGETEGFVFAIMDEVMMTNNYRKYIVKDGTVDICRACHRPGESIRHIISGCSHLANGDYLHRHNLVARIIHQQLALKYNLVESEVPYYRYVPDPVLENGSVTLYWDRSIITDRTIVANKPDIVVIDRLERRTMIVDIAVPHDENLVKAEKDKQTKYLDLAREVVDMWEVDRAIIVPIVVTANGLIAKSLDQHLRRLSLGSWIKGLIQKAVLLDTARIVRRFLSQEP

SEQ ID NO: 30484 - protein, 922 aa, Xestia xanthographa
MSCSSRQIPQQRRATRPKLAVPAWQCRIERRIGEARALIGKLICFREGNTRPRVMRFVRRAFSGTDISFRDYLARVTERIDSLKQKICAWASRIRRYKRRVERYTQNRTFQSDERWVYRAWERPDQGVTDTCLPDDSAMYSFWRNIWSVPVSHTEGDWTREVEQACDPIPEMGAIIISPQDVARAVRPLPNWKSPGSDGLHNFWIKWFQRSHARLASQFQSALESGSLPQFLTTEITHLLHKSGSAAEPKNYKPITCLPTVYKVLTSILRAKINQHIDSNSIMSASQNGCRNGSRGTKELLLIDMAISQQVRRSRKNLSTCWIDYKKAYDSVPHTWLMRVLELYKIDATLRTFLMSCMGHWRTVLRYPGCRQIQGNSEPIRIERGIFQGDSLSPLWFCLALNPLSTLLERSGLSYLLRRDGQVISHLLYMDDLKLFAPNNLQLMKLLKVTETFSSAIRMEFGVDKCAVMHVKRGEIMKSEGTQLSDSIHLISLSSTETYKYLGMSEALGINTADMKQSLRERFFGRLNKVLGSLLSGGNKVRAFNGWVMPVLMYSFGILKWTQTELDALDRRVRTLLTANRMHHPRSSVMRLYIPRKCGGRGFLSAKTLHNREVYSLREYFLEAEGEMHQDVVSVDKGLIPLSLANENWRKPKVLDTNDRKVEWQGMELHGRFYRALHGPDVDFLASVSWLRFGDLFGETEGFICAIMDEVMMTNNYRKYIVKDGTVDICRACHRPGESIRHIISGCSSLANGEYLHRHNLVARIIHQQLALKYNLVESEVPYYKYAPDPVLDNGHITLYWDRPITTDRTVVANRPDIVVIDRLERRTMIVDITIPHDENLVKAEKDKQFKYLDLAREVVDMWDVGTADIVPIVVSANGLIAKSLDQHLRRLSLGSWIKGLIQKAVLLDTARIVRRFLSQEP

SEQ ID NO: 30485 - protein, 868 aa, Amphipyra tragopoginis
MRFVRRAFSGTDVSPREYISRVTERIDFLKQKVYAWANRIRRYRRRVDRYNQNRMFRSDERWVYRTWERPDQSVGAAHLPDDDATNSFWRNIWSVPVTHTEGDWMRDVERMCEPILDMGAILISPQDVAGAVRPLPNWKSPGPDGLHNFWLKWLRSSHARLASQFQSSLETGTLPQFLTTGVTHLLHKSGSTAEPKNYRPITCLPTVYKVLTSILRTKINNHIDNNSIMSASQNGCRNGSRGTKELLLIDMAISQQVRRSRKDLSTCWIDYKKAFDSVPHTWLMRVLELYKVNTTLRTFLTSCMGQWRTVLHYPGCRQIQGIGEPIRIERGIFQGDSLSPLWFCLALNPLSTLLEGSGLGYRLRRGGQVISHLLYMDDLKLFAPNNLQLLELLKVTETFSNSIRMEFGVDKCAVMHVKRGRIMESVGTQLSDSIHLISLSSTETYKYLGMSEALGINETDMKQSLRERFYGRLKKVLNSLLSGGNKVRAFNGWVMPVLMYSFGILKWTQTELDALDRRVRTLLTANRMHHPRSSVMRLYIPRKCGGRGFLNAKTLHNREVCSLREYFSQTEVGMHRDVVAVDKGLTPLSLAKENWRKPVVLDTNGRKDVWRSKELHGRFYRALHGPDVDFLASVAWLRFGDLFGETEGFVCAIMDEVMMTNNYRKYVVKDGTVDICRACHCPGESIRHIVSGCSRLANGEYLHRHNLVARIIHQKLALKYNLVDAEVPYYKYVPDPVLENGHVTLYWDRSIITDRTIVANKPDIVVIDRSERLTMIVDITVPHDENLVKAEKDKEIKYQDLAHEVVAMWDVDSAVIVPIVVTANGLIAKSLDQHLKRLSLGGWIKGLIQKAVLLDTARIVRRFLSLRP

SEQ ID NO: 30486 - protein, 1065 aa, Amphipyra tragopoginis
MMINNNKTMQNKDKSIAAGPPPAGHIIIIIITVISSSSQAPGLISRNVPVASPRLQHVDEEDDDRATAVSIQCNEQLRRALEDAMREYRSTRPELRPRLPRLPMHRRNRALMCALDSLLSNYFDSSEDLGDTHSILYCAAVAACRVAHVKFINNERATRPKNAVPAWQCRIERRIAEARALIGKLICFGEGNTRPRVMRFVRRAFSGTDVSPREYMSRVTERIDFLKQKVYAWANRIRRYRRRVDRYNQNRMFRSDERWVYRNWERPDQSVGAAHLPDDDAMNSFWRSIWSVPVTHTEGDWMRDVERMCEPILDMGAIIISPQDVASAVRPLPNWKSPGPDGLHNFWLKWLRSSHARLASQFQSSLETGTLPQFLTTGVTHLLHKSGSTAEPKNYRPITCLPSVYKVLTSILRTKINNHIDNNSIMSASQNGCRNGSRGTKELLLIDMAISQQVRRSRKDLSTCWIDYKKAYDSVPHTWLMRVLELYKVNTTLCAFLTSCMRQWRTVLRYPGCRQIQGIGEPIRIERGIFQGDSLSPLWFCLALNPLSTLLEGSGLGYRLRRGGQVISHLLYMDDLKLFAPNKLQLLELLKVTETFSNSIRMEFGVDKCAVMHVKRGRIMESVGTQLTDSIHLISLSSTETYKYLGMSEALGINETDMKQSLRERFYGRLKKVLNSLLSGGNKVRAFNGWVMPVLMYSFGILKWTQTELDALDRRVRSLLTANRMHHPRSSVMRLYIPRKCGGRGFLNAKTLHNREVCSLREYFSQADVGMHRDVVAVDKGFTPLSLAKENWRKPVIFDTNGRREVWRSKELHGRFYRALHGPDVDFLASVAWLRFGDLFGETEGFVCAIMDEVMMTNNYRKYIVKDGTVDICRACHCPGESIRHIVSDCSRLANGEYLHRHNLVARIIHQQLALKYNLVDAEVPYYKYVPDPVLENGHVTLYWDRSIITDRTIVANKPDIVVIDRSERLTMIIDITVPHDENLVKAEKDKEIKYQDLAHEVVDMWDVDSAVIVPIVVTANGLIAKSLDQHLKRLSLGGWIKGLIQKAVLLDTARIVRKFLSLRP

SEQ ID NO: 30487 - protein, 1111 aa, Mamestra configurata
MRWTQSMNENVMRAYYGSKEGGTNLTAYRVRMLSLFQDLEPTVNVSAQRLSDQVRIIQRNHRLDDAALDRLRSEVLNNLIISTPTQTAVQAPVNDAITPRPNNVSHEVDDRVVTVSSQCNDRLRSALEDALREYRSTPTELRPRLPRLPMHKKNRALVCALDSLLQNTFESSESLVDTHSILFCGAVAACRIANVKFPSYDEAIRPKPAAPAWQCRIERRIDEARALIGKLYCFREGNTRPRVMRFVRRAFLGTGISPRDFTSRVTERIDFLKQKVCAWANRIRRYKRRVDRYSQNRMFQSDERWVYRAWERPEQSVMDVCRPDDNTTSTFWRGIWSVPVCHTEGDWLRDVEHVCEAIPEMDTITITPLDVAKAVRPLPNWKSPGPDGLHNFWLKWYSSSHVLLASQFQSSLESGSLPQFLTTGVTHLLHKTGSPAEPKNYRPITCLSTVYKLLTSILRAKINEHIESNSIMSASQNGCRKGSRGTKELLLIDMAISQQVRRSRKDLSTCWIDYKKAYDSVPHTWLMKVLELYKIDATLRTFLESCMRQWKTVLRYPGCRPIQGSDEPVWIKRGIFQGDSLSPLWFCLALNPLSTLLEDSGLGYRLRRGGQAISHLLYMDDLKLFAPNNLRLMELLKVTETFSSAIRMEFGVDKCAVMHVKKGEIMESEGIQISDSIQVRSLSSIGTYKYLGMSEALGINGADMKQSLRERFFGRLKKVLNSLLSGGNKVRAFNGWVMPVLMYSYGILKWTQTELDALDRRVRTLLTANRMHHPRSSVMRLYIPRKCGGRGFLNAKTLHNHEVCNLRDFFLKTDVGMHRDVVAVDKGLTPLSMAKENWRKPVILTTDDRKEVWKGKELHGRFYRALHEPDVDFPASVSWLRFGDLFGETEGFVCAIMDEVILTNNYRKYIMKDGTVDVCRACHRPGESIRHIISGCSRLANGEYLHRHNQVARIIHQQLALKYQLVDSEVPYYKYVPDPVLENDHVTLYWDRSIITDRTIVANKPDIVVIDRLARRTMIIDVTIPHDVNLVKAEKEKQIKYLDLAHEVVDMWNVDSAVIVPIVVTANGLLSKSFDDHLSKLSLRGWVKGLIQKAVLLDTARIVRRFLSLEP

SEQ ID NO: 30488 - protein, 1229 aa, Mamestra configurata
MLTRAASRRARPPSPDPSLSSASPPPDSGSPMSPAVAVASSSSDEYFSPPTSPTPVRWQGRGRPPRGLGPRGQPAPSRVPATGGCVQRMRWTQSMNENVMRAYYGSTEGGTNLTAYRVRMLSLFQDLEPTVNVSAQRLSDQVRVIQRNHRLDDAALDRLRSEVLNNLIISTPTQTAVQAPVNDAITPRPNNVSHEVDDRVVTVSSQCNDRLRSALEDALREYRSTPTELRPRLPRLPMHKKNRALVCALDSLLQNTFESSESLVDTHSILFCGAVAACRIANVKFPSYDEAIRPKPAAPAWQCRIERRIDEARALIGKLYCFREGNTRPRVMRFVRRAFLGTGISPRDFTSRVTERIDFLKQKVCAWANRIRRYKRRVDRYSQNRMFQSDERWVYRAWERPEQSVMDVCRPDDNTTSTFWRGIWSVPVCHTEGDWLRDVEHVCEAIPEMDTITITPLDVAKAVRPLPNWKSPGPDGLHNFWLKWYSSSHVLLASQFQSSLESGSLPQFLTTGVTHLLHKTGSPAEPKNYRPITCLSTVYKLLTSILRAKINEHIESNSIMSASQNGCRKGSRGTKELLLIDMAISQQVRRSRKDLSTCWIDYKKAYDSVPHTWLMKVLELYKIDATLRTFLESCMRQWKTVLRYPGCRPIQGSDEPVWIKRGIFQGDSLSPLWFCLALNPLSTLLEDSGLGYRLRRGGQAISHLLYMDDLKLFAPNNLRLMELLKVTETFSSAIRMEFGVDKCAVMHVKKGEIMESEGIQLSDSIQVRSLSSTGTYKYLGMSEALGIDGADMKQSLRERFFGRLKKVLNSLLSGGNKVRAFNGWVMPVLMYSYGILKWTQTELDALDRRVRTVLTANRMHHPRSSVMRLYIPRKCGGRGFLNAKTLHNHEVCNLRDFFLKTDVGMHRDVVAVDKGLTPLSMAKENWRKPVILNTDDRKEVWKGKELHGRFYRALHEPDVDFPASVSWLRFGDLFGETEGFVCAIMDEVILTNNYRKYIMKDGTVDVCRACHRPGESIRHIISGCSRLANGEYLHRHNQVARIIHQQLALKYQLVDSEVPYYKYVPDPVLENDHVTLYWDRSIITDRTIVANKPDIVVIDRLARRTMIIDVTIPHDVNLVKAEKEKQIKYLDIAHEVVDMWNVDSAVIVPIVVTANGLLSKSFDDHLSKLSLRGWVKGLIQKASRYGSYCEEVPFSGALTTGSLDPAPDTGGLLFFIFLNVFFFFVTTVL

SEQ ID NO: 30489 - protein, 1201 aa, Mesoligia furuncula
MLTRLAARRARLPPPDSSLSSAPPPPESSPIVSAVTPAVAVASSSSDEYFSPPTSPTPVRRQGRGRPPNSLGLRGHPAPSRVPATGGCVQRMRWTQSMNENVMRAYYRSTEGGINLTAYRDRMLSLFQELEPTVNISAQRLSDQVRVIQRNHRLDDIALDRLRSEVLSNHIVSTSAQTAAQASTVDAIPPRSNHVKEEDDRVDTVSSQCNVRLRSALEDALCEYRSTPTERRPRLPRLPMHKKNRALVCALDSQLKNFFESSEDLVDTHSILYCAAVAACRLANVKFPSCDGATRPKPAVPAWQRRIERRIDGTRVLIGKLYCFREGNTRPRVMRFVRRAFSGTGISPREYISRVTERIDFLKQKVCAWASRIRRYKRRVDRYTQNRMFQSDERWVYRAWERPEQNVTDVYRPDDATTSAFWCSIWSVPVCHTEAGWMRDVERVCESVPEMETVLITPSDVAKAVRPLPNWKSPGPDGLHNFWLKWLISSHTCLASQFQSSLESGSLPQFLTTGVTHLLHKSGSPAEPKNYRPITCLSTVYKLLTSILRAKINTHIESNSIMFASQNGCRNGSRGTKELLLIDMAISQQVRRSRKDLSTCWIDYKKAYDSVPHTWLMKVLELYKIDATLRTFLESCMRQWKTVLRYPGCRQIQGNDEPVWIKRGIFQGDSLSPLWFCLALNPLSTLLVDSGLGYRLRRDGQVISHLLYMDDLKLFAPNKLRLMELLKVTETFSSAIRMEFGVDKCAVMHVKRGEIMESEGIQVSDSISLRSLSSSESYKYLGMSEALGINDADMKQSLKERFFCRLKKVLISLLSGGNKVRAFNGWVMPVLMYSFGILKWTQTELDALDRRVRTLLTANRMHHPRSSVMRLYIPRKSGGRGFLNAKTLHNREVCSLREYFLKAEVGMHRDVVAVDKGLTPLSMAKENWRKPVVLSTDDRKKVWQSKELHGRFYRALHEPGVDFLASISWLRFGDLFGETAGFVCAIMDEVILTNNYRRHIMRDGTVDVCRACHRPGESIRHIISGCSRLANGEYLHRHNQVARIIHQQLALKYKLVDSEVPYYKYVPDPVLENDHVTLYWDRSIITDRTIVANKPDIVVIDRLARRTMIVDVTIPHDGNLVKAEKEKQIKYLDLAHEVVDMWNVSSAIIVPIVVSANELMAESLDQHLSRLSLGGWIKGLIQKAVLLDTARIVRRFLSLEP

SEQ ID NO: 30490 - protein, 1111 aa, Hecatera dysodea
MKWTQSINENVMRAYYGSTEGGTNLTAYRARMLSMFQDLEPTVDVSAQRLSDQVRVIQRNHRLDDAALDRLRSEVLDNPIISTSTQTVVPVPSSGAITSRTINVCDEVDDRIVTVSSQCNDRLRSALEDALREYRSTPTELRPRLPRLPMHKRNRALVCALDSLLQNIFESSENLVDTHSILYCGAVAACRVANVKFTNSDGATRPKTAAPAWQCRIERRIDEARVLIGKLYCFREGNTRPRVMRFVRRAFSGTEISPQEYISRVTERIDFLKQKVCAWANRIRRYKRRVDRYSQNRIFQSDERWVYRSWERPEQSVTDVCRPDDIVTSTFWRSIWSVPVRHTEGDWMRGIERVCEAIPQMEKITITPTDVATAVRPLPNWKSPGPDGLHNFWLKWYSSSHAVLASQFQSSLESGSLPQFLTTGVTHLLHKTGSPAEPKNYRPITCLSTVYKLLTSILRVKINEHIESNSIMSSSQNGCRKGSRGTKELLLIDMAISQQVRRTRKDLSTCWIDYKKAYDSVPHTWLMKVLELYKIDATLRTFLESCMRQWKTVLCYPGCQPIQGNDEPVWIKRGIFQGDSLSPLWFCLALNPLSTLLEDSGLGYRLRRGGQAISHLLYMDDLKLFAHNKLRLMELLKITETFSSAIRMEFGVDKCAVMHVKKGEIMESEGVQVSDSIQVRSLSSTETYKYLGMSEALGINVADMKQSLKERFFGRLKKVLNSLLSGGNKVRAFNGWVMPVLMYSFGILKWTQTELDALDRRVRTLLTANRMHHPRSSVMRLYIPRKCGGRGFLNAKTLHNREMCSLREYFLKVDVGMHRDVVAVDKGLTPLSMANENWRKPVIHTTDDRKEVWKGKELHGRFYRALYGSDVDFSASVAWLRFGDLFGETEGFVCAIMDEVILTNNYRRHIMKDGTVDVCRACHRPGESIRHIISGCSRLANSEYLHRHNQVARIIHQQLALKYKLVDSEVPYYKYVPDPVLENGRVTLYWDRSIITDRTIVANKPDIVVIDRLARRTMIIDVTIPHDENLVKAEKEKQIKYLDLAHEVVDMWDVDSAVIVPIVITANGLMAKSFDDHLSKLALHGWLKGLIQKAVLLDTARIVRRFLSLEP

SEQ ID NO: 30491 - protein, 962 aa, Cosmia trapezina
MHKKNRALMCALDSLLKDFFGNSENLVDTHSILYCAAVAACRLANVKFPNCDGATRPKPAVPAWQCRIERRIDGARVLIGKLYCFRQGNTRPRVMRFVRRAFSGTGISPPEYMSRVTERIDFLKQKVCAWASRIRRYKRRVDRYAQNRMFQSDERWVYRAWERPEQNVTDVCRPDDAATSAFWRSIWSVPVCHVEAGWMRDVERVCEAIPEMEPVLITPLDVARAVRPLPNWKSPGPDGLHNFWLKWLISSHTRLASQFQSSLESGSLPQFLTTGITHLLHKSGSPAEPKNYRPITCLSTIYKLLTSILRTKINMHIDSNSIMSTSQNGCRNGSRGTKELLLIDMAISQQVRRSRKDLSTCWIDYKKAYDSVSHAWLMRVLELYKIDATLRTFLESCMGQWRTVLRYPGCRRIQGSDEPVRIKRGIFQGDSLSPLWFCLALNPLSTLLEDSGLGYRLRRGGQVISHLLYMDDLKLFAPNKLRLMELLKVTETFSSAIRMEFGVDKCAVMHVKRGEIMESEGIQVLDSIHLRSLSSSETYKYLGMSEALGINVADMKQSLRERFFGRLKKVLFSLLSGGNKVRAFNGWVMPVLMYSFGILKWTQTELDALDRRVRTLLTANRMHHPRSSVMRLYIPRKCGGRGFLNAKTLHNREVCSLREHFLKSDVGMHRDVVAVDKGLTPLSMAKENWRKPVVLTTDDRKNVWQSKELHGRFYRALHEPGVDFLASVSWLRFGDLFGETEGFVCAIMDEVILTNNYRRYIMKDGTVDVCRACHRPGESIRHIISGCSRLANGEYLHRHNQVARIIHQQLALKYKLVDSEVPYYKYVPDPVLENDHVTLYWDRSIITDRTIVANKPDIVVIDRLTRRAMIVDVTIPHDGNLVKAEKEKQIKYLDLAHEVVDMWNVNSAVIVPIVVTANGLIADSLDQHLSRLSLGGWIKGQIQKAVLLDTARIVRRFLSLQP

SEQ ID NO: 30492 - protein, 1200 aa, Mythimna ferrago
MLTRSRAQQLNTQLTTSGPSLSSASQPPGPAPAVSPEIPVAAVASSSSDEYFSPPTTPPPARRRGRGRPPACLGPRGPPASDRVPAAGGSVQRMRWTQSINENVMRSYFGATEGGTNLTAYRGRMLSLFQVLEPAVNVSAQRLSDQVRVIQRNRMLDDAVLDRLRLESRNGRVSPVSPPAPVQRQPSVSPRPDHVGEDDDDGAISVSTQCNVRLRSALEDAFREYRSIPPELRPRLPRLPMHRKNRALVCALDSQLSNCFDSSEDLTDTHSILYCAAAAACRVAHVKIPNSDRATRPAKPAWQCRIERRIGEAKALIGKLICFREGNTRPRVMRFVRRAFSGTDISPRDYLPRITERIDFLRQKVYAWANRIRRYKRRVERYTQNRAFQSNERWVYRAWERPDQSVIDTRLPDDDAMYSFWRSIWSVPVNHTEGDWTRKVERECELLPEMGAVTISPQDVARAVRPLPNWKSPGPDGLHNFWLKWFKSSHARLASQFQSALESGSLPQFLTTGITHLLHKSGSTAEPKNYRPITCLPTVYKVLTSILRAKFNSHIETNSIMSASQNGCRNGSRGTKELLLIDVAISQQVRRSRRDLSTCWIDYKKAYDSVPHTWLMRVLELYKIDVTLRTFLMSCMGQWRTVLHYPGCRRVSENSEPLRIERGIFQGDSLSPLWFCLALNPLSTLLEGSGVGYRLRREGQVISHLLYMDDLKLFASNNLQLMELLKVTETFSSAIRMEFGLDKCAVMHVKRGEIMESVGTQLSDSIHLRSLCSTETYKYLGMSEALGINAADVKQSLRERFFGRLNKVLKSLLSGGNKVRAFNGWVMPVLMYSFGILKWTQTELDALDRRVRTLLTANRMHHPRSSVMRLNIPRKCGGRGFLNAKTLHNREVCSLRKYFLETDVGMHRDVVAVDKGLTPLSLANENWRKPIVMDINERKEVWKGKELHGRFYRALHGPDVDLLASVSWLRFGDLFGETEGFVFAIMDEVMMTNNYRKYIVKDGTVDICRACHRPGESIRHIISGCSHLANGDYLHRHNLVARIIHQQLALKYNLVESEVPYYRYLPDPVLENGSVTLYWDRSIITDRTIVANKPDIVVIDRLERRTMIVDIAVPHDENLVKAEKDKQTKYLDLAREVVDMWEVDRAIIVPIVVTANGLIAKSLDQHLRRLSLGSWIKGLIQKAILLDTARIVRRFLSQEP

SEQ ID NO: 30493 - protein, 868 aa, Noctua pronuba
MRFVRRAFSGTDISPRDYMSRVTERIDFLKQKVYAWANRIRRYKRRVDRYTQNRTFQRDERWVYRAWERPDQGMADTRLPDDDAMCSFWRSIWSVPVSHTEDEWTREVERACDPVQEMGAITISPQDVVCAVRPLPNWKSPGPDGLHNFWIKWFTRSHARLATLFQSALESGSLPEFLTTGITHLLHKSGSTAEPKNYRPITCLPTVYKVLTSILRTKFSKHINDNSIMSPSQNGCRSGSRGSKELLLIDMAISQQVRRFRRDLSTCWIDYKKAYDSVPHTWLMRVLELYKVDTTLRTFLMSCMGQWRTVLRYPGCRQIQRDSEPIRIERGIFQGDSLSPLWFCLALNPLSTLLEDSGLGYRLRRGGQVISHLLYMDDLKLFAPNDLQLMELLKVTETFSSAIRMEFGVDKCAVMHVKRGEIVESVRTQLSDSINLRSLSATETYKYLGMSEALGINVADMKQSLKERFFGRLKKVFNSLLSGGNKVRAFNGWVMPVLMYSFGILKWTQTELDALDRRVRTLLTAYRMHHPRSSVMRLYIPRRCGGRGFLNAKTLHNREICSLREYFLEADVGVHRDVVAVDKGLTPLSLAKENWRKPVVLDTNDRREVWQSKELHGRFFRALHGPDVDLSASVAWLRSGDLFGETEGFVCAIMDEVMMTNNYRRFIVKDGTVDICRACHRPGESIRHIISGCSRLANGEYLHRHNLVARIIHQQLALKYNLVESEVPYYKYVPDPVLENGCVTLYWDRSIITDRTIVANKPDIVVVDRSERRAMIVDITVPHDENLVKAEKDKQIKYLDLAHEVVDLWDVDSTIIVPIVVSAHGLIAKSFDQHLWRLSLGSWIKGLIQKAVLLDTARIVRRFLSLEP

SEQ ID NO: 30494 - protein, 1085 aa, Mamestra brassicae
MVGCSLCFRCLSQLSTYQPNDYRIRCGSSSVTVCWMTPYLIDCVWNHGMAASQLLHHRPRYIIQSSVSPRPNIVGEDDDDGAISVSTQCNERLRSALEDAFREYRSTPPELRPRLPRLPMHNKNRALVCALDSQLANCFDSSEDLADTHSILYCAAAAACRVAHVKFPNSDRATRPAVPAWQCRIERRIGEARALIGKLICFREGNTRRRVMRFVRRAFSGTDTSPRDYLTRVTERIDFQKQKIYAWANRIRRYKRRVERYTQNRTFQSNERWVYRAWERPDQGVTDTRLPDDDVMCSFWRNIWSVPVSHTEGDWTREVERACDPIPEMGAITISPQDVARAVRPLPNWKSPGPDGLHNFWIKWLKRSHARLASQFQSALESGSLPQFLTTGITHLLHKSGSTAEPKNYRPITCLPTVYKVLTSILRAKINQHIETNSIMSASQNGCRNRSRGTKELLLIDVAISQQVRRSRRDLSTCWIDYKKAYDSVPHTWLMRVLELYKVDAVLRTFLMSCMGQWRTVLRYPGCRQIQANSDPIRIERGIFQGDSLSPLWFCLALNPLSTLLEGSGQGYRLRRGGQVISHLLYMDDLKLFAPNNLQLMKLLKVTETFSSAISMEFGVDKCAVMHVKRGEIMESVGTQLSDSIHLRSLSSTETYKYLGMSEALGINANDVKQSLKERFFGRLNKVLNSLLSGGNKVRAFNGWVMPVLMYSFGILKWTQTELDALDRRVRSLLTANRMHHPRSSVMRLYIPRKCGGRGFLNAKTLHNREICSLREFFLEADVGMHRDVVAVDKGLTALSLANENWRKPVVLDTNDRREVWQSKELHGRFYRVLHGPDVDFLASVAWLRFGDLFGETEGFVCAIMDEFMMTNNYRKYIVKDGTVDICRACHRPHPKSGNRESIRHIISGYSSLANGDYLHRHNLVARIIHQQLALKYNLVEWEVPYYRYVPDPVLENGNCTLYWDRSIITDRTIIANKPDIVVIDRLERRAMIVDIAVPHDVNLVKTEKDKQTKYLDLAREVVDMWDVNTAVIVPIVVTANGIIAKSLDQHLKRLSLGSWIKGLIQKAVLLDTARIVRRFLSQGP

SEQ ID NO: 30495 - protein, 1107 aa, Mythimna ferrago
MRWTQSINENVMRSYFGATEGGTNLTAYRGRMLSLFQVLEPAVNVSAQRLSDQVRVIQRNRMLDDAVLDRLRLESRNGRVSPVSPPAAVQRQPSVSPRPDHVGEDDDDGAISVSTQCNVRLRSALEDAFREYRSIPPELRPRLPRLPMHRKNRALVCALDSQLSNCFDSSEDLTDTHSILYCAAAAACRVAHVKIPNSDRATRPAKPAWQCRIERRIGEARALIGKLICFREGNTRPRVMRFVRRAFSGTDISPRDYLPRITERIDFLRQKVYAWANRIRRYKRRVERYTQNRAFQSNERWVYRAWERPDQSVIDTRLPDDDAMYSFWRSIWSVPVNHTEGDWTRKVERECELLPEMGAVTISPQDVARAVRPLPNWKSPGPDGLHNFWLKWFKSSHARLASQFQSALESGSLPQFLTTGITHLLHKSGSTAEPKNYRPITCLPTVYKVLTSILRAKINSHIETNSIMSASQNGCRNGSRGTKELLLIDVAISQQVRRSRRDLSTCWIDYKKAYDSVPHTWLMRVLELYKIDVTLRTFLMSCMGQWRTVLHYPGCRRVSENSEPLRIERGIFQGDSLSPLWFCLALNPLSTLLEGSGVGYRLRREGQVISHLLYMDDLKLFASNNLQLMELLKVTETFSSAIRMEFGLDKCAVMHVKRGEIMESVGTQLSDSIHLRSLCSTETYKYLGMSEALGINAADVKQSLRERFFGRLNKVLKSLLSGGNKVRAFNGWVMPVLMYSFGILKWTQTELDALDRRVRTLLTANRMHHPRSSVMRLYIPRKCGGRGFLNAKTLHNREVCSLRKYFLETDVGMHRDVVAVDKGLTPLSLANENWRKPIVMEINERKEAWKGKELHGRFYRALHGPDVDLLASVSWLRFGDLFGETEGFVFAIMDEVMMTNNYRKYIVKDGTVDICRACHRPGESIRHIISGCSHLANGDYLHRHNLVARIIHQQLALKYNLVESEVPYYRYVPDPVLENGSVTLYWDRSIITDRTIVANKPDIVVIDRLERRTMIVDIAVPHDENLVKAEKDKQTKYLDLAREVVDMWEVDRAIIVPIVVTANGLIAKSLDQHLRRLSLGSWIKGLIQKAVLLDTARIVRRFLSQEP

SEQ ID NO: 30496 - protein, 1211 aa, Xestia xanthographa
MSPMLTRHRAKLQKEAHPPSPGSSLSSASQRPGRATPVSTVSSVAAVASSSSDEFFSPPSTPPPPPRGRRRGRGRPPAGLGPRGQQAPSRVPAAGGNVSRMRWTQSINENVMRAYYGATEGGSNLTAYRSRMLSLFQVLEPAVSVEAQRLSDQVRVIQRNHMLDDTVLDRLRSESRSNLVTPASPMIAVQHQNIPSAPPRSDYDGEEDRDEVISVSTQCNAQLRSALEGAFREYRSTPPELRPRLPRLPMHNKNKALMCALDSQLSNCFDSSKDLTDTHSILYCGAVAACRVAHVKFPNNDRATRPKLAVPAWQWRIERRIGEARALIGKLICFREGNTRPRVMRFVRRAFSGTDISFRDYLARVTERIDSLKQKICAWASRIRRYKRRVERYTQNRTFQSDERWVYRACERPDQGVTDTRLPDDSAMYSFWRNIWSVPVSHTEGDWTREVEQACDPIPEMGAIIISPQDVARAVRPLPNWKSPGPDGLHNFWIKWFQRSHARLASQFQSALESGSLPQFLTTGITHLLHKSGSAAEPKNYRPITCLPTVYKVLTSILRAKINQHIDSNSIMSASQNGCRNGSRGTKELLLIDMAISQQVRRSRKNLSTCWIDYKKAYDSVPHTWLMRVLELYKIDATLRTFLMSCMGHWRTVLRYPGCRQIQGNSEPIRIERGIFQGDSLSPLWFCLALNPLSTLLERSGLGYLLRRDGQVISHLLYMDDLKLFAPNNLQLMKLLKVTETFSSAIRMEFGVDKCAVMHVKRGEIMESEGTQLSDSIHLRSLSATETYKYLGMSEALGINTADMKQSLRERFFGRLNKVLGSLLSGGNKVRAFNGWVMPVLMYSFGILKWTQTELDALDRRVRTLLTANRMHHPRSSVMRLYIPRKCGGRGFLNAKTLHNREVYSLREYFLEAEGEMHRDVVSVDKGLTPLSLANENWRKPKVLGTNDRKVEWQGKELHGRFYRALHGPDVDFLASVSWLRFGDLFGETEGFICAIMDEVMMTNNYRKYIVKDGTVDICRACHRPGESIRHIISGCSSLANGEYLHRHNLVARIIHQQLALKYNLVESEVPYYKYAPDPVLDNGHITLYWDRPITTDRTVVANRPDIVVIDRLERRAMIVDITIPHDENLVKAEKDKQFKYLDLAREVVDMWDVGTAVIVPIVVSANGLIAKSLDQHLRRLSLGSWIKGLIQRAVLLDTARIVRRFLSQEP

SEQ ID NO: 30497 - protein, 1201 aa, Euproctis similis
MLTRAKARLANALRPTPDSSLRSASQLPEPIPMSLAPVEASSSSSSDEYFSPLASPAPDRRKRRGRPPSSLGSRGPLVSNRIPAAGGEVHRMKWTQTINENVMRAYFRATRGGTNLTAYRSRMLLLFQDLEPAVNVSAQRLSDQVRVIQRSRLLDDVLLERLRSESVQSSSDTSASQLINTITNTRKPTSSNRGIEVDDRIIDADAQYNNKELKKSLEGLIREYMFMPHNIRPPLPRLPTNRKNIALVSALDSILNSYLDKSNNLSDTHSILYCTALTACRVAGINISHNDSVTRPKPNKPSWQQRIESRIADARVLIGKLICFRSGNTRPRVMRFVKRAFLGTTYRPEEYMAQITERIDYLKQKVCAWANRIRRYKKRYERYAVNRMFQRDQKLVYRDWERPLQATDVGPLPDAITTKNFWSSIWSAPVVHSEGAWICDVERACENITRMPSIKITENDVRCAVRSLSNWKSPGPDGLYNFWLKWLRSSHARIATQFQEAIEKGTLPEFLTTGNTYLLHKTGSTTDPSNYRPITCLSSIYKLLTSILRSKITQHIEMNSVMSTSQNGCRKGGRGTKELLLIDMTINQQVRRRRGDLATAWIDYKKAFDSVPHTWLMRVLELYKVDRTLCTFLETCMRQWKTVLSYPGCRQSRDGGVPLKIQRGIFQGDSLSPLWFCLALNPLSTLLENSGLGYRLRRGSRCLSHLLYMDDLKLFASNRSQLVELLRVTQTFSSSINMGFGVDKCAVMHVKRGVIVESEGISLSDSTRFRSLSVTETYKYLGISQALCINEVSMKQLMRERFFGRLKKVLNSLLSGGNKVRAFNSWVMPVLMYSFGILKWTQTELDALDRKVRTLLTASRMHHPRSSVMRLYIPRRCGGRGFLNIKSLHNREVCSLRQFLLLADVDVVRDVVRVDDGFTPLALAKENWRKPVVLNTTDRLEVWRSKELHGRFYRALHGPDVDTLTSVSWLRFGDLFGETEGFVFAIMDEVMMTNNYRKYILKDGTVDICRACHCPGESIRHIVSGCSRLANGEYLHRHNQVARIIHQQIALKYNLVERGVPYYRYMPDPVLENGHITLYWDRSIVTDRTVVANRPDIVIVDRLERRAVIVDVTIPHDENLVKAEKDKQLKYLDLAHEISDMWDVDSTIIVPIVISVNGLIAKSLDQHLERLSLGSWIKGLMQKAVLLGTARIVRKFLSLGP

SEQ ID NO: 30498 - protein, 1201 aa, Euproctis similis
MLTRAKARLANALRPTPDSSLRSASQLPEPIPMSLAPVEASSSSSSDEYFSPLASPAPDRRKRRGRPPSSLGSRGPLVSNRIPAAGGEVHRMKWTQTINENVMRAYFGATRGGTNLTAYRSRMLLLFQDLEPAVNVSAQRLSDQVRVIQRSRLLDDVILERLRSESVQSSSDTSASQLINTITNTRKPTSSNQGIEVDDRIIDADAQYNNEELKKSLEGVIREYMFMPHNIRPPLPRLPTNRKNIALVSALDSILNSYLDNSNNLSDTHSILYCTALTACSVVGINISHNDSVTRPKPNKPSWQQRIESRIADARVLIGKLICFRSGNTRPRVMRFVKRAFLGTTYRPEEYMAQITERIDYLKQKICAWANRIRIYKKRYERYAVNRMFQRDQKLVYRDWDRPLQATDVGPLPDAITTKNFWSSIWSAPVVHSEGAWICDVERACENITRMPSIKIAENDVRCAVRSLSNWKSPGPDGLYNFWLKWLRSSHARIATQFQEAIEKGTLPEFLTTGNTYLLHKTGSTTDPSNYRPITCLSSIYKLLTSILRSKITQHIEMNSVMSTSQNGCRKGGRGTKELLLIDMTINQQVRRRRGDLATAWIDYKKAFDSVPHTWLMRVLELYKVDRTLCTFLETCMRQWKTVLSYPGCRQSRDGGVPLKIQRGIFQGDSLSPLWFCLALNPLSTLLENSGLGYRLRRGSRCLSHLLYMDDLKLFASNRSQLVELLRVTQTFSSSINMGFGVDKCAVMHVKRGVIVESEGISLSDSTRFRSLSVTETYKYLGISQALCINEVSMKQLMRERFFGRLKKVLNSLLSGGNKVRAFNSWVMPVLMYSFGILKWTQTELDALDRKVRTLLTASRMHHPRSSVMRLYIPRRCGGRGFLNIKSLHNREVCSLRQFLLLADVDVIRDVVRVDDGFTPLALAKENWRKPVVLNTTDRLEVWRSKELHGRFYRALHGPDVDTLTSVSWLRFGDLFGETEGFVFAIMDEVMMTNNYRKYILKDGTVDICRACHCPGESIRHIVSGCSRLANGEYLHRHNQVARIIHQQIALKYNLVERGVPYYRYMPDPVLENGHITLCWDRSIVTDRTVVANRPDIVIVDRLERRAVIVDVTIPHDENLVKAEKDKQLKYLDLAHEISDMWDVDSTIIVPIVISVNGLIAKSLDQHLERLSLGSWIKGLMQKAVLLGTARIVRKFLSLGP

SEQ ID NO: 30499 - protein, 1198 aa, Laspeyria flexula
MLTRARRRQALIPPPDSSLSVASQPPDPVPTTPPAAEASSSSSSDEYYSPPTSPPPVRQRGRGRPPASLGPRGFPAANRAPATGGNVRRMKWTRSINENVMRAYFVATEGGTNLTMYRDRMLPLFQVLEPSINVSAQRLSDQVRVIQRAHMLDDATLERLRSEVRSSPVVPSSTQLVTGMADNLPQSHPTSAVEDVDCGATDVSTQCNDRLRSALECALSEYRCKLSADRPRLPRLPTHKKNIALVCALDSLLSEFLDSSEDIGDTHSILYCAAVAACRVAGVKFPTDTATRPRSGVPAWQCRIERRIADARALIGKLICFRTGNTRPRVMRFVKRAFLGTDVRPQDYSSRVTERIDYLKQKVCAWANRIRRYRRRVDRYYQNCTFQKDERWVYRRWECSDLDVAHSGRPDDDVTSLFWRNIWSAPVSHTESDWTRVVERSCESIRDMEPISITTEDVASAARSLPNWKSAGPDGLYNFWLKWLHSLHARLASGFQSCLESGSIPLFLTTGVTHLLYKSVSVADPKNYRPITCLPTVYKLLTSILRTKLVKHVNDNNIMSISQNGCRNGARGTKELLIIDMAVNQQVRRNRKDLSTCWIDYKKAYDSVPHTWLLRVLELYKIDATLCTFLKTCMGQWRTALRYPGCPQSLGNGNPIRIERGIFQGDGLSPLWFCLALNPLSTLLEDSGLGYRLRRGGQVISHLLYMDDLKLFAPGTSQLTALLKVTETFSNSIKMEFGVDKCAVMHVKRGGILESEGIQLSDSTQLRSLSAAETYKYLGMSQALGIMDSGVKQVLGERFLSRLKKILKSLLSGGNKVRAFNSWVMPVLTYSFGILRWTQTELDALDRKVRTQLTAFRMHHPRSSVMRLYIPRKCGGRGLLCAKTLHNREVYNLREYFLKTDVEMHRDVVAVDNGLTPLGLAKENWRKPAILSLDDRKEVWKGKELHGRFYRALHGSDVDSLSSVSWLRFGDLFGETEGFVCAIMDEVIMTNNYRRHILKDGTVDICRACHRPGESLGHIVSGCSRLANGEYLHRHNQVARIVHQQLALKYGLVDSEVPYYMYVPDPVLENGHATMYWDRSIITDRTIVANKPDIVVIDRLERLAVIIDVTVPHDENLVKAEKDKQVKYLDLAHEIVDMWDVDSAIIVPIVVSVNGLIAKSLHRHLKRLALGGWVVGQMQKAVLLDTACIVRRFLSLEP

SEQ ID NO: 30500 - protein, 1201 aa, Euproctis similis
MLTRAKTRLANALRPTPDSSLRSASQLPEPIPMSLAPVEASSSSSSDEYFSPLASPAPDRRKRRGRPPSSLGSRGPLVSNRIPAAGGEVHRMKWTQTINENVMRAYFRATRGGTNLTAYRSRMLLLFQDLEPAVNVSAQRLSDQVRVIQRSRLLDDVILERLRSESVQSSSDTSASQLINTITNTRKPTSSNRGIEVDDRIIDADAQYNNEELKKSLEGVIREYMFMPHNIRPPLPRLPTNRKNIALVSALDSILNSYLDNSNNLSDTHSILYCTALTACRVAGINISHNDSVTRPKPNKPSWQQRIENRIADARVLIGKLICFRSGNTRPRVMRFVKRAFLGTTYRPEEYMAQITERIDYLKQKVCAWANRIRRYKKRYERYAVNRMFQRDQKLVYRDWERPLQATDVGPLPDAITTKNFWSSIWSAPVVHSEGAWICDVERACENITRMPSIKIAENDVRCAVRSLSNWKSPGPDGLYNFWLKWLRSSHARIATQFQEAIEKGTLPEFLTTGNTYLLHKTGSTTDPSNYRPITCLSSIYKLLTSILRSKITQHIEMNSVISTSQNGCRKGGRGTKELLLIDMTINQQVRRRRGDLATAWIDYKKAFDSVPHTWLMRVLELYKVDRTLCTFLETCMRQWKTVLSYPGCRQSRDGGVPLKIQRGIFQGDSLSPLWFCLALNPLSTLLENSGLGYRLRRGSRCLSHLLYMDDLKLFASNRSQLVELLRVTQTFSSSINMGFGVDKCAVMHVKRGVIVESEGISLSDSTRFRSLSVTETYKYLGISQALCINEVSMKQLMRERFFGRLKKVLNSLLSGGNKVRAFNSWVMPVLMYSFGILKWTQTELDALDRKVRTLLTASRMHHPRSSVMRLYIPRRCGGRGFLNIKSLHNREVCSLRQFLLLADVDVIRNVVRVDDGFTPLALAKENWRKPVVLNTTDRLEVWRSKELHGRFYRALHGPDVDTLTSVSWLRFGDLFGETEGFVFAIMDEVMMTNNYRRYILKDGTVDICRACHCPGESIRHIVSGCSRLANGEYLHRHNQVARIIHQQIALKYNLVERGVPYYRYMPDPVLENGHITLYWDRSIVTDRSVVANRPDIVIVDRLERRAVIVDVTIPHDENLVKAEKDKQLKYLDLAHEISDMWDVDSTIIVPIVISVNGLIAKSLDQHLERLLLGSWIKGLMQKAVLLGTARIVRKFLSLGP

SEQ ID NO: 30501 - protein, 1201 aa, Euproctis similis
MLTRAKARLANALRPTPDSSLRSASQLPEPIPMSLAPVEASSSSSSDEYFSPLASPAPDRRKRRGRPPSSLGSRGPLVSNRIPAAGGEVHRMKWTQTINENVMRAYFGATRGGTNLTAYRSRMLLLFQDLEPAVNVSAQRLSDQVRVIQRSRLLDDVILERLRSESVQSSSDTSASQLINTITNTRKPTSSNQGIEVDDRIIDADAQYNNEELKKSLEGVIREYMFMPHNIRPPLPRLPTNRKNIALVSALDSILNSYLDNSNNLSDTHSILYCTALTACRVAGINISHNDSVTRPKPNKPSWQQRIESRIADARVLIGKLICFRSGNTRPRVMRFVKRAFLGTTYRPEEYMAQITERIDYLKQKICAWANRIRRYKKRYERYAVNRMFQRDQKLVYRDWERPLQATDVGPLPDAITTKNFWSSIWSAPVVHSEGAWICDVERACENITRMPSIKIAENDVRCAVRSLSNWKSPGPDGLYNFWLKWLRSSHARIATQFQEAIEKGTLPEFLTTGNTYLLHKTGSTTDPSNYRPITCLSSIYKLLTSILRSKITQHIEMNSVMSTSQNGCRKGGRGTKELLLIDMTINQQVRRRRGDLATAWIDYKKAFDSVPHTWLMRVLELYKVDRTLCTFLETCMRQWKTVLSYPGCRQSRDGGVPLKIQRGIFQGDSLSPLWFCLALNPLSTLLENSGLGYRLRRGSRCLSHLLYMDDLKLFASNRSQLVELLRVTQTFSSSINMGFGVDKCAVMHVKRGVIVESEGISLSDSTRFRSLSVTETYKYLGISQALCINEVSMKQLMRERFFGRLKKVLNSLLSGGNKVRAFNSWVMPVLMYSFGILKWTQTELDALDRKVRTLLTASRMHHPRSSVMRLYIPRRCGGRGFLNIKSLHNREVCSLRQFLLLADVDVIRDVVRVDDGFTPLALAKENWRKPVDLNTTDRLEVWRSKELHGRFYRALHGPDVDTLTSVSWLRFGDLFGETEGFVFAIMDEVMMTNNYRKYILKDGTVDICRACHCPGESIRHIVSGCSRLANGEYLHRHNQVARIIHQQIALKYNLVERGVPYYRYMPDPVLENGHITLYWDRSIVTDRTVVANRPDIVIVDRLERRAVIVDVTIPHDENLVKAEKDKQLKYLDLAHEISDMWDVDSTIIVPIVISVNGLIAKSLDQHLERLSLGSWIEGLMQKAVLLGTARIVRKFLSLGP

SEQ ID NO: 30502 - protein, 1201 aa, Euproctis similis
MLTRAKARLANALRPTPDSSLRSASQLPEPIPMSLAPVEASSSSSSDEYFSPLASPAPDRRKRRGRPPSSLGSRGPLVSNRIPAAGGEVHRMKWTQTINENVMRAYFRATRGGTNLTAYRSRMLLLFQDLEPSVNVSAQRLSDQVRVIQRSRLLDDVILERLRSESVQSSSDTSASQLINTITNTRKPTSSNRGIEVDDRIIDADAQYNNEELKKSLEGVIREYMFMPHNIRPPLPRLPTNRKNIALVSALDSILNSYLDKSNNLSDTHSILYCTALTACRVAGINISHNDSVTRPKPNKPSWQQRIESRIADARVLIGKLICFRSGNTRPRVMRFVKRAFLGTTYRPEEYMAQITERIDYLKQKVCAWANRIRRYKKRYERYAVNRMFQRDQKLVYRDWERPLQATDVGPLPDAITTKNFWSSIWSAPVVHSEGAWICDVERACENITRMPSIKIAENDVRCAVRSLSNWKSPGPDGLYNFWLKWLRSSHARIATQFQETIENGTLPEFLTTGNTYLLHKTGSTTDPSNYRPITSLSSIYKLLTSILRSKITQHIEMNSVMSTSQNGCRKGGRGTKELLLIDMTINQQVRRRRGDLATAWIDYKKAFDSVPHTWLMRVLELYKVDRTLCTFLETCMRQWKTVLSYPGCRQSRDGGVPLKIQRGIFQGDSLSPLWFCLALNPLSTLLENSGLGYRLRRGSRCLSHLLYMDDLKLFASNRSQLVELLRVTQTFSSSINMGFGVDKCAVMHVKRGVIVESEGISLSDSTRFRSLSVTETYKYLGISQALCINEVSLKQLMRERFFGRLKKVLNSLLSGGNKVRAFNSWVMPVLMYSFGILKWTQTELDALDRKVRTLLTASRMHHPRSSVMRLYIPRRCGGRGFLNIKSLHNREVCSLRQFLLLADVDVIRDVVRVDDGFTPLALAKENWRKPVVLNTTDRLEVWRSKELHGRFYRALHGPDVDTLTSVSWLRFGDLFGETEGFVFAIMDEVMMTNNYRKYILKDGTVDICRACHCPGESIRHIVSGCSRLANGEYLHRHNQVARIIHQQIALKYNLVERGVPYYRYMPDPVLENGHITLYWDRSIVTDRTVVANRPDIVIVDRLERRAVIVDVTIPHDENLVIAEKDKQLKYLDLAHEISDMWDVDSTIIVPIVISVNGLIAKSLDQHLERLSLGSWIKGLMQKAVLLGTARIVRKFLSLGP

SEQ ID NO: 30503 - protein, 1201 aa, Euproctis similis
MLTRAKARLANALRPTPDSSLRSASQLPEPIPMSLAPVEASSSSSSDEYFSPLASPAPDRRKRRGRPPSSLGSRGPLVSNRIPAAGGEVHRMKWTQTINENVMRAYFRATRGGTNLTAYRSRMLLLFQDLEPAVNVSAQRLSDQVRVIQRSRLLDDVILERLRSESVQSSSDTSASQLINTITNTRKPTSSNQGIEVDDRIIDADAQYNNEELKKSLEGVIREYMFMPHNIRPPLPRLPTNRKNIALVSALDSILNSYLDNSNNLSDTHSILYCTALTACRVAGINISHNDSATRPKPNKPSWQQRIESRIADARVLIGKLICFRSGNTRPRVMRFVKRAFLGTTYRPEEYMAQITERIDYLKQKVCAWANRIRRYKKRYERYAVNRMFQRDQKLVYRDWERPLQATDVGPLPDAITTKNFWSSIWSAPVVHSEGAWICDVERACENITRMPSIKIAENDVRCAVRSLSNWKSPGPDGLYNFWLKWLRSSHARIATQFQEAIEKGTLPEFLTTGNTYLLHKTGSTTDPSNYRPITCLSSIYKLLTSILRSKITQHIEMNSVMSTSQNGCRKGGRGTKELLLIDMTINQQVRRRRGDLATAWIDYKKAFDSVPHTWLMRVLELYKVDRTLCTFLETCMRQWKTVLSYPGCRQSRDGGVPLKIQRGIFQGDSLSPLWFCLALNPLSTLLENSGLGYRLRRGSRCLSHLLYMDDLKLFASNRSQLVELLRVTQTFSSSINMGFGVDKCAVMHVKRGVIVESEGISLSDSTRFRSLSVTETYKYLGISQALCINEVSMKQLMRERFFGRLKKVLNSLLSGGNKVRAFNSWVMPVLMYSFGILKWTQTELDALDRKVRTLLTASRMHHPRSSVMRLYIPRRCGGRGFLNIKSLHNREVCSLRQFLLLADVDVVRDVVRVDDGFTPLALAKENWRKPVVLNTTDRLEVWRSKELHGRFYRALHGPDVDTLTSVSWLRFGDLFGETEGFVFAIMDEVMMTNNYRKYILKDGTVDICRACHCPGESIRHIVSGCSRLANGEYLHRHNQVARIIHQQIALKYNLVERGVPYYRYMPDPVLENGHITLYWDRSIVTDRTVVANRPDIVIVDRLERRAVIVDVTIPHDENLVKAEKDKQLKYLDLAHEISDMWDVDSTIIVPIVISVNGLIAKSLDQHLERLSLGSWIKGLMQKAVLLGTARIVRKFLSLGP

SEQ ID NO: 30504 - protein, 1201 aa, Euproctis similis
MLTRAKARLANALRPTPDSSLRSASQLPEPIPMSLAPVEASSSSSSDEYFSPLASPAPDRRKRRGRPPSSLGSRGPLVSNRIPAAGGEVHRMKWTQTINENVMRAYFRATRGGTNLTAYRSRMLLLFQDLEPSVNVSAQRLSDQVRVIQRSRLLDDVILERLRSESVQSSSDTSASQLINTITNTRKPTSSNRGIEVDDRIIDADAQYNNEELKKSLEGVIREYMFMPHNIRPPLPRLPTNRKNIALVSALDSILNSYLDKSNNLSDTHSILYCTALTACRVAGINISHNDSVTRPKPNKPSWQQRIESRIADARVLIGKLICFRSGNTRPRVMRFVKRAFLGTTYRPEEYMAQITERIDYLKQKVCAWANRIRRYKKRYERYAVNRMFQRDQKLVYRDWERPLQATDVGPLPDAITTKNFWSSIWSAPVVHSEGAWICDVERACENITRMPSIKIAENDVRCAVRSLSNWKSPGPDGLYNFWLKWLRSSHARIATLFQEAIEKGTLPEFLTTGNTYLLHKTGSTTDPSNYRPITCLSSIYKLLTSILRSKITQHIEINSVMSTSQNGCRKGGRGTKELLLIDMTINQQVRRRRGDLATAWIDYKKAFDSVPHTWLMRVLELYKVDRTLCTFLETCMRQWKTVLSYPGCRQSRDGGVPLKIQRGIFQGDSLSPLWFCLALNPLSTLLENSGLGYRLQRGSRCLSHLLYMDDLKLFASNRSQLVELLRVTQTFSSSINMGFGVDKCAVMHVKRGVIVESEGISLSDSTRFRSLSVTETYKYLGISQALCINEVTLKQLMRERFFGRLKKVLNSLLSGGNKVRAFNSWVMPVLMYSFGILKWTQTELDALDRKVRTLLTASRMHHPRSSVMRLYIPRRCGGRGFLNIKSLHNREVCSLRQFLLLADVDVIRDVVRVDDGFTPLALAKENWRKPVVLNTTDRLEVWRSKELHGRFYRALHGPDVDTLTSVSWLRFGDLFGETEGFVFAIMDEVMMTNNYRKYILKDGTVDICRACHCPGESIRHIVSGCSRLANGEYLHRHNQVARIIHQQIALKYNLVERGVPYYRYMPDPVLENGHITLYWDRSIVTDRTVVANRPDIVIVDRLERRAVIVDVTIPHDENLVKAEKDKQLKYLDLAHEISDMWDVDSTIIVPIVISVNGLIAKSLDQHLERLSLGSWIKGLMQKAVLLGTARIVRKFLSLGP

SEQ ID NO: 30505 - protein, 1201 aa, Euproctis similis
MLTRAKARLANALRPTPDSSLRSASQLPEPIPLSLAPVEASSSSSSDEYFSPLASPAPDRRKRRGRPPSSLGSRGPLVSNRIPAAGGEVHRMKWTQTINENVMRAYFRATRGGTNLTAYRSRMLLLFQDLEPAVNVSAQRLSDQVRVIQRSRLLDDVILERLRSESVQSSSDTSASQLINTITNTRKPTSSNRGIEVDDRIIDADAQYNNEELKKSLEGVIREYMFMPHNIRPPLPRLPTNRKNIALVSALDSILNSYLDNSNNLSDTHSILYCTALTACRVAGINISHNDSVTRPKPNKPSWQQRIESRIADARVLIGKLICFRSGNTRPRVMRFVKRAFLGTTYRPEEYMAQITERIDYLKQKVCAWANRIRRYKKRYERYAVNRMFQRDQKLVYRDWERPLQATDVGPLPDAITTKNFWSSIWSAPVVHSEGAWICDVERACENITHMPSIKIAENDVRCAVRSLSNWKSPGPDGLYNFWLKWLRSSHARIATQFQEAIEKGTLPEFLTTGNTYLLHKTGSTTDPSNYRPITCLSSIYKLLTSILRSKITQHIEMNSVMSTSQNGCRKGGRGTKELLLIDMTINQQVRRRRGDLATAWIDYKKAFDSVPHTWLMRVLELYKVDRTLCTFLETCMRQWKTVLSYPGCRQSRDGGVPLKIQRGIFQGDSLSPLWFCLALNPLSTLLENSGLGYRLRRGSRCLSHLLYMDDLKLFASNRSQLVELLRVTQTFSSSINMGFGVDKCAVMHVKRGVIVESEGISLSDSTRFRSLSVTETYKYLGISQALCINEVSMKQLMRERFFGRLKKVLNSLLSGGNKVRAFNSWVMPVLMYSFGILKWTQTELDALDRKVRTLLTASRMHHPRSSVMRLYIPRRCGGRGFLNIKSLHNREVCSLRQFLLLADVDVIRDVVRVDNGFTPLALAKENWRKPVVLNTTDRLEVWRNKELHGRFYRALHGPDVDTLTSVSWLRFGDLFGETEGFVFAIMDEVMMTNNYRKYILKDGTVDICRACHCPGESIRHIVSGCSRLANGEYLHRHNQVARIIHQQIAIKYNLVERGVPYYRYMPDPVLENGHITLYWDRSIVTDRTVVANRPDIVIVDRLERRAVIVDVTIPHDENLVKAEKHKQLKYLDLAHEISDMWDVDSTIIVPIVISVNGLIAKSLDQHLERLSLGSWIKGLMQKAVLLGTARIVRKFLSLGP

SEQ ID NO: 30506 - protein, 1201 aa, Euproctis similis
MLTRAKARLANALRPTPDSSLRSASQLPEPIPMSLAPVEASSSSSSDEYFSPLASPTPDRRKRRGRPPSSLGSRGPLVSNRIPAAGGEVHRMKWTQTINENVMRAYFRATRGGTNLTAYRSRMLLLFRDLEPAVNVSAQRLSDQVRVIQRSRLLDDVILERLRSESVQSSSDTSASQLINTITNTRKPTSSNRGIEVDDRIIDTDAQYNNEELKKSLEGVIREYMFMPHNIRPPLPRLPTNRKNIALVSALDSILNSYLDNSNNLSDTHSILYCTALTACRVAGINISHNDSVTRPKPNKPSWQQRIENRIVDARVLIGKLICFRSGNTRPRVMRFVKRAFLGTTYRPEEYMAQITERIDYLKQKVCAWANRIRRYKKRYERYAVNRMFQRDQKLVYRDWERPLQATDVGPLPDAITTKNFWSSIWSAPVVHSEGAWICDVERACENITRMPSIKIAENDVRCAVRSLSNWKSPGPDGLYNFWLKWLRSSHARIATQFQEAIEKGTLPEFLTTGNTYLLHKTGSTTDPSNYRPITCLSSIYKLLTSILRSKITQHIEMNSVISTSQNGCRKGGRGTKELLLIDMTINQQVRRRRGDLATAWIDYKKAFDSVPHTWLMRVLELYKVDRTLCTFLETCMRQWKTVLSYPGCRQSRDGGVPLKIQRGIFQGDSLSPLWFCLGLNPLSTLLENSGLGYRLRRGSRCLSHLLYMDDLKLFASNRSQLVELLRVTQTFSSSINMGFGVDKCAVMHVKRGVIVESEGISLSDSTRFRSLSVTETYKYLGISQALCINEVSMKQLMRERFFGRLKKVLNSLLSGGNKVRAFNSWVMPVLMYSFGILKWTQTELDALDRKVRTLLTASRMHHPRSSVMRLYIPRRCGGRGFLNIKSLHNREVCSLRQFLLLADVDVIRDVVRVDDGFTPLALAKENWRKPVVLNTTDRLEVWRSKELHGRFYRALHGPDVDTLTSVSWLRFGDLFGETEGFVFAIMDEVMMTNNYRRYILKDGTVDICRACHCPGESIRHIVSGCSRLANGEYLHRHNQVARIIHQQIALKYNLVERGVPYYRYMPDPVLENGHITLYWDRSIVTDRTVVANRPDIVIVDRLERRAVIVDVTIPHDENLVKAEKDKQLKYLDLAHEISDMWDVDSTIIVPIVISVNGLIAKSLDQHLERLSLGSWIKGLMQKAVLLGTARIVRKFLSLGP

SEQ ID NO: 30507 - protein, 1201 aa, Euproctis similis
MLTRAKARLANALRPTPDSSLRSASQLPEPIPMSLAPVEASSSSSSDEYFSPLASPAPDRRKRRGRPPSSLGSRGPLVSNRIPAAGGEVHRMKWTQTINENVMRAYFRATRGGTNLTAYRSRMLLLFQDLEPSVNVSAQRLSDQVRVIQRSRLLDDVILERLRSESVQSSSDTSASQLINTITNTRKPTSSNRGIEVDDRIIDADAQYNNEELKKSLEGVIREYMFMPHNIRPPLPRLPTNRKNIALVSALDSILNSYLDKSNNLSDTHSILYCTALTACRVAGINISHNDSVTRPKPNKPSWQQRIESRIADARVLIGKLICFRSGNTRPRVMRFVKRAFLGTTYRPEEYMAQITERIDYLKQKVCAWANRIRRYKKRYERYAVNRMFQGDQKLVYRDWERPLQATDVGPLPDAITTKNFWSSIWSAPVVHSEGAWICDVERACENITRMPSIKIAENDVRCAVRSLSNWKSPGPDGLYNFWLKWLRSSHARIATQFQEAIEKGTLPEFLTTGNTYLLHKTGSTTDPSNYRPITCLSSIYKLLTSILRSKITQHIEMNSVMSTSQNGCRKGGRGTKELLLIDMTINQQVRRRRGDLATAWIDYKKAFDSVPHTWLMRVLELYKVDRTLCTFLETCMRQWKTVLSYPGCRQSRNGGVPLKIQRGIFQGDSLSPLWFCLALNPLSTLLENSGLGYRLQRGSRCLSHLLYMDDLKLFASNRSQLVELLRVTQTFSSSINMGFGVDKCAVMHVKRGVIVESEGISLSDSTRFRSLSVTETYKYLGISQALCINEVSLKQLMRERFFGRLKKVLNSLLSGGNKVRAFNSWVMPVLMYSFGILKWTQTELDALDRKVRTLLTASRMHHPRSSVMRLYIPRRCGGRGFLNIKSLHNREVCSLRQFLLLADVDVIRDVVRVDDGFTPLALAKENWRKPVVLNTTDRLEVWRSKELHGRFYRALHGPDVDTLTSVSWLRFGDLFGETEGFVFAIMDEVMMTNNYRKYILKDGTVDICRACHCPGESIRHIVSGCSRLANGEYLHRHNQVARIIHQQIALKYNLVERGVPYYRYMPDPVLENGHITLYWDRSIVTDRTVVANRPDIVIVDRLERRAVIVDVTIPHDENLVKAEKDKQLKYLDLAHEISDMWDVDSTIIVPIVISVNGLIAKSLDQHLERLSLGSWIKGLMQKAVLLGTARIVRKFLSLGP

SEQ ID NO: 30508 - protein, 1201 aa, Euproctis similis
MLTRAKARLANALRPTPDSSLRSASQLPEPIPMSLAPVEASSSSSSDEYFSPLASPAPDRRKRRGRPPSSLGSRGPLVSNRIPAAGGEVHRMKWTQTINENVMRAYFGATRGGTNLTAYRSRMLLLFQDLEPAVNVTAQRLSDQVRVIQRSRLLDDVILERLRSESVQSSSDTSASQLINTITNTRKPTSSNQGIEVDDRIIDADAQYNNEELKKSLEGVIREYMFMPHNIRPPLPRLPTNRKNIALVSALDSILNSYLDNSNNLSDTHSILYCTALTACRVVGINISHNDSVTRPKPNKPSWQQRIESRIADARVLIGKLICFRSGNTRPRVMRFVKRAFLGTTYRPEEYMAQITERIDYLKQKICAWANRIRRYKKRYERYAVNRMFQRDQKLVYRDWDRPLQATDVGPLPDAITTKNFWSSIWSAPVVHSEGAWICDVERACENITCMPSIKIAENDVRCAVRSLSNWKSPGPDGLYNFWLKWLRSSHARIATQFQEAIEKGTLPEFLTTGNTYLLHKTGSTTDPSNYRPITCLSSIYKLLTSILRSKITQHIEMNSVMSTSQNGCRKGGRGTKELLLIDMTINQQVRRRRGDLATAWIDYKKAFDSVPHTWLMRVLELYKVDRTLCTFLETCMRQWKTVLSYPGCRQSRDGGVPLKIQRGIFQGDSLSPLWFCLALNPLSTLLENSGLGYRLRRGSRCLSHLLYMDDLKLFASNRSQLVELLRVTQTFSSSINMGFGVDKCAVMHVKRGVIVESEGISLSDSTRFRSLSVTETYKYLGISQALCINEVSMKQLMRERFFGRLKKVLNSLLSGGNKVRAFNSWVMPVLMYSFGILKWTQTELDALDRKVRTLLTASRMHHPRSSVMRLYIPRRCGGRGFLNIKSLHNREVCSLRQFLLLADVDVIRDVVRVDDGFTPLALAKENWRKPVVLNTTDRLEVWRSKELHGRFYRALHGPDVDTLTSVSWLRFGDLFGETEGFVFAIMDEVMMTNNYRKYILKDGTVDICRACHCPGESIRHIVSGCSRLANGEYLHRHNQVARIIHQQIALKYNLVERGVPYYRYMPDPVLENGHITLYWDRSIVTDRTVVANRPDIVIVDRLERRAVIVDVTVPHDENLVKAEKDKQLKYLDLAHEISDMWDVDSTIIVPIVISVNGLIAKSLDQHLERLSLGSWIKGLMQKAVLLGTARIVRRFLSLGP

SEQ ID NO: 30509 - protein, 868 aa, Xestia xanthographa
MRFVRRAFSGTDISFRDYLARVTERIDSLKQKICAWASRIRRYKRRVERYTQSRTFQSDERWVYRAWERPDQGVTDTRLPDDSAMYSFWRNIWSVPVSHTEGDWTREVEQACDPIPEMGAIIISPQDVARAVRPLPNWKSPGPDGLHNFWIKWFQRSHARLASQFQSALESGSLPQFLTTGITHLLHKSGSVAEPKNYRPITCLPTVYKVLTSILRAKINQHIDSNSIMSASQNGCKNGSRGTKELLLIDMAISQQVHRSRKNLSTCWIDYKKAYDSVPHTWLMKVLELYKIDATLRTFLMSCMGHWRTVLRYPGCRQIQGNSEPIRIERGIFQGDSLSPLWFCLALNPLSTLLERSGLGYLLRRGGQVISHLLYMDDLKLFAPNNLQLMKLLKVTETFSSAIRMEFGVDKCAVMHVKRGEIMESVGTQLSDSIHLRSLSSTETYKYLGMSEALGINTADVKQSLKERFFGRLNKVLGSLLSGGNKVRAFNGWVMPVLMYSFGILKWTQTELDALDRRVRTLLTANRMHHPRSSVMRLYIPRNCGGRGFLNAKTLHKREVCSLREYFLEADGEMHRDVVSVDKGLTPLFLANENWRKPKVLDTNDRKVEWQGKELHGRFYRALHGPDVDFLPSVSWLRFGDLFGETEGFICAIMDEVMMTNNYRKYIVKDGTVDICRACHRPGESIRHIISGCSSLANGEYLHRHNLVARIIHQQLALKYNLVESEVPYYKYAPDPVLDNGHITLYWDRPITTDRTVVANRPDIVVIDRLERRTMIVDITIPHDENLVKAEKDKQFKYLDLAREVVDMWDVSTAVIVPIVVSANGLIAKSLDQHLRRLSLGSWIKGLIQKAVLLDTARIVRRFLSQEP

SEQ ID NO: 30510 - protein, 1186 aa, Mamestra brassicae
MLTRAASRRARPPSPDPSLSSASPPPDSGSPMSPAVAVASSSSDEYFSPPTSPTPVRRQGRGRPPRGLGPRGQPAPSRVPATGGCVQRMRWTQSMNENVMRAYYGSTEGGTNLTAYRVRMLSLFQDLEPTVNVSAQRLSDQVRVIQRNHRLDVAALDRLRSEVLNNLIISTPTQTAVQAPVNDAITPRPNNVSHEVDERSALEDALREYRSTPTELRPRLPRLSMHKKNRALVCALDSLLQNTFESSESLVDTHSILFCGAVAACRIANVKFPSYDEAIRPKPAAPAWQCRIERRIDEARALIGKLYCFREGNTRSRVMRFVRRAFLGTGISPRDFTSRVTERIDFLKQKVCAWANRIRRYKRRVDRYSQNRMFQSDERWVYRAWERPEQSVMDVCRPDDNTTSTFWRGIWSVPVCHTEGGWLRDVEHVCEAIPEMDTITITPLDVAKAVRPLPNWKSPGPDGLHNFWLKWYSSSHVLLASQFQSSLESGSLPQFLTTGVTHLLHKTGSPAEPKNYRPITCLSTVYKLLTSILRAKINQHIERNSIMSASQNGCRKGSRGTKELLLIDMAISQQVRRSRKDLSTCWIDYKKAYDSVPHTWLMKVLELYKIDATLRTFLESCMRQWKTVLRYPGCRPIQGSDEPVWIKRGIFQGDSLSPLWFCLALNPLSTLLEDSGLGYRSRRGGQAISHLLYMDDLKLFAPNNLRLMELLKVTETFSSSIRMEFGVDKCAVMHVKKGEIMESEGIQLSDSIQVRSLSSTETYKYLGMSEALGINGADMKQSLRERFFGRLKKVLNSLLSGGNKVRAFNGWVMPVLMYSYGILKWTQTELDALDRRVRTLLTANRMHHPRSSVMRLYIPRKCGGRGFLNAKTLHNREVCNLRDFFLKTDVGMHRDVVAVDKGLTPLSMAKENWRKPVILTTDDRKEVWKGKELHGRFYRALHEPDVDFPASVSWLRFGDLFGETEGFVCAIMDEVILTNNYRRYIMKDGTVDVCRACHRPGESIRHIISGCSRLANGEYLHRHNQVARIIHQQLALKYQLVDSEVPYYKYVPDPVLENDHVTLYWDRSIITDRTIVANKPDIVVIDRLARRTMIIDVTIPHDVNLVKAEKEKQIKYLDLAHEVVDMWNVDSALIVPIVVTANGLLSKSFDDHLSKLSLRGWVKGLIQKAVLLDTARIVRRFLSLEP

SEQ ID NO: 30511 - protein, 1199 aa, Mamestra brassicae
MLTRAASRRARPPSPDPSLSSASPPPDSGSPMSPAVAVASSSSDEYFSPPTSPTPVRRQGRGRPPRGLGPRGQPAPSRVPATGGCVQRMRWTQSMNENVMRAYYGSTEGGTNLTAYRVRMLSLFQDLEPTVNVSAQRLSDQVRVIQRNHRLDDAALDRLRSEVLNNLIISTPTQTAVQAPVNDAITPRPNNVSHEVDDRVVTVSSQCNDRLRSALEDALREYRSTPTELRPRLPRLSMHKKNRALVCALDSLLQNTFESSESLVDTHSILFCGAVAACRIANVKFPSYDEAIRPKPAAPAWQCRIERRIDEARALIGKLYCFREGNTRPRVMRFVRRAFLGTGISPRDFTSRVTERIDFLKQKVCAWANRIRRYKRRVDRYSQNRMFQSDERWVYRAWGRPEQSVMDVCRPDDNTTSTFWRGIWSVPVCHTEGGWLRDVEHVCEAIPEMDTITITPLDVAKAVRPLPNWKSPGPDGLHNFWLKWYSSSHVLLASQFQSSLESGSLPQFLTTGVTHLLHKTGSPAEPKNYRPITCLSTVYKLLTSILRAKINQHIERNSIMSASQNGCRKGSRGTKELLLIDMAISQQVRRSRKDLSTCWIDYKKAYDSVPHTWLMKVLELYKIDATLRTFLESCMRQWKTVLRYPGCRPIQGSDEPVWIKRGIFQGDSLSPLWFCLALNPLSTLLEDSGLGYRLRRGGQAISHLLYMDDLKLFAPNNLRLMELLKVTETFSSSIRMEFGVDKCAVMHVKKGEIMESEGIQLSDSIQVRSLSSTETYKYLGMSEALGINGADMKQSLRERFFGRLKKVLNSLLSGGNKVRAFNGWVMPVLMYSYGILKWTQTELDALDRRVRTLLTANRMHHPRSSVMRLYIPRKCGGRGFLNAKTLHNREVCNLRDFFLKTDVGMHRDVVAVDKGLTPLSMAKENWRKPVILTTDDRKEVWKGKELHGRFYRALHEPDVDFPASVSWLRFGDLFGETEGFVCAIMDEVILTNNYRRYIMKDGTVDVCRACHRPGESIRHIISGCSRLANGEYLHRHNQVARIIHQQLALKYQLVDSEVPYYKYVPDPVLENDHVTLYWDRSIITDRTIVANKPDIVVIDRLARRTMIIDVTIPHDVNLVKAEKEKQIKYLDLAHEVVDMWNVDSAVIVPIVVTANGLLSKSFDDHLSKLSLRGWVKGLIQKAVLLDTARIVRRFLSLEP

SEQ ID NO: 30512 - protein, 961 aa, Noctua janthe
MHNKNRALVCALDSQLKNIFESSENLVDTHSILYCGAVAACRLANVKFPNYDVAIRPKPAVPTWQRRIECRIDEARVLIGKLHCFREGNTRPRVMRFVRRAFSGTGISPQEYMSRVTERIDFLKQKVYAWANRIRRYKRRVDRYSQNRIFQSDERWVCRAWERPEQNMTDVCRPDDAATSSFWRSIWSLPVCHTEADWIRDVERTCEPIPEMEPILITPIDIARAVRPLPNWKSPGPDGLHDFWLKWLSSSHTCLSSQFQSSLESGSLPQFLTTGVTHLLHKSGPAEPKNYRPITCLSTVYKLLTSILRVKINTHIDKNFIMSASQNGCRNRSRGTKELLLIDMAISQQVRRSRKDLLTCWIDYKKAYDSVPHTWLMRVLELYKIDATLRAFLGSCMGQWRTVLRYPGYRQIQRNDEPVWIKRGIFQGDSLSPLWFWLALNPLSTWLEDSGLGYRLRRGGQVISHLLYMDDLKLFAHNKLRLMELLKVTETFSNAIRMEFGVDKCAVMYVKRGEIMECEGIQLSDSIHHRSLSSSESYKYLGMSESLGINVTDMKQSLRESFFGRLNKVLNSLLSGGNKVRAFNGWVMPVLMYSFGVLKWTQTKLDALDRRVRTLLTANRMHHPRSSVMRLYIPRKCGGRGFLNAKTLHNHEICSLREYFLKTEVGMHRDVVAVDKGLTPLSMAKENWRKPVVLTTDDRKEVWQGKELHGRFYRTLHGPDVDFLASVSWLRFGDLFGETEGFVCAIMDEVMLTNNYRKYIMKDWTVDVCRACHRPGESIRRIISGCSRLANGEYLHRHNQVARIIHQQLALKYKLVESEVPYYKYVPDPVLEKDHVTLYWDRSIITDRTIVANKPDIVVIDRLARRVMIVDVTIPHDENLVKAEKEKQIKCLDLAHEVIDMWNVNSAMIVPIVVTANGLIAKSLDDHLSRLSLGGWIKGLIQKAVLLDTARIVRRFLSLEP

SEQ ID NO: 30513 - protein, 1068 aa, Griposia aprilina
MLSLFQVLEPAVNVTAQRLSDQVRVIQRNHMLDDTVLDRLRNEMQSSHVIAPPSQTVVVLPQSKTSQADEESDDRATNVSTQCNDELRSALEDAIREYRPRLPRLPMHNKNRALVVALDAQLSNYFDDCVDLTDTHSILYCAAVAACRVAHVKFANDSRATRPKPAVPAWQCRIERRIGGARALIGKLICFREGNTRPRVMRFVRRAFAGTDISPQDYMSCVTERIDFLKQKVYAWANRIRRYKRRVQRYTQNRTFQRDERWVYRGWERPDQGVADTCLPDDDAMCSFWRNIWSVPVSHTEGDWTREVERACDPIPEMGAITICPQDVTRAVRPLPNWKSPGPDGLHNFWIKWFGRSHARLAAQYQVALESGTLPQFLTTGVTHLLHKSGSTAEPKNYRPIACLPTVYKVLTSILRDKINKHIDTNYIMSPSQNGCRNGSRGTKELLLIDMAISQQVRRSRKDLSTCWIDYKKAYDSVPHTWLMRVLELYKVEATLRTFLMSCMGQWRTVLRYPACRNTQRNSEPIRIERGIFQGDSLSPLWFCLALNPLSTLLKDSGLGYRLRRGGQVISHLLYMDDLKLFAPNNSQLMDLLKVTETFSSAIRMEFGVDKCAVMHVKRGEIVESVGTQLSDSINLRALSASETYKYLGMSEALGINGTDMKQSLKDRFFGRLKKVFNSLLSGGNKVRAFNGWVMPVLMYSFGILKWTQTELDALDRKVRTLLTANRMHHPRSSVMRLYIPRKCGGRGFLNAKTLHNREICSLREYFLEADVGMHRDVVTVDKGLTPLSLAKENWRKPVVLDTNDRMEVWQSKELHGRFFRALHGPDVDQLASVAWLRFGDLFGETEGFVCAIMDEVMMTNNYRRFIVKDGTVDICRACHRPGESIRHIISGCSRLANEEYLHRHNLVARIIHQQLALKYSLVESEVPYYRYVPDPVLENGHITLYWDRSIITDRTIVANKPDIVMVDRLERRAMIVDITVPHDGNLVKAEKDKQIKYLDLAREVVDMWDVDSALIVPIVVTANGLIAKSLDQHLRRLSLGSWIKGLIQKAVLLDTARIVRRFLSLEP

SEQ ID NO: 30514 - protein, 1200 aa, Mythimna ferrago
MLTRSRAQQLNTQLTTSGPSLSSASQPPGPAPAVSPEIPVAAVASSSSDEYFSPPTTPPPARWRGRGRPPACLGPRGPPASDRVPAAGGSVQRMRWTQSINENVMRSYFGATEGGTNLTAYRGRMLSLFQVLEPAVNVSAQRLSDQVRVIQRNRMLDDAVLDRLRLESRNGRVSPVSPPAVVQRQPSVSPRPDHVGEDDDDGAISVSTQCNVRLRSALEDAFREYRSIPPELRPRLPRLPMHRKNRALVCALDSQLSNCFDSSEDLTDTHSILYCAAAAACRVAHVKIPNIDRATRPAKPAWQCRIERRIGEARALIGKLICFREGNTRPRVMRFVRRAFSGTDISPRDYLPRITERIDFLRQKVYAWANRIRRYKRRVERYTQNRAFQSNERWVYRAWERPDQSVIDTRLPDDDAMYSFWRSIWSVPVNHTEGDWTRKVERECELLPEMGAVTISPQDVARAVRPLPNWKSPGPDGLHNFWLKWFKSSHARLASQFQSALESGSLPQFLTTGITHLLHKSGSTAEPKNYRPITCLPTVYKVLTSILRAKINSHIETNSIMSASQNGCRNGSRGTKELLLIDVAISQQVRRSRRDLSTCWIDYKKAYDSVPHTWLMRVLELYKIDVTLRTFLMSCMGQWRTVLHYPGCRRVSENSEPLRIERGIFQGDSLSPLWFCLALNPLSTLLEGSGVGYRLRREGQVISHLLYMDDLKLFASNNLQLMELLKVTETFSSAIRMEFGLDKCAVMHVKRGEIMESVGTQLSDSIHLRSLCSTETYKYLGMSEALGINAADVKQSLRERFFGRLNKVLKSLLSGGNKVRAFNGWVMPVLMYSFGILKWTQTELDALDRRVRTLLTANRMHHPRSSVMRLYIPRKCGGRGFLNAKTLHNREVCSLRKYFLETDVGMHRDVVTVDKGLTPLSLANENWRKPIVMDINERKEVWKGKELHGRFYRALHGPEVDLLASVSWLRFGDLFGETEGFVFAIMDEVMMTNNYRKYIVKDGTVDICRACHRPGESIRHIISGCSHLANGDYLHRHNLVARIIHQQLALKYNLVESEVPYYRYVPDPVLENGNVTLYWDRSIITDRTIVANKPDIVVIDRLERRTMIVDIAVPHDENLVKAEKDKQTKYLDLAREVVDMWEVDRAIIVPIVVTANGLIAKSLDQHLRRLSLGSWIKGLIQKAVLLDTARIVRRFLSQEP

SEQ ID NO: 30515 - protein, 1211 aa, Xestia xanthographa
MSPMLTRHRAKLQKEAHPPSPGSSLSSASQRPGRATPVSTVSSVAAVASSSSDEFFSPPSTPPPPPRGRRRGRGRPPAGLGPRGQQAPSRVPAAGGNVSRMRWTQSINENVMRAYYGATEGGSNLTAYRSRMLSLFQVLEPAVSVEAQRLSDQVRVIQRNHMLDDTVLDRLRSESRSNLVTPASPMIAVQHQNIPSAPPRSDYDGEEDRDEVISVSTQCNAQLRSALEGAFREYRSTPPELRPRLPRLPMHNKNKALMCALDSQLSNCFDSSKDLTDTHSILYCGAVAACRVAHVKFPNNDRATRPKLAVPAWQWRIERRIGEARALIGKLICFREGNTRPRVMRFVRRAFSGTDISFRDYLARVTERIDSLKQKICAWASRIRRYKRRVERYTQNRTFQSDERWVYRAWERPDQGVTDTRLPDDSAMYSFWRNIWSVPVSHTEGDWTREVEQACDPIPEMGAIIISPQDVARAVRPLPNWKSPGPDGLHNFWIKWFQRSHARLASQFQSALESGSLPQFLTTGITHLLHKSGSAAEPKNYRPITCLPTVYKVLTSILRAKINQHIDSNSIMSASQNGCRNGSRGTKELLLIDMAISQQVRRSRKNLSTCWIDYKKAYDSVPHTWLMRVLELYKIDATLRTFLMSCMGHWRTVLRYPGCRQIQGNSEPIRIERGIFQGDSLSPLWFCLALNPLSTLLERSGLGYLLRRDGQVISHLLYMDDLKLFAPNNLQLMKLLKVTETFSSAIRMEFGVDKCAVMHVKRGEIMESEGTQLSDSIHLRSLSATETYKYLGMSEALGINTADMKQSLRERFFGRLNKVLGSLLSGGNKVRAFNGWVMPVLMYSFGILKWTQTELDALDRRVRTLLTANRMHHPRSSVMRLYIPRKCGGRGFLNAKTLHNREVYSLREYFLEAEGEMHRDVVSVDKGLTPLSLANENWRKPKVLDTNDRKVEWQGKELHGRFYRALHGPDVDFLASVSWLRFGDLFGETEGFICAIMDEVMMTNNYRKYIVKDGTVDICRACHRPGESIRHIISGCSSLANGEYLHRHNLVARIIHQQLALKYNLVESEVPYYKYAPDPVLDNGHITLYWDRPITTDRTVVANRPDIVVIDRLERRAMIVDITIPHDENLVKAEKDKQFKNLDLAREVVDMWDVGTAVIVPIVVSANGLIAKSLDQHLRRLSLGSWIKGLIQRAVLLDTARIVRRFLSQEP

SEQ ID NO: 30516 - protein, 1200 aa, Mythimna ferrago
MLTRSRAQQLNAQLTTSGPSLSSASQPPGPAPAVSPEIPVAAVASSSSDEYFSPPTTPPPARRRGRGRPPACLGPRGPPASDRVPAAGGSVQRMRWTQSINENVMRSYFGATEGGTNLTAYRGRMLSLFQVLEPAVNVSAQRLSDQVRVIQRNRMLDDAVLDRLRLESRNGRVSPVSPPAAVQRQPSVSPRPDHVGEDDDDGAISVSTQCNVRLRSALEDAFREYRSIPPELRPRLPRLPMHRKNRALVCALDSQLSNCFDSSEDLTDTHSILYCAAAAACRVAHVKIPNSDRATRPAKPAWQCRIERRIGEARALIGKLICFREGNTRPRVMRFVRRAFSGTDISPRDYLPRITERIDFLRQKVYAWANRIRRHKRRVERYTQNRAFQSNERWVYRAWERPDQSVIDTRLPDDDAMYSFWRSIWSVPVNHTEGDWTRKVERECELLPEMGAVTISPQDVARAVRPLPNWKSPGPDGLHNFWLKWFKSSHARLASQFQSALESGSLPQFLTTGITHLLHKSGSTAEPKNYRPITCLPTVYKVLISILRAKINSHIETNSIMSASQNGCRNGSRGTKELLLIGVAISQQVRRSRRDLSTCWIDYKKAYDSVPHTWLMRVLELYKIDVTLRTFLMSCMGQWRTVLHYPGCRRVSENSEPLRVERGIFQGDSLSPLWFCLALNPLSTLLEGSGVGYRLRREGQVISHLLYMDDLKLFASNNLQLMELLKVTETFSSAIRMEFGLDKCAVMHVKRGEIMESVGTQLSDSIHLRSLCSTETYKYLGMSEALGINAADVKQSLRERFFGRLNKVLKSLLSGGNKVRAFNGWVMPVLMYSFGILKWTQTELDALDRRVRTLLTANRMHHPRSSVMRLYIPRKCGGRGFLNAKTLHNREVCSLRKYFLETDVGMHRDVVAVDKGLTPLSLANENWRKPIVMEINELKEVWKGKELHGRFYRALHGPDVDLLASVSWLRFGDLFGETEGFVFAIMDEVMMTNNYRKYIVKDGTVDICRACHRPGESIRHIISGCSHLANGDYLHRHNLVARIIHQQLALKYNLVESEVPYYRYVPDPVLENGSVTLYWDRSIITDRTIVANKPDIVVIDRLERRTMIVDIAVPHDENLVKAEKDKQTKYLDLAREVVDMWEVDRAIIVPIVVTANGLIAKSLDQHLRRLSLGSWIKGLIQKAVLLDTARIVRRFLSQEP

SEQ ID NO: 30517 - protein, 1200 aa, Mythimna ferrago
MLTRSRAQQLNTQLTTSGPSLSSASQPPGPAPAVSPEIPVAAVASSSSDEYFSPPTTPPPARRRGRGRPPACLGPRGPPASDRVPAVGGSVQRMRWTQSINENVMRSYFGATEGGTNLTAYRGRMLSLFQVLEPAVNVSAQRLSDQVRVIQRNRMLDDAVLDRLRLESRNGRVSPVSPPAVVQRQPSVSPRPDHVGEDDDDGAISVSTQCNVRLRSALEDAFREYRSIPPELRPRLPRLPMHRKNRALVCALDSQLSNCFDSSEDLTDTHSILYCAAAAACRVAHVKIPNSDRATRPAKPAWQCRIERRIGEARALIGKLICFREGNTRPRVMRFVRRAFSGTDISPRDYLPRITERIDFLRQKVYAWANRIRRYKRRVERYTQNRAFQSNERWVYRAWERPDQSVIDTRLPDDDAMYSFWRSIWSVPVNHTEGDWTRKVERECELLPEMGAVTISPQDVARAVRPLPNWKSPGPDGLHNFWLKWFKSSHARLASQFQSALESGSLPQFLTTGITHLLHKSGSTAEPKNYRPITCLPTVYKVLTSILRAKINSHIETNSIMSASQNGCRNGSRGTKELLLIDVAISQQVRRSRRDLSTCWIDYKKAYDSVPHTWLMRVLELYKIDVTLRTFLMSCMGQWRTVLHYPGCRRVSENSEPLRIERGIFQGDSLSPLWFCLALNPLSTLLEGSGVGYRLRREGQVISHLLYMDDLKLFASNNLQLMELLKVTETFSSAIRMEFGLDKCAVMHVKRGEIMESVGTQLSDSIHLRSLCSTETYKYLGMSEALGINAADVKQSLRERFFGRLNKVLKSLLSGGNKVRAFNGWVMPVLMYSFGILKWTQTELDALDRRVRTLLTANRMHHPRSSVMKLYIPRKCGGRGFLNAKTLHNREVCSLRKYFLETDVGMHRDVVAVDKGLTPLSLANENWRKPIVMDINERKEVWKGKELHGRFYRALHGPEVDLLASVSWLRFGDLFGETEGFVFAIMDEVMMTNNYRKYIVKDGTVDICRACHRPGESIRHIISGCSHLANGDYLHRHNLVARIIHQQLALKYNLVESEVPYYRYVPDPVLENGSVTLYWDRSIITDRTIVANKPDIVVIDRLERRTMIVDIAVPHDENLVKAEKDKQTKYLDLAREVVDMWEVDRAIIVPIVVTANGLIAKSLDQHLRRLSLGSWIKGLIQKAVLLDTARIVRRFLSQEP

SEQ ID NO: 30518 - protein, 1046 aa, Mythimna ferrago
MLDDAVLDRLRLESRNGRVSPVSPPAVVQRQPSVSPRPDHVGEDDDDGAISVSTQCNVRLRSALEDAFREYRSIPPELRPRLPRLPMHRKNRALVCALDSQLSNCFDSSEDLTDTHSILYCAAAAACRVAHVKIPNSDRATRPAKPAWQCRIERPIGEARALIGKLICFREGNTRPRVMRFVRRAFSGTDISPRDYLPRITERIDFLRQKVYAWANRIRRYKRRVERYTQNRAFQSNERWVYRAWERPDQSVIDTRLPDDDAMYSFWRSIWSVPVNHTEGDWTRKVERECELLPEMGAVTISPQDVARAVRPLPNWKSPGPDGLHNFWLKWFKSSHARLASQFQSALESGSLPQFLTTGITHLLHKSGSTAEPKNYRPITCLPTVYKVLTSILRAKINSHIETNSIMSASQNGCRNGSRGTKELLLIDVAISQQVRRSRRDLSTCWIDYKKAYDSVPHTWLMRVLELYKIDVTLRTFLMSCMGQWRTVLHYPGCRRVSENSEPLRIERGIFQGDSLSPLWFCLALNPLSTLLEGSGVGYRLRREGQVISHLLYMDDLKLFASNNLQLMELLKVTETFSSAIRMEFGLDKCAVMHVKRGEIMESVGTQLSDSIHLRSLCSTETYKYLGMSEALGINAADVKQSLRERFFGRLNKVLKSLLSGGNKVRAFNGWVMPVLMYSFGILKWTQTELDALDRRVRTLLTANRMHHPRSSVMRLYIPRKCGGRGFLNAKTLHNREVCSLRKYFLETDVGMHRDVVAVDKGLTPLSLANENWRKPIVMDINERKEVWKGKELHGRFYRALHGPEVDLLASVSWLRFGDLFGETEGFVFAIMDEVMMTNNYRKYIVKDGTVDICRACHRPGESIRHIISGCSHLANGDYLHRHNLVARIIHQQLALKYNLVESEVPYYRYVPDPVLENGSVTLYWDRSIITDRTIVANKPDIVVIDRLERRTMIVDIAVPHDENLVKAEKDKQTKYLDLAREVVDMWEVDRAIIVPIVVTANGLIAKSLDQHLRRLSLGSWIKGLIQKAVLLDTARIVRRFLSQEP

SEQ ID NO: 30519 - protein, 1200 aa, Mythimna ferrago
MLTRSRAQQLNTQLTTSGPSLSSASQPPGPAPAVSPEIPVAAVASSSSDEYFSPPTTPPPARRRGRGRPPACLGPRGPPASDRVPAVGGSVQRMRWTQSINENVMRSYFGATEGGTNLTAYRGRMLSLFQVLEPAVNVSAQRLSDQVRVIQRNRMLDDAVLDRLRLESRNGRVSPVSPPAVVQRQPSVSPRPDHVGEDDDDGAISVSTQCNVRLRSALEDAFREYRSIPPELRPRLPRLPMHRKNRALVCALDSQLSNCFDSSEDLTDTHSILYCAAAAACRVAHVKIPNSDRATRPAKPAWQCRIERRIGEARALIGKLICFREGNTRPRVMRFVRRAFSGTDISPRDYLPRITERIDFLRQKVYAWANRIRRYKRRVERYTRNRAFQSNGRWVYRAWERPDQSVIDTRLPDDDAMYSFWRSIWSVPVNHTEGDWTRKVERECELLPEMGAVTISPQDVARAVRPLPNWKSPGPDGLHNFWLKWFKSSHARLASQFQSALESGSLPQFLTTGITHLLHKSGSTAEPKNYRPITCLPTVYKVLTSILRAKINSHIETNSIMSASQNGCRNGSRGTKELLLIDVAISQQVRRSRRDLSTCWIDYKKAYDSVPHTWLMRVLELYKIDVTLRTFLMSCMGQWRTVLHYPGCRRVSENSEPLRIERGIFQGDSLSPLWFCLALNPLSTLLEGSGVGYRLRREGQVISHLLYMDDLKLFASNNLQLMELLKVTETFSSAIRMEFGLDKCAVMHVKRGEIMESVGTQLSDSIHLRSLCSTETYKYLGMSEALGINAADVKQSLRERFFGRLNKVLKSLLSGGNKVRAFNGWVMPVLMYSFGILKWTQTELDALDRRVRTLLTANRMHHPRSSVMRLYIPRKCGGRGFLNAKTLHNREVCSLRKYFLETDVGMHRDVVAVDKGLTPLSLANENWRKPIVMDINERKEVWKGKELHGRFYRALHGPEVDLLASVSWLRFGDLFGETEGFVFAIMDEVMMTNNYRKYIVKDGTVDICRACHRPGESIRHIISGCSHLANGDYLHRHNLVARIIHQQLALKYNLVESEVPYYRYVPDPVLENGSVTLYWDRSIITDRTIVANKPDIVVIDRLERRTMIVDIAVPHDENLVKAEKDKQTKYLDLAREVVDMWEVDRAIIVPIVVTANGLIAKSLDQHLRRLSLGSWIKGLIQKAVLLDTARIVRRFLSQEP

SEQ ID NO: 30520 - protein, 1211 aa, Xestia xanthographa
MSRMLTRHRAKLQKEAHPPSPGSSLSSASQPPGRATPVSSVSPAAAIASSSSDEFFSPPSTPPPPPRGRRRGRGRPPAGLGPRGQQAPSRVPAAGGNVSRMRWTQSMNENVMRAYYGATEGGSNLTAYRSRMLSLFQVLEPAVSVEAQRLSDQVRVIQRNHMLDDTVLDRLRSESRSNLVTPASPMIAVQQQNIPSALPRSDYDGEEDRDEVISVSTQCNAQLRSALEGAFREYRSTPPELRPRLPRLPMHNKNKALMCALDSQLSNCFDSSKDLTDSHSILYCGAVAACRVAHVKFPNNDGATRPKLAVPAWQCRIERRIGEARALIGKLICFREGNTRPRVMRFVRRAFSGTDISFRDYLARVTERIDSLKQKICAWASRIRRYKRRVERYTQNRTFQSDERWVYRAWERPDQGVTDTRLPDDSAMYSFWRNIWSVPVSHTEGDWTREVEQACDPIPEMGAIIISPQDVARAVHPLPNWKSPGPDGLHNFWIKWFQRSHARLASQFQSALESGSLPQFLTTGITHLLHKSGSAAEPKNYRPITCLPTVYKVLTSILRAKINQHIDSNSIMSASQNGCRNGSRGTKELLLIDMAISQQVRRSRKNLSTCWIDYKKAYDSVPHTWLMRVLELYKIDATLRTFLMSCMGHWRTVLRYPGCRQIQGNSQPIRIERGIFQGDSLSPLWFCLALNPLSTLLERSGLGYLLRRDGQVISHLLYMDDLKLFAPNNLQLMKLLKVTETFSSAIRMEFGVDKCAVMHVKRGEIMESEGTQLSDSIHLRSLSSTETYKYLGMSEALGINTADMKQSLRERFFGRLNKVLGSLLSGGNKVRAFNGWVMPVLMYSFGILKWTQTELDALDRRVRTLLTANRMHHPRSSVMRLYIPRKCGGRGFLSAKTLHNREVYSLREYFLEAEGEMHRDVVSVDKGLTPLSLANENWRKPKVLDTNDRKVEWQGKELHGRFYRALHGPDVDFLASVSWLRFGDLFGETEGFICAIMDEVMMTNNYRKYIVKDGTVDICRACHRPGESIRHIISGCSSLANGEYLHRHNLVARIIHQQLALKYNLVESEVPYYKYAPDPVLDNGHITLYWDRPITTDRTVVANRPDIVVIDRLERRTMIVDITIPHDENLVKAEKDKQFKYLDLAREVVDMWDVGTAVIVPIVVSANGLIAKSLDQHLRRLSLGSWIKGLIQKAVLLDTARIVRRFLSQEP

SEQ ID NO: 30521 - protein, 1200 aa, Heliothis virescens
MLTRARLRARLPAPDSSLSSASPPPDPGSPVSPAAAAASSSSDEYFSPPTSPPPVRRRGGHRPPDGMGSRGPQASDRVSAPGGRASRIRWTQGINESVMRAYYGATEGETNLTAYRSRMLSLFQALEPAVNVSAQRLADQVRVIRRDHRLDNAVLDRLRSEMRSSSVISEPPHPEAPAPVVPPRTNDTVEHGADEATSAGTQCNDLLRSTLEAAIAEYRTMPHAQRPRLPHLPMHRKNQALMGSLDSLLSIFFESSENLADTHSILYCGAVAACRIANVKFPNVTTTRHKAAPAWQCRIQRRIDEARVLIGKLTCFREGNTRPRVMRFVRRAFTGIDVNPSEYLARVTERIDFLKQNICAWAGRIRRYKRRMERYNLNRAFQRDQRWVYRAWERPDCGGDDGCLPDNNAMNAFWRDIWSVPVVHAEGDWMVEVQRACEHIQEMEPVNITTEDVSCAVHPMPNWKSPGPDGLHNYWIKWFRSSHARLASQFQAALESGSLPEFLTTGITHLLYKSGSATEPKNYRPITCLPTVYKILTSILRAKMYHHVETQSIMSASQNGCRNGSRGTKELLLIDMTINQQVRRSRKNLSTCWIDYKKAYDSVPHAWLLRVLELYKIDATLRAFLKSCMGQWKTALNYPGCGQICGNGELIRIERGIFQGDSLSPLWFCLALNPLSTLLEGSGLGFKLRRGGQVISHLLYMDDLKLFAHNRLQLMELLKITKVFSEAIRMEFGVDKCAVMYVERGEIVESLGTQLTDSINFRSLSSTETYKYLGMSEALGINVTDMKQSLKERFFGRLKKVFNSLLSGGNKVRAFNGWVMPVLMYSFGILKWTQTELDALDRKVRTLLTAYRMHHPRSSVMRLYIPRKCGGRGFLNAKTLHNREVCNLREFFLKVNAAMHRDVVAVDKGLTPLSLQAENWRKPVIMDTNDRKRVWQSKVLHGRFYQALHGPDIDFKASVTWLPTGDLFGETEGFVCAIMDEVMMTNNYRKYVVKDGTVDICRACRRPGESIRHIISGCSHLANGEYLHRHNLVARIIHQQLALKYKLAELEVPYYRYVPDPVLENGHVTLYWDRPIITDRTVMANRPDIVVIDRLERRAMIVDISVPHDENLVKAEKDKQLKYLDLAHEVVDIWHVDSAVIVPIVVSANGLIAKSLDLHLRRLSLDGWIKRTQEVSLYGALTAGSLDHVPDAGGKLFLYF

SEQ ID NO: 30522 - protein, 1200 aa, Mythimna ferrago
MLTRSRAQQLNTQLTTSGPSLSSASQPPGPAPAVSPEIPVAAVASSSSDEYFSPPTTPPPARRRGRGRPPACLGPRGPPASDRVPAVGGSVQRMRWTQSINENVMRSYFGATEGGTNLTAYRGRMLSLFQVLEPAVNVSAQRLSDQVRVIQRNRMLDDAVLDRLRLESRNGRVSPVSPPAVVQRQPSVSPRPDHVGEDDDDGAISVSTQCNVRLRSALEDAFREYRSIPPELRPRLPRLPMHRKNRALVCALDSQLSNCFDSSEDLTDTHSILYCAAAAACRVAHVKIPNSDRATRPAKPAWQCRIERRIGEARALIGKLICFREGNTRPRVMRFVRRAFSGTDISPRDYLPRITERIDFLRQKVYAWANRIRRYKRRVERYTQNRAFQSNERWVYRAWERPDQSVIDTRLPDDDAMYSFWRSIWSVPVNHTEGDWTRKVERECELLPEMGAVTISPQDVARAVRPLPNWKSPGPDGLHNFWLKWFKSSHARLASQFQSALESGSLPQFLTTGITHLLHKSGSTAEPKNYRPITCLPTVYKVLTSILRAKINSHIETNSIMSASQNGCRSGSRGTKELLLIDVAISQQVRRSRRDLSTCWIDYKKAYDSVPHTWLMRVLELYKIDVTLRTFLMSCMGQWRTVLHYPGCRRVSENSEPLRIERGIFQGDSLSPLWFCLALNPLSTLLEGSGVGYRLRREGQVISHLLYMDDLKLFASNNLQLMELLKVTETFSSAIRMEFGLDKCAVMHVKRGEIMESVGTQLSDSIHLRSLCSTETYKYLGMSEALGINAADVKQSLRERFFGRLNKVLKSLLSGGNKVRAFNGWVMPVLMYSFGILKWTQTELDALDRRVRTLLTANRMHHPRSSVMRLYIPRKCGGRGFLNAKTLHNREVCSLRKYFLETDVGMHRDVVAVDKGLTPLSLANENWRKPIVMDINERKEVWKGKELHGRFYRALHGPEVDLLASVSWLRFGDLFGETEGFVFAIMDEVMMTNNYRKYIVKDGTVDICRACHRPGESIRHIISGCSHLANGDYVHRHNLVARIIHQQLALKYNLVESEVPYYRYVPDPVLENGSVTLYWDRSIITDRTIVANKPDIVVIDRLERRTMIVDIAVPHDENLVKAEKDKQTKYLDLAREVVDMWEVDRAIIVPIVVTANGLIAKSLDQHLRRLSLGSWIKGLIQKAVLLDTARIVRRFLSQEP

SEQ ID NO: 30523 - protein, 1190 aa, Mamestra brassicae
MLTRAAAQRARLPPPASSLSSASPPPEPSPTVSAVIPAVAVASSSSDEYFSPPTSPPPARRRRGRRPPDVLGPRGPPASDRVPAPGGSVQRMRWTQTINENVMRSYYGATEGGTNLTAYRGRMLSLFQVLEPAVNVSAQRLSDQVRVIQRNRMLDDAVLDRLRLESRNGRVSAASPPAAVQIQSSVSPRPNIVGEDDDDGAISVSTQCNERLRSALEDAFREYRSTPPELRPRLPRLPMHNKNRALVCALDSQLANCFDSSEDLADTHSILYCAAAAACRVAHVKFPNSDRATRPAVPAWQCRIERRIGEARALIGKLICFREGNTRRRVMRFVRRAFSGTDTSPRDYLTRVTERIDFLKQKIYAWANRIRRYKRRVERYTQNRTFQSNERWVYRAWERPDQGVTDTRLPDDDVMCSFWRNIWSVPVSHTEGDWIREVERACDPILEMGATTISPQDVARAVRPLPNWKSPGPDGLHNFWIKWFKRSHARLASQFQSALESGSLPQFLTTGITHLLHKSGSTAEPKNYRPITCLPTVYKVLTSILRAKINQHIETNSIMSASQNGCTKELLLIDVAISQQVRRSRRDLSTCWIDYKKAYDSVPHTWLMRVLELYKVDAVLRTFLMSCMGQWRTVLRYPGCRQIQANSDPIRIERGIFQGDSLSPLWFCLALNPLSTLLEGSGQGYRLRRGGQVISHLLYMDDLKLFAPNNLQLMKLLKVTETFSSAISMEFGVDKCAVMHVKRGEIMESVGTQLSDSIHLRSLSSTETYKYLGMSEALGINANDVKQSLKERFFGRLNKVLNSLLSAGNKVRAFNGWVMPVLMYSFGILKWTQTELDALDRRVRSLLTANRMHHPRSSVMRLYIPRKCGGRGFLNAKTLHNREICSLREFFLEADVGMHRDVVAVDKGLTALSLANENWRKPVVLDTNDRREVWQSKELHGRFYRVLHGPDVDFLASVAWLRFGDLFGETEGFVCAIMDEVMMTNNYRKYIVKDGTVDICRACHRPGESIRHIISGCSSLANGDYLHTHIHIHIHQQLALKYNLVESEVPYYRYVPDPVLENGNCTLYWDRSIITDRTIIANKPDIVVIDRLERRAMIVDIAVPHDVNLVKTEKDKQTKYLDLAREVVDMWDVNTAVIVPIVVTANGIIAKSLDQHLKRLSLGSWIKGLIQKAVLLDTARIARRFLSQGP

SEQ ID NO: 30524 - protein, 1200 aa, Mythimna ferrago
MLTRSRAQQLNAQLTTSGPSLSSASQPPGPAPAVSPEIPVAAVASSSSDEYFSPPTTPPPARRRGRGRPPACLGPRGPPASDRVPAAGGSVQRMRWTQSINENVMRSYFGATEGGTNLTAYRGRMLSLFQVLEPAVNVSAQRLSDQVRVIQRNRMLDDAVLDRLRLESRNGRVSPVSPPAAVQRQPSVSPRPDHVGEDDDDGAISVSTQCNVRLRSALEDAFREYRSIPPELRPRLPRLPMHRKNRALVCALDSQLSNCFDSSEDLTDTHSILYCAAAAACRVAHVKIPNSDRATRPAKPAWQCRIERRIGEARALIGKLICFREGNTRPRVMRFVRRAFSGTDISPRDYLPRITERIDFLRQKVYAWANRIRRYKRRVERYTQNRAFQSNERWVYRAWERPDQSVIDTRLPDDDAMYSFWRSIWSVPVNHTEGDWTQKVERECELLPEMGAVTISPQDVARAVRPLPNWKSPGPDGLHNFWLKWFKSSHARLASQFQSALESGSLPQFLTTGITHLLHKSGSTAEPKNYRPITCLPTVYKVLTSILRAKINSHIETNSIMSASQNGCRNGSRGTKELLLIDVAISQQVRRSRRDLSTCWIDYKKAYDSVPHTWLMRVLELYKIDVTLRTFLMSCMGQWRTVLHYPGCRRVSENSEPLRIERGIFQGDSLSPLWFCLALNPLSTLLEGSGVGYRLRREGQVISHLLYMDDLKLFASNNLQLMELLKVTETFSSAIRMEFGLDKCAVMHVKRGEIMESVGTQLSDSIHLRSLCSTETYKYLGMSEALGINAADMKQSLRERFFGRLNKVLKSLLSGGNKVRAFNGWVMPVLMYSFGILKWTQTELDALDRRVRTLLTANRMHHPRSSVMRLYIPRKCGGRGFLNAKTLHNREVCSLRKYFLETDVGMHRDVVAVDKGLTPLSLANENWRKPIVMEINERKEVWKGKELHGRFYRALHGPDVDLLASVSWLRFGDLFGETEGFVFAIMDEVMMTNNYRKYIVKDGTVDICRACHRPGESIRHIISGCSHLANGDYLHRHNLVARIIHQQLALKYNLVESEVPYYRYVPDPVLENGSVTLYWDRSIITDRTIVANKPDIVVIDRLERRTMIVDIAVPHDENLVKAEKDKQTKYLDLAREVVDMWEVDRAIIVPIVVTANGLIAKSLDQHLRRLSLGSWIKGLIQKAVLLDTARIVRRFLSQEP

SEQ ID NO: 30525 - protein, 1022 aa, Mythimna ferrago
MVVSHLFHHRPRCNVNPVFHRDPTTLAISVSTQCNVRLRSALEDAFREYRSIPPELRPRLPRLPMHRKNRALVCALDSQLSNCFDSSEDLTDTHSILYCAAAAACRIAHVKIPNSDRATRPAKPAWQCRIERRIGEARALIGKLICFREGNTRPRVMRFVRRAFSGTDISPRDYLPRITERIDFLRQKVYAWANRIRRYKRRVERYTQNRAFQSNERWVYRAWERPDQKVIVTRLLDDDAMYSFWRSIWSVPVNHTEGDWTREVERECELLPEMGAVTISPQDVARAVRPLPNWKSPGPDGLHNFWLKWFQSSHARLASQFQSALESGSLPQFLTTGITHLLHKSGSTAEPKNYRPITCLPTVYKVLTSILRAKINSHIETNSIISASQNGCRNGSRGTKELLLIDVAISQQVRRSRRDVSTCWIDYKKAYDSVPHTWLMRVLELYKIDVTLRTFLMSCMGQWRTVLHYPGCRRVSENSEPLRIERGIFQGDSLSPLWFCLALNPLSTLLEGSGLGYRLRREGQVISHLLYMDDLKLFASNNLQLLELLKVTETFSSAIRMEFGLDKCAVMHVKRGEIMESVGTQLSDSIHLRSLCSTETYKYLGISEVLGINAADVKQSLRERFFGHLNKVLKSLLSGGNKVRAFNGWVMPVLMYSFGILKWTQTELDALDRRVRTLLTTNWMHHPRSSVMRLYIPRKCGGRGFLNAKTLHNREVCSLRKYFLETNVGMHRDVVVVDKGLTPLSLANENWRKPILMDTNERKEVWKGKELHGCFYRALHGPDVDLLASVSWLRFGDLFRETEGFVFAIMDEVMMTNHYRKYIVKDGTVDICRACHRPGESIRHIISGCSHLANGDYLHRHNLVARIIHQQLAIKYNLVESEVPYYRYVPDPVLENGSVTLYWDRSIITDRTIVANKPDIAVIDRLERQTMIVDIAVPHDENLVKAEKDKQTKYLDLAREVVDMWDRAIIVPIVVTANGLIAKSLDQHLRRLSLGSWIKGLIQKAVLLDTARIVRRLLSQEP

SEQ ID NO: 30526 - protein, 1211 aa, Xestia xanthographa
MSPMLTRHRAKLQKEAHPPSPGSSLSSASQRPGRATPVSTVSSVAAVASSSSDEFFSPPSTPPPPPRGRRRGRGRPPAGLGPRGQQAPSRVPAAGGNVSRMRWTQSINENVMRAYYGATEGGSNLTAYRSRMLSLFQVLEPAVSVEAQRLSDQVRVIQRNHMLDDTVLDRLRSESRSNLVTPASPMIAVQHQNIPSAPPRSDYDGEEDRDEVISVSTQCNAQLRSALEGAFREYRSTPPELRPRLPRLPMHNKNKALMCALDSQLSNCFDSSKDLTDTHSILYCGAVAACRVAHVKFPNNDRATRPKLAVPAWQWRIERRIGEARALIGKLICFREGNTRPRVMRFVRRAFSGTDISFRDYLARVTERIDSLKQKICAWASRIRRYKRRVERYTQNRTFQSDERWVYRAWERPDQGVTDTRLPDDSAMYSFWRNIWSVPVSHTEGDWTREVEQACDPIPEMGAIIISPQDVARAVRPLPNWKSPGPDGLHNFWIKWFQRSHARLASQFQSALESGSLPQFLTTGITHLLHKSGSAAEPNNYRPITCLPTVYKVLTSILRAKINQHIDSNSIMSASQNGCRNGSRGTKELLLIDMAISQQVRRSRKNLSTCWIDYKKAYDSVPHTWLMRVLELYKIDATLRTFLMSCMGHWRTVLRYPGCRQIQGNSEPIRIERGIFQGDSLSPLWFCLALNPLSTLLERSGLGYLLRRDGQVISHLLYMDDLKLFAPNNLQLMKLLKVTETFSSAIRMEFGVDKCAVMHVKRGEIMESEGTQLSDSIHLRSLSATETYKYLGMSEALGINTADMKQSLRERFFGRLNKVLGSLLSGGNKVRAFNGWVVPVLMYSFGILKWTQTELDALDRRVRTLLTANRMHHPRSSVMRLYIPRKCGGRGFLNAKTLHNREVYSLREYFLEAEGEMHRDVVSVDKGLTPLSLANENWRKPKVLDTNDRKVEWQGKELHGRFYRALHGPDVDFLASVSWLRFGDLFGETEGFICAIMDEVMMTNNYRKYIVKDGTVDICRACHRPGESIRHIISGCSSLANGEYLHRHNLVARIIHQQLALKYNLVESEVPYYKYAPDPVLDNGHITLYWDRPITTDRTVVANRPDIVVIDRLERRAMIVDITIPHDENLVKAEKDKQFKYLDLAREVVDMWDVGTAVIVPIVVSANGLIAKSLDQHLRRLSLGSWIKGLIQRAVLLDTARIVRRFLSQEP

SEQ ID NO: 30527 - protein, 845 aa, Mythimna ferrago
MRFVRRAFSGTDISPRDYLPRITERIDFLRQKVYAWANRIRRYKRRVERYTQNRAFQGNERWFYRAWERPDQSVIDTRLPDDDAMYSFWRSIWSVPVSHTEGDWTREVERECELIPEMGAITISPQDVARAVRPLPNWKSPGPDGLHNFWLKWFKSSHARLASQFQSALESGSLPQFLTTGITHLLHKSGSTAEPKNYRPITCLPTVYKVLTSILRAKINSHIETNSIMSASQNGCRNGSRGTKELLLIDVAISQQVRRSRRDLSTCWIDHKKAYDSVPHTWHRTVLHYPGCRRVSENSEPLRIERGIFQGDSLSPLWFCLALNPLSTLEGSGLGYRLRREGQVISHLLYMDDLKFFASNNLQLMELLKVTETFSSAIRMEFGLDKCAVMHVKRGEIMESVGTQFSDSIHLRSLSSTETYKYLGMSEALGINAADVKQSLRERFFGRLNKVLKSLLSGGNKVRAFNGWVMPVLMYSFGILKWTQTELDALDRRVRTLLTANRMHHPRSSVMRLYIPRKCGGRGFLNAKTLHNREVCSLREYFLETDVGMHRDVVAVDKGLTPLSLANENWRKPIVMDTNERKEVWKGKELHGRFYRALHGPDVDLLASVSWLRFGDLFGETEGFVFAIMDEVMMTNNYRKYIVKDGTVDISRACHRPGESIRHIISGCSHLANGDYLHRHNLVARIIHQQLALKYNLVESEVPYYRYVPDPVLENGSVTLYWDRSIITDRTIVANKPDIVVIDRLERRTMIVDLAVPHDENLVKAEKDKQTKYLDLAREVVDMWEVDRAIIVPIVVTANGLIAKSLDQHLRRLSLGTAFWIKGLIQKAVLLDTTRIVRRFLSQEP

SEQ ID NO: 30528 - protein, 1103 aa, Mythimna impura
MLTRSRALKLNTHPTSSGSSLSSASQPPGPAPTVSPEIPVAAVASSSSDEYFSPPTTPPPARRRGRGRPPASLGPRGPPASDRVPAAGGSVQRMRWTSSINENVMRSYFGATEGGINLTAYRGRMLSLFQVLEPAVNVSVQRLSDQVRVIQRNRMLDDAVLDRLRLESQSSRVSPATTPAAVQRLPTASPRPVQVGDADDDAAISVSTQCNDRLRGALEDAFREYRSTPPGLRPRLPRLPMHKRNRALVCALDSQLSNCFDSSKDLTDTHSILYCAAVAACRVAHVKFPNCDRATRPAVPAWQCRIEHRIGEARALIGKLICFREGNTRPRVMRFVRRAFSGTDISPRDYLSCVTERIDFLKQKIYAWANRIRRYKRRVERYTRNRTFQSNERWVYRDWERPDQGVTDTRLPDDDAMCSFWRSIWSAPVSHTEGDWIREVERACDLLPEMGAITISPQDVARAVRPLPNWKSPGPDGLHNFWVKWFQRSHARLASQFQSALESGSLPQFLTTGITHLLHKSGSTAEPKNYRPITCLPTVYKVLTSILRAKINSHIETNSIMSASQNGCRNGSRGTKELLLIDIAISQQVRRSRKNLSACWIDYKKAYDSVPHTWLKRVLELYKVDATLRTFLMSCMGQWRTVLHYPGCRQIQENNEPIRIERGIFQGDSLSPLWFCLALNPLSTLLEGSGLGYRLKRGGQVISHILYMDDLKLFAPNNLQLVELLKVTETFSSAIRMEFGVDKCAVIHVKRGEIMESVGIQLSDSIHLRSLCSTETYKYLGISESLGINTDDVKQLLKERFFGRLNKVLNSLLSGGNKVRAFNGWVMPVLMYSFGILKWTQTELDALDRRVRTLLTANRMHHPRSSVMRLYIPRKCGGRGFLNAKTLHNREVCSLREYFLKTDVGMHRDVVAVDKGLTPLSLANENWRKPIVLDTNDRREVWQSKELHGRFYRTLHGPDVDLLASVSWLRFGDLFGETEGFVFAIMDEVMMTNNYRKYIVKDGTVDTCRACHRPGESIRHIISGCSHLANGDYLHRHNLVARIIHQQLALKYNLVESEVPYYRYVPDPVLDNGNITLYWDRSIITDRTIVANKPDIVKIVKRL

SEQ ID NO: 30529 - protein, 1200 aa, Mythimna impura
MLTRSRAQKLHTHPTSSGSSLSSASQPPGPAPTVSPEIPVAAVASSSSDEYFSPPTTPPPARRRGRGRPPASLGPRGPPASDRVPAAGGSVQRMRWTSSINENVMRSYFGATEGGFNLTAYRGRMLSLFQVLEPAVNVSAQRLSDQVRVIQRNRMLDDAVLDRLRLESQSSRVSPATTPAAVQRLPTASPRPDQVGDADDDAAISVSTQCNDRLRGALEDAFREYRSTPPGLRPRLPRLPMHKRNRALVCALDSQLSNCFDSSKDLTDTHSILYCAAVAACRVAHVKFPNCDRATRPAVPAWQCRIEHRIGEARALIGKLICFREGNTRPRVMRFVRRAFSGTNISSRDYLPCVTERIDFLKQKIYAWANRIRRYKRRVERYTRNRTFQSNERWVYRDWERPDQGVTDTRLPDDDAMCSFWRSIWSAPVSHTEGDWIREVERACDLLPEMGAITISPQDIARAVRPLPNWKSPGPDGLHNFWVKWFQRSHARLASQFQSALESGSLPQFLTTGITHLLHKSGSTAEPKNYRPITCLPTVYKVLTSILRAKINSHIETNSIMSASQNGCRNGSRGTKELLLIDIAISQQVRRSRKNLSACWIDYKKAYDSVPHTWLMRVLELYKVDATLRTFLKSCMGQWRTVLHYPGCRQIQENNEPIRIERGIFQGDSLSPLWFCLALNPLSTLLEGSGLGYRLKRGGQVISHLLYMDDLKLFAPNNLQLVELLKVTETFSSAIRMEFGLGKCAVIHVKRGEIMESVGIQLSDSIHLRSLCSTETYKYLGMSESLGINTDDVKQSLKERFFGRLNKVLNSLLSGGNKVRAFNGWVMPVLMYSFGILKWTQTELDALDRRVRTLLTANRMHHPRSSVMRLYIPRKCGGRGFLNAKTLHNREVCSLREYFLKTDVGMHRDVVAVDKGLTPLSLANENWRKPIVLDTNDRREVWQSKELHGRFYRALHGPDVDLLASVSWLRFGDLFGETEGFVFAIMDEVMMTNNYRKYIVKDGTVDICRACHRPGESIRHIISGCSHLANGDYLHRHNLVARIIHQQLALKYNLVESEVPYYRYVPDPVLDNGNTTLYWDRSIITDRTIVANKPDIVVIDRLERRTMIVDIAVPHDENLVKAEKDKQTKYLDLAREVVDMWEVDRAIIVPIVVTANGLIAKSLEQHLRRLSLGSWIKGLIQKAVLLDTARIVRRFLSQEP

SEQ ID NO: 30530 - protein, 962 aa, Xestia xanthographa
MHNKNKALMCALDSQLSNCFDSSKDLTDTHSILYCGAVAACRVAHVKFPNNDRATRPKLAVPAWQCRIERRIGEARALIGKLICFREGNTRPRVMRFVRRAFSGTDISFRDYLARVTERIDSLKQKICAWASRIRRYKRRVERYTQNRTFQSDERWVYRAWERPDQGVTDTRLPDDSAMYSFWRNIWSVPVSHTEGDWTREVEQACDPIPQMGAIIISPQDVARAVRPLPNWKSPGPDGLHNFWIKWFQRSHARLASQFQSALESGSLPQFLTTGITHLLHKSGSAAEPKNYRPITCLPTVYKVLTSILRAKINQHINSNSIMSASQNGCRNGSRGTKELLLIDMAISQQVRRSRKNLSTCWIDYKKAYDSVPHTWLMRVLELYKIDTTLHTFLMSCMGHWRTVLRYPGCRQIQRNSESIRIERGIFQGDSLSPLWFCLALNPLSTLLERSGLGYLLRRDGQVISHLLYMDDLKLFAPNNLQLMKLLKVTETFSSAIRMEFGVDKCAVMHVKRGEIMESEGTQLSDSIHLRSLSSTETYKYLGMSEALGINTADMKQSLRERFFGRLNKVLGSLLSGGNKVRAFNGWVMPVLMYSFGILKWTQTELDALDRRVRTLLTANRMHHPRSSVMRLYIPRKCGGRGFLNAKTLHNREVYSLREYFLEAEGEMHRDVVSVDKGLTPLSLANENWRKPKVLDTNDRKVEWQGKELHGRFYRALHGPDVDFLASVSWLRFGDLFGETEGFICAIMDEVMMTNNYRKYIVKDGTVDICRACHRPGESIRHIISGCSSLANGEYLHRHNLVARIIHQQLALKYNLVESEVPYYKYAPDPVLDNGHITLYWDRPITTDRTVVANRPDIVVIDRLERRAMIVDITIPHDENLVKAEKDKQFKYLDLAREVVDMWDVNTAVIVPIVVSANGLIAKSLDQHLRRLSLGSWIKGLIQKAVLLDTARIVRRFLSQEP

SEQ ID NO: 30531 - protein, 1198 aa, Xestia xanthographa
MLTRSAAARRARLPPPDSSLSSASPPPEPSPIVSAVTPAVAVASSSSDEYFSPPTTPPPARRRGGRRPPDGLGPRGPPASDRVPAPGGSVQRMRWTQSINENVMRAYYGATEGGNNLTAYRVRMLSLFQVLEPAVNVSAQRLSDQVRVIQRNRMLDDTVLDRLRTEIQSSHVIATPSQAVVPPQSSIIPNCDNDVGNDMVTNVSTQCNVEMRSALEGAIREYRFMQPDLRPRIPRLPMHNKNRALVAVLDSQLSNYFDNCEDLTDVHSILYCAAVAACRVAHVKFPSDRATRPKPAVPAWQYRIERRIGGARALIGKLVCFREGNTRPRVMRFVRQVFSGTDISPRDYMSRVTERIDFLKQKVYAWANRIRRYKRRVDRYTQNRTFQKDERWVYRAWERPDQGVADTHLPDDDAMCSFWRSIWSVPVSHAEGEWTRVIERACDPVSEMGAITISPQDVARAVRPLPNWKSPGPDGLHNFWIKWFRRSHARLATLFQSALESGSLPEFLTTGITHLLHKSGSTAEPKNYRPITCLPTVYKVLTSILRTKISKHIDDNSVMSASQNGCRNGSRGTKELLLIDMAISHQVRRSRKDLSTCWIDYKKAYDSVPHTWLMRVLELYKVDATLRTFLMSCMGQWRTVLRYPGCWQIQRNSESIRIERGIFQGDSLSPLWFCLALNPLSTLLEDSGLGYRLRKDGQVISHLLYMDDLKLFAPNDLQLMELLKVTNTFSSAIRMEFGVDKCAVMHVKRGEIVESVGTQLSDSITLRSLSATETYKYLGMSEALGVNVADMKQSLKERFFGRLKKVFNSLLSGGNKVRAFNGWVMPVLMYSFGILKWTQTELDALDTKVRKLLTAYRMHHPRSSVMRLYIPRKCGGRGFLNAKTLHNREVCSLREYFLGTDVGMHRDVVTVDKGFTPLSLAKENWRKPPVLDTNDRREVWQSKELHGRFFRAFHGPDVDLPASVAWLRSGDLFGETEGFVCAIMDEVMMTNNYRRFIVKDGTVDICRACHRPGETIRHIISGCSRLANGEYLHRHNLVARIIHQQLALKYNLVESEVPYYRYVPDPVLDNGCITLYWDQSIITDRTIVANKPDIVVVDRSERRAMIVDITVPHDENLVKAEKDKQIKYLDLAREVVDMWEVDSAIIVPIVVSAHGLIAKSLDQYLRRLSLGSRIKGLIQKAVLLDTARIVRRFLSLEP

SEQ ID NO: 30532 - protein, 866 aa, Mythimna ferrago
MRFVRRAFSGTDVSPRDYLPRITERIDFLRQKVYAWANRIRRYKRRVERYTQNRAFQSNEKWVYRAWERPDQSVIDTRLPDDDAMYSFWRSIRSVPVSHTEGDWTRGVERECELIPEMGAITISPQDVARAVRPLPNWKSPGPDGLHNFWLKWFKSSHARLASQFQSALESGSLPQFLTTGLTHLLHKSGTQYYPIYEPKNYRPITYLPTVYKVLTSILRAKINSHIETNSIMSASQNGCRNGSRGTKELLLIDVAISQQVRRSRRDLSTCWIDYKKAYDSVPHTWLMRVLEQYKIDVTLRTFLMSCMGQWRTVLHYPGCRRVSENSEPLRIERGIFQGDSLSPLWFCLALNPLSTLLEGSGLGYRLRREGQVISHLLYMDNLKLFASNNLQLMELLKVTETFSSAIRMEFGLDKCAVMHVKRGEIMESVGTQLSDSIHLRSLSSTETYKYLGINTADVKQSLRERFFCRLNKVLKSLLSGGNKVRAFNGWVMPVLMYSFGILKWTQTELDALDRRVRTLLTANRMHHPRSSVMRLYIPRKCGGRGFLNAKTLHNREVCSLREYFLETDVGMHRDVVAVDKGLTPLSLASENWRKPIVMDTNERKEVWKGKELHGRFYRALHGPDVDLLASVSWLRFGNLFGETEGFVFAIMDEVMMTNNYRKYIVKDGTVDICRACHRPGESIRHIISGCSHLANGDYLHRHNLVARIIHQQLALKYNLVESEVPYYRYVPDPVLENGSVTLYWDRSIITDRTIVANKPDIVVIDRLERRTMIVDIAGPHDENLVKAEKDKQTKYLDLAREVVDMWEVDRAIIVPIVVTANGLIAKSLDQHLRRLSLGSWIKGLIQKAVLLDTARIVRRFLSQEP

SEQ ID NO: 30533 - protein, 1202 aa, Mythimna ferrago
MLTRSRARSQIAQPTSSGSSLSSASQPPGPAPAVSPEIPAAAVASSSSDEYFSPPTTPPLARRRGRGRPPACLGLRGPPASDRVPAAGGSVQRMRWTESINENVMRSYFGATQGGTNLTAYRGRMLSLFQVLEPAVNVSAQRLSDQVRVIQRNRMLDDAVLDRLRLESRNGRVTPISPPAAVQRQPSVSPRPDHVGEDDDDGAISVSTQCNARLRSALEDAFREYRSIPPELRPRLPRLPMHRKNRALVCALDSQLSNCFDSSKDLTDTHSILYCAAAAACRVAHVKIPNSDRATRPAKPAWQCRIERRIGEARALIGKLICFREGNTRPRVMRFVRRAFSGTDISPRDYLPRITERIDFLRQKVYAWANRIRRYKRRVERYTQNRAFQSNERWVYRAWERPDQSVIDTRLPDDDAMYSFWRSIWSVPVSHTEGDWTREVERECELIPEMGAITISPQDVARAVRPLPNWKSPGPDGLHNFWLKWFKSSHARLASQFQSALESESLPQFLTTGITHLLHKSGSTAEPKNYRPITCLPTVYKVLTSILRAKINSHIETNSIMSASQNGCRNGSRGTKELLLIDVAISQQVRRSRRDLSTCWIDYKKAYDSVPHTWLMRVLELYKIDVTLRAFLMSCMGQWRTVLHYPGCRRVSENSEPLRIERGIFQGDSLSPLWFCLALNPLSTLLEGSGLGYRLRREGQVISHLLYMDDLKLFASNNLQLMELLKVTETFSSAIRMEFGLDKCAVMHVKRGEIMESVGTQLSDSIHLRSLSSTETYKYLGMSEALGINAADVKQSLRERFFGRLNKVLKSLLSGGNKVRAFNGWVMPVLMYSFGILKWTQTELDALDRRVRTLLTANRMHHPRSSVMRLYIPRKCGGRVFLNAKTLHNREVCSLREYFLETDVGMHRDVVAVDKGLTPLSLANENENWRKPIVMDTNERKEVWKGKELHGRFYRALHGPDVDLLASVSWLRFGDLFGETEGFVFAIMDEVMMTNNYRKYIVKDGTVDICRACHRPGESIRHIISGCSHLANGDYLHRHNLVARIIHQQLALKYNLVESEVPYYRYVPDPVLENGSVTLYWDRSIITDRTIVANKPDIVVIDRLERRTMIVDIAVPHDENLVKAEKDKQTKYLDLAREVVDMWEVDRAIIVPIVVTANGLIAKSLDQHLRRLSLGSWIKGLIQKAVLLDTARIVRRFLSQEP

SEQ ID NO: 30534 - protein, 1207 aa, Noctua fimbriata
MITRSRAKQLQEAHTPSPGSSLSSASQPPRRATSVSTVSPVAAVASSSSDEFFSPPSTPPPSPRRRGRGRPPAGLGPRGQPAPNRVPAASGNVSRMRWTQSINEQVMRAYYGATEGGSNLTAYRGRMLSLFQVLEPGVSVSAQRLSDQVRVIQRNHMLDDTVLDRLRSESRSNLVTPASPMTAVQLQNVTIASPRSDRGGEGDDDEVISVSTQCNAQLRSALESAFREYRSTPPELRPRLPRLPMHKKNKALMCALDSQLSNCFDTSKDLADTHSILYCGAVAACRVAHVKFPNNDRATRPKLAVPAWQCRIERRIGEARALIGKLICFREGNTRPRVMRFVRRAFSGTDVNFRDYLARVTERIDFLKQKICAWASRIRRYKRRVERYTQNRTFQSDERWVYRAWERPDQGVTDTRLPDDNAMCSFWRSIWSVPVSHTEGDWIREVERACDPIPEMGAIIISPQDVACAVRPLPNWKSPGPDGLHNFWIKWFQRSHVRLASQFQLALESGSLPQFLTTGITHLLHKSGSTAEPKNYRPITCLPTVYKVLTSILRAKINHHIDSNSIMSASQNGCRNGSRGTKELLLIDMAVSQQVRRSRRDLSTCWIDYKKAYDSVPHTWLMRVLELYKVDATLRTFLTSCMGHWRTVLRYPGCRQIQGNSEPIRIERGIFQGDSLSPLWFCIALNPLSTLLEGSGLGYRLRRDGQVISHLLYMDDLKLYAPNNLQLMKLLKVTETFSSSIRMEFGVDKCAVMHVKQGEIMESLGTQLSDSIHLRSLSSTETYKYLGMSEALGINAADMKQSLRERFFGRLNKVLSSLLSGGNKVRAFNGWVMSVLMYSFGILKWTQMELDALDRRVRVLLTANRMHHPRSSVMRLYIPRKCGGRGFLNVKTSLHNREVCSLREYFLEADVGVHRDVVSVDKGLTPLSLANENWRKPRVLDTNDRKEVWQGKELHGRFYRALHGPDVDFLASVAWLRFGDLFGETEGFVCAIMDEVMMTNNYRKYIVKDGTVDICRACHRPVESIRHIISGCSRLANGEYLHRHNLVARIIHQQLALKYNLVESEVPYYKYVPDPVLDDGNITLYWDRSIVTDRTIVANKPDIVVIDRLERRAMIVDITVPHDENLVKAEKDKQFKYLDLAHEVVDIWDVSTAVIVPIVVSANGLIANTLDQHLRRLSLGSWIKGLIQKAVLLDTARIVRRFLSQEP

SEQ ID NO: 30535 - protein, 869 aa, Noctua fimbriata
MRFVRRAFSGTDVSFRDYLARVTERIDFLKQKICAWASRIRRYKRRVERYTQNRTFQSDERWVYRAWERPDQGVTDTRLPDDDAMCSFWRSIWSVPVSHTEGDWIREVARACDPIPEMGAIIISPQDVACAVRPLPNWKFSGPDGLHNFWIKWFQRSHVRLASQFQLALESGSLPQFSTTGITHLLHKSGSTAEPKNYRPITCLPTVYKVLTSILRAKINHHIDSNSIMSASQNGCRNGSRGTKELLLIDMAVSQQVRRSRRDLSTCWIDYKKAFDSVPHTWLMRVLELYKVDATLRTFLMSCMGHWRTVLRYPGCRQIQGNSEPIRIERGIFQGDSLSPLWFCIALNPLSTLLEGSGLGYRLRRDGQVISHLLYMDDLKLYAPNNLQLMKLLKVTEAFSSSIRMEFVVDKCAVMHVKQGEIMESVGTQLSDSIHLRSLSSTETYKYLGMSEALGINTADMKQSLRERFFGRLNKVLSSLLSDGNKVCAFNGWVMPVLMYSFGILKWTQTELDALDRRVRVLLTANRMHHPRSSVMRLYIPRKCGGRGFLNAKTLHNREVCSLREYFLEADVGMHRDVVSVDKGLSPLSLANENWRKPRVLDTNDRKEVWQGKELHGRFYRALHGPDIDFLASVAWLRFGDLFGKTKGFVCAIMDEVMMTNNYRKYIVKDGTVDICRACHHRPGESIRHIISGCSRLAKGEYLHRHNLVARIIHQQLALKYNLVESEVPYYKYVPDPVLDDGNITLYWNRSIVTDRTIVANKPDIVVIDRLERRAMIVDITVPHDENLVKAEKDKLFKYLDLAHEVVDIWDVSTAVIVPIVVSANGLIANTLDQHLRRLSLASWIKGLIQKAVLLDTARIVRRFLSQEP

SEQ ID NO: 30536 - protein, 1027 aa, Noctua fimbriata
MTAVQLQNVTIASPRSDRGGEGDDDEVISVSTQCNAQLRSALESAFREYRSTPPELRPRLPRLPMHKKNKALVCALDSQLSNCFETSKDLADTHSILYCGAVAACRVAHVKFPNNDRATRPILAVPAWQCRIERRIGEARALIGKLICFREGNTRPRVMRFVRRAFSGTDISFRDYLARVTERIDFLKQKICAWASRIRRYKRRVERYTQNRTFQSDERWVYRAWERPDQGVTDTRLPDDNAMCSFWRSIWSVPVSHTEGDWIREVERACDPIPEMGAIIISPQDVACAVRPLPNWKSPGPDGLHNFWIKWFQRSHVRLASQFQLALESGSLPQFLTTGITHLLHKSGSTAEPKNYRPITCLPTVYKVLTSILRAKINHHIDSNSIMSASHNGCRNGSRGTKELLLIDMAVSQQVRRSRRDLSTCWIDYKKAYDSVPHTWLMRVLELYKVDATRRTFLMSCMGHWRTVLLYPGCRQIQGNSEPIRIERGIFQGDSLSPLWFCIALNPLSTLLEGSGLGYRLRRDGQVISHLLYMDDLKLYAPNNLQLMKLLKVTETFSSSIRMEFGVDKCAVMHVKQGEIMESVGTQLSDSIHLRSLSSTETCNKYLGMSEALGINTADMKQSLRERFFGRLNKVLSSLLSGGNKVRAFNGWVMPVLMYSFGILKWTQTELDALDRRVRVLLTANRMHHPRSSVMRLYIPRKCGGRGFLNAQTLHNREVCSLREYFLEADVGMHRDVVSVDKGLTPLSLANENWRKPRVLDTNDCKEVWQGKELHGRFYRALHGPDVDFLASVAWLRFGDLFAETEGFVCAIMDEVMMTNNYRKYIVKDGTVDICRACHRPGESIRHIISGCSRLANGEYLHRHNLVAKIIHQQLALKHNLVESEVPYYKYVPDPVLDDGNITLYWDRSIVTDRTIVANKPDIVVIDRLERRAMIVDITVPHDENLVKAEKDKQFKYLDLAHEVVDIWDVSTAVIVPIVVSANGLIANTLDQHLRRLSLGSWIKGLIQKAVLLDTARIVRRFLSQEP

SEQ ID NO: 30537 - protein, 892 aa, Amphipyra berbera
MHRKNRALMCALDSLLSSYFDNSENLEDTHSILYCAAVAACRVAHAKFHNNDRATRPKPTVPAWQCRIERRINEARALIGKLICFREGNTRPRVMRFVRRAFSGTDINPRDYMSRVTERIDFLKQKVYAWANRIRRYKRRVERYTQNRMFHSDERRVYRTWERPDHDVSDTHLPDNDVMNTFWRNIWSMPVTHTEGDWMQEVQRACEPIEEMGDITIVPQDVTSAVRPMANWKSPGPNGLHNFWLKWLRSSHARLASQFQSSLESGSLPQFLTTGVTHLLHKSGSTAEPKNYRPITCLPTVYKLLTSILRSKISKHIANNSIMSVSQNGCKNGSRGTKELLLIDMAISQQVRRSRKNLSTCWIDYKKAYDSVPHTWLMRVLELYKVNTTLCAFLTSCMGQWRTVLHYPGCRQIQGRGEPIRIERGIFQGDSLSPLWFCLALNPLNTLLEGSGLGYRLRRGGQVISHLLYMDDLKLFAPNNLQLMKLLKVTETFSNSIRMEFGVDKCAVMHVKRGGIMESVGTQLSDSIHLRSLSSTETYKYLGMSEALGINETDMKQSLRERFYGRLKKVLKSLLSGGNKVRAFNGWVMPVLMYSFGILKWTQTELDALDRRVRTLLTAYRMHHPRSSVMRLYIPRKCGGRGFLNAKTLHNREVCSLREYFLQADVGMHRDVVAVDKGFTPLSLAKENWRKPVVLDTNGRREVWQSKELHGRFYRALYGPDVDFLASVAWLRFGDLFGETEGFVCAIMDEVMMTNNYRKYIVKDGTVDICRACHCPGESIRHIISGCSRLANGEYLHRHNLVARIIHQQLALKYNLVDAKVPYYKYVPDPVLENGHITLYWDRSIITDRTIVANKPDIVVIDRSERLAMIVDITVPHDENLVKAEKDKEIKY

SEQ ID NO: 30538 - protein, 1111 aa, Noctua pronuba
MRWTQSINEQVMRAYYGATEGGSNLTAYRGRMLSLFQVLEPAVSVSAQRLSDQVRVIQRNHMLDDTVLDRLRSESRSNPVTPASPMIAVQLQSVTSTSPRSDRGGEEDDNEVISVSTQCNAQLRSALEGAFREYRSTPPELRPRLPRLPMHKKNKVLMCALDSQLSNCFDSSKDLADTHSILYCGAVAACRVAHVKFPNNDRATRPKLAVPAWQCRIERRIGEARALIGKLICFREGNTRPRVMRFVRRAFSGTDISFRDYLTRVTERIDFLKQKICAWASRIRRYKRRVDRYTQNRTFQSDERWVYRAWERPDQGVTDTRLPDDDAMCSFWRSIWSVPVSHTEGDWTREVERACDPIPQMGAINISPQDVACAVRPLPNWKSPGPDGLHNFWIKWFQRSHARLASQFQSALESGSLPQFLTTGITHLLHKSGSTAEPKNYRPITCLPTVYKVLTSILRAKINHHIDSNSIMSASQNGCRNGSRGTKELLLIDMAISQQVRRSRRDLSTCWIDYKKAYDSVPHTWLMRVLELYKVDATLRTFLMSCMGHWRTVLRYPGCRQIQGNSEPIKIERGIFQGDSLSPLWFCLALNPLNTLLEGSGLGYRLRRGGQVISHLLYMDDLKLFAPNNLQLMKLLKVTETFSSAIRMEFGVDKCAVMHVKRGEIMESVGTQLSDSIYLRSLSSTETYKYLGMSEALGINTADMKQSLRERFFSRLNKVLGSLLSGGNKVRAFNGWVMPVLMYSFGILKWTQTELDALDRRVRALLTANRMHHPRSSVMRLYIPRKCGGRGFLNAKTLHNREVCSLREYFLEADVGMHRDVVSVDKGLTPLSLANGNWRKPRVLDTNDRKEVWQGKELHGRFYRALHGPDVDFLASVSWLRFGDLFGETEGFVCAIMDEVMMTNNYRKYIVKDGTVDICRACHRPGESIRHIISGCSRLANGEYLHRHNLVARIIHQQLALKYNLVESEVPYYKYAPDPVLDDGNITLYWDRSIITDRTIVANKPDIVVIDRLERRAMIVDITVPHDENLVKAEKDKQFKYLDLAREVVDMWDVNTAVIVPIVVSANGLIAKSLDQHLRRLALGSWIKGLIQKAVLLDTARIVRRFLSQEP

SEQ ID NO: 30539 - protein, 1107 aa, Mythimna ferrago
MRWTQSINENVMRSYFGATEGGTNLTAYRGRMLSLFQVLEPAVNVSAQRLSDQVRVIQRNRMLDDAVLDRLRLESRNGRVSPVSPPAVVQRQPSVSPRPDHVGEDDDDGAISVSTQCNVRLRSALEDAFREYRSIPPELRPRLPRLPMHRKNRALVCALDSQLSNCFDSSEDLTDTHSILYCAAAAACRVAHVKIPNSDRATRPAKPAWQCRIERRIGEARALIGKLICFREGNTRPRVMRFVRRAFSGTDISPRDYLPRITERIDFLRQKVYAWANRIRRYKRRVERYTRNRAFQSNERWVYRAWERPDQSVIDTRLPDDDAMYSFWRSIWSVPVNHTEGDWTRRVERECELLPEMGAVTISPQDVARAVRPLPNWKSPGPDGLHNFWLKWFKSSHARLASQFQSALESGSLPQFLTTGITHLLHKSGSTAEPKNYRPITCLPTVYKVLTSILRAKINSHIETNSIMSASQNGCRNGSRGTKELLLIDVAISQQVRRSRRDLSTCWIDYKKAYDSVPHTWLMRVLELYKIDVTLRTFLMSCMGQWRTVLHYPGCRRVSENSEPLRIERGIFQGDSLSPLWFCLALNPLSTLLEGSGVGYRLRREGQVISHLLYMDDLKLFASNNLQLMELLKVTETFSSAIRMEFGLDKCAVMHVKRGEIMESVGTQLSDSIHLRSLCSTETYKYLGMSEALGINAADVKQSLRERFFGRLNKVLKSLLSGGNKVRAFNGWVMPVLMYSFGILKWTQTELDALDRRVRTLLTANRMHHPRSSVMRLYIPRKCGGRGFLNAKTLHNREVCSLRKYFLETDVGMHRDVVAVDKGLTPLSLANENWRKPIVMDINERKEVWKGKELHGRFYRALHGPEVDLLASVSWLRFCDLFGETEGFVFAIMDEVMMTNNYRKYIVKDGTVDICRACHRPGESIRHIISGCSHLANGDYLHRHNLVARIIHQQLALKYNLVESEVPYYRYVPDPVLENGSVTLYWDRSIITDRTIVANKPDIVVIDRLERRTMIVDIAVPHDENLVKAEKDKQTKYLDLAREVVDMWEVDRAIIVPIVVTANGLIAKSLDQHLRRLSLGSWIKGLIQKAVLLDTARIVRRFLSQEP

SEQ ID NO: 30540 - protein, 977 aa, Omphaloscelis lunosa
MLDDTVLDRLRSEMQCSHVIAPPVRSVPSQIITSQADERIDDRATNVSTQCDEELRSALEGAIQEYRFMSPELRPRLPRLPMHNKNKALVAALDSQLSNYFDDCEDLTNTHSILYCAAVAVCRVAHVKFSNDSRATRPKPAAPAWQCRIERRIGGARTLIGKLICFREGNTRPRVMRFVRRAFLGTDISPQDYMTRVTERIDFLKQKVNAWANRIRRYKRRVERYTQNRTFQSDERWVYRAWERPNQGVADTHLPDEDAMCSFWRSIWSVPVSHTEGDWTREVERACDPIPEMGAITICPQDVARAVRPLPNWKSPGPDGLHNFWIKWFVRSHARLAAQYQTALESGSLPQFLTTGATHLLHKSGSTAEPKNYRPITCLPTVYKVLTSILRAKINKHIDTNSIMSASQNGCRNKSRGTKELLLIDMAISQQVRLSRKDLSTCWIDYKKVYDSVPHTWLMRVLYKVDATLRTCLMSCMGQWRTVLRYIGCRNIQRNSEPIRIERGIFQGDSLSPLWFCLALNPLSTLLEDSGLGYRLRRGGQVISHLLYMDDLKHFAPNNLQLMELLKVTETFSSAIRMEFGVDKCAIMHVKRGEIMESVGTQLSDSINLRALSASETYKYLGMSEALGINVTDMKQSLKERFFGRLKKVLNSLLSGGNKVRAFNGWVMPVLMYSFGILKWTQTELDALDRRVRTLLTVYRMHHPRSSVMRLYIPRKCGGRGFLNAKTLHNREICSLREYFLEADMGMHRDVVVVDKGLTPLSLAKENWRKPVVLDTKDRMEIWQSKELHGRYFRALHGPDVDLPAWLRCGDLFGETEGFVCAIMDEVMMTNNYRRFIVKDGTVDICRACHRPGESIRHIISGCSRLANEEYLHRHNLVARIIHQQLALKYSLVESEVPYYRYVPDPVLENGNITLYWDRSIISDRTIVANKPDIVVVDREERRAMIIDITVPHDENLVKAEKDKQIKYLDLARQVVD

SEQ ID NO: 30541 - protein, 1200 aa, Mythimna ferrago
MLTRSRAQQLNTQLTTSGPSLSSASQPPGPAPAVSPEIPVAAVASSSSDEYFSPPTTPPPARRRGRGRPPACLGPRGPPASDRVPAAGGSVQRMRWTQSINENVMRSYFGATEGGTNLTAYRGRMLSLFQVLEPAVNVSAQRLSDQVRVIQRNRMLDDAVLDRLRLESRNGRVSPVSPPAVVQRQPSVSPRPDHVGEDDDDGAISVSTQCNVRLRSALEDAFREYRSIPPELRPRLPRLPMHRKNRALVCALDSQLSNCFDSSEDLTDTHSILYCAAAAACRVAHVKIPNSDRATRPAKPAWQCRIERRIGEARALIGKLICFREGNTRPRVMRFVRRAFSGTDISPRDYLPRITERIDFLRQKVYAWANRIRRYKRRVERYTQNRAFQSNERWVYRAWERPDQSVIDTRLPDDDAMYSFWRSIWSVPVNHTEGDWTRKVERECELLPEMGAVTISPQDVARAVRPLPNWKSPGPDGLHNFWLKWFKSSHARLASQFQSALESGSLPQFLTTGITHLLHKSGSTAEPKNYRPITCLPTVYKVLTSILRAKINSHIETNSIMSASQNGCRNGSRGTKELLLIDVAISQQVRRSRRDLSTCWIDYKKAYDSVPHTWLMRVLELYKIDVTLRTFLMSCMGQWRTVLHYPGCRRVSENSEPLRIERGIFQGDSLSPLWFCLALNPLSTLLEGSGVGYRLRREGQVISHLLYMDDLKLFASNNLQLMELLKVTETFSSAIRMEFGLDKCAVMHVKRGEIMESVGTQLSDSIHLRSLCSTETYKYLGMSEALGINAADVKQSLRERFFGRLNKVLKSLLSGGNKVRAFNGWVMPVLMYSFGILKWTQTELDALDRRVRTLLTANRMHHPRSSVMRLYIPRKCGGRGFLNAKTLHNREVCSLRKYFLETDVGMHRDVVAVDKGLTPLSLANENWRKPIVMDINERKEVWKGKELHGRFYRALHGPEVDLLASVSWLRFGDLFGETEGFVFAIMDEVMMTNNYRKYIVKDGTVDICRACHRPGESIRHIISGCSHLANGDYLHRHNLVARIIHQQLALKYNLVESEVPYYRYVPDPVLENGSVTLYWDRSIITDRTIVANKPDIVLIDRLERRTMIVDIAVPHDENLVKAEKDKQTKYLDLAREVVDMWEVDRAIIVPIVVTANGLIAKSLDQHLRRLSLGSWIKGLIQKAVLLDTARIVRRFLSQEP

SEQ ID NO: 30542 - protein, 1076 aa, Mythimna ferrago
MLSLFQVLEPAVNVSAQRLSDQVRVIQRNRMLDDAVLDRLRLESRNGRVSPVSPPAAVQRQPSVSPRPDHVGEDDDDGAISVSTQCNVRLRSALEDAFREYRSIPPELRPRLPRLPMHRKNRALVCALDSQLSNCFDSSEDLTDTHSILYCAAAAACRVAHVKIPNSDRATRPAKPAWQCRIERRIGEARALIGKLICFREGNTRPRVMRFVRRAFSGTAISPRDYLPRITERIDFLRQKVYAWANRIRRYKRRVERYTQNRAFQSNERWVYRAWERPDQSVIETRLPDDDAMYSFWRSIWSVPVNHTEGDWTRKVERECELLPEMGAVTISPQDVARAVRPLPNWKSPGPDGLHNFWLKWFKSSHARLASQFQSALESGSLPQFLTTGITHLLHKSGSTAEPKNYRPITCLPTVYKVLTSILRAKINSHIETNSIMSASQNGCRNGSRGTKELLLIDVAISQQVRRSRRDLSTCWIDYKKAYDSVPHTWLMRVLELYKIDVTLRTFLMSCMGQWRTVLHYPGCRRVSENSEPLRIERGIFQGDSLSPLWFCLALNPLSTLLEGSGVGYRLRREGQVISHLLYMDDLKLFASNNLQLMELLKVTETCSSAIRMEFGLDKCAVMHVKRGEIMESVGTQLSDSIHLRSLCSTETYKYLGMSEALGINAADVKQSLRERFFGRLNKVLKSLLSGGNKVRAFNGWVMPVLMYSFGILKWTQTGLDALDRRVRTLLTANRMHHPRSSVMRLYIPRKCGGRGFLNAKTLHNREVCSLRKYFLETDVGMHRDVVAVDKGLTPLSLANENWRKPIVMDINERKEVWKGKELHGRFYRALHGPDVDLLASVSWLRFGDLFGETEGFVFAIMDEVMMTNNYWKYIVKDGTVDICRACHRPGESIRHIISGCSHLANGDYLHRHNLVARIIHQQLALKYNLVESEVPYYRYVPDPVLENGSVTLYWDRSIITDRTIVANKPDIVVIDRLERRTMIVDIAVPHDENLVKAEKDKQTKYLDLAREVVDMWEVDRAIIVPIVVTANGLIAKSLDQHLRRLSLGSWIKGLIQKAVLLDTARIVRRFLSQEP

SEQ ID NO: 30543 - protein, 954 aa, Xestia xanthographa
MCALDSQLSNCFDSSKDLTDTHSILYCGAVAACRVAHVKFPNNDGATRPKLAVPAWQCRIERRIGEARALIGKLICFREGNTRPRVMRFVRRAFSGTDISFRDYLARVTERIDSLKQKICAWASRIRRYKRRVERYTQNRTFQSDERWVYRAWERPDQGVTDTRLPDDSAMYSFWRNIWSVPVSHTEGDWTREVEQACDPIPQMGAIIISPQDVARAVRPLPNWKSPGPDGLHNFWIKWFQRSHARLASQFQSALESGSLPQFLTTGITHLLHKSGSAAEPKNYRPITCLPTVYKVLTSILRAKINQHIDSNSIMSASQNGCRNGSRGTKELLLIDMAISQQVRRSRKNLSTCWIDYKKAYDSVPHTWLMRVLELYKIDATLRTFLMSCMGHWRTVLRYPGCRQIQGNSESIRIERGIFQGDSLSPLWFCLALNPLSTLLERSGLGYLLTRDGQVISHLLYMDDLKLFAPNNLQLMKLLKVTETFSSAIRMEFGVDKCAVMHVKRGEIMESEGTQLSDSIHLRSLSSTETYKYLGMSEALGINTADMKQSLRERFFGRLNKVLGSLLSGGNKVRAFNGWVMPVLMYSFGILKWTQTELDALDRRVRTLLTANRMHHPRSSVMRLYIPRKCGGRGFLNAKTLHNREVYSLREYFLEAEGEMHRDVVSVDKGLTPLSLANENWRKPKVLDTNDRKVEWQGKELHGRFYRALHGPDVDFLASVSWLRFGDLFGETEGFICAIMDEVMMTNNYRKYIVKDGTVDICRACHRPGESIRHIISGCSSLANGEYLHRHNLVARIIHQQLALKYNLVESEVPYYKYAPDPVLDNGHITLYWDRPITADRTVVANRPDIVVIDRLERRAMIVDITIPHDENLVKAEKDKQFKYLDLAREVVDMWDVNTAVIVPIVVSANGLIAKSLDQHLRRLSLGSWIKGLIQKAVLLDTARIVRRFLFQEP

SEQ ID NO: 30544 - protein, 1213 aa, Xestia xanthographa
MSPMLTRHRAKLQKEAHPPSPGSSLSSASQPPGRATPVSTVSPVAAVASSSSDEFFSPPSTPPPPPRGRRRGRGRPPAGLGPRGQQAPSRVPAAGGNVSRMRWTQSMNENVMRAYYGATEGGSNLTAYRSRMLSLFQVLEPAVSVEAQRLSDQVRVIQRNHMLDDTVLDRLRSESRSNLVTPASPMIAVQQQNIPSAPSRSDYDGEEDRDEVISVSTQCNAQLRSALEGAFREYRSTPPELRPRLPRLPMHNKNKALMCALDSQLSNCFDSSKDLTDTHSILYCGAVAACRVAHVKFPNNDGATRPKLAVPAWQCRIERRIGEARALIGKLICFREGNTRPRVMRFVRRAFSGTDISFRDYLARVTERIDSLKQKICAWASRIRRYKRRVERYTQNRTFQSDERWVYRAWERPDQGVTDTRLPDDSAMYSFWRNIWSVPVSHTEGDWTREVEQACDPIPEMGAIIISPQDVARAVRPLPNWKSPGPDGLHNFWIKWFQRSHARLASQFQSALESGSLPQFLTTGITHLLHKSGSAAEPKNYRPITCLPTVYKVFTSILRAKINQHIDSNSIMSASQNGCRNGSRGTKELLLIDMAISQQVRRSRKNLSTCWIDYKKAYDSVPHTWLMRVLELYKIDATLRTFLMSCMGHWRTVLRYPGCRQIQGNSEPIRIERGIFQGDSLSPLWFCLALNPLSTLLERSGLGYLLRRDGQVILSSHLLYMDDLKLFAPNNLQLMKLLKVTETFSSAIRMEFGVDKCAVMHVKRGEIMESEGTQLSDSIHLRSLSSTETYKYLGMSEALGINTADMKQSLRERFFGRLNKVLGSLLSGGNKVRAFNGWVMPVLMYSFGILKWTQTELDALDRRVRTLLTANRMHHPRSSVMRLYIPRKCGGRGFLSAKTLHNREVYSLREYFLEAEGEMHRDVVSVDKGLTPLSLANGNWRKPKVLDTNDRKVEWQGKELHGRFYRALHGPDVDFLASVSWLRFGDLFGETEGFICTIMDEVMMTNNYRKYIVKDGTVDICRACHRPGESIRHIISGCSSLANGEYLHRHNLVARIIHQQLALKYNLVESEVPYYKYAPDPVLDNGHITLYWDRPITTDRTVVANRPDIVVIDRLERRTMIVDITIPHDENLVKAEKDKQFKYLDLAREVVDMWDVGTAVIVPIVVSANGLIAKSLDQHLRRLSLGSWIKGLIQKAVLLDTARIVRRFLSQEP

SEQ ID NO: 30545 - protein, 1146 aa, Mythimna ferrago
MLTRSRAQQLNTQLTTSGPSLSSASQPPGPAPAVSPEIPVAAVASSSSDEYFSPPTTPPPARRRGRGRPPACLGPRGPPASDRVPAAGGSVQRLRWTQSINENVMRSYFGATEGGTNLTAYRGRMLSLFQVLEPAVNVSAQRLSDQVRVIQRNRMLDDAVLDRLRLESRNGRVSPVSPPAAVQRQPSVSPRPDHVGEDDDDGAISVSTQCNVRLRSALEDAFREYRSIPPELRPRLPRLPMHRKNRALVCALDSQLSNCFDSSEDLTDTHSILYCAAAAACRVAHVKIPNSDRATRPAKPAWQCRIERRIGEARALIGKLICFREGNTRPRVMRFVRRAFSGTDISPRDYLPRITERIDFLRQKVYAWANRIRRYKRRVERYTQNRAFQSNERWVYRAWERPDQSVIDTRLPDDDAMYSFWRSIWSVPVNHTEGDWTRKVERECELLPEMGAVTMSPQDVARAVRPLPNWKSPGPDGLHNFWLKWFKSSHARLASQFQSALESGSLPQFLTTGITHLLHKSGSTVEPKNYRPITCLPTVYKVLTSILRAKINSHIETNSIMSASQNGCRNGSRGTKELLLIDVAISQQVRRSRRDLSTCWIDYKKAYDSVPHTWLMRVLELYKIDVTLRTFLMSCMGQWRTVLHYPGCRRVSGYSRFQGDSLSPLWFCLALNPLSTLLEGSGVGYRLRREGQVISHLLYMDDLKLFASNNLQLMELLKVTETFSSAIRMEFGLDKCAVMHVKRGEIMESVGTQLSDSIHLRSLCSTETYKYLGMSEALGINAADVKQSLRERFFGRLNKVLKSLLSGGNKVRAFNGWVMPVLMYSFGILKWTQTELDALDRRVRTLLTANRMHHPRSSVMRLYIPRKCGGRGFLNAKTLHNREVCSLREYFLETDVGMHRDVVAVDKGLTPLSLANENWRKPIVMDTNERKEVWKGKELHGRFYRALHGPDVDLLASVSWLRFGDLFGETEGFFFAIMDEVMMTNNYRKYIVKDGTVDICRACHRPGESIRHIISGCSHLANGDYLHRHNLVARIIHQQLALKYNLVESEVPYYRYVPDPVLENGSVTLYWDRSIITDRTREVVDMWEVDRAIIVPIVVTANGLIAKSLDQHLRRLSLGSWIKGLIQKAVLLDTARIVRRFLSQEP

SEQ ID NO: 30546 - protein, 1235 aa, Noctua janthe
MLTRSRAKHQAHPPSPDSSLSSASQPPGRPSIVSAVSPIAAVASSSSDEFFSPPSTPSPPRRRGRGRPPAGLGPRGQQAPNRVPAAGGNVSRMRWTQSINENVMRAYYGATEGGSNLTAYRGRMLSLFQVLEPGVSVSAQRLSDQVRVIQRNHMLDDTVLERLRFDSRSNLVIPASPMIAVQLQNVSSAPPRSEHDGEEDDDEVISVSTQCNAQLRSALEGAFREYRSTPPELRPRLPRLPMHKKNKALVCALDSQLSNCFDSNKDLADTHSILYCGAVAACRVAHVKFPNNDRATRPKFAVPAWQCRIERRIGKARALIGKLICFREGNTRPRVLRFVKRAFSGTDVSFRDYLARVTERIDFLKQKICAWASRIRRYKRRVERYTQNRTFRSDERWVYRAWERPDQGVTDTRLPDDDAMCSFWRNIWSVPVSHTEGDWTREVERACDSIPEMGAIIISPQDVARAVRPLPNWKSPGPDGLHNFWIKWFQRSHVRLASQFQSALESGSLPLFLTTGITHLLHKSGSTAEPKNYRPITCLPTVYKVLTSILRAKINHHIDSNSIMSASQIGCRNGSRGTKELLLIDMAISQQVRRSRRDLSTCWIDYKKAYDSVPHTWLMRVLELYKVDATLRTFLMSCMGHWRTVLRYPGCRQIQGNSEPIKIERGIFQGDSLSPLWFCLALNPLSTLLEGSGLGYRLRRGGQVISHLLYMDDLKLFASNNLQLMKLLKVTETFSSAIRMEFGVDKCAVMHVKRGEIMESVGTQLSDSIHLRSLSSTETYKYLGMSEALGINTADMKQSLRDRFFGRLNKVLSSLLSGGNKVRAFNGWVMPVLMYSFGILKWTQTELDALDRRVRALLTANRMHHPRSSVMRLYIPRKCGGRGFLNAKTLHNREICSLREYFLDVDEGMHRDVVSVDKGLTPLSLANENWRKPRVLDTNDRKEVWQGKELHGRFYRALHGPDVDFLASVSWLRFGDLFGETEGFVCAIMDEVMMTNNYRKYIVKDGTVDICRACHRPGESIRHIISGCSRLANGEYLHRHNLVARIIHQQLALKYNLVESEVPYYKYAPDPVLDNGNITLYWDRSIITDRTIVANKPDIVVIDRLERRAMIVDITVPHDENLVKAEKDKQFKYLDLAREVVDMWDVSTAVIVPIVVSANGLIANSLDKHLRRLSLGSWIKGLFRKQYFWTRRVLLGGSSLKSPDHRYFGPCSRYQWATIFYIFKCFFYITLYRNI

SEQ ID NO: 30547 - protein, 1045 aa, Noctua fimbriata
MMIIIRSESRSNLVTPASPMTAVQLQNVTIASPRSDRGGEGDDDEVISVSTQCNAQLRSALESAFREYRSTPPELRPRLPRLPMHKKNKALVCALDSQLSNCFDTSKDLADTHSILYCGAVAACRVAHVKFPNNDRATRPKLAVPAWQCRIEQRIGEARALIGKLICFREGNTRPRVMRFVRRAFSGTDVSFRDYLARVTERIDFLKQKICAWASRIRRYKRRVERYTQNRTFQSDERLVYRAWERPDQGVTDTRLPDDNAMCSFWCSIWSLPVSHTEGDWIREVERACDPIPEMGAIIISPQDVACAVRPLPTWKSPGPDGLHNFWIKWFQRSHVRLASQFQLALESGSLPQFLTTGITHLLHKSGSTAEPKNYRPITCLPTVYKVLTSILRAKINHHIDSNSIMSASQNGCRNGSRGTKELLLIDMAVSQQVRRSRRDLSTCWIYYKKAYDSVPHTWLMRVLELYKVDATLRTFLMSCMGHWRTVLRYPGCRQIQGNSEPIRIERGIFQGDSLSSLWFCIALNPLSTLLEGSGLGYRLRRDGQVISQLLYMDDLKLYAPNNLQLMKLLKVTETFSSSIRMEFGVDKCAVMHVKQGEIMESVGTQLSDSIHLRSLSSTETYKYLGMSEALGINTADMKQSLSERFFGRLNKVLSSLLSGGNKVRAFNGWVMPVLMYSFGILKWTQTELDALDRRVRVLVTANRMHHPRSSVMRLYIPRKCGGRGFLNVKTLHNREVCSLREYFLEADVGMHRDVVSVDKGLTPLSLANENWRKPRVLDTNDGKEVWQGKELHGRFYRALHGPDVDFLASVAWLRFGDLFGETEGFVCAIMDEVMMTNNYRKYIVKDGTVDICRACHRPGESIRHIISGCSRLANGEYLHRHNLVARIIHQQLALKYNLVESEVPYYKYVPDPVLDDGNITLYWDRSIVTDRTIVANKPDIVVIDRLERRAMIVDITVPHDDNLVKAEKDKQFKYLDLAHEVVDIWDVSTAVIVPIVVSANGLIANTLDQHLRRLSLGSWLKGLIQKAVLLDSARIVRRFLSQEP

SEQ ID NO: 30548 - protein, 1206 aa, Noctua fimbriata
MITRSRAKQLQEAHTPSPGSSLSSASQPPRRATSVSTVSPVAAVASSSSDEFFSPPSTPPPSPRRRGRGRPPAGLGPRGQPAPNRVPAAGGNVSRMRWTQSINEQVMRAYYGATEGGSNLTAYRGRMLSLFQVLEPGVSVSAQRLSDQVRVIQRNHMLDDTVLDRLRSESRSNLVTPASPMTAVQLQNVTIASPRSDRGGEGDDDEVISVSTQCNAQLRSALESAFREYRPTPPELRPRLPRLPMHKKNKALMCALDSQLSNCFDTSKDLADTHSILYCGAVAACRVAHVKFPNNDRATRPKLAVPAWQCRIERRIGEARALIGKLICFREGNTRPRVMRFVRRAFSGTDVNFRDYLARVTERIDFLKQKICAWASRIRRYKRRVERYTQNRTFQSDERWVYRAWERPDQGVTDTRLPDDNAMCSFWRSIWSVPVSHTEGDWIREVERACDPIPEMGAIIISPQDVACAVRPLPNWKSPGPDGLHNFWIKWFQRSHVRLASQFQLALESGSLPQFLTTGITHLLHKSGSTAEPKNYRPITCLPTVYKVLTSILRAKINHHIDSNSIMSASQNGCRNGSRGTKELLLIDMAVSQQVRRSRRDLSTCWIDYKKAYDSVPHTWLMRVLELYKVDATLRTFLTSCMGHWRTVLRYPGCRQIQGNSEPIRIERGIFQGDSLSPLWFYIALNPLSTLLEGSGLGYRLRRDGQVISHLLYMDDLKLYAPNNLQLMKLLKVTETFSSSIRMEFGVDKCAVMHVKQGEIMESLGTQLSDSIHLRSLSSTETYKYLGMSEALGINAADMKQSLRERFFGRLHKVLSSLLSGGNKVRAFNGWVMPVLMYSFGILKWTQMELDALDRRVRVLLTANRMHHPRSSVMRLYIPRKCGGRGFLNVKTLHNREVCSLREYFLEADVGMHRDVVSVDKGLTPLSLANENWRKPRVLDTNDRKEVWQGKELHGRFYRALHGPDVDFLASVAWLRFGDLFGETEGFVCAIMDEVMMTNNYRKYIVKDGTVDICRACHRPGESIRHIISGCSRLANGEYLHRHNLVARIIHQQLALKYNLVESEVPYYKYVPDPVLDDGNITLYWDRSIVTDRTIVANKPDIVVIDRLERRAMIVDITVPHDENLVKAEKDKQFKYLDLAHEVVDIWDVSTAVIVPIVVSANGLIANTLDQHLRRLSLGSWIKGLIQKAVLLDTARIVRRFLSQEP

SEQ ID NO: 30549 - protein, 1206 aa, Noctua fimbriata
MITRSRAKQLQEAHTPSPGSSLSSASQPPRRATSVSTVSPVAAVASSSSDEFFSPPSTPPPSPRRRGRGRPPAGLGPRGQPAPNRVPAAGGNVSRMRWTQSINEQVMRAYYGATEGGSNLTAYRGRMLSLFQVLEPGVSVSAQRLSDQVRVIQRNHMLDDTVLDRLRSESRSNLVTPASPMTAVQLQNVTIASPRSDRGGEGDDDEVISVSTQCNAQLRSALESAFREYRSTPPELRPRLPRLPMHKKNKALMCALDSQLSNCFDTSKDLADTHSILYCGAVAACRVAHVKFPNNDRATRPKLAVPAWQCRIERRIGEARALIGKLICFREGNTRPRVMRFVRRAFSGTDVNFRDYLARVTERIDFLKQKICAWASRIRRYKRRVERYTQNRTFQSDERWVYRAWERPDQGVTDTRLPDDNAMCSFWRSIWSVPVSHTEGDWIREVERACDPIPEMGAIIISPQDVACAVRPLPNWKSPGPDGLHNFWIKWFQRSHVRLASQFQLALESGSLPQFLTTGITHLLHKSGSTAEPKNYRPITCLPTVYKVLTSILRAKINHHIDSNSIMSASQNGCRNGSRGTKELLLIDMAVSQQVRRSRRDLSTCWIDYKKAYDSVPHTWLMRVLELYKVDATLRTFLTSCMGHWRTVLRYPGCRQIQGNSEPIRIERGIFQGDSLSPLWFCIALNPLSTLLEGSGLGYRLRRDGQVISHLLYMDDLKLYAPNNLQLMKLLKVTETFSSSIRMEFGVDKCAVMHVKQGEIMESLGTQLSDSIHLRSLSSTETYKYLGMSEALGINAADMKQSLRERFFGRLNKVLSSLLSGGNKVRAFNGWVMPVLMYSFGILKWTQMELDALDRRVRVLLTANRMHHPRSSVMRLYIPRKCGGRGFLNVKTLHNREVCSLREYFLEADVGMHRDVVSVDKGLTPLSLANENWRKPRVLDTNDRKEVWQGKELHGRFYRALHGPDVDFLASVAWLRFGDLFGETEGFVCAIMDEVMMTNNYRKYIVKDGTVDICRACHRPGESIRHIISGCSRLANGEYLHRHNLVARIIHQQLALKYNLVESEVPYYKYVPDPVLDDGNITLYWDRSIVTDRTIVANKPDIVVIDRLERRAMIVDITVPHDENLVKAEKDKQFKYLDLAHEVVDIWDVSTAVIVPIVVSANGLIANTLDQHLRRLSLGSWIKGLIQKAVLLDTARIVRRFLSQEP

SEQ ID NO: 30550 - protein, 868 aa, Noctua janthe
MRFVKRAFSGTDVSFRDYLARVTERIDFLKQKICAWASRIRRYKRRVERYTQNRTFRSDERWVYRAWERPDQGVTDTRLPDDDAMCSFWRNIWSVPVSHTEGDWTREVERACDSIPEMGATIISPQDVARAVRPLPNWKSPGPDGLHNFWNKWFQRSHVRLASQFQSALESGSLPQFLTTGITHLLHKSGSTAEPKNYRPITCLPTVYKVLTSILRAKINHHIDSNSIMSASQNGCRNGSRGTKELLLIDMAISQQVRRSRRDLSTCWIDYKKAYDSVPHTWLMKVLELYKVDATLRTFLMSCMGHWRTVLRYPGCRQIQGNSEPIKIERGIFQGDSLSPLWFCLALNPLSTLLEGSGLGYRLRRGGQVISHLLYMDDLKLFAPNNLQLMKLLKVTETFSSAIRMEFGVDKCAVMHVKRGEIMESVGTQLSDSIHLRSLSSTETYKYLGMSEALGINTADMKQSLRDRFFGRLNKVLSSLLSGGNKVRAFNGWVMPVLMYSFGILKWTQTELDALDRRVRALLTANRMHHPRSSVMRLYIPRKCGGRGFLNAKTLHNREICSLREYFLEVDEGMHRDVVSVDKGLTPLSLANENWRKPRVLDTNDRKEVWQGKELHGRFYRALHGPDVDFLASVSWLRFGDLFGETEGFVCAIMDEVMMTNNYRKYIVKDGTVDICRACHRPGESIRHIISGCSRLANGEYLHRHNLVARIIHQQLALKYNLVESEVPYYKYAPDPVLDNGNITLYWDRFIITDRTIVANKPDIVVIDRLERRAMIVDITVPHDENLVKAEKDKQFKYLDLAREVVDMWDVSTAVIVPIVVSANGLIANSLDKHLRRLSLGSWIKGLIQKAVLLDTARIVRRFLSQEP

SEQ ID NO: 30551 - protein, 1109 aa, Noctua janthe
MRWTQSINENVMRAYYGATEGGSNLTAYRGRMLSLFQVLEPGVSVSAQRLSDQVRVIQRNHMLDDTVLERLRFDSRSNLVIPASPMIAVQLQNVSSAPPRSEHDGEEDDDEVISVSTQCNAQLRSALEGAFREYRSTPPELRPRLPRLPMHKKNKALVCALDSQLSNCFDSSKDLADTHSILYCGAVAVCRVAHVKFPNNDRATRPKFAVPAWQCRIERRIGKARALIGKLICFREGNTRPRVLRFVKRAFSGTDVSFRDYLARVTERIDFLKICAWASRIRRYKRRVERYTQNRTFRSDERWVYRAWERPDQGVTDTRLPDDDAMCSFWRNIWSVPVSHTEGDWTREVERACDSIPEMGAIIICPQDVARAVRPLPNWKSPGPDGLHNFWIKWFQRSHVRLASQFQSALESGSLPQFLTTGITHLLHKSGSTAEPKNYRPITCLPTVYKVLTSILRAKINHHIDSNSIMSASQNGCRNGSRGTKELLLIDMAISQQVRRSRRDLSTCWIDYKKAYDSVPHTWLMKVLELYKVDATLRTFLMSCMGHWRTVLRYPGCRQIQGNSEPIKIERGIFQGDSLSPLWFCLALNPLSTLLEGSDLGYRLRRGGQVISHLLYMDDLKLFAPNNLQLMKLLKVTETFSSAIRMEFGVDKCAVMHVKRGEIMESVGTQLSDSIHLRSLSSTETYKYLGMSEALGINTADMKQSLRDRFFGRLNKVLSSLLSGGNKVRAFNGWVMPVLMYSFGILKWTQTELDALDRRVRALLTANRMHHPRSSVMRLYIPRKCGGRGFLNAKTLHNREICSLREYFLEVDEGMHRDVVLVDKGLTPLSLANENWRKPRVLDTNDRKEVWQGKELHGRFYRALHGPDVDFLASVSWLRFGDLFGETEGFVCAIMDEVMMTNNYRKYIVKDGTVDICRACHRPGESIRHIISGCSRLANGEYLHRHNLVARIIHQQLALKYNLVESEVPYYKYAPDPVLDNGNITLYWDRSIITDRTIVANKPDIVVIDRLERRAMIVDITVPHDENLVKAEKDKQFKYLDLAREVVDMWDVSTAVIVPIVVSANGLIANSLDKHLRRLSLGSWIKGLIQKAVLLDTARIVRRFLSQEP

SEQ ID NO: 30552 - protein, 868 aa, Noctua janthe
MRFVKRAFSGTDVSFRDYLARVTERIDFLKQKICAWASRIHRYKRRVERYTQNRTFRSDERWVYRAWERPDQGVTDTRLPDDDAMCSFWRNIWSVPVSHNEGDWTREVERACDPIPEMGAIIISPQDVARAVHPLPNWKSPGPDGLHNFWIKWFQRSHVRLASQFQSALESGSLPQFLTTGITHLLHKSGSTAEPKNYRPITCLPTVYKVLTSILRAKINHHIDSNSIMSASQNGCRNGSRGFKKLLLIDMAISQQVRRSRRDLSTCWIDYNKAYDSVPHTWLMKVLELYKVDATLRTLLMSCMGHWRTVFRYPGCRQIQGNSEPIKIERGIFQGDSLSPLRFCLALNPLSTLLEGSGLGYRLRRGGQVISHLLYMDDLKLIAPNNLQLMKLLKVTETYSSAIKMEFGVDKCAVMHVKRGEIMESVGTQLSDSIHLRSLSSTETYKYLGLSEALGINTPDMKQSLRDRFFGRLNKVISSLLSGGNKVRAFNGWVMPVLMYSFGILKWTQTELDALDRRVRALLTANRMHHPRSSVMRLYIPRKCGGRGFLNAKTLHNREVCSLREYFLEVDEGMHRDVVSEDKGLTPLSLANENWRKPRVLDTNDRKEVWQGKGLHGRFYRALHGPDVDFLASVSWLRFGDLFGETEGFVCAIMDEVMMTNNYRKYIVKDGTVDICRACHRPGESIRHIISGCSRLANGEYLHRHNLVARIIHQQLALKYNLVESEVPYYKYAPDPVLDNGNITLYWDRSIITDRTIVANKPDIVVIDRLERRAMIVDITVPHDENLVKAEKDKQFKYLDLAREVVDMWDVSTAVIVPIVVSANGLIANSLDKHLRRLSLGSWIKGLIQKAVLLDTARIVRRFLSLEP

SEQ ID NO: 30553 - protein, 1203 aa, Noctua janthe
MLTRSWAKHQAHPPSPDSSLSSASQPPGRASIVSAVSPIAAVASSSSDEFFSPPSTPSPPRRRGRGRPPAGLGPRGQQAPNRVPAAGGNVSRMRWTQSINENVMRAYYGATEGGSNLTAYRGRMLSLFQVLEPGVSVSAQRLSDQVRVIQRNHMLDDTVLERLRFDSRSNQVIPASPMIAVQLQNVSSAPPRSEHDGEEDDDEVISVSTQCNAQLRSALEGAFREYRSTPPELRPRLPRLPMHKKNKALVCALDSQLSNCFDSSKDLTDTHSILYCGAVAACRVAHVKFPNNDRATRPKFAVPAWQCRIERRIGEARALIGKLICFREGNTRPRVMRFVKRAFSGTDVSFRDYLARVTERIDFLKQKICAWASRIRRYKRRVERYTQNRTFRSDERWVYRAWERPDQGVTDTRLPDDDAMCSFWRNIWSVPVSHTEGDWTREVERACDSIPEMGAIIISPQDVARAVRPLPNWKSPGPDGLHNFWIKWFQRSHVRLASQFQSALESGSLPQFLTTGITHLLHKSGSTAEPKNYRPITCLPTVYKVLTSILRAKINHHIDSNSIMSASQNGCRNGSRGTKELLLIDMAISQQVRRSRRDLSTCWIDYKKAYDSVPHTWLMRVLELYKVDATLRTFLMSCMGHWRTVLHYPGCRQIQGNSEPIKIERGIFQGDSLSPLWFCLALNPLSTLLEGSGLGYRLRRGGQVISHLLYMDDLKLFAPNNLQLMKLLKVTETFSSAIRMEFGVDKCAVMHVKRGEIMESVGTQLSDSIHLRSLSSTETYKYLGMSEALGINTADMKQSLRDRFFGRLNKVLSSLLSGGNKVRAFNGWVMPVLMYSFGILKWTQTELDALDRRVRALLTANRMHHPRSSVMRLYIPRKCRGRGFLNAKTLHNREICSLREYFLEVDEGMHRDVVSVDKGLTPLSLANENWRKPRVLDTNDRKEVWQGKELHGRFYRALHGPDVDFLASVSWLRFGDLFGETEGFVCAIMDEVMMTNNYRKYIVKDGTVDICRACHRPGESIRHIISGCSRLANGEYLHRHNLVARIIHQQLALKYNLVESEVPYYKYAPDPVLDNGNITLYWDRSIITDRTIVANKPDIVVIDRLERRAMIVDITVPHDENLVKAEKDKQFKYLDLAREVVDMWDVSTAVIVPIVVSANGLIANSLDKHLRRLSLGSWIKGLIQKAVLLDTARIVRRFLSQEP

SEQ ID NO: 30554 - protein, 1111 aa, Noctua janthe
MRWTQSINENVMRAYYGATEGGSNLTAYRGRMLSLFQVLEPGVSVSAQRLSDQVRVIQRNHMLDDTVLERLRFDSRSNLVIPASPMIAVQLQNVPSAPPRSEHDGEEDDDEVISVSTQCNAQLRSALEGAFREYRSTPPELRPRLPRLPMHKKNKALVCALDSQLSNCFDSSKDLADTHSILYCGAVAACRVARVKFPNNDRATRPKFAVPAWKCRIERRIGKARALIGKLICFREGNTRPRVLRFVKRAFSGTDVSFRDYLARVTERIDFLKQKICAWASRIRRYKRRVERYTQNRTFRSDERWVYRAWERPDQGVTDTRLPDDDAMCSFWRNIWSVPVSHTEGDWTREVERACDSIPEMGAIIISPQDVARAVRPLPNWKSPGPDGLHNFWIKWFQRSHVRLASQFQSALESGSLPQFLTTGITHLLHKSGSTAEPKNYRPITSLPTVYKVLTSILRAKINHHIDSNSIMSASQNGCRNGSRGTKELLLIDMAISQQVRRSRRDLSTCWIDYKKAYDSVPHTWLMRVLELYKVDATLRTFLMSCMGHWRTVLRYPGCRQIQGNSEPIKIERGIFQGDSLSPLWFCLALNPLSTLLEGSGLGYRLRRGGQVISHLLYMDDLKLFAPNNLQLMKLLKVTETFSSAIRMEFGVDKCAVMHVKRGEIMESVGTQLSDSIHLRSLSSTETYKYLGMSEALGINTADMKQSLRDRFFGRLNKVLSSLLSGGNKVRAFNGWVMPVLMYSFGILKWTQTELDALDRRVRALLTANRMHHPRSSVMRLYIPRKCGGRGFLNAKTLHNREICSLREYFLEVDEGMHRDVVSVDKGLTPLSLANENWRKPRVLDTNDRKEVWQGKELHGRFYRALHGPDVDFLASVSWLRFGDLFGETEGFVCAIMDEVMMTNNYRKYIVKDGTVDICRACHRPGESIRHIISGCSRLANGEYLHRHNLVARIIHQQLALKYNLVESEVPYYKYAPDPVLDNGNITLYWDRSIITDRTIVANKPDIVVIDRLERRAMIVDITVPHDENLVKAEKDKQFKYLDLAREVVDMWDVSTAVIVPIVVSANGLIANSLDKHLRRLSLGSWIKGLIQKAVLLDTARIVRRFLSQEP

SEQ ID NO: 30555 - protein, 1203 aa, Noctua janthe
MLTRSRAKHQAHPPSPDSSLSSASQPPGRASIVSAVSPIAAVASSSSDEFFSPPSTPSPPRRRGRGRPPAGLGPRGQQAPNRVPAAGGNVSRMRWTQSINENVMRAYYGATEGGSNLTAYRGRMLSLFQVLEPGVSVSAQRLSDQVRVIQRNHMLDDTVLERLRFDSRSNLVIPASPMIAVQLQNVSSAPPRSEHDGEEDDDEVISVSTQCNAQLRSALEGAFREYRSTPPELRPRLPRLPMHKKNKALVCALDSQLSNCFDSSKDLTDTHSILYCGAVAACRVAHVKFPNNDRATRPKFAVPAWQCRIERRIGEARALIGKLICFREGNTRPRVMRFVKRAFSGTDVSFRDYLARVTERIDFLKQKICAWASRIRRYKRRVERYTQNRTFRSDERWVYRAWERPDQGVTDTRLPDDDAMCSFWRNIWSVPVSHTEGDWTREVERACDSIPEMGAIIISPQDVARAVRPLPNWKSPGPDGLHNFWIKWFQRSHVRLASQFQSALESGSLPQFLTTGITHLLHKSGSTAEPKNYRPITCLPTVYKVLTSILRAKINHHIDSNSIMSASQNGCRNGSRGTKELLLIDMAISQQVRRSRRDLSTCWIDYKKAYDSVPHTWLMKVLELYKVDATLRTFLMSCMGHWRTVLHYPGCRQIQGNSEPIKIERGIFQGDSLSPLWFCLALNPLSTLLEGSGLGYRLRRGGQVISHLLYMDDLKLFAPNNLQLMKLLKVTETFSSAIRMEFGVDKCAVMHVKRGEIMESVGTQLSDSIHLRSLSSTETYKYLGMSEALGINTADMKQSLRDRFFGRLNKVLSSLLSGGNKVRAFNGWVMPVLMYSFGILKWTQTELDALDRRVRALLTANRMHHPRSSVMRLYIPRKCGGRGFLNAKTLHNREICSLREYFLEVDEGMHRDVVSVDKGLTPLSLANENWRKPRVLDTNDRKEVWQGKELHGRFYRALHGPDVDFLASVSWLRFGDLFGETEGFVCAIMDEVMMTNNYRKYIVKDGTVDICRACHRPGESIRHIISGCSRLANGEYLHRHNLVARIIHQQLALKYNLVESEVPYYKYAPDPVLDNGNITLYWDRSIITDRTIVANKPDIVVIDRLERRAMIVDITVPHDENLVKAEKDKQFKYLDLAREVVDMWDVNTAVIVPIVVSANGLIANSLDKHLRRLSLGSWIKGLIQKAVLLDTARIVRRFLSQEP

SEQ ID NO: 30556 - protein, 1203 aa, Noctua janthe
MLTRSRAKHQAHPPSPDSSLSSASQPPGRASIVSAVSPIAAVASSSSDEFFSPPSTPSPPRRRGRGRPPAGLGPRGQQAPNRVPAAGGNVSRMRWTQSINENVMRAYYGATEGGSNLTAYRGRMLSLFQVLEPGVSVSAQRLSDQVRVIQRNHMLDDTVLERLRFDSRSNLVIPASPMIAVQLQNVSSAPPRSEHDGEEDDDEVISVSTQCNAQLRSALEGAFREYRSTPPELRPRLPRLPMHKKNKALVGALDSQLSNCFDSSKDLADTHSILYCGAVAACRVAHVKFPNNDRATRPKFAVPAWQCRIERRIGEARALIGKLICFREGNTRPRVMRFVKRAFSGTDVSFRDYLARVTERIDFLKQKICAWASRIRRYKRRVERYTQNRTFRSDERWVYRAWERPDQGVTDTRLPDDDAMCSFWRNIWSVPVRHTEGDWTREVERACDSIPEMGAIIISPQDVARAVRPLPNWKSPGPDGLHNFWIKWFQRSHVRLASQFQSALESGSLPQFLTTGITHLLHKSGSTAEPKNYRPITCLPTVYKVLTSILRAKINHHIDSNSIMSASQNGCRNGSRGTKELLLIDMAISQQVRRSRRDLSTCWIDYKKAYDSVPHTWLMRVLELYKVDATLRTFLMSCMGHWRTVLRYPGCRQIQGNREPIKIERGIFQGDSLSPLWFCLALNPLSTLLEGSGLGYRLRRGGQVISHLLYMDDLKLFAPNNLQLMKLLKVTETFSSAIRMEFGVDKCAVMHVKRGEIMESVGTQLSDSIHLRSLSSTETYKYLGMSEALGINTADMKQSLRDCFFGRLNKVLSSLLSGGNKVRAFNGWVMPVLMYSFGILKWTQTELDALDRRVRALLTANRMHHPRSSVMRLYIPRKCGGRGFLNAKTLHNREICSLREYFLEVDEGMHRDVVSVDKGLTPLSLANENWRKPRVLDTNDRKEVWQGKELHGRFYRALHGPDVDFLASVSWLRFGDLFGETEGFVCAIMDEVMMTNNYRKYIVKDGTVDICRACHRPGESIRHIISGCSRLANGEYLHRHNLVARIIHQQLALKYNLVESEVPYYKYAPDPVLDNGNITLYWDRSIITDRTIVANKPDIVVIDRLERRAMIVDITVPHDENLVKAEKDKQFKYLDLAREVVDMWDVSTAVIVPIVVSANGLIANSLDKHLRRLSLGSWIKGLIQKAVLLDTARIVRRFLSQEP

SEQ ID NO: 30557 - protein, 1203 aa, Noctua janthe
MLTRSRAKHQAHPPSPDSSLSSASQPPGRASIVSAVSPIAAVASSSSDEFFSPPSTPSPPRRRGRGRPPAGLGPRGQQAPNRVPAAGGNVSRMRWTQSINENVMRAYYGATEGGSNLTAYRGRMLSLFQVLEPGVSVSAQRLSDQVRVIQRNHMLDDTVLERLRFDSRSNLVIPASPMIAVQLQNVSSAPPRSEHDGEEDDDEVISVSTQCNAQLRSALEGAFREYRSTPPELRPRLPRLPMHKKNKALVCALDSQLSNCFDSSKDLADTHSILYCGAVAVCRVAHVKFPNNDRATRPKFAVPAWQCRIERRIGKARALIGKLICFREGNTRPRVLRFVKRAFSGTDVSFRDYLARVTERIDFLKQKICAWASRIRRYKRRVERCTQNRTFRSDERWVYRAWERPDQGVTDTRLPDDDAMCSFWRNIWSVPVSHTEGDWTREVERACDSIPEMGAIIISPQDVARAVRPLPNWKSPGPDGLHNFWIKWFQRSHVRLASQFQSALESGSLPQFLTTGITHLLHKSGSTAEPKNYRPITCLPTVYKVLTSILRAKINHHIDSNSIMSASQNGCRNGSRGTKELLLIDMAISQQVRRSRRDLSTCWIDYKKAYDSVPHTWLMKVLELYKVDATLRTFLMSCMGHWRTVLRYPGCRQIQGNSEPIKIERGIFQGDSLSPLWFCLALNPLSTLLEGSDLGYRLRRGGQVISHLLYMDDLKLFAPNNLQLMKLLKVTETFSSAIRMEFGVDKCAVMHVKRGEIMESVGTHLSDSIHLRSLSSTETYKYLGMSEALGINTADMKQSLRDRFFGRLNKVLSSLLSGGNKVRAFNGWVMPVFMYSFGILKWTQTELDALDRRVRALLTANRMHHPRSSVMRLYIPRKCGGRGFLNAKTLHNREICSLREYFLEVDEGMHRDVVSVDKGLTPLSLANENWRKPRVLDTNDRKEVCQGKELHGRFYRALHGPDVDFLASVSWLRFGDLFGETEGFVCAIMDEVMMTNNYRKYIVKDGTVDICRACHRPGESIRHIISGCSRLANGEYLHRHNLVARIIHQQLALKYNLVESEVPYYKYAPDPVLDNGNITLYWDRSIITDRTIVANKPDIVVIDRLERRAMIVDITVPHDENLVKAEKDKQFKYLDLAREVVDMWDVSTAVIVPIVVSANGLIANSLDKHLRRLSLGSWIKGLIQKAVLLDTARIVRRFLSQEP

SEQ ID NO: 30558 - protein, 1203 aa, Noctua janthe
MLTRSRAKHQAHPPSPDSSLSSASQPPGRASIVSAVSPIAAVASSSSDEFFSPPSTPSPPRRRGRGRPPAGLGPRGQQAPNRVPAAGGNVSRMRWTQSINENVMRAYYGATEGRSNLTAYRGRMLSLFQVLEPGVSVSAQRLSDQVRVIQRNHMLDDTVLERLRFDSRSNLVIPASPMIAVQLQNVSSAPPRSEHDGEEDDDEVISVSTQCNAQLRSALEGAFREYRSTPPELRPRLPRLPMHKKNKALVCALDSQLSNCFDSSKDLADTHSILYCGAVAACRVAHVKFPNNDRATRPKFAVPAWQCRIERRIGEARALIGKLICFREGNTRPRVMRFVKRAFSGTDVSFRDYLARVTERIDFLKQKICAWASRIRRYKRRVERYTQNRTFRSDERWVYRAWERPDQGVTDTRLPDDDAMCSFWRNIWSVPVSHTEGDWTREVERACDSIPEMGAIIISPQDVARAVRPLPNWKSPGPDGLHNFWIKWFQRSHVRLASQFQSALESGSLPQFLMTGITHLLHKSGSTAEPKNYRPITCLPTVYKVLTSILRAKINHHIDSNSIMSASQNGCRNGSRGTKELLLIDMAISQQVRRSRRDLSTCWIDYKKAYDSVPHTWLMKVLELYKVDATLRTFLMSCMGHWRTVLRYPGCRQIQGNREPIKIERGIFQGDSLSPLWFCLALNPLSTLLEGSGLGYRLRRGGQVISHLLYMDDLKLFAPNNLQLMKLLKVTETFSSAIRMEFGVDKCAVMHVKRGEIMESVGTQLSDSIHLRSLSSTETYKYLGMSEALGINTADMKQSLRDCFFGRLNKVLSSLLSGGNKVRAFNGWVMPVLMYSFGILKWTQTELDALDRRVRALLTANRMHHPRSSVMRLYIPRKCGGRGFLNAKTLHNREICSLREYFLEVDEGMHRDVVSVDKGLTPLSLANENWRKPRVLDTNDRKEVWQGKELHGRFYRALHGPDVDFLASVSWLRFGDLFGETEGFVCAIMDEVMMTNNYRKYIVKDGTVDICRACHRPGESIRHIISGCSRLANGEYLHRHNLVARIIHQQLALKYNLVESEVPYYKYAPDPVLDNGNITLYWDRSIITDRTIVTNKPDIVVIDRLERRAMIVDITVPHDENLVKAEKDKQFKYLDLARDVVDMWDVSTAVIVPIVVSANGLIANSLDKHLRRLSLGSWIKGLIQKAVLLDTARIVRRFLSQEP

SEQ ID NO: 30559 - protein, 1203 aa, Noctua janthe
MLTRSRAKHQAHPPSPDSSLSSASQPPGRASIVSAVSPIAAVASSSSDEFFSPPSTPSPPRRRGRGRPPAGLGPRGQQAPNRVPAAGGNVSRMRWTQSINENVMRAYYGATEGGSNLTAYRGRMLSLFQVLEPGVSVSAQRLSDQVRVIQRNHMLDDTVLERLRFDSRSNLVIPASPMIAVQLQNVSSAPPRSEHDGEEDDDEVISVSTQCNAQLRSALEGAFREYRSTPPELRPRLPRLPMHKKNKALVCALDSQLSNCFDSSKDLTDTHSILYCGAVAACRVAHVKFPNNDRATRPKFAVPAWQCRIERRIGEARALIGKLICFREGNTRPRVMRFVKRAFSGTDVSFRDYLARVTERIDFLKQKICAWASRIRRYKRRVERYTQNRTFRSDERWVYRAWERPDQGVTDTRLPDDDAMCSFWRNIWSVPVSHTEGDWTREVERACDSIPEMGAIIISPQDVARAVRPLPNWKSPGPDGLHNFWIKWFQRSHVRLASQFQSALESGSLPQFLTTGITHLLHKSGSTAEPKNYRPITCLPTVYKVLTSILRAKINHHIDSNSIMSASQNGCRNGSRGTKELLLIDMAISQQVRRSRRDLSTCWIDYKKAYDSVPHTWLMKVLELYKVDATLRTFLMSCMGHWRTVLHYPGCRQIQGNSEPIKIERGIFQGDSLSPLWFCLALNPLSTLLEGSGLGYRLRRGGQVISHLLYMDDLKLFAPNNLQLMKLLKVTETFSSAIRMEFGVDKCAVMHVKRGEIMESVGTQLSDSIHLRSLSSTETYKYLGMSEALGINTADMKQSLRDRFFGRLNKVLSSLLSGGNKVRAFNGWVMPVLMYSFGILKWTQTELDALDRRVRALLTANRMHHPRSSVMRLYIPRKCGGRGFLNAKTLHNREICSLREYFLEVDEGMHRDVVSVDKGLTPLSLANENWRKPRVLDTNDRKEVWQGKELHGRFYRALHGPDVDFLASVSWLRFGDLFGETEGFVCAIMDEVMMTNNYRKYIVKDGTVDICRACHRPGESIRHIISGCSRLANGEYLHRHNLVARIIHQQLALKYNLVESEVPYYKYAPDPVLDNGNITLYWDRSIITDRTIVANKPDIVVIDRLERRAMIVDITVPHDENLVKAEKDKQFKYLDLAREVVDMWDVSTAVIVPIVVSANGLIANSLDKHLRRLSLGSWIKGLIQKAVLLDTARIVRRFLSQEP

SEQ ID NO: 30560 - protein, 1078 aa, Ochropleura plecta
MSVSTGARATTERPLMRGKKPTPDGTGRSMFERSNKHIGARSKMVTISRGRNARQCSSSWSAKSIRGLTRGSEEDDDEVISVSTQCNIQLRSALEVAFREYRSTLPELRPRLPRLPMHKKNKALVCALDSLLANCFDSSKDLADTHSILYCAAVAACRVANVKFPNNDRATRPKLSVPAWQCRIERRIGEARALIGKLICFREGNTRPRVMRFVRRAFSGTDTSSRDYLARVTERIDFLKQKISAWASRIRRFKQRVERYTQNRTFQSDERWVYRAWERPDQGVADTCLPDDDAMSSFWRSIWSVPVSHTEGDWTREIERACDPIPDMGAIIISLQDVARAVRPLPNWKSPGPDGLQNFWIKWFQRSHARLASQFQSALESGSLPQFLTTGITHLLHKSGSTTEPKNYRPITCLPTIYKVLTSILRGKINQHIESNSIMSPSQNGCRNGSRGTKELLLIDMAISQQVRRSRRNLSTCWIDYKKAYDSVPHTWLMRVLELYKVDATLRTFLMSCMGQWRTVLRYPGCRQMQRNSEPIRIERGIFQGDSLSPLWFCLALNPLSTLLEGSGLGYRLRRGGQVISHLLYMDDLKLVAPNNLQLMKLLKVTETFSSSIRMEFGVEKCAVMHVKRGEIMESAGIQLSDSIHLRSLSSTETYKYLGMSEALGINTADMKQSLKVRFFGRLNKVLSSLLSGGNKVRAFNGWVMPVLMYSFGILKWTQTELDALDRRVRTLLTANRMHHPRSSVMRLYIPRKCGGRGFLNAKTLHNREVCSLREYFLGTDVEMHRDVVSVDKGLTPLSLANENWRKPKVLDTNDRKEVWQSKELHGRFYRALHGPDVDFSASVSWLRFGNLFGETEGFVCAIMDEVMMTNNYRKYIVKDGTVDICRACCRPGESIRHIISGCSRLANGEYLHRHNLVARIIHQQLALKYNLVESEVPYYKYVPDPVLEDGNISLYWDRSIVTDRTIVANKPDIVVIDRLERRAMIVDITVPHDENLVKAEKDKQFKYLDLAREVVDMWHVNTAVIVPIVVSANGLIANSLDQHLRRLSLGSWIKGLIQKAVLLDTARIVRRFLSQES

SEQ ID NO: 30561 - protein, 1203 aa, Noctua janthe
MLTRSRAKHQAHPPSPDSSLSSASQPPGRASIVSAVSPIAAVASSSSDEFFSPPSTPSPPRRRGRGRPPAGLGPRGQQAPNRVPAAGGNVSRMRWTQSINENVMRAYYGATEGGSNLTAYRGRMLSLFQVLEPGVSVSAQRLSDQVRVIQRNHMLDDTVLERLRFDSRSNLVIPASPMIAVQLQNVSSAPPRSEHYGEEDDDEVISVSTQCNAQLRSALEGAFREYRSTPPELRPRLPRLPMHKKNKALVCALDSQLSNCFDSSKDLADTHSILYCGAVAACRVAHVKFPNNDRATQPKFAVPAWQCRIERRIGKARALIGKLICFREGNTRPRVLRFVKRAFSGTDVSFRDYLARVTERIDFLKQKICAWASRIRRYKRRVERYTQNRTFRSDERWVYRAWERPDQGVTDTRLPDDDAMCSFWRNIWSVPVSHTEGDWTREVERACDSIPEMGAIIISPQDVARAVRPLPNWKSPGPDGLHNFWIKWFQRSHVRLASQFQSALESGSLPQFLTTGITHLLHKSGSTAEPKNYRPITCLPTVYKVLTSILRAKINHHIDSNSIMSASQNGCRNGSRGTKELLLIDMAISQQVRRSRRDLSTCWIDYKKAYDSVPHTWLMRVLELYKVDATLRTFLMSCMGHWRTVLRYPGCRQIQGNSEPIKIERGIFQGDSLSPLWFCLALNPLSTLLEGSGLGYRLRRGGQVISHLLYMDDLKLFAPNNLQLMKLLKVTETFSSAIRMEFGVDKCAVMHVKRGEIMESVGTQLSDSIHLRSLSSTETYKYLGMSEALGINTADMKQSLRDRFFGRLNKVLSSLLSGGNKVRAFNGWVMPVLMYSFGILKWTQTELDALDRRVRALLTANRMHHPRSSVMRLYIPRKCGGRGFLNATTLHNREICSLREYFLEVDEGMHRDVVSVDKGLTPLSLANENWRKPRVLDTNDRKEVWQGKELHGRFYRALHGPDVDFLASVSWLRFGDLFGETEGFVCAIMDEVMMTNNYRKYIVKDGTVDICRACHRPGESIRHIISGCSRLANGEYLHRHNLVARIIHQQLALKYNLVESEVPYYKYAPDPVLDNGNITLYWDRSIITDRTIVANKPDIVVIDRLERRAMIVDITVPHDENLVKAEKDKQFKYLDLAREVVDMWDVSTAVIVPIVVSANGLIANSLDKHLRRLSLGSWIKGLIQKAVLLDTARIVRRFLSQEP

SEQ ID NO: 30562 - protein, 1111 aa, Noctua janthe
MRWTQSINENIMRAYYGATEGGSNLTAYRGRMLSLFQVLEPGVSVSAQRLSDQVRVIQRNHMLDDTVLERLRFDSRSNLVIPASPMIAVQLQNVSSAPPRSEHDGEEDDDEVISVSTQCNAQLRSALEGAFREYRSTPPELRPRLPRLPMHKKNKALVCALDSQLSNCFDSSKDLAYTHSILYCGAVAACRVAHVKFPNNDRATRPKFAVPAWQCRIERRFGKARALIGKLICFREGNTRPRVLRFVKRAFSGTDVSFRDYLARVTERIDFLKQKICAWASRIRRYKRRVERYTQNRTFRSDERWVYRAWERPDQGVTDTRLPDDDAMCSFWRNIWSVPVSHTEGDWTREVERACDSIPEMGAIIISPQDVARAVRPLPNWKSPGPDGLHNFWIKWFQRSHVRLASQFQSALESGSLPQFLTTGITHLLHKSGSTAEPKNYRPITCLPTVYKVLTSILRAKINHHIDSNSIMSASQNGCRNGSRGTKELLLIDMAISQQVRRSRRDLSTCWIDYKKAYDSVPHTWLMKVLELYKVDATLRTFLMSCMGHWRTVLRYPGCRQIQGNSEPIKIERGIFQGDSLSPLWFCLALNPLSTLLEGSGLGYRLRRGGQVISHLLYMDDLKLFAPNNLQLMKLLKVTETFSSAIRMEFGVDKCAVMHVKRGEIMESVGTQLSDSIHLRSLSSTETYKYLGMSEALGINTADMKQSLRDRFFGRLNKVLSSLLSGGNKVRAFNGWVMPVLMYSFGILKWTQTELDALDRRVRALLTANRMHHPRSSVMRLYIPRKCGGRGFSNAKTLHNREICSLREYFLEIDEGMHRDVVSVDKGLTPLSVANENWRKPRVLDTNDRKEVWQGKELHGRFYRALHGPDVDFLASVSWLRFGDLFGETEGFVCAIMDEVMMTNNYRKYIVKDGTVDICRACHRPGESIRHIISGCSRLANGEYLHRHNLVARIIHQQLALKYNLVESEVPYYKYAPDPVLDNGNITLYWDRSIITDRTIVANKPDIVVIDRLERRAMIVDITVPHDENLVKAEKDKQFKYLDLAREVVDMWDVSTAVIVPIVVSANGLIANSLDKHLRRLSLGSWIKGLIQKAVLLDTARIVRRFLSQEP

SEQ ID NO: 30563 - protein, 962 aa, Noctua janthe
MHKKNKALVCALDSQLSNCFDSSKDLADTHSILYCGAVAACRVAHVNFPNNDRATRPKFAVPAWQCRIERRIGKARALIGKLICFREGNTRPRVLRFVKRAFSGTDVSFRDYLARVTERIDFLKQKICAWASRIRRYKRRVERYTQNRTFRSDERWVYRAWERPDQGVTDTRLPDDDAMCSFWRNIWSVPVSHTEGDWTREVERACDSIPEMGTIIISPQDVARAVRPLPNWKSPGPDGLHNFWIKWFQRSHVRLASQFQSALESGSLPQFLTTGITHLLHKSGSTAEPKNYRPITCLPTVYKVLTSILRAKINHHIDSNSIMSASQNGCRNGSRGTKELLLIDMAISQQVRRSRRDLSTCWIDYKKAYDSVPHTWLMRVLELYKVDATLRTFLMSCMGHWRTVLRYPGCRQIQGNSEPIKIERGIFQGDSLSPLWFCLALNPLSTLLEGSGLGYRLRRGGQVISHLLYMDDLKLFAPNNLQLMKLLKVTETFSSAIRMEFGVDKCAVMHVKRGEIMESVGTQLSDSIHLRSLSSTETYKYLGMSEALGINTADMKQSLRDRFFGRLNKVLSSLLSGGNKVRAFNGWVMPVLMYSFGILKWTQTELDALDRRVRALLTANRMHHPRSSVMRLYIPRKCGGRGFLNAKTLHNREICSLREYFLEVDEGMHRDVVSVDKGLTPLSLANENWRKPRVLDTNDRKEVWQGKELHGRFYRALHGPDVDFLASVSWLRFGDLFGETEGFVCAIMDEVMMTNNYRKYIVKDGTVDICRACHRPGESIRHIISGCSRLANGEYLHRHNLVARIIHQQLALKYNLVESEVPYYKYAPDPVLDNGNITLYWDRSIITDRTIVANKPDIVVIDRLERRAMIVDITVPHDENLVKAEKDKQFKYLDLAREVVDMWDVSTAVIVPIVVSANGLIANSLDKHLRRLSLGSWIKGLIQKAVLLDTARIVRRFLSQEP

SEQ ID NO: 30564 - protein, 1206 aa, Noctua fimbriata
MITRSRAKQLQEAHTPSPGSSLSSASQPPRRATSVSTVSPVAAVASSSSDEFFSPPSTPPPSPRRRGRGRPPAGLGPRGQPAPNRVPAAGGNVSRMRWTQSINEQVMRAYYGATEGGSNLTAYRGRMLSLFQVLEPGVSVSAQRLSDQVRVIQRNHMLDDTVLDRLRSESRSNLVTPASPMTAVQLQNVTIASPRSDRGGEGDDDEVISVSTQCNAQLRSALESAFREYRSTPPELRPRLPRLPMHKKNKALMCALDSQLSNCFDTSKDLADTHSILYCGAVAACRVAHVKFPNNDRATRPKLAVPAWQCRIERRIGEARALIGKLICFREGNTRPRVMRFVRRAFSGTDVNFRDYLARVTERIDFLKQKICAWASRIRRYKRRVERYTQNRTFQSDERWVYRAWERPDQGVTDTRLPDDNAMCSFWRSIWSVPVSHTEGDWIREVERACDPIPEMGAIIISPQDVACAVRPLPNWKSPGPDGLHNFWIKWFQRSHVRLASQFQLALESGSLPQFLTTGITHLLHKSGSTAEPKNYRPITCLPTVYKVLTSILRAKINHHIDSNSIMSASQNGCRNGSRGTKELLLIDMAVSQQVRRSRRDLSTCWIDYKKAYDSVPHTWLMRVLELYKVDATLRTFLTSCMGHWRTVLRYPGCRQIQGNSEPIRIERGIFQGDSLSPLWFCIALNPLSTLLEGSGLGYRLRRDGQVISHLLYMDDLKLYAPNNLQLMKLLKVTETFSSSIRMEFGVDKCAVMHVKQGEIMESLGTQLSDSIHLRSLSSTETYKYLGMSEALGINAADMKQSLRERFFGRLNKVLSSLLSGGNKVRAFNGWVMPVLMYSFGILKWTQMELDALDRRVRVLLTANRMHHPRSSVMRLYIPRKCGGRGFLNVKTLHNREVCSLREYFLEADVGMHRDVVSVDKGLTPLSLANENWRKPRVLDTNDRKEVWQGKELHGRFYRALHGPDVDFLASVAWLRFGDLFGETEGFVCAIMDEVMMTNNYRKYIVKDGTVDICRACHRPGESIRHIISGCSRLANGEYLHRHNLVARIIHQQLALKYNLVESEVPYYKYVPDPVLDDGNITLYWDRSIVTDRTIVANKPDIVVIDRLERRAMIVDITVPHDENLVKAEKDKQFKYLDLAHEVVDIWDVSTAVIVPIVVSANGLIANTLDQHLRRLSLGRWIKGLIQKAVLLDTARIVRRFLSQEP

SEQ ID NO: 30565 - protein, 868 aa, Noctua janthe
MRFVKRAFSGTDVSFRDYLARVTERIDFLKQKICAWASRIRRYKRRVERYTQNRTFRSDERWVYRAWERPDQGVTDTRLPDDDAMCSFWRNIWSVPVSHTEGDWTREVERACDSIPEMGAIIISPQDVARAVRPLPNWKSPGPDGLHNFWIKWFQRSHVRLASQFLSALESGSLPQFLTTGITHLLHKTGSTAEPKNYRPITCLPTVYKVLTSILRAKINHHIDSNSIMSASQNGCRNGSRGTKELLLIDMAISQQVRRSRRDLSTCWIDYKKAYDSVPHTWLMKVLELYKVDATLRTFLMSCMGHWRTVLRYPGCRQIQGNREPIKIERGIFQGDSLSPLWFCLALNPLSTLLEGSGLGYRLRRGGQVISHFLYMDDLKLFAPNNLQLMKLLKVTETFSSAIRMEFGVDKCAVMHVKQGEIMESVGTQLSDSIHLRSLSSTETYKYLGMSEALGINTADMKQSLRDRFFGRLNKVLSSLLSGGNKVRAFNGWVMPVLMYSFGILKWTQTELDALDRRVRALLTANRMHHPRSSVMRLYIPRKCGGRGFLNAKTLHNREICSLREYFLEVDEGMHRDVVSVDKGLTPLSLANENWRKPRVLDTNDRKEVWQGKELHGRFYRALHGPDVDFLASVSWLRFGDLFGETEGFVCAIIDEVMMTNNYRKYIVKDGTVDICRACHRPGESIRHIISGCSRLANGEYLHRHNLVARIIHQQLALKYNLVESEVPYYKYAPDPVLDNGNITLYWDRSIITDRTIVANKPDIVVIDRLERRAMIVDITVPHDENLVKAEKDKQFKYLDLAREVVDMWDVSTAVIVPIVVSANGLIANSLDKHLRRLSLGSWIKGLIQKAVLLDTARIVRRFLSQEP

SEQ ID NO: 30566 - protein, 1203 aa, Noctua janthe
MLTRSRAKHQAHPPSPDSSLSSASQPPERASIVSAVSPIAAVASSPSDEFFSPPSTPSPPRRRGRGRPPAGLGPRGQEAPNRVPAAGGNVSRMRWTQSINENVMRAYYGATEGGSNLTAYRGRMLSLFQVLEPGVSVSAQRLSDQVRVIQRNHMLDDTVLERLRFDSRSNQVIPASPMIAVQLQNVSSAPPRSEHDGEEDDDEVISVSTQCNAQLRSALEGAFREYRSTPPELRPRLPRLPMHKKHKALVCALDSQLSNCFDSSKDLADTHSILYCGAVAACRVAHVKFPNNDRATRPKFAVPAWQCRIERRIGKARALIGKLICFREGNTRPRVLRFVKRAFSGTDVSFRDYLARVTERIDFLKQKICAWASRIRRYKRRVERYTQNRTFRSDERWVYRAWERPDQGVTDTRLPDDDAMCSFWRNIWSVPVSHTEGDWTREVERACDSIPEMGAIIISPQDVARAVRPLLNWKSPGPDGLHNFWIKWFQRSHVRLASQFQSALESGSLPQFLTTGITHLLHKSGSTAEPKNYRPITCLPTVYKVLTSILRAKINHHIDSNSIMSASQNGCRNGSRGTKELLLIDMAISQQVRRSRRDLSTCWIDYKKAYDSVPHTWLMKVLELYKVDATLRTFLMSCMGHWRTVLRYPGCRQIQGNSEPIKIERGIFQGDSLSPLWFCLALNPLSTLLEGSGLGYRLRRGGQVISHLLYMDDLKLFAPNNLQLMKLLKVTETFSSAIRMEFGVDKCAVMHVKRGEIMESVGTQLSDSIHLRSLSSTEIYKYLGMSEALGINTADMKQSLRDPFFGRLNKVLSSLLSGGNKVRAFNGWVMPVLMYSFGILKWTQTELDALDRRVRALLTANRMHHPRSSVMRLYIPRKCGGRGFLNAKTLHNREICSLREYFLEVDEGMHRDVVSVDKGLTPLSLANEYWRKPRVLDTNDRKEVWQGKELHGRFYRALHGPDVDFLASVSWLRFGDLFGETEGFVCAIMDEVMMTNNYRKYIVKDGTVDICRACHRPGESIRHIISGCSRLANGEYLHRHNLVARIIHQQLALKYNLVESEVPYYKYAPDPVLDNGNITLYWDRSIITDRTIVANKPDIVVIDRLERRAMIVDITVPHDENLVKAEKDKQFKYLDLAREVVDMWDVSTAVIVPIVVSANGLIANSLDKHLRRLSLGSWIKGLIQKAVLLDTARIVRRFLSQEP

SEQ ID NO: 30567 - protein, 1226 aa, Noctua janthe
MITHLQLAIYLIIRKSHTTTIIIIIIYFNLKHQAHPPSPDSSLSSASQPPGRASIVSAVSPIAAVASSSSDEFFSPPSTPSPPRRRGRGRPPAGLGPRGQQAPNRVPAAGGNVSRMRWTQSINENVMRAYYGATEGGSNLTAYRGRMLSLFQVLEPGVSVSAQRLSDQVRVIQRNHMLDDTVLERLRFDSRSNLVIPASPMIAVQLQNVSSAPPRSEHDGEEDDDEVISVSTQCNAQLRSALEGAFREYRSTPPELRPRLPRLPMHKKNKALVCALDSQLSNCFDSSKDLADTHSILYCGAVAACRVAHVKFPNNDRATRPKFAVPAWQCRIKRRIGKARALIGKLICFREGNTRPRVLRFVKRAFSGTDVSSRDYLARVTERIDFLKQKICAWASRIRRYKRRVERYTQNRTFRSDERWVYRAWERPDHGVTDTRLPDDDAMCSFWRNIWSVPVSHTEGDWTREVERACDSIPEMGAIIISPQDVARAVRPLPNWKSPGPDGLHNFWIKWFQRSHVRLASQFQSALESGSLPQFLTTGITHLLHKSGSTAEPKNYRPITCLPTVYKVLTSILRAKINHHIDSNSIMSASQNGCRNGSRGTKELLLIDMAISQQVRRSRRDLSTCWIDYKKAYDSVPHTWLMKVLELYKVDATLRTFLMSCMGHWRTVLRYPGCRQIQGNSEPIKIERGIFQGDSLSPLWFCLALNPLSTLLEGSGLGYRLRRGGQVISHLLYMDDLKLFAPNNLQLMKLLKVTETFSSAIRMEFGVDKCAVMHVKRGEIMESVGTQLSDSIHLSSLSSTETYKYLGMSEALGINTADMKQSLRDRFFGRLNKVLSSLLSGGNKVRAFNGWVMPVLMYSFGILKWTQTELDALDRRVRALLTANRMHHPRSSVMRLYIPRKCGGRGFLNAKTLHNRDICSLREYFLEVDEGMHRDVVSVDKGLTPLSLANENWRKPRVLDTNDRKEVWQGKELHGRFYRALHGPDVDFLASVSWLRFGDLFGETEGFVCAIMDEVMMTNNYRKYIVKDGTVDICRACHRPGESIRHIISGCSRLANGEYLHRHNLVARIIHQQLALKYNLVKSEVPYYKYAPDPVLDNGNITLYWDRSIITDRTIVANKPDIVVIDRLERRAMIVDITVPHDENLVKAEKDKQFKYLDLAREVVDMWDVSTAVIVPIVVSANGLIANSLDKHLRRLSLGSWIKGLIQKAVLLDTARIVRRFLSQEP

SEQ ID NO: 30568 - protein, 1203 aa, Noctua janthe
MLTRSRAKHQAHPPSPDSSLSSASQPPGRASIVSAVSPIAAVASSSSDEFFSPPSTPSPPRRRGRGRPPAGLGPRGQQAPNRVPAAGGNVSRMRWTQSINENVMRAYYGATEGGSNLTAYRGRMLALFQVLEPGVSVSAQRLSDQVRVIQRNHMLDDTVLERLRFDSRSNLVIPASPMIAVQLQNVSSAPPRSEHDGEEDDDEVISVSTQCNAQLRSALEGAFREYRSTPPELRPRLPRLPMHKKNKALVCALDSQLSNCFDSSKDLADTHSILYCGAVAACRVAHVKFPNNDRATRPKFAVPAWQCRIERRIGEARALIGKLICFREGNTRPRVMRFVKRAFSGTDVSFRDYLARVTERIDFLKQKICAWASRIRRYKRRVERYTQNRTFRSDERWVYRAWERPDQGVTDTRLPDDDAMCSFWRNIWSVPVSHTEGDWTREVERACDSIPEMGAIIISPQDVARAVRPLPNWKSPGPDGLHNFWIKWFQRSHVRLASQFQSALESGSLPQFLTTGITHLLHKSGSTAEPKNYRPITCLPTVYKVLTSILRAKINHHIDSNSIMSASQNGCRNGSRGTKELLLIDMAISQQVRRSRRDLSTCWIDYKKAYDSVPHTWLMKVLELYKVDATLRTFLMSCMGHWRTVLHYPGCRQIQGNSEPIKIERGIFQGDSLSPLWFCLALNPLSTLLEGSGLGYRLRRGGQVLSHLLYMDDLKLFAPNNLQLMKLLKVTETFSSAIRMEFGVDKCAVMHVKRGEIMESVGTQLSDSIQLRSLSSTETYKYLGMSEALGINTADMKQSLRDRFFGRLNKVLSSLLSGGNKVRAFNGWVMPVLMYSFGILKWTQTELDALDRRVRALLTANRMHHLRSSVMRLYIPRKCGGRGFLNAKTLHNREICSLREYFLEVDEGMHRDVVSVDKGLTPLSLANENWRKPRVLDTNDRKEVWQGKELHGRFYRALHGPDVDFLASVSWLRFGDLFGETEGFVCAIMDEVMMTNNYRKYIVKDGTVDICRACHRPGESIRHIISGCSRLANGEYLHRHNLVARIIHQQLALKYNLVESEVPYYKYAPDPVLDNGNITLYWDRSIITDRTIVANKPDIVVIDRLERRAMIVDITVPHDENLVKAEKDKQFKYLDLAREVVDMWDVSTAVIVPIVVSANGLIANSLDKHLRRLSLGSWIKGLIQKAVLLDTARIVRRFLSQEP

SEQ ID NO: 30569 - protein, 1203 aa, Noctua janthe
MLTRSRAKHQAHPPSPDSSLSSASQPPGRASIVSAVSPIAAVASSSSDEFFSPPSTPSPPRRRGRGRPPAGLGPRGQQAPNRVPAAGGNVSRMRWTQSINENVMRAYYGATEGGSNLTAYRGRMLSLFQVLEPGVSVSAQRLSDQVRVIQRNHMLDDTVLERLRFDSRSNLVIPASPMIAVQLQNVSSAPPRSEHDGEEDDDEVISVSTQCNAQLRSALEGAFREYRSTPPELRPRLPRLPMHKKNKALVCALDSQLSNCFDSSKDLADTHSILYCGAVAACRVAHVKFPNNDRATRPKFAVPAWQCRIERRIGKARALIGKLICFREGNTRPRVLRFVKRAFSGTDVSFRDYLARVTERIDFLKQKICAWASRIRRYKRRVERYTQNRTFRSDERWVYRAWERPDQGVTDTRLPDDDAMCSFWRNIWSVPVSHTEGDWTREVERACDSIPEMGAIIISPQDVARAVRPLPNWKSPGPDGLHNFWIKWFQRSHVRLASQFQSALESGSLPQFLTTGITHLLYKSGSTAEPKNYRPITCLPTVYKVLTSILRAKINHHIDSNSIMSASQNGCRNGSRGTKELLLIDMAISQQVRRSRRDLSTCWIDYKKAYDSVPHTWLMKVLELYKVDATLRTFLMSCMGHWRTVLRYPGRRQIQGNSEPIKIERGIFQGDSLSPLWFCLALNPLSTLLEGSGLGYRLRRGGQVISHLLYMDDLKLFAPNNLQLMKLLKVTETFSSAIRMEFGVDKCAVMHVKRGEIMESVGTQLSDSIHLRSLSSTETYKYLGMSEALGINTADMKQSLRDRFFGRLNKVLSSLLSGGNKVRAFNGWVMPVLMYSFGILKWTQTELDALDRRVRALLTANRMHHPRSSVMRLYIPRKCGGRGFLNAKTLHNREICSLREYFLEVDEGMHRDVVSVDKGLTPLSLANENWRKPRVLDTNDRKEVWQGKELHGRFYRALHGPDVDFLASVSWLRCGDLFGETEGFVCAIMDEVMMTNNYRKYIVKDGTVDICRACHRPGESIRHIISGCSRLANGEYLHRHNLVARIIHQQLALKYNLVESEVPYYKYAPDPVLDNGNITLYWDRSIITDRTIVANKPDIVVIDRLERRAMIVDITVPHDENLVKAEKDKQFKYLDLAREVVDMWDVSTAVIVPIVVSANGLIANSLDKHLRRLSLGSWIKGLIQKAVLLDTARIVRRFLSQEP

SEQ ID NO: 30570 - protein, 1134 aa, Noctua janthe
MNHIIIIINWNNNIIAAGGNVSRMRWTQSIIENVMRAYYGATEGGSNLTAYRGRMLSLFQVLEPGVSVSAQRLSDQVRVIQRNHMLDDTVFERLRFDSRSNLVIPASPMIAVQLQNVSSAPPRSEHDGEEDDDEVISVSTQCNAQLRSALEGAFREYRSTPPELRPRLPRLPMHKKNKALVCALDSQLSNCFDSSKDLADTHSILYCGAVAACRVAHVKFPNNDRATRPKFAVPAWQCRIERRIGKARALIGKLICFREGNTRPRVLRFVKRAFSGTDVSFRDYLARVTERIDFLKQKICAWASRIRRYKRRVERYTQNRTFRSDERWVYRAWERPDQGVTDTRLPDDDAMCSFWRNIWSVPVSHTEGDWTREVERACDSIPEMGAIIISPQDVTRAVRPLPNWKSPGPDGLHNFWIKWFQRSHVRLASQFQSALESGSLPQFLTTGITHLLHKSGSTAEPKNYRPITCLPTVYKVLTSILRAKINHHIDSNSIMSASQNGCRNGSRGTKELLLIDMAISQQVRRSRRDLSTCWIDYKKAYDSVPHTWLMKVLELYKVDATLRTFLMSCMGHWRTVLRYPGCRQIQGNSEPIKIERGIFQGDSLSPLWFCLALNPLSTLLEGSGLGYRLRRGGQVISHLLYMDDLKLFAPNNLQLMKLLKVTETFSSAIRMEFGVDKCAVMHVKRGEIMESVGTQLSDSIHLRSLSSTETYKYLGMSEALGINTADMKQSLRDRFFGRLNKVLSSLLSGGNKVRAFNGWVMPVLMYSFGILKWTQTELDALDRRVRALLTANRMHHPRSSVMRLYIPRKCGGRGFLNAKTLHNREICSLREYFLEVDEGMHRDVVSVDKGLTPLSLANENWRKPRVLDTNDRKEVWQGKELHGRFYRALHGPDVDFLASVSWLRFGDLFGETEGFVCAIMDEVMMTNNYRKYIVKDGTVDICRACHRPGESIRHIISGCSRLANGEYLHRHNLVARIIHQQLALKYNLVESEVPYYKYAPDPVLDNGNITLYWDRSIITDRTIVANKPDIVVIDRLERRAMIVDITVPHDENLVKAEKDKQFKYLDLAREVVDMWDVSTAVIVPIVVSANGLIANSLDKHLRRLSLGSWIKGLIQKAVLLDTARIVRRFLSQEP

SEQ ID NO: 30571 - protein, 1115 aa, Noctua janthe
MRWTQSINENVMRAYYGATEGGSNLTAYRGRMLSLFQVLEPGVSVSAQRLSDQVRVIQRNHMLDDTVLERLRFDSRSNLVIPASPMIAVQLQNVSSAPPRSEHDGEEDDDEVISVSTQCNAQLRSALEGAFREYRSTPPELRPRLPRLPMHKKNKALVCALDSQLSNCFDSSKDLADTHSILYCGAVAACRVAHVKFPNNDRATRPKFAVPAWQCRIERRIGKARALIGKLICFREGNTRPRVLRFVKRAFSGTDVSFRDYLARVTERIDFLKQKICAWASRIRRYKRRVERYTQNRTFRSDERWVYRAWERPDQAVTDTRLPDDDAMCSFWRNIWSVPVSHTEGDWTREVERACDSIPEMGAIIISPQDVARAVRPLPNWKSPGPDGLHNFWIKWFQRSHVRLASQFQSALESGSLPQFLTTGITHLLHKSGSTAEPKNYRPITCLPTVYKVLTSILRAKINHHIDSNSIMSASQNGCRMSRGTKELLLIYVVYIDMAISQQVRRSRRDLSTCWIDYKKAYDSVPHTWLMRVLELYKVDATLRTFLMSCMGHWRTVLRYPGCRQIQGNSEPIKIERGIFQGDSLSPLWFCLALNPLSTLLEGSGLGYRLRRGGQVISHLLYMDDLKLFAPNNLQLMKLLKVTETFSSAIRMEFGVDKCAVMHVKRGEIMESVGTQLSDSIHLRSLSSTETYKYLGMSEALGINTADMKQSLRDRFFGRLNKVLSSLLSGGNKVRAFNGWVMPVLMYSFGILKWTQTELDALDRRVRALLTANRMHHPRSSVMRLYIPRKCGGRGFLNAKTLHNREICSLREYFLEVDEGMHRDVVSVDKGLTPLSLANENWRKPRVLDTNDRKEVWQGKELHGRFYRALHGPDVDFLASVSWLRFGDLFGETEGFVCAIMDEVMMTNNYRKYIVKDGTVDICRACHRPGESIRHIISGCSRLANGEYLHRHNLVARIIHQQLALKYNLVESEVPYYKYAPDPVLDNGNITLYWDRSIITDRTIVANKPDIVVIDRLERRAMIVDITVPHDENLVKAEKDKQFKYLDLAREVVDMWDVSTAVIVPIVVSANGLIANSLDKHLRRLSLGSWIKGLIQKAVLLDTARIVRRFLSQEP

SEQ ID NO: 30572 - protein, 1111 aa, Noctua janthe
MRWTQSINENVMRAYYGATEGGSNLTAYRGRMLSLFQVLEPGVSVSAQRLSDQVRVIQRNHMLDDTVLERLRFDSRSNLVIPASPMIAVQLQNVSSAPPRSEHDGEEDDDEVISVSTQCNAQLRSALEGAFREYRSTPPELRPRLPRLPMHKKNKALVCALDSQLSNCFDSSKDLADTHSILYCGAVAACRVAHVKFPNNDRATRPKFAVPAWQCRIERRIGKARALIGKLICFREGNTRPRVLRFVKRAFSGTDVSFRDYLARVTERIDFLKQKICAWASRIRRYKRRVERYTQNRTFRSDERWVYRAWERPDQGVTDTRLPDDDAMCSFWRNIGSVPVSHTEGDWTREVERACDSIPEMGAIIISPQDVARAVRPLPNWKSPGPDGLHNFWIKWFQRSHVRLASQFQSALESGSLPQFLTTGITHLLHKSGSTAEPKNYRPITCLPTVYKVLTSILRAKINHHIDSNSIMSASQNGCRNGSRGTKELLLIDMAISQQVRRSRRDLSTCWIDYKKAYDSVPHTWLMKVLELYKVDATLRTFLMSCMGHWRTVLRYPGCRQIQGNSEPIKIERGIFQGDSLSPLWFCLALNPLSTLLEGSGLGYRLRRGGQVISHLLYMDDLKLFAPNNLQLMKLLKVTETFSSAIRMEFGVDKCAVMHVKRGEIMESVGTQLSDSIHLRSLSSTETYKYLGMSEALGINTADMKQSLRDRFFGRLNKVLSSLLSGGNKVRAFNGWVMPVLMYSFGILKWTQTELDALDRRVRALLTANRMHHPRSSVMRLYIPRKCGGRGFLNAKTLHNREICSLREYFLEVDEGMHRDVVSVDKGLTPLSLANENWRKPRVLDTNDRKEVWQGKELHGRFYRALHGPDVDFLASVSWLRFGDLFGETEGFVCAIMDEVMMTNNYRKYIVKDGTVDICRACHRPGESIRHIISGCSRLANGEYLHRHNLVARIIHQQLALKYNLVESEVPYYKYAPDPVLDNGNITLYWDRSIITDRTIVANKPDIVVIDRLERRAMIVDITVPHDENLVKAEKDKQFKYLDLAREVVDMWDVSTAVIVPIVVSANGLIANSLDKHLRRLSLGSWIKGLIQKAVLLDTARIVRRFLSQEP

SEQ ID NO: 30573 - protein, 1203 aa, Noctua janthe
MLTRSRAKHQAHPPSPDSSLSSASQPPGRPSIVSAVSPIAAVASSSSDEFFSPPSTPSPPRRRGRGRPPAGLGPRGQQAPNRVPAAGGNVSRMRWTQSINENVMRAYYGATEGGSNLTAYRGRMLSLFQVLEPGVSVSAQRLSDQVRVIQRNHMLDDTVLERLRFDSRSNLVIPASPMIAVQLQNVSSAPPRSEHDGEEDDDEVISVSTQCNAQLRSALEGAFREYRSTPPELRPRLPRLPMHKKNKALVCALDSQLSNCFDSSKDLADTHSILYCGAVAACRVAHVKFPNNDRATRPKFAVPAWQCRIERRIGEARALIGKLICFREGNTRPRVMRFVKRAFSGTDVSFRDYLARVTERIDFLKQKICAWASRIRRYKRRVERYTQNRTFRSDERWVYRAWERPDQGVTDTRLPNDDAMCSFWRNIWSVPVSHTEGDWTREVERACDPIPEMGAIIISPQDVARAVRPLPNWKSPGPDGLHNFWIKWFQRSHVRLASQFQSALESGSLPQFLTTGITHLLHKSGSTAEPKNYRPITCLPTVYKVLTSILRAKINHHIDSNSIMSASQNGCRNGSRGTKELLLIDMAISQQVRRSRRDLSTCWIDYKKAYDSVPHTWLMKVLELYKVDATLRTFLMSCMGHWRTVLRYPGCRQIQGNSEPIKIERGIFQGDSLSPLWFCLALNPVSTLLEGSGLGYRLRRGGQVISHLLYMDDLKLFAPNNLQLMKLLKVTETFSSAIRMEFGVDKCAVMHVKRGKIMESVGTQLSDSIHLRSLSSTETYKYLGMSEALGINTADMKQSLRDRFFGRLNKVLSSLLSGGNKVRAFNGWVMPVLMYSFGILKWTQTELDALDRRVRALLTANRMHHPRSSVMRLYIPRKCGGRGFLNAKTLHNREICSLREYFLEVDEGMHRDVVSVDKGLTPLSLANENWRKPRVLDTNDRKEVWQGKELHGRFYRALHGPDVDFLASVSWLRFGDLFGETEGFVCAIMDEVMMTNNYRKYIVKDGTVDICRACHRPGESIRHIISGCSRLANGEYLHRHNLVARIIHQQLALKYNLVESEVPYYKYAPDPVLDNGNITLYWDRSIITDRTIVANKPDIVVIDRLERRAMIVDITVPHDENLVKAEKDKQFKYLDLAREVVDMWDVSTAVIVPIVVSANGLIANSLDKHLRRLSLGSWIKGLIQKAVLLDTARIVRRFLSQEP

SEQ ID NO: 30574 - protein, 1206 aa, Noctua fimbriata
MITRSRAKQLQEAHTPSPGSSLSSASQPPRRATSVSTVSPVAAVASSSSDEFFSPPSTPPPSPRRRGRGRPPAGLGPRGQPAPNRVPAAGGNVSRMRWTQSINEQVMRAYYGATEGGSNLTAYRGRMLSLFQVLEPGVSVSAQRLSDQVCVIQRNHMLDDTVLDRLRSESRSNLVTPASPMTAGQLQNVTIASPRSDRGGEGDDDEVISVSTQCNAQLRSALESAFREYRSTPPELRPRLPRLPMHKKNKALMCALDSQLSNCFDTSKDLADTHSILYCGAVAACRVAHVKFPNNDRATRPKLAVPAWQCRIERCIGEARALIGKLICFREGNTRPRVMRFVRRAFSGTDVNFRDYLARVTERIDFLKQKICAWASRIRRYKRRVERYTQNRTFQSDERWVYRAWERPDQGVTDTRLPDDNAMCSFWRSIWSVPVSHTEGDWIREVERACDPIPEMGAIIISPQDVACAVRPLPNWKSPGPDGLHNFWIKWFQRSHVRLASQFQLALESGSLPQFLTTGITHLLHKSGSTAEPKNYRPITCLPTVYKVLTSILRAKINHHIDSNSIMSASQNGCRNGSRGTKELLLIDMAVSQQVRRSRRDLSTCWIDYKKAYDSVPHTWLMRVLELYKVDATLRTFLMSCMGHWRTVLRYPGCRQIQGNSEPIRIERGIFQGDSLSPLWFCIALNPLSTLLEGSGLGYRLRRDGQVISHLLYMDDLKLYAPNNLQLMKLLKVTETFSSSIRMEFGVDKCAVMHVKQGEIMESLGTQLSDSIHLRSLSSTETYKYLGMSEALGINAADMKQSLRERFFGRLNKVLSSLLSGGNKVRAFNGWVTPVLMYSFGILKWTQMELDALDRRVRVLLTANRMHHPRSSVMRLYIPRKCGGRGFLNVKTLHNREVCSLREYFLEADVGMHRDVVSVDKGLTPLSLANENWRKPRVLDTNDRKEVWQGKELHGRFYRALHGPDVDFLASVAWLRFGDLFGETEGFVCAIMDEVMMTNNYRKYIVKDGTVDICRACHRPGESIRHIISGCSRLANGEYLHRHNLVARIIHQQLALKYNLVESEVPYYKYVPDPVLDDGNITLYWDRSIVTDRTIVANKPDIVVIDRLERRAMIVDITVPHDENLVKAEKDKLFKYLDLAHEVVDIWDVSTAVIVPIVVSANGLIANTLDQHLRRLSLGSWIKGLIQKAVLLDTARIVRRFLSQEP

SEQ ID NO: 30575 - protein, 1206 aa, Noctua fimbriata
MITRSRAKQLQEAHTPSPGSSLSSASQPPRRATSVSTVSPVAAVASSSSDEFFSPPSTPPPSPRRRGRGRPPAGLGPRGQPAPNRVPAAGGNVSRMRWTQSINEQVMRAYYGATEGGSNLTAYRGRMLSLFQVLEPGVSVSAQRLSDQVRVIQRNHMLDDTVLDRLRSESRSNLVTPASPMTAVQLQNVTIASPRSDRGGEGDDDEVISVSTQCNAQLRSALESAFREYRSTPPELRPRLPRLPMHKKNKALMCALDSQLSNCFDTSKDLADTHSILYCGAVAACRVAHVKFPNNDRATRPKLAVPAWQCRIERRIGEARALIGKLICFREGNTRPRVMRFVRRAFSGTDVNFRDYLARVTERIDFLKQKICAWASRIRRYKRRVERYTQNRTFQSDERWVYRAWERPDQGVTDTRLPDDNAMCSFWRSIWSVPVSHTEGDWIREVERACDPIPEMGAIIISPQDVACAVRPLPNWKSPGPDGLHNFWIKWFQRSHVRLASQFQLALESGSLPQFLTTGITHLLHKSGSTAEPKNYRPITCLPTVYKVLTSILRAKINHHIDSNSIMSASQNGCRNGSRGTKELLLIDMAVSQQVRRSRRDLSTCWIDYKKAYDSVPHTWLMRVLELYKVDATLRTFLMSCMGHWRTVLRYPGCRQIQGNSEPIRIERGIFQGDSLSPLWFCIALNPLSTLLEGSGLGYRLRRDGQVISHLLYMDDLKLYAPNNLQLMKLLKVTETFSSSIRMEFGVDKCAVMHVKQGEIMESLGTQLSDSIHLRSLSSTETYKYLGMSEALGINAADMKQSLRERFFGRLNKVLSSLLSGGNKVRAFNGWVMPVLMYSFGILKWTQMELDALDRRVRVLLTANRMHHPRSSVMRLYIPRKCGGRGFLNVKTLHNREVCSLREYFLEADVGMHRDVVSVDKGLTPLSLANENWRKPRVLDTNDRKEVWQGKELHGRFYRALHGPDVDFLASVAWLRFGDLFGETEGFVCAIMDEVMMTNNYRKYIVKDGTVDICRACHRPGESIRHIISGCSRLANGEYLHRHNLVARIIHQQLALKYNLVESEVPYYKYVPDPVLDDGNITLYWDRSIVTDRTIVANKPDIVVIDRLERRAMIVDITVPHDENLVKAEKDKQFKYLDLAHEVVDIWDVSTAVIVPIVVSANGLIANTLDQHLRRLSLGSWIKGLIQKAVLLDTARIVRRFLSQEP

SEQ ID NO: 30576 - protein, 1203 aa, Noctua janthe
MLTRSRAKHQAHPPSPDSSLSSASQPPGRASIVSAVSPIAAVASSSSDEFFSPPSTPSPPRRRGRGRPPAGLGPRGQQAPNRVPAAGGNVSRMRWTQSINENVMRAYYGATEGGSNLTAYRGRMLSLFQVLEPGVSVSAQRLSDQVRVIQRNHMLDDTVLERLRFDSRSNLVIPASPMIAVQLQNVSSAPPRSEHDGEEDDDEVISVSTQCNAQLRSALEGAFREYRSTPPELRPRLPRLPMHKKNKALVCALDSQLSNCFDSSKDLADTHSILYCGAVAACRVAHVKFPNNDRATRPKFAVPAWQCRIERRIGKARALIGKLICFREGNTRPRVLRFVKRAFSGTDVSFRDYLARVTERIDFLKQKICAWASRIRRYKRRVERYTQNRTFRSDERWVYRAWERPDQGVTDTRLPDDDAMCSFWRNIWSVPVSHTEGDWTREVERACDSIPEMGAIIISPQDVARAVRPLPNWKSPGPDGLHNFWIKWFQRSHVRLASQFQSALESGSLPQFLTTGITHLLHKSGSTAEPKNYRPITCLPTVYKVLTSILRAKINHHIDSNSIMSASQNGCRNGSRGTKELLLIDMAISQQVRRSRRDLSTCWIDYKKAYDSVPHTWLMKVLELYKVDATLRTFLMSCMGHWRTVLRYPGCRQIQGNSEPIKIERGIFQGDSLSPLWFCLALNPLSTLLEGSGLGYRLRRGGQVISHLLYMDDLKLFAPNNLQLMKLLKVTETFSSAIRMEFGVDKCAVMHVKRGEIMESVGTQLSDSIHLRSLSSTETYKYLGMSEALGINTADMKQSLRDRFFGRLNKVLSSLLSGGNKVRAFNGWVMPVLMYSFGILKWTQTELDALDRRVRALLTANRMHHPRSSVMRLYIPRKCGGRGFLNAKTLHNREICSLREYFLEVDEGMHRDVVSVDKGLTPLSLANENWRKPRVLDTNDRKEVWQGKELHGRFYRALHGPDVDFLASVSWLRFGDLFGETEGFVCAIMDEVMMTNNYRKYIVKDGTVDICRACHRPGESIRHIISGCSRLANGEYLHRHNLVARIIHQQLALKYNLVESEVPYYKYAPDPVLDNGNITLYWDRSIITDRTIVANKPDIVVIDRLERRAMIVDITVPHDENLVKAEKDKQFKYLDLAREVVDIWDVSTAVIVPIVVSANGLIANSLDKHLRRLSLGSWIKGLIQKAVLLDTARIVRRFLSQEP

SEQ ID NO: 30577 - protein, 1203 aa, Noctua janthe
MKSVCKSLSFSVRWSPDSSLSSASQPPGRASIVSAVSPIAAVASSSSDEFFSPPSTPSPPRRQGRGRPPAGLGPRGQQAPNRVPAAGGNVSRMRWTQSINENVMRAYYGATEGGSNLTAYRGRMLSLFQVLEPGVSVSAQRLSDQVRVIQRNHMLDDTVLERLRFDSRSNLVIPASPMIAVQLQNVSSAPPRSEHDGEEDDDEVISVSTQCNAQLRSALEGAFREYRSTPPELRPRLPRLPMQKKNKALVCALDSQLSNCFDSNKDLIDTHSILYCGAVAACRVAHVKFPNNDRATRPKFAVPAWQCRIERRIGEARALIGKLICFREGNTRPRVMRFVKRAFSGTDVSFRDYLARVTERIDFLKQKICAWASRIRRYKRRVERYTQNRTFRSDERWVYRAWERPDQGVTDTRLPNDDAMCSFWRNIWSVPVSHTEGDWTREVERACDPIPEMVAIIISPQDVARAVRPLPNWKSPGPDGLHNFWIKWFQRSHVRLASQFQSALESGSLPQFLTTGITHLLHKSGSTAEPKNYRPITCLPTVYKVLTSILRAKINHHIDSNSIMSASQNGCRNGSRGTKELLLIDMVISQQVRRSRRDLSTCWIDYKKAYDSVPHTWLMKVLELYKVDATLRTFLMSCMGHWRTVLRYPGCRQIQGNSEPIKIERGIFQGDSLSPLWFCLALNPLSTLLEGSGLGYRLRRGGQVISHLLYMDDLKLFAPNNLQLVKLLKVTETFSSAIRMEFGVDKCAVMHVKRGEIMESVGAQLSDSIHLRSLSSTETYKYLGMSEALGINTADMKQSLRDRFFGRLNKVLSSLLSGGNKVRAFNGWVMPVLMYSFGILKWTQTELDALDRRVRALLTANRMHHPRSSVMRLYIPRKCGGRGFLNAKTLHNREICSLREYFLEVDEGMHRDVVSVDKGLTPLSLANENWRKPRVLDTNDRKEVWQGKELHGRFYRALHGPDVDFLASVSWLRFGDLFGETEGFVCAIMDEVMMTNTYRKYIVKDGTVDICRACHRPGESIRHIISGCSRLANGEYLHRHNLVARIIHQQLALKYNLVESEVPYYKYAPDPVLDNGNITLYWDRSIITDRTIVANKPDIVVIDQLERRAMIVDITVPHDENLVKAEKDKQFKYLDLAREVVDMWDVSTAVIVPIVVSANGLIANSLDKHLRRLSLGSWIKGLIQKAVLLDTARIVRRFLSQEP

SEQ ID NO: 30578 - protein, 1050 aa, Noctua fimbriata
MLDDTVLDRLRSESRSNLVTPASPMTAVQLQNVTIASPRSDRGGEGDDDEVISVSTQCNAQLRSALESAFREYRSTPPELRPRLPRLPMHKKNKALVCALDSQLSNCFDTSKDLADTHSILYCGAVAACRVAHVKFPNNDRATRPKLAVPAWQCRIERRIGEARALIGKLICFREGNTRPRVMRFVRRAFSGTDVSFRDYLARVTERIDFLKQKICAWASRIRRYKRRVERYTQNRTFQSDERWVYRAWERPDQGVTDTRLPDDNAMCSFWRSIWSVPVSHTEGDWIREVERACDPIPEMGAIIISPQDVACAVRPLPNWKSPGPDGLHNFWIKWFQRSHVRLASQFQLALESGSLPQFLTTGITHLLHKSGSTAEPKNYRPITCLPTVYKVLTSILRAKINHHIDSNSIMTASQNGCRNGSRGTKELLLIDMAVSQQVRRSRRDLSTCWIDYKKAYDSVPHTWLMRVLELYKVDATLRTFLMSCMGHWRTVLRYPGCRQIQANSEPIRIERGIFQGDSLSPLWFCIALNPLSTLLEGSGLGYRLRRDGQVISHLLYMDDLKLYAPNNLQLMKLLKVTETFSSSIRMEFGVDKCAVMHVKQGEIMESVGTQLSDSIHLRSLSSTETYKYLGMSEALGINTADMKQSLRERFFGRLNKVLSSLLSGGNKVRAFNGWVMPVLMYSFGILKWTQTELDALDTRVRVLLTANRMHHPRSSVMRLYIPRKCGGRGFLNAKTLHNREVCSLREYFLEADVEMHRDVVSVDKGLTPLSLANENWRKPRVLDTNDRKEVWQGKELHGRFYRALHGPDVDFLASVAWLRFGDLFGETEGFVCAIMDEVMMTNNYRKYIVKDGTVDICRACHRPGESIRHIISGCSRLANGEYLHRHNLVARIIHQQLALKYNLVESEVPYYKYVPDPVLDDGNITLYWDRSIVTDRTIVANKPDIVVIDRLERRAMIVDITVPHDENLVKAEKDKQFKYLDLAHEVVDIWDVSTAVIVPIVVSANGLIANTLDQHLRRLSLGSWIKGLIQKAVLLDTARIVRRFLSQEP

SEQ ID NO: 30579 - protein, 1205 aa, Noctua fimbriata
MSPMITRSRAKQLQEAHTPSPGSSLSSASQPPGRATSVSTVSPVAAVASSSSDEFFSPPSTPPPPPRRRGRGRPPASLGPQGQPAPNGVPASGGNVSRMRWTQSINEQVMRAYYGAAEGGSNLTAYRGRMLSLFQVLEVTAQRLSDQVRVIQRNHMLDDTVLDRLRSESRSNLVTPASPMTAVHLQNVTIASPRSDRGGEGDDDEVISVSTQCNAQLRSALESAFREYRSTPPELRPRLPRLPMHKKNKALVCALDSLLSNCFDTSEDLADTHSILYCGAVTACRVAHVKFPNNDRATRPKLAVPAWQCRIERRIGEARALIGKLICFREGNTRPRVMRFVRRAFSGTDVSFRDYLARVTERIDFLKQKICAWAGRIRRYKRRVERYTQNRTFQSDERWVYRAWERPDQGVTDTRLPDDDAMCSFWRSIWSVPVSHIEGDWTREVERACDPIPEMGAIIISPQDVACAVRPLPNWKSPGPDGLHNFWIKWFQRSHVRLASQFQLALESGSLPQFLTTGITHLLHKSGSTAEPKNYRPITCLPTVYKVLTSILRAKINHHIDSNSIMSASQNGCRNGSRGTKELLLIDMAVSQQVRRSRRDLSTCWIDYKKAYDSVPHTWLMRVLELYKVDATLRTFLMSCMGHWRTVLRYPGCRQIQGNREPIRIERGIFQGDSLSPLWFCLALNPLSTLLEGSGLGYRLRRDGQVISHLLYMDNLKLFAPNNLQLMKLLKVTETFSSSIRMEFGVDKCAVMHVKRGEIMESVGTQLSDSIHLRSLSSTETYKYLGMSEALGINTADMKQSLRERFFGRLNKVLSSLLSGGNKVRAFNGWVMPVLMYSFGILKWTQTELDALDRRVRVLLTANRMHHPRSSVMRLYIPRKCGGRGFLNAQTLHNREVCSLKEYFLEADVGMHRDVVSVDKGLTPLSLANENWRKPRVLDTNDRKEVWQGKELHGRFYRALHGPDVDFLASVAWLRFGDLFGETEGFVCAIMDEVMMTNNYRKYIVKDGTVDICRACHRPGESIRHIISGCSRLANGEYLHRHNLVAKIIHQQLALKYNLVESEVPYYKYVPDPVLVDGNITLYWDRSIVTDRTIVANKPDIVVIDRLERRAMIVDITVPHDENLVKAEKDKQFKYLDLAHEVVDIWDVSTAVIVPIVVSANGLIANTLDQHLRRLSLGSWIKGLIQKAVLLDTARIVRRFLSQEP

SEQ ID NO: 30580 - protein, 1203 aa, Noctua janthe
MLTRSRAKHQAHPPSPDSSLSSASQPPGRASIVSAVSPIAAVASSSSDEFFSPPSTPSPPRRRGRGRPPAGLGPRGQQAPNRVPAAGGNVSRMRWTQSINENVMRAYYGATEGGSNLTAYRGRMLSLFQVLEPGVSVSAQRLSDQVRVIQRNHMLDDTVLERLRFDSRSNLVIPASPMIAVQLQNVSSAPPRSEHDGEEDDDEVISVSTQCNAQLRSALEGAFREYRSTPPELRPRLPRLPMHKKNKALVCALDSQLSNCFDSSKDLADTHSILYCGAVAACRVAHVKFPNNDRATRPKFAVPAWQCRIERRIGKARALIGKLICFREGNTRPRVLRFVKRAFSGTDVSFRDYLARVTERIDFLKQKICAWASRIRRYKRRVERYTQNRTFRSDERWVYRAWERPDQGVTDTRLPDDDAMCSFWRNIWSVPVSHTEGDWTREVERACDSIPEMGAIIISPQDVTRAVRPLPNWKSPGPDGLHNFWIKWFQRSHVRLASQFQSALESGSLPQFLTTGITHLLHKSGSTAEPKNYRPITCLPTVYKVLTSILRAKINHHIDSNSIMSASQNGCRNGSRGTKELLLIDMAISQQVRRSRRDLSTCWIDYKKAYDSVPHTWLMKVLELYKVDATLRTFLMSCMGHWRTVLRYPGCRQIQGNSEPIKIERGIFQGDSLSPLWFCLALNPLSTLLEGSGLGYRLRRGGQVISHLLYMDDLKLFAPNNLQLMKLLKVTETFSSAIRMEFGVDKCAVMHVKRGEIMESVGTQLSDSIHLRSLSSTETYKYLGMSEALGINTADMKQSLRDRFFGRLNKVLSSLLSGGNKVRAFNGWVMPVLMYSFGILKWTQTELDALDRRVRALLTANRMHHPRSSVMRLYIPRKCGGRGFLNAKTLHNREICSLREYFLEVDEGMHRDVVSVDKGLTPLSLANENWRKPRVLDTNDRKEVWQGKELHGRFYRALHGPDVDFLASVSWLRFGDLFGETEGFVCAIMDEVMMTNNYRKYIVKDGTVDICRACHRPGESIRHIISGCSRLANGEYLHRHNLVARIIHQQLALKYNLVESEVPYYKYAPDPVLDNGNITLYWDRSFITDRTIVANKPDIVVIDRLERRAMIVDITVPHDENLVKAEKDKQFKYLDLAREVVDMWDVSTAVIVPIVVSANGLIANSLDKHLRRLSLGSWIKGLIQKAVLLDTARIVRRFLSQEP

SEQ ID NO: 30581 - protein, 1203 aa, Noctua janthe
MLTRSRAKHQAHPPSPDSSLSSASQPPGRASIVSAVSPIAAVASSSSDEFFSPPSTPSPPRRRGRGRPPAGLGPRGQQAPNRVPAAGGNVSRMRWTQSINENVMRAYYGATEGGSNLTAYRGRMLSLFQVLEPGVSVSAQRLSDQVRVIQRNHMLDDTVLERLRFDSRSNLVIPASPMIAVQLQNVSSAPPRSEHDGEEDDDEVISVSTQCNAQLRSALEGAFREYRSTPPELRPRLPRLPMHKKNKALVCALDSQLSNCFDSSKDLADTHSILYCGAVAACRVAHVKFPNNDRATRPKYAVPAWQCRIERRIGKARALIGKLICFREGNTRPRVLRFVKRAFSGTDVSFRDYLARVTERIDFLKQKICAWASRIRRYKRRVERYTQNRTFRSDERWVYRAWERPDQGVTDTRLPDDDAMCSFWRNIWSVPVSHTEGDWTREVERACDSIPEMGAIIISPQDVARAVRPLPNWKSPGPDGLHNFWIKWFQRSHVRLASQFQSALESGSLPQFLTTGITHLLHKSGSTAEPKNYRPITCLPTVYKVLTSILRAKINHHIDSNSIMSASQNGCRNGSRGTKELLLIDMAISQQVRRSRRDLSTCWIDYKKAYDSVPHTWLMKVLELYKVDATLRTFLMSCMGHWRTVLRYPGCRQIQGNSEPIKIERGIFQGDSLSPLWFCLALNPLSTLLEGSGLGYRLRRGGQVISHLLYMDDLKLFAPNNLQLMKLLKVTETFSSAIRMEFGVDKCAVMHVKRGEIMESVGTQLSDSIHLRSLSSTETYKYLGMSEALSINTADMKQSLRDRFFGRLNKVLSSLLSGGNKVRAFNGWVMPVLMYSFGILKWTQTELDALDRRVRALLTANRMHHPRSSVMRLYIPRKCGGRGFLNAKTLHNREICSLREYFLEVDEGMHRDVVSVDKGLTPLSLANENWRKPRVLDTNDRKEVWQGKELHGRFYRALHGPDVDFLASVSWLRFGDLFGETEGFVCAIMDEVMMTNNYRKYIVKDGTVDICRACHRPGESIRHIISGCSRLANGEYLHRHNLVARIIHQQLALKYNLVESEVPYYKYAPDPVLDNGNITLYWDRSIITDRTIVANKPDIVVIDRLERRAMIVDITVPHDENLVKAEKDKQFKYLDLAREVVDMWDVSTAVIVPIVVSANGLIANSLDKHLRRLSLGSWIKGLIQKAVLLDTARIVRRFLSQEP

SEQ ID NO: 30582 - protein, 1206 aa, Noctua fimbriata
MITRSRAKQLQEAHTPSPGSSLSSASQPPGRATTVSTVSSVAAVASSSSDEFFSPPSTPPPSPRRRGRGRPPAGLGPRGQPAPNRVPAAGGNVSRMRWTQSINEQVMRAYYGATEGGSNLTAYRGRMLSLFQVLEPGVSVSAQRLSDQVRVIQRNHMLDDTVLDRLRSESRSNLVTPASPMTAVQLQNVTIASPRSDRGGEGDDDEVISVSTQCNAQLRSALESAFREYRSTPPELRPRLPRLPMHKKNKALVCALDSQLSNCFDTSKDLADTHSILYCGAVAACRVAHVKFPNNDRATRPKLAVPAWQCRIERRIGEARALIGKLICFREGNTRPRVMRFVRRAFSGTDVSFRDYLARVTERIDFLKQKICAWASRIRRYKRRVERYTQNRTFQSDERWVYRAWERPDQGVTDTRLPDDNAMCSFWRSIWSVPVSHTEGDWIREVERACDPIPEMGAIIISPQDVACAVRPLPNWKSPGPDGLHNFWIKWFQRSHVRLASQFQLALESGSLPQFLTTGITHLLHKSGSTAEPKNYRPITCLPTVYKVLTSILRAKINHHIDSNSIMSASQNGCRNGSRGTKELLLIDMAVSQQVRRSRRDLSTCWIDYKKAYDSVPHTWLMRVLELYKVDATLRTFLMSCMGHWRTVLRYPGCRQIQGNSEPIRIERGIFQGDSLSPLWFCIALNPLSTLLEGSGLGYRLRRDGQVISHLLYMDDLKLYAPNNLQLMKLLKVTETFSSSIRMEFGVDKCAVMHVKQGEIMESVGTQLSDSIHLRSLSSTETYKYLGMSEALGINTADMKQSLRERFFGRLNKVLSSLLSGGNKVRAFNGWVMPVLMYSFGILKWTQTELDALDTRVRVLLTANRMHHPRSSVMRLYIPRKCGGRGFLNAKTLHNREVCSLREYFLEADVEMHRDVVSVDKGLTPLSLANENWRKPRVLDTNDRKEVWQGKELHGRFYRALHGPDVDFLASVAWLRFGDLFGETEGFVCAIMDEVMMTNNYRKYIVKDGTVDICRACHRPGESIRHIISGCSRLANGEYLHRHNLVARIIHQQLALKYNLVESEVPYYKYVPDPVLDDGNITLYWDRSIVTDRTIVANKPDIVVIDRLERRAMIVDITVPHDENLVKAEKDKQFKYPDLAHEVVDIWDVSTAVIVPIVVSANGLIANTLDQHLRRLSLGSWIKGLIQKAVLLDTARIVRRFLSQEP

SEQ ID NO: 30583 - protein, 1206 aa, Noctua fimbriata
MITRSRAKQLQEAHTPSPGSSLSSASQPPRRATSVSTVSPVAAVASSSSDEFFSPPSTPPPSPRRRGRGRPPAGLGPRGQPAPNRVPAAGGNVSRMRWTQSINEQVMRAYYGATEGGSNLTAYRGRMLSLFQVLEPGVSVSAQRLSDQVRVIQRNHMLDDTVLDRLRSESRSNLVTPASPMTAVQLQNVTIASPRSDRGGEGDDDEVISVSTQCNAQLRSALESAFREYRSTQPELRPRLPRLPMHKKNKALMCALDSQLSNCFDTSKDLADTHSILYCGAVAACRVAHVKFPNNDRATRPKFAVPAWQCRIERRIGEARALIGKLICFREGNTRPRVMRFVRRAFSGTDVNFRDYLARVTERIDFLKQKICAWASRIRRYKRRVERYTQNRTFQSDERWVYRAWERPDQGVTDTRLPDDNAMCSFWRSIWSVPVSHTEGDWIREVERACDPIPEMGAIIISPQDVACAVRPLPNWKSPGPDGLHNFWIKWFQRSHVRLASQFQLALESGSLPQFLTTGITHLLHKSGSTAEPKNYRPITCLPTVYKVLTSILRAKINHHIDSNSIMSASQNGCRNGSRGTKELLLIDMAVSQQVRRSRRDLSTCWIDYKKAYDSVPHTWLMRVLELYKVDATLRTFLMSCMGHWRTVLRYPGCRQIQGNSEPIRIERGIFQGDSLSPLWFCIALNPLSTLLEGSGLGYRLRRDGQVISHLLYMDDLKLYAPNNLQLMKLLKVTETFSSSIRMEFGVDKCAVMHVKQGEIMESLGTQLSDSIHLRSLSSTETYKYLGMSEALGINAADMKQSLRERFFGRLNKVLSSLLSGGNKVRAFNGWVMPVLMYSFGILKWTQMELDALDRRVRVLLTANRMHHPRSSVMRLYIPRKCGGRGFLNVKTLHNREVCSLREYFLEADVGMHRDVVSVDKGLTPLSLANENWRKPRVLDTNDRKEVWQGKELHGRFYRALHGPDVDFLASVAWLRFGDLFGETEGFVYAIMDEVMMTNNYRKYIVKDGTVDICRACHRPGESIRHIISGCSRLANGEYLHRHNLVARIIHQQLALKYNLVESEVPYYKYVPDPVLDDGNITLYWDRSIVTDRTIVANKPDIVVIDRLERRAMIVDITVPHDENLVKAEKDKQFKYLDLAHEVVDIWDVSTAVIVPIVVSANGLIANTLDQHLRRLSLGSWIKGLIQKAVLLDTARIVRRFLFQEP

SEQ ID NO: 30584 - protein, 1203 aa, Noctua janthe
MLTRSRAKHQAHPPSPDSSLSSASQPPGRASIVSAVSPIAAVASSSSDEFFSPPSTPSPPRRRGRGRPPAGLGPRGQQAPNRVPAAGGNVSRMRWTQSINENVMRAYYGATEGGSNLTAYRGRMLSLFQVLEPGVSVSAQRLSDQVRVIQRNHMLDDTVLERLRFDSRSNLVIPASPMIAVQLQNVSSAPPRSEHDGEEDDDEVISVSTQCNAQLRSALEGAFREYRSTPPELRPRLPRLPMHKKNKALVCALDSQLSNCFDSSKDLADTHSILYCGAVAACRVAHVKFPNNDRATRPKFAVPAWQCRIERRIGKARALIGKLICFREGNTRPRVLRFVKRAFSGTDVSFRDYLARATERIDFLKQKICAWASRIRRYKRRVERYTQNRTFRSDERWVYRAWERPDQGVTDTRLPDDDAMCSFWRNIWSVPVSHTEGDWTREVERACDSIPEMGAIIISPQDVARAVRPLPNWKSPGPDGLHNFWIKWFQRSHVRLASQFQSALESGSLPQFLTTGITHLLHKSGSTAEPKNYRPITCLPTVYKVLTSILRAKINHHIDSNSIMSASQNGCRNGSRGTKELFLIDMAISQQVRRSRRDLSTCWIDYKKAYDSVPHTWLMKVLELYKVDATLRTFLMSCMGHWRTVLRYPGCRQIQGNSEPIKIERGIFQGDSLSPLWFCLALNPLSTLLEGSGLGYRLRRGGQVISHLLYMDDLKLFAPNNLQLMKLLKVTETFSSAIRMEFGVDKCAVMHVKRGEIMESVGTQLSDSIHLRSLSSTETYKYLGMSEALGINTADMKQSLRDRFFGRLNKVLSSLLSGGNKVRAFNGWVMPVLMYSFGILKWTQTELDALDRRVRALLTANRMHHPRSSVMRLYIPRKCGGRGFLNAKTLHNREICSLREYFLEVDEGMHRDVVSVDKGLTPLSLANENWRKPRVLDTNDRKEVWQGKELHGRFYRALHGPDVDFLASVSWLRFGDLFGETEGFVCAIMDEVMMTNNYRKYIVKDGTVDICRACHRPGESIRHIISGCSRLANGEYLHRHNLVARIIHQQLALKYNLVESEVPYYKYAPDPVLDNGNITLYWDRSIITDRTIVANKPDIVVIDRLERRAMIVDITVPHDENLVKAEKDKQFKYLDLAREVVDMWDVSTAVIVPIVVSANGLIANSLDKHLRRLSLGSWIKGLIQKAVLLDTARIVRRFLSQEP

SEQ ID NO: 30585 - protein, 1111 aa, Noctua janthe
MRWTQSINENVMRAYYGATEGGSNLTAYRGRMLSLFQVLEPGVSVSAQRLSDQVRVIQRNHMLDDTVLERLRFDSRSNLVIPASPMIAVQLQNVSSAPPRSEHDGEEDDDEFISVSTQCNAQLRSALEGAFREYRSTPPELRPRLPRLPMHKKNKALVCALDSQLSNCFDSSKDLADTHSILYCGAVAACRVAHVKFPNNDRATRPKFAVPAWQCRIERRIGKARALIGKLICFREGNTRPRVLRFVKRAFSGTDVSFRDYLARVTERIDFLKQKICAWASRIRRYKRRVERYTQNRTFRSDERWVYRAWERPDQGVTDTRLPDDDAMCSFWRNIWSVPVSHTEGDWTREVERACDSIPEMGAIIISPQDVARAVRPLPNWKSPGPDGLHNFWIKWFQRSHVRLASQFQSALESGSLPQFLTTGITHLLHKSGSTAEPKNYRPITCLPTVYKVLTSILRAKINHHIDSNSIMSAFQNGCRNGSRGTKELLLIDMAISQQVRRSRRDLSTCWIDYKKAYDSVPHTWLMRVLELYKVDATLRTFLMSCMGHWRTVLRYPGCRQIQGNSEPIKIERGIFQGDSLSPLWFCLALNPLSTLLEGSGLGYRLRRGGQVISHLLYMDDLKLFAPNNLQLMKLLKVTETFSSAIRMEFGVDKCAVMHVKRGEIMESVGTQLSDSIHLRSLSSTETYKYLGMSEALGINTADMKQSLRDRFFGRLNKVLSSLLSGGNKVRAFNGWVMPVLMYSFGILKWTQTELDALDRRVRALLTANRMHHPRSSVMRLYIPRKCGGRGFLNAKTLHNREICSLREYFLEVDEGMHRDVVSVDKGLTPLSLANENWRKPRVLDTNDRKEVWQGKELHGRFYRALHGPDVDFLASVSWLRFGDLFGETEGFVCAIMDEVMMTNNYRKYIVKDGTVDICRACHRPGESIRHIISGCSRLANGEYLHRHNLVARIIHQQLALKYNLVESEVPYYKYAPDPVLDNGNITLYWDRSIITDRTIVANKPDIVVIDRLERRAMIVDITVPHDENLVKAEKDKQFKYLDLAREVVDMWDVSTAVIVPIVVSANGLIANSLDKHLRRLSLGSWIKGLIQKAVLLDTARIVRRFLSQEP

SEQ ID NO: 30586 - protein, 1206 aa, Noctua fimbriata
MITRSRAKQLQEAHTPSPGSSLSSASQPPRRATSVSTVSPVAAVASSSSDEFFSPPSTPPPSPRRRGRGRPPAGLGPRGQPAPNRVPAAGGNVSRMRWTQSINEQVMRAYYGATEGGSNLTAYRGRMLSLFQVLEPGVSVSAQRLSDQVRVIQRNHMLDDTVLDRLRSESRSNLVTPASPMTAVQLQNVTIASPRSDRGGEGDDDEVISVSTQCNAQLRSALESAFREYRSTPPELRPRLPRLPMHKKNKALMCALDSQLSNCFDTSKDLADTHSILYCGAVAACRVAHVKFPNNDRATRPKLAVPAWQCRIERRIGEARALIGKLICFREGNTRPRVMRFVRRAFSGTDVNFRDYLARVTERIDFLKQKICAWANRIRRYKRRVERYTQNRTFQSDERWVYRAWERPDQGVTDTRLPDDNAMCSFWRSIWSVPVSHTEGDWIREVERACDPIPEMGAIIISPQDVACAVRPLPNWKSPGPDGLHNFWIKWFQRSHVRLASQFQLALESGSLPQFLTTGITHLLHKSGSTAEPKNYRPITCLPTVYKVLTSILRAKINHHIDSNSIMSASQNGCRNGSRGTKELLLIDMAVSQQVRRSRRDLSTCWIDYKKAYDSVPHTWLMRVLELYKVDATLRTFLTSCMGHWRTVLRYPGCRQIQGNSEPIRIERGIFQGDSLSPLWFCIALNPLSTLLEGSGLGYRLRRDGQVISHLLYMDDLKLYAPNNLQLMKLLKVTETFSSSIRMEFGVDKCAVMHVKQGEIMESLGTQLSDSIHLRSLSSTETYKYLGMSEALGINAADMKQSLRERFFGRLNKVLSSLLSGGNKVRAFNGWVMPVLMYSFGILKWTQMELDALDRRVRVLLTANRMHHPRSSVMRLYIPRKCGGRGFLNVKTLHNREVCSLREYFLEADVGMHRDVVSVDKGLTPLSLANENWRKPRVLDTNDRKEVWQGKELHGRFYRALHGPDVDFLASVAWLRFGDLFGETEGFVCAIMDEVMMTNNYRKYIVKDGTVDICRACHRPGESIRHIISGCSRLANGEYLHRHNLVARIIHQQLALKYNLVESEVPYYKYVPDPVLDDGNITLYWDRSIVTDRTIVANKPDIVVIDRLERRAMIVDITVPHDENLVKAEKDKQFKYLDLAHEVVDIWDVSTAVIVPIVVSANGLIANTLDQHLRRLSLGSWIKGLIQKAVLLDTARIVRRFLSQEP

SEQ ID NO: 30587 - protein, 1203 aa, Noctua janthe
MLTRSRAKHQAHPPSPDSSLSSASQPPGRASIVSAVSPIAAVASSSSDEFFSPPSTPSPPRRRGRGRPPAGLGPRGQQAPNRVPAAGGNVSRMRWTQSINENVMRAYYGATEGGSNLTAYRGRMLFLFQVLEPGVSVSAQRLSDQVRVIQRNLMLDDTVLERLRFDSRSNLVIPASPMIAVQLQNVSSAPPRSEHDGEEDDDEVISVSTQCNAQLRSALEGAFREYRSTPPELRPRLPRLPMHKKNKALVCALDSQLSNCFDSSKDLADTHSILYCGAVAACRVAHVKFPNNDRATRPKFAVPAWQCRIERRIGKARALIGKLICFREGNTRPRVLRFVKRAFSGTDVSSRDYLARVTERIDFLKQKICAWASRIRRYKRRVERYTQNRTFRSDERWVYRAWERPDQGVTDTRLPDDDAMCSFWRNIWSVPVSHTEGDWTREVERACDSIPEMGAIIISPQDVARAVRPLPNWKSPGPDGLHNFWIKWFQRSHVRLASQFQSALESGSLPQFLTTGITHLLHKSGSTAEPKNYRPITCLPTVYKVLTSILRAKINHHIDSNSIMSASQNGCRNGSRGTKELLLIDMAISQQVRRSRRDLSTCWIDYKKAYDSVPHTWLMKVLELYKVDATLRTLLMSCMGHWRTVLRYPGCRQIQGNSEPIKIERGIFQGDSLSPLWFCLALNPLSTLLEGSGLGYRLRRGGQVISHLLYMDDLKLFAPNNLQLMKLLKVTETFSSAIRMEFGVDKCAVMHVKRGEIMESVGTQLSDSIHLRSLSSTETYKYLGMSEALGINTADMKQSLRDRFFGRLNKVLSSLLSGGNKVRAFNGWVMPVLMYSFGILKWTQTELDALDRRVRALLTANRMHHPRSSVMRLYIPRKCGGRGFLNAKTLHNREICSLREYFLEVDEGMHRDVVSVDKGLTPLSLANENWRKPRVLDTNDRKEVWQGKELHGRFYRALHGPDVDFLASVSWLRFGDLFGETEGFVCAIMDEVMMTNNYRKYIVKDGTVDICRACHRPGESIRHIISGCSRLANGEYLHRHNLVARIIHQQLALKYNLVESEVPYYKYAPDPVLDNGNITLYWDRSIITDRTIVANKPDIVVIDRLERRAMIVDITVPHDENLVKAEKDKQFKYLDLAREVVDMWDVSTAVIVPIVVSANGLIANSLDKHLRRLSLGSWIKGLIQKAVVLDTARIVRRFLSQEP

SEQ ID NO: 30588 - protein, 1203 aa, Noctua janthe
MLTRSRAKHQAHPPSPDSSLSSASQPPGRPSIVSAVSPIAAVASSSSDEFFSPPSTPSPPRRRGRGRPPAGLGPRGQQAPNRVPAAGGNVSRMRWTQSINENVMRAYYGATEGGSNLTAYRGRMLSLFQVLEPGVSVSAQRLSDQVRVIQRNHMLDDTVLERLRFDSRSNLVIPASPMIAVQLQNVSSAPPRSEHDGEEDDDEVISVSTQCNAQLRSALEGAFREYRSTPPELRPRLPRLPMHKKNKALVCALDSQLSNCFDSSKDLADTHSILYCGAVAACRVAHVKFPNNDRATRPKFAVPAWQCRIERRIGKARALIGKLICFREGNTRPRVLRFVKRAFSGTDVSFRDYLARVTERIDFLKQKICAWASRIRRYKRRVERYTQNRTFRSDERWVYRAWERPDQGVTDTRLPDDDAMCSFWRNIWSVPVSHTEGDWTREVERACDSIPEMGAIIISPQDVARAVRPLPNWKSPGPDGLHNFWIKWFQRSHVRLASQFQSALESGSLPQFLTTGITHLLHKSGSTAEPKNYRPITCLPTVYKVLTSILRAKINHHIDSNSIMSASQNGCRNGSRGTKELLLIDMAISQQVRRSRRDLSTCWIDYKKAYDSVPHTWLMRVLELYKVDATLRTFLMSCMGHWRTVLRYPGCRQIQGNSEPIKIERGIFQGDSLSPLWFCLALNPLSTLLEGSGLGYRLRRGGQVISHLLYMDDLKLFAPNNLQLMKLLKVTETFSSAIRMEFGVDKCAVMHVKRGEIMESVGTQLSDSIHLRSLSSTETYKYLGMSEALGINTADMKQSLRDRFFGRLNKVLSSLLSGGNKVCAFNGWVMPVLMYSFGILKWTQTELDALDRRVRALLTANRMHHPRSSVMRLYIPRKCGGRGFLNAKTLHNREICSLREYFLEVDEGMHRDVVSVDKGLTPLSLANENWRKPRVLDTNDRKEVWQGKELHGRFYRALHGPDVDFLASVSWLRFGDLFGETEGFVCAIMDEVMMTNNYRKYIVKDGTVDICRACHRPGESIRHIISGCSRLANGEYLHRHNLVARIIHQQLALKYNLVESEVPYYKYAPDPVLDNGNITLYWDRSIITDRTIVANKPDIVVIDRLERRAMIVDITVPHDENLVKAEKDKQFKYLDLAREVVDMWDVSTAVIVPIVVSANGLIANSLDKHLRRLSLGSWIKGLIQKAVLLDTARIVRRFLSQEP

SEQ ID NO: 30589 - protein, 1203 aa, Noctua janthe
MLTRSRAKHQAHPPSPDSSLSSASQPPGRASIVSAVSPIAAVASSSSDEFFSPPSTPSPPRRRGRGRPPAGLGLRGQQAPNRVPAAGGNVSRMRWTQSINDNVMRAYYGATEGGSNLTAYRGRMLSLFQVLEPGVSVSAQRLSDQVRVIQRNHMLDDTVLERLRFDSRSNLVIPASPMIAVQLQNVSSAPPRSEHDGEEDDDEVISVSTQCNAQLRSALEGAFREYRSTPPELRPRLPRLPMHKKNKALVCALDSQLSNCFDSSKDLTDTHSILYCGAVAACRVAHVKFPNNDRATRPKFAVPAWQCRIERRIGEARALIGKLICFREGNTRSRVMRFVKRAFSGTDVNFRDYLARVTERIDFLKQKICAWASRIRRYKRRVERYTQNRTFRSDERWVYRAWERPDQGVTDTRLPDDDAMCSFWRNIWSVPVSHTEGDWTREVERACDSIPEMGAIIISPQDVARAVRPLPNWKSPGPDGLHNFWIKWFQRSHVRLASQFQSALESGSLPQFLTTGITHLLHKSGSTAEPKNYRPITCLPTVYKVLTSILRAKINHHIDSNSIMSASQNGCRNGSRGTKELLFIDMAISQQVRRSRRDLSTCWIDYKKAYDSVPHTWLMKVLELYKVDATLRTFLMSCMGHWRTVLRYPGCRQIQGNSEPIKIERGIFQGDSLSPLWFCLALNPLSTLLEGSGLGYRLRRGGQVISHLLYMDDLKLFAPNNLQLMKLLKVTETFSSAIRMEFGVDKCAVMHVKRGEIMESVGTQLSDSIHLRSLSSTETYKYLGMSEALGINTADMKQSLRDRFFGRLNKVLSSLLSGGNKVRAFNGWVMPVLMYSFGVLKWTQTELDALDRRVRALLTANRMHHPRSSVMRLYIPRKCGGRGFLNAKILHNREICSLREYFLEVDEGMHRDVVSVDKGLTPLSLANENWRKPRVLDTNDRKEVWQGKELHGRFYRALHGPDVDFLASVSWLRFGDLFGETEGFVCAIMDEVMMTNNYRKYIVKDGTVDICRACHRPGESIRHIISGCSRLANGEYLHRHNLVARIIHQQLALKYNLVESEVPYYKYAPDPVLDNGNITLYWDRSIITDRTIVANKPDIVVIDRLERRAMIVDITVPHDENLVKAEKDKQFKYLDLAREVVDMWDVSKAVIVPIVVSANGLIANSLDKHLRRLSLGSWIKGLIQKAVLLDTARIVRRFLSQEP

SEQ ID NO: 30590 - protein, 1203 aa, Noctua janthe
MLTRSRAKHQAHPPSPDSSLSSASQPPERASIVSAVSPIAAVASSSSDEFFSPPSTPSPPRRRGRGRPPAGLGPRGQEAPNRVPAAGGNVSRMRWTQSINENVMRAYYGATEGGSNLTAYRGRMLSLFQVLEPGVSVSAQRLSDQVRVIQRNHMLDDTVLERLRFDSRSNQVIPASPMIAVQLQNVSSAPPRSEHDGEEDDDEVISVSTQCNAQLRSALEGAFREYRSTPPELRPRLPRLPMHKKNKALVCALDSQLSNCFDSSKDLADTHSILYCGAVAACRVAHVKFPNNDRATRPKFAVPAWQCRIERRIGKARALIGKLICFREGNTRPRVLRFVKRAFSGTDVSFRDYLARVTERIDFLKQKICAWASRIRRYKRRVERYTQNRTFRSDERWVYRAWERPDQGVTDTRLPDDDAMCSFWRNIWSVPVSHTEGDWTREVERACDSIPEMGAIIISPQDVARAVRPLPNWKSPGPDGLHNFWIKWFQRSHVRLASQFQSALESGSLPQFLTTGITHLLHKSGSTAEPKNYRPITCLPTVYKVLTSILRAKINHHIDSNSIMSASQNGCRNGSRGTKELLLIDMAISQQVRRSRRDLSTCWIDYKKAYDSVPHTWLMKVLELYKVDATLRTFLMSCMGHWRTVLRYPGCRQIQGNSEPIKIERGIFQGDSLSPLWFCLALNPLSTLLEGSGLGYRLRRGGQVISHLLYMDDLKLFAPNNLQLMKLLKVTETFSSAIRMEFGVDKCAVMHVKRGEIMESVGTQLSDSIHLRSLSSTETYKYLGMSEALGINTADMKQSLRDRFFGRLNKVLSSLLSGGNKVRAFNGWVMPVLMYSFGILKWTQTELDALDRRVRALLTANRMHHPRSSVMRLYIPRKCGGRGFLNAKTLHNREICSLREYFLEVDEGMHRDVVSVDKGLTPLSLANENWRKPRVLDTNDRKEVWQGKELHGRFYRALHGPDVDFLASVSWLRFGDLFGETEGFVCAIMDEVMMTNNYRKYIVKDGTVDICRACHRPGESIRHIISGCSRLANGEYLHRHNLVARIIHQQLALKYNLVESEVPYYKYAPDPVLDNGNITLYWDRSIITDRTIVANKPDIVVIDRLERRAMIVDITVPHDENLVKAEKDKQFKYLDLAREVVDMWDVSTAVIVPIVVSANGLIANSLDKHLRRLSLGSWIKGLIQKAVLLDTARIVRRFLSQEP

SEQ ID NO: 30591 - protein, 922 aa, Noctua fimbriata
MSCSSRQISQQRQSYTTKLAVPAWLCRIERRIGEARALIGKLICFREGNTRPRVICFVRRAFSGTDVSFRDYLARVTERIDFLKQKICAWAGRIRRYKRRVERYTQNRTFQSDERWVYRAWERPDQGVTDTRLPDDDAMCSFWRSIWSVPVSHIEGDWTREVERACDPIPEMGAIIISPQDVACAVRPLPNWKSPGPDGLHNFWIKWFQRSHVRLASQFQLALESGSQPQFLTTGITHLLHKSGSTAELTNYRPITCLPTVYKVLTSILRAKINHHIDSNSIMSASQNGCRNGSRGTKELLLIDMAVSQQVRRSRRDLSTCWIDYKKAYDSVPHTWLMRVLELYKVDATLRTFLMSCMGHWRTVLRYPGCRQIQGNSEPIRIERGIFQGDSLSPLWFCLALNPLSTLLEGSGLGYRLRRDGQVISHLLYMDDLKLFAPNNLQLMKLLKVTETFSSSIRMEFGVDKCAVMHVKRGEIMESVGTQLSDSIHLRSLSSTETYKYLGMSEALGINTADMKQSLRERFFGRLNKVLSSLLSGGNKVRAFNGWVMPVLMYSFGILKWTQTELDALDRRVRVLLTANRMHHPRSSVMRLYIPRKCGGRGFLNAQTLHNREVCSLREYFLEADVGMHRDVVSVDKGLTPLSLANENWRKPRVLDTNVRKEVWQGKELHGRFYRALHGPDVDFLASVAWLRFGDLFGETEGFVCAIMDEVMVTNNYRKYIVKDGTVDICRACHRPGESIRHIISGCSRLANGEYLHRHNLVAKIIHQQLALKYNLVESEVPYYKYVPDPVLDDGNITLYWDRSIVTDRTIVANKPDIVVIDRLERRAMIVDITVPHDENLVKAEKDKQFKYLDLAHEVVDIWDVSTAVIVPIVVSANGLIANTLDQHLRRLSLGSWIKGLIQKAVLLDTARIVRRFLSQEP

SEQ ID NO: 30592 - protein, 1206 aa, Noctua fimbriata
MITRSRAKQLQEAHTPSPGSSLSSASQPPRRATSVSTVSPVAAVASSSSDEFFSPPSTPPPSPRRRGRGRPPAGLGPRGQPAPNRVPAAGGNVSRMRWTQSINEQVMRAYYGATEGGSNLTAYRGRMLSLFQVLEPGVSVSAQRLSDQVRVIQRNHMLDDTVLDRLRSESRSNLVTPASPMTAVQLQNVTIASPRSDRGGEGDDDEVISVSTQCNAQLRSALESAFREYRSTPPELRPRLPRLPMHKKNKALMCALDSQLSNCFDTSKDLADTHSILYCGAVAACRVAHVKFPNNDRATRPKLAVPAWQCRIERRIGEARALIGKLICFREGNTRPRVMRFVRRAFSGTDVNFRDYLARVTERIDFLKQKICAWASRIRRYKRRVERYTQNRTFQSDERWVYRAWERPDQGVTDTRLPDDNAMCSFWRSIWSVPVSHTEGDWIREVERACDPIPEMGAIIISPQDVACAVRPLPNWKSPGPDGLHNFWIKWFQRSHVRLASQFQLALESGSLPQFLTTGITHLLHKSGSTAEPKNYRPITCLPTVYKVLTSILRAKINHHIDSNSIMSASQNGCRNGSRGTKELLLIDMAVSQQVRRSRRDLSTCWIDYKKAYDSVPHTWLMRVLELYKVDATLRTFMTSCMGHWRTVLRYPGCRQIQGNSEPIRIERGIFQGDSLSPLWFCIALNPLSTLLEGSGLGYRLRRDGQVISHLLYMDDLKLYAPNNLQLMKLLKVTETFSSSIRMEFGVDKCAVMHVKQGEIMESLGTQLSDSIHLRSLSSTETYKYLGMSEALGINAADMKQSLRERFFGRLNKVLSSLLSGGNKVRAFNGWVMPVLMYSFGILKWTQMELDALDRRVRVLLTANRMHHPRSSVMRLYIPRKCGGRGFLNVKTLHNREVCSLREYFLEADVGMHRDVVSVDKGLTPLSLANENWRKPRVLDTNDRKEVWQGKELHGRFYRALHGPDVDFLASVAWLRFGDLFGETEGFVCAIMDEVMMTNNYRKYIVKDGTVDICRACHRPGESIRHIISGCSRLANGEYLHRHNLVARIIHQQLALKYNLVESEVPYYKYVPDPVLDDGNITLYWDRSIVTDRTIVANKPDIVVIDRLERRAMIVDITVPHDENLVKAEKDKQFKYLDLAHEVVDIWDVSTAVIVPIVVLANGLIANTLDQHLRRLSLGSWIKGLIQKAVLLDTARIVRRFLSQEP

SEQ ID NO: 30593 - protein, 1206 aa, Noctua fimbriata
MITRSRAKQLQEAHTPSPGSSLSSASQPPRRATSVSTVSPVAAVASSSSDEFFSPPSTPPPSPRRRGRGRPPAGLGPRGQPAPNRVPAAGGNVSRMRWTQSINEQVMRAYYGATEGGSNLTAYRGRMLSLFQVLEPGVSVSAQRLSDQVRVIQRNHMLDDTVLDRLRSESRSNLVTPASPMTAVQLQNVTIASPRSDRGGEGDDDEVISVSTQCNAQLRSALESAFREYRSTPPELRPRLPRLPMHKKNKALMCALDSQLSNCFDTSKDLADTHSIVYCGAVAACRVAHVKFPNNDRATRPKLAVPAWQCRIERRIGEARALIGKLICFREGNTRPRVMRFVRRAFSGTDVNFRDYLARVTERIDFLKQKICAWASRIRRYKRRVERYTQNRTFQSDERWVYRAWERPDQGVTDTRLPDDNAMCSFWRSIWSVPVSHTEGDWIREVERACDPIPEMGAIIISPQDVACAVRPLPNWKSPGPDGLHNFWIKWFQRSHVRLASQFQLALESGSLPQFLTTGITHLLHKSGSTAEPKNYRPITCLPTVYKVLTSILRAKINHHIDSNSIMSASQNGCRNGSRGTKELLLIDMAVSQQVRRSRRDLSTCWIDYKKAYDSVPHTWLMRVLELYKVDATLRTFLTSCMGHWRTVLRYPGCRQIQGNSEPIRIERGIFQGDSLSPLWFCIALNPLSTLLEGSGLGYRLRRDGQVISHLLYMDDLKLYAPNNLQLMKLLKVTETFSSSIRMEFGVDKCAVMHVKQGEIMESLGTQLSDSIHLRSLSSTETYKYLGMSEALGINAADMKQLLRERFFDRLNKVLSSLLSGGNKVRAFNGWVMPVLMYSFGILKWTQMELDALDRRVRVLLTANRMHHPPSSVMRLYIPRKCGGRGFLNVKTLHNREVCSLREYFLEADVGMHRDVVSVDKGLTPLSLANENWRKPRVLDTNDRKEVWQGKELHGRFYRALHGPDVDFLASVAWLRFGDLFGETEGFVCAIMDEVMMTNNYRKYIVKDGTVDICRACHRPGESIRHIISGCSRLANGEYLHRHNLVARIIHQQLALKYNLVESEVPYYKYVPDPVLDDGNITLYWDRSIVTDRTIVANKPDIVVIDRLERRAMIVDITVPHDENLVKAEKDKQFKYLDLAHEVVDIWDVSTAVIVPIVVSANGLIANTLDQHLRRLSLGSWIKGLIQKAVLLDTARIVRRFLSQEP

SEQ ID NO: 30594 - protein, 1203 aa, Noctua janthe
MLTRSRAKHQAHPPSPDSSLSSASQPPGRASIVSAVSPIAAVASSSSDEFFSPPSTPSPPRRRGRGRPPAGLGPRGQQAPNRVPAAGGNVSRMRWTQSINENVMRAYYGATEGGSNLTAYRGRMLSLFQVLEPGVSVSAQRLSDQVRVIQRNHMLDDTVLERLRFDSRSNLVIPASPMIAVQLQNVSSAPPRSEHDGEDDDDEVISVSTQCNAQLRSALEGAFREYRSTPPELRPRLPRLPMHKKNKALVCALDSQLSNCFDSSKDLADTHSILYCGAVAACRVAHVKFPNNDRATRPKFAVPAWQCRIERRIGKARALIGKLICFREGNTRPRVLRFVKRAFSGTDVSFRDYLARVTERIDFLKQKICAWASRIRRYKRRVERYTQNRTFRSDERWVYRAWERPDQGVTDTRLPDDDAMCSFWRNIWSVPVSHTEGDWTREVERACDSIPEMGAIIISPQDVARAVRPLPNWKSPGPDGLHNFWIKWFQRSHVRLASQFQSALESGSLPQFLTTGITHLLHKSGSTAEPKNYRPITCLPTVYKVLTSILRAKINHHIDSNSIMSASQNGCRNGSRGTKELLLIDMAISQQVRRSRRDLSTCWIDYKKAYDSVPHTWLMKVLELYKVDATLRTFLMSCMGHWRTVLRYPGCRQIQGNSEPIKIERGIFQGDSLSPLWFCLALNPLSTLLEGSGLGYRLRRGGQVISHLLYMDDLKLFAPNNLQLMKLLKVTETFSSAIRMEFGVDKCAVMHVKRGEIMESVGTQLSDSIHLRSLSSTETYKYLGMSEALGINTADMKQSLRDRFFGRLNKVLSSLLSGGNKVRAFNGWVMPVLMYSFGILKWTQTELDALDRRVRALLTANRMHHPRSSVMRLYIPRKCEGRGFLNAKTLHNREICSLREYFLEVDEGMHRDVVSVDKGLTPLSLANENWRKPRVLDTNDRKEVWQGKELHGRFYRALHGPDVDFLASVSWLRFGDLFGETEGFVCAIMDEVMMTNNYRKYIVKDGTVDICRACHRPGESIRHIISGCSRLANGEYLHRHNLVARIIHQQLALKYNLVESEVPYYKYAPDPVLDNGNITLYWDRSIITDRTIVANKPDIVVIDRLERRAMIVDITVPHDENLVKAEKDKQFKYLDLAREVVDMWDVSTAVIVPIVVSANGLIANSLDKHLRRLSLGSWIKGLIQKAVLLDTARIVRRFLSQEP

SEQ ID NO: 30595 - protein, 1049 aa, Noctua janthe
MLDDTVLERLRFDSRSNLVTPASPMIAVQLQNVSSAPPRSEHDGEDDDEVISVSTQCNAQLRSALEGAFREYRSTPPELRPRLPRLPMHKKNKALVCALDSQLSNCFDSSKDLTDTHSILYCGAVAACRVAHVKFPNNDRATRPKFAVPAWQCSIERRIGEARALIGKLICFREGNTRPRVMRFVKRAFSGTDVSFRDYLARVTERIDFLKQKICAWASRIRRYKRRVECYTQNRTFRSDERWVYRAWERPDQGVTDTRLPDDDAMCSFWRNIWSVPVSHTEGDWTREVERACDPIPEMGAIIISPQDVARAVRPLPNWKSPGPDGLHNFWIKWFQRSHVRLASQFQSALESGSLPQFLTTGITHLLHKSGSTAEPKNYRPITCLPTVYKVLTSILRAKINHHIDSNSMMSASQNGCRNGSRGTKELLLIDMAISQQVRRSRRDLSTCWIEYKKAYDSVPHTWLMKVLELYKVDATLRTFLMSCMGHWRTVLRYPGCRQIQGNSEPIKIERGIFQGDSLSPLWFCLALNPLSTLLEGSGLGYRLRRGGQVIFHLLYMDDLKLFAPNNLQLMKLLKVTETFSSAIRMEFGVDKCAVMHVKRGEIMESVGTQLSDSIHLRSLSSTETYKYLGMSEALGINTADMKQSLRDRFFGRLNKVLSSLLSGGNKVRAFNGWVMPVLIYSFGILKWTQTELDALDRRVRAMLTANRMHHPRSSVMRLYIPRKCGGRGFLNAKTLHNREICSLREYFLEVDEGMHRDVVSVDKGLTPLSLANENWRKPRVLDTNDRKEVWQGKELHGRFYRALHGPDVDFVASVSWLRFGDLFGETEGFVCAIMDEVMMTNNYRKYIVKDGTVDICRACHRPGESIRHIISGCSRLANGEYLHRHNLVARIIHQQLALKYNLVESEVPYYKYAPDPVLDNGNITLYWDRSIITDRTIVANKPDIVVIDRLERRAMIVDITVPHDENLVKAEKDKQFKYLDLAREVVDMWDVSTAVIVPIVVSANGLIANSLDKHLRRLSLDSWIKGLIQKAVLLDTARIVRRFLSQEP

SEQ ID NO: 30596 - protein, 1205 aa, Noctua janthe
MNADKKPGKTSGTPTISGLVAQLRLAAMVGRASIVSAVSPIAAVASFSSDEFFSPPSTPSPPRRRGRGRPPAGLGPRGQQAPNRVPAAGGNVSRMRWTQSINENVMRAYYEATEGGSKLTAYRGRMLSLFQVLEPGVSVSAQRLSDQVRVIQRNHMLDDTVLERLRFDSRSNLVIPASTMIAVQLQNVSSAPPRSEHDGEEDDDEVISVSTQCNAQLRSALEGAFREYRSTPPELRPRLPRLPMHKKNKALVCALDSQLSNCFDSSKDLTDTHSILYCGAVAACRVAHVKFPNNDRATRPKFAVPAWQCRIERRIGEARALIGKLICFREGNTRPRVMRFVKRAFSGTDVSFRDYLARVTERIDFLKQKICAWASRIRRYKRRVERYTQNRTFRSDERWVYRAWERPDQGVTDTRLPDDDAMCSFWRNIWSVPVSHTEGDWTREVERACDSIPEMGAIIISPQDVARAVRPLPNWKSPGPDGLHNFWIKWFQRSHVRLASQFQSALESGSLPQFLTTGITHLLHKSGSTAEPKNYRPITCLPTVYKVLTSILRAKINHHIDSNSIMSASQNGCRNGSRGTKELLLIDMAISQQVRRSRRDLSTCWIDYKKAYDSVPHTWLMKVLELYKVDATLRTFLMSCMGHWRTVLRYPGCRQIQGNSEPIKIERGIFQGDSLSPLWFCLALNPLSTLLEGSGLGYRLRRGGQVISHLLYMDDLKLFAPNNLQLMKLLKVTETFSSAIRMEFGVDKCAVMHVKRGEIMESVGTQLSDSIHLRSLSSTETYKYLGMLEALGINTADMKQSLRDRFFGRLNKVLSSLLSGGNKVRAFNGWVMPVLMYSFGILKWTQTELDALDRRVRALLTANRMHHPRSSVMRLYIPRKCGGRGFLNAKTLHNREICSLREYFLEVDEGMHRDVVSVDKGLTPLSLANENWRKPRVLDTNDRKDVWQGKELHGRFYRALHGPDVDFLASVSWLRFGDLFGETEGFVCAIMDEVMMTNNYRKYIVKDGTVDICRACHRPGESIRHIISGCSRLANGEYLYRHNLVARIIHQQLALKYNLVESEVPYYKYAPDPVLDNGNITLYWDRSIITDRTIVANKPDIVVIDRLERRAMIVYITVSHDENLVKAEKDKQFKYLDLAREVVDMWDVSTAVIVPIVVSANGLIANSLDKHLRRLSLGSWIKGLIQKAVLLDTARIVRRFLSQEP

SEQ ID NO: 30597 - protein, 962 aa, Noctua janthe
MHKKNKALVCALDSQLSNCFDSSKDLADTHSILYCGAVAACRVAHVKFPNNDRATRPKFAVPAWQCRIERRIGKARALIGKLICFREGNTRPRVLRFVKRAFSGTDVSFRDYLARVTERIDFLKQKICAWASRIRRYKRRVERYTQNRTFRSDERWVYRAWERPDQGVTDTRLPDDDAMCSFWRNIWSVPVSHTEGDWTREVERACDSIPEMGAIIISPQDVARAVRPLPNWKSPGPDGLHNFWIKWFQRSHVRLASQFQSALESGSLPQFLTTGITHLLHKSGSTAEPKNYRPITCLPTVYKVLTSILRAKINHHIDSNSIMSASQNGCRNGSRGTKELLLIDMAISQQVRRSRRDLSTCWIDYKKAYDSVPHTWLMRVLELYKVDATLRTFLMSCMGHWRTVLRYPGCRQIQGNSEPIKIERGIFQGDSLSPLWFCLALNPLSTLLEGSGLGYRLRRGGQVISHLLYMDDLKLFAPNNLQLMKLLKVTETFSSAIRMEFGVDKCAVMHVKRGKIMESVGTQLSDSIHLRSLSSTETYKYLGMSEAFGINTADMKQSLRDRFFGRLNKVLSSLLSGGNKVRAFNGWVMPVLMYSFGILKWTQTELDALDRRVRALLTANRMHHPRSSVMRLYIPRKCGGRGFLNAKTLHNREICSLREYFLEVDEGMHRDVVSVDKGLTPLSLANENWRKPRVLDTNDRKEVWQGKELHGRFYRALHGPDVDFLASVSWLRFGDLFGETEGFVCAIMDEVMMTNNYRKYIVKDGTVDICRACHRPGESIRHIISGCSRLANGEYLHRHNLVARIIHQQLALKYNLVESEVPYYKYAPDPVLDNGNITLYWDRSIITDRTIVANKPDIVVIDRLERRAMIVDITVPHDENLVKAEKDKQFKYLDLAREVVDMWDVSTAVIVPIVVSANGLIANSLDKHLRRLSLGSWIKGLIQKAVLLDTARIVRRFLSQEP

SEQ ID NO: 30598 - protein, 1206 aa, Noctua fimbriata
MITRSRAKQLQEAHTPSPGSSFSSASQPPRRATSVSTVSPVAAVASSSSDEFFSPPSTPPPSPRRRGRGRPPAGLGPRGQPAPNRVPAAGGNVSRMRWTQSINEQVMRAYYGATEGGSNLTAYRGRMLSLFQVLEPGVSVSAQRLSDQVRVIQRNHMLDDTVLDRLRSESRSNLVTPASPMSAVQLQNVTIASPRSDRGGEGDDDEVISVSTQCNAQLRSALESAFREYRSTPPELRPRLPRLPMHKKNKALMCALDSQLSNCFDTSKDLADTHSILYCGAVAACRVAHVKFPNNDRATRPKLAVPAWQCRIERRIGEARALIGKLICFREGNTRPRVMRFVRRAFSGTDVNFRDYLARVTERIDFLKQKICAWASRIRRYKRRVERYTQNRTFQSDERWVYRAWERPDQGVTDTRLPDDNAMCSFWRSIWSVPVSHTEGDWIREVERACDPIPEMGAIIISPQDVACAVRPLPNWKSPGPDGLHNFWIKWFQRSHVRLASQFQLALESGSLPQFLTTGITHLLHKSGSTAEPKNYRPITCLPTVYKVLTSILRAKINHHIDSNSIMSASQNGCRNGSRGTKELLLIDMAVSQQVRRSRRDLSTCWIDYKKAYDSVPHTWLMRVLELYKVDATLRTFLTSCMGHWRTVLRYPGCRQIQGNSEPIRIERGIFQGDSLSPLWFCIALNPLSTLLEGSGLGYRLRRDGQVISHLLYMDDLKLYAPNNLQLMKLLKVTETFSSSIRMEFGVDKCAVMHVKQGEIMESLGTQLSDSIHLRSLSSTETYKYLGMSEALGINAADMKQSLRERFFGRLHKVLSSLLSGGNKVRAFNGWVMPVLMYSFGILKWTQMELDALDRRVRVLLTANRMHHPRSSVMRLYIPRKCGGRDFLNVKTLHNREVCSLREYFLEADVGMHRDVVSVDKGLTPLSLANENWRKPRVLDTNDRKEVWQGKELHGRFYRALHGPDVDFLASLAWLRFGDLFGETEGFVCAIMDEVMMTNNFRKYIVKDGTVDICRACHRPGESIRHIISGCSRLANGEYLHRHNLVARIIHQQLALKYNLVESEVPYYKYVPDPVLDDGNITLYWDRSIVTDRTIVANKPDIVVIDRLERRAMIVDITVPLDENLVKAEKDKQFKYLDLAHEVVDIWDVSTAVIVPIVVSANGLIANTLDQHLRRLSLGSWIKGLIQKAVLLDTARIVRSFLSQEP

SEQ ID NO: 30599 - protein, 868 aa, Noctua janthe
MRFVKRAFSGTDVSFRDYLARVTERIDFLKQKICAWASRIRRYKRRVERYTQNRTFRSDERWVYRAWERPDQGVTDTRLPDDDAMCSFWRNIWSVPVSHTEGDWTREVERACDPIPEMGAIIISPQDVARAVRPLPNWKSPGPHGLHNFWIKWFQRSHVRLASQFQSALESGSLPQFLTTGITHLLHKSGSTAKPKNYRPITCLPTVYKVLTSILRAKINHHIDSNSIMSASQNGCRNGSRGTKELLLIDMAISQQVRRSRRDLSTCWIDYKKAYDSVPHTWLMKVLELYKVDATLRTFLMSCMVHWRTALRYPGCRQIQGNSEPIKIERGIFQGDSLSPFWFCLALNPLSTLLEGSGLAYRLRRGGQVISHLLYMDDLKLFAPNNLQLMKLLKVTETFSSAIRMEFGVDKCAVMHVKRGEIMESVGTQLSDSIHLRSLSSTDTYKYLGMSEALGINTADMKQSLRDRFFGRLNKVLCSLLSGGNKVRAFNGWVMPVLMYSFGILKWTQTELDALDRRVRALLTANRMHHPRSSVMRLYIPRKCGGRGFLNAKTLHNREICSLREYFLEVDEGMHRDVVSVDKGLTPLSLANENWRKPRVLDTNDRKEVWQGKELHGRFYRALHGPDVDFLASVSWLRFGDLFGETEGFVCATMDEVMMTNNYRKYIVKDGTVDICRACHRPGESIRHIISGCSRLANGEYLHRHNLVARIIHQPLALKYNLVESEVPYYKYAPDPVLDNGNITLYWDRSIITDRTIVANKPDIVVIDRLERRAMIVDITVPHDENLVKAEKDKQFKYLDLAREVVDMWDVSTAVIVPIVVSANGLIANSLDKHLRRLSLGSWIKGLIQKAVLLDTARIVRRFLSQEP

SEQ ID NO: 30600 - protein, 1203 aa, Noctua janthe
MLTRSRAKHQAHPPSPDSSLSSASQPPGRPSIVSAVSPIAAVASSSSDEFFSPPSTPSPPRRRGRGRPPAGLGPRGQQAPNRVPAAGGNVSRMRWTQSINENVMRAYYGATEGGSNLTAYRGRMLSLFQVLEPGVSVSAQRLSDQVRVIQRNHMLDDTVLERLRFDSRSNLVIPASPMIAVQLQNVSSAPPRSEHDGEEDDDEVISVSTQCNAQLRSALEGAFREYRSTPPELRPRLPRLPMHKKNKALVCALDSQLSNCFDSSKDLADTHSILYCGAVAACRVAHVKFPNNDRATRPKFAVPAWQCRIERRIGKARALIGKLICFREGNTRPRVLRFVKRAFSGTDVSFRDYLARVTERIDFLKQKICAWASRIRRYKRRVERYTQNRTFRSDERWVYRAWERPDQGVTDTRLPDDDAMCSFWRNIWSVPVSHTEGDWTREVERACDSIPEMGAIIISPQDVARAVRPLPNWKSPGPDGLHNFWIKWFQRSHVRLASQFQSALESGSLPQFLTTGITHLLHKSGSTAEPKNYRPITCLPTVYKVLTSILRAKINHHIDSNSIMSASQNGCRNGSRGTKELLLIDMAISQQVRRSRRDLSTCWIDYKKAYDSVPHTWLMRVLELYKVDATLRTFLMSCMGHWRTALRYPGCRQIQGNSEPIKIERGIFQGDSLSPLWFCLALNPLSTLLEGSGLGYRLRRGGQVISHLLYMDDLKLFAPNNLQLMKLLKVTETFSSAIRMEFGVDKCAVMHVKRGEIMESVGTQLSDSIHLRSLSSTETYKYLGMSEALGINTADMKQSLRDRFFGRLNKVLSSLLSGGNKVRAFNGWVMPVLMYSFGILKWTQTELDALDRRVRALLTANRMHHPRSSVMRLYIPRKCGGRGFLNAKTLHNREICSLREYFLEVDEGMHRDVVSVDKGLTPLSLANENWRKPKVLDTNDRKEVWQGKELHGRFYRALHGPDVDFLASVSWLRFGDLFGETEGFVCAIMDEVMMTNNYRKYIVKDGTVDICRACHRPGESIRHIISGCSRLANGEYLHRHNLVARIIHQQLALKYNLVESEVPYYKYAPDPVLDNGNITLYWDRSIITDRTIVANKPDIVVIDRLERRAMIVDITVPHDENLVKAEKDKQFKYLDLAREVVDMWDVSTAVIVPIVVSANGLIANSLDKHLRRLSLGSWIKGLIQKAVLLDTARIVRRFLSQEP

SEQ ID NO: 30601 - protein, 1203 aa, Noctua janthe
MLTRSRAKHQAHPPSPDSSLSSASQLPGRASIVSAVSPIAAVASSSSDEFFSPPSTPSPPRRRGRGRPPAGLGPRGQQAPNRVPAAGGNVSRMRWTQSINENVMRAYYGATEGGSNLTAYRGRMLSLFQVLEPGVSVSAQRLSDQVRVIQRNHMLDDTVLERLRFDSRSNLVIPASPMIAVQLQNVSSAPPRSEHDGEEDDDEVISVSTQCNAQLRSALEGAFREYRSTPPELRPRLPRLPMHKKNKALVCALDSQLSNCFDSSKDLADTHSILYCGAVAACRVAHVKFPNNDRATRPKFAVPAWQCRIERRIGKARALIGKLICFREGNTRPRVLRFVKRAFSGTDVSSRDYLARVTERIDFLKQKICAWASRIRRYKRRVERYTQNRTFRSDERWVYRAWERPDQGVTDTRLPDDDAMCSFWRNIWSVPVSHTEGDWTREVERACDSIPVMGAIIISPQDVARAVRPLPNWKSPGPDGLHNFWIKWFQRSHVRLASQFQSALESGSLPQFLTTGITHLLHKSGSTAEPKNYRPITCLPTVYKVLTSILRAKINHHIDSNSIMSASQNGCRNGSRGTKELLLIDMAISQQVRRSRRDLSTCWIDYKKAYDSVPHTWLMKVLELYKVDATLRTFLMSCMGHWRTVLRYPGCRQIQGNSEPIKIERGIFQGDSLSPLWFCLALNPLSTLLEGSGLGYRLRRGGQVISHLLYMDDLKLFAPNNLQLMKLLKVTETFSSAIRMEFGVDKCAVMHVKRGEIMESVGTQLSDSIHLRSLSSTETYKYLGMSEALGINTADMKQSLRDRFFGRLNKVLSSLLSGGNKVRAFNGWVMPVLMYSFGILKWTQTELDALDRRVRALLTANRMHHPRSSVMRLYIPRKCGGRGFLNAKTLHNREICSLREYFLEVDEGMHRDVVSVDKGLTPLSLANENWRKPRVLDTNDRKEVWQGKELHGRFYRALHGPDVDFLASVSWLRFGDLFGETEGFVCAIMDEVMMTNNYRKYIVKDGTVDICRACHRPGESIRHIISGCSRLANGEYLHRHNLVARIIHQQLALKYNLVESEVPYYKYAPDPVLDNGNITLYWDRSIITDRTIVANKPDIVVIDRLERRAMIVDITVPHDENLVKAEKDKQFKYLDLAREVVDMWDVSTAVIVPIVVSANGLIANSLDKHLRRLSLGSWIKGLIQKAVLLDTARIVRRFLSQEP

SEQ ID NO: 30602 - protein, 868 aa, Noctua janthe
MRFVKRAFSGTDVSFRDYLARVTERIDFLKQKICAWASRIRRYKRRVERYTQNRTFRSDERWVYRAWERPDQGVTDTRLPDDDAMCSFWRNIWSVPVSHTEGDWTREVERACDSIPEMGAIIISPQDVARAVRPLPNWKSPGPDGLHNFWIKWFQRSHVRLASQFQSALESGSLPQFLTTGITHLLHKSGSTAEPKNYRPITCLPTVYKVLTSILRAKINHHIYSNSIMFASQNGCRNGSRGTKELLLIDMTISQQVRRSLRDLSTCWIDYKKAYDSVPHTWLMKVLELYKVDATLRTFLMSCMGHWRTVLRYPGCRQIQGNSEPIKIERGIFQGDSLSPLWFCLALNLLSTLLEGSGLGYRLRRGGQVISHLLYMDDLKLFAPNNLQLMKLLKVTETFSSAIRMEFGVDKCAVMHVKRGEIMESVGTQLSDSIHLRSLSSTETYKYLGMSEALGINTADMKQSLRDRFFGRLNKVLNSLLSGGNKVRAFNGWVMPVLMYSFGILKWTQTELDALDRRVRALLTANRMHHPRSSVMRLYIPRKCGGRGFLNAKTLHNREICSLREYFLEVDEGMHRDVVSVDKGLTPLSLANENWRKPRVLDTNDRKEVWQGKELHGRFYRALHGPDVDFLASVSWLRFGDLFEETEGFVCAIMDEVMMTNNYRKYIVKDGTVDICRACHRPGESIRHIISGCSRLANGEYLHRHNLVARIIHQQLALKYNLVESEVPYYKYAPDPVLDNGNITLYWDRSIITDRTIVANKPDIVVIDRLERRAMIVDITVPHDENLVKAEKDKQFKYLDLAREVVDMWDVSTEVIVPIVVSANGLIANSLDKHLRRLSLGSWIKGLIQKAVLLDTARIVRRFLSQEP

SEQ ID NO: 30603 - protein, 1206 aa, Noctua fimbriata
MITRSRAKQLQEAHTPSPGSSLSSASQPPRRATSVSTVSPVAAVASSSSDEFFSPPSTPPPSPRRRGRGRPPAGLGPRGQPAPNRVPAAGGNVSRMRWTQSINEQVMRAYYGATEGGSNLTAYRGRMLSLFQVLEPGVSVSAQRLSDQVRVIQRNHMLDDTVLDRLRSESRSNLVTPASPMTAVQLQNVTIASPRSDRGGEGDDDEVISVSTQCNAQLRSALESAFREYRSTPPELRPRLPRLPMHKKNKALMCALDSQLSNCFDTSKDLADTHSILHCGAVAACHVAHVKFPNNDRATRPKLAVPAWQCRIERRIGEARALIGKLICFREGNTRPRVMRFVRRSFSGTDVNFRDYLARVTERIDFLKQKICAWASRIRRYKRRVERYTQNRTFQSDERWVYRAWERPDQGVTDTRLPDDNAMCSFWRSIWSVPVSHTEGDWIREVERACDPIPEMGAIIISPQDVACAVRPLPNWKSPGPDGLHNFWIKWFQRSHVRLASQFQLALESGSLPQFLTTGITHLLHKSGSTAEPKNYRPITCLPTVYKVLTSILRAKINHHIDSNSIMSASQNGCRNGSRGTKELLLIDMAVSQQVRRSRRDLSTCWIDYKKAYDSVPHTWLMRVLELYKVDATLRTFLTSCMGHWRTILRYPGCRQIQGNSEPIRIERGIFQGDSLSPLWFCIALNPLSTLLEGSGLGYRLRRDGQVISHLLYMDDLKLYAPNNLQLMKLLKVTETFSSSIRMEFGVDKCAVMHVKQGEIMESLGTQLSDSIHLRSLSSTETYKYLGMSEALGINAADMKQSLRERFFGRLNKVLSSLLSGGNKVRAFNGWVMPVLMYSFGILKWTQMELDALDRRVRVLLTANRMHHPRSSVMRLYIPRKCGGRGFLNVKTLHNREVCSLREYFLEADVGMHRDVVSVDKGLTPLSLANENWRKPRVLDTNDRKEVWQGKELHGRFYRALHGPDVDFLASVAWLRFGDLFGETEGFVCAIMDEVMMTNNYRKYIVKDGTVDICRACHRPGESIRHIISGCSRLANGEYLHRHNLVARIIHQQLALKYNLVESEVPYYKYVPDPVLDDGNITLYWDRSIVTDRTIVANKPDIVVIDRLERRAMIVDITVPHDENLVKAEKDKQFKYLDLAHEVVDIWDVSTAVIVPIVVSANGLIANTLDQHLRRLSLGSWIKGLIQKAVLLDTARIVRRFLSQEP

SEQ ID NO: 30604 - protein, 1203 aa, Noctua janthe
MLTRSRAKHQAHPPSPDSSLSSASQPPGRASIVSAVSPIAAVASSSSDEFFSPPSTPSPPRRRGRGRPPAGLGPRGQQAPNRVPAAGGNVSRMRWTQSINENVMRAYYGATEGGSNLTAYRGRMLSLFQVLEPGVSVSAQRLSDQVRVIQRNHMLDDTVLERLRFDSRSNLVIPASPMIAVQLQNVSSAPPRSEHDGEEDDDEVISVSTQCNAQLRSALEGAFREYRSTPPELRPRLPRLPMHKKNKALVCALDSQLSNCFDSSKDLADTHSILYCGAVAACRVAHVKFPNNDRATRPKFAVPAWQCRIERRIGEARALIGKLICFREGNTRPRVMRFVKRAFSGTDVSFRDYLARVTERIDFLKQKICAWASRIRRYKRRVERYTQNRTFRSDERWVYRAWERPDQGVTDTRLPNDDAMCSFWRNIWSVPVSHTEGDWTREVERACDPIPEMGAIIISPQDVARAVRPLPNWKSPGPDGLHNFWIKWFQRSHVRLASQFQSALESGSLPQFLTTGITHLLHKSGSTAEPKNYRPITCLPTVYKVLTSILRAKINHHIDSNSIMSASQNGCRNGSRGTKELLLIDMAISQQVRRSRRDLSTCWIDYKKAYDSVPHTWLMKVLELYKVDATLRTFLMSCMGHWRTVLRYPGCRQIQGNSEPIKIERGIFQGDSLSPLWFCLALNPLSTLLEGSGLGYRLRRGGQVISHLLYMDDLKLFAPNNLQLMKLLKVTETFSSAIRMEFGVDKCAVMHVKRGEIMESVGTQLSDSIHLRSLSSTETYKYLGMSEALGINTADMKQSLRDRFFGRLNKVLSSLLSGGNKVRAFNGWVMPVLMYSFGILKWTQTELDALDRRVRALLTANRMHHPRSSVMRLYIPRKCGGRGFLNAKTLHNREICSLREYFLEVDEGMHRDVVSVDKGLTPLSLANENWRKPRVLDTNDRKEVWQGKELHGRFYRALHGPDVDFLASVSWLRFGDLFGETEGFVCAIMDEVMMTNNYRKYIVKDGTVDICRACHRPGESIRHIISGCSRLANGEYLHRHNLVARIIHQQLALKYNLVESEVPYYKYAPDPVLDNGNITLYWDRSIITDRTIVANKPDIVVIDRLERRAIIVDITVPHDENLVKAEKDKQFKYLDLAREVVDMWDVSTAVIVPIVVSANGLIANSLDKHLRRLSLGSWIKGLIQKAVLLDTARIVRRFLSQEP

SEQ ID NO: 30605 - protein, 1203 aa, Noctua janthe
MLTRSRAKHQAHPPSPDSSLSSASQPPGRPSIVSAVSPIAAVASSSSDEFFSPPSTPSPPRRRGRGRPPAGLGPRGQQAPNRVPAAGGNVSRMRWTQSINENVMRAYYGATEGGSNLTAYRGRMLSLFQVLEPGVSVSAQRLSDQVRVIQRNHMLDDTVLERLRFDSRSNLVIPASPMIAVQLQNVSNAPPRSEHDGEEDDDEVISVSTQCNAQLRSALEGAFREYRSTPPELRPRLPRLPMHKKNKALVCALDSQLSNCFDSSKDLTDTHSILYCGAVAACRVAHVKFPNNDRATRPKFAVPAWQCRIERRIGEARALIGKLICFREDNTRPRVMRFVKRAFSGTDVSFRDYLARVTERIDFLKQKICAWASRIRRYKRRVERYTQNRTFRSDERWVYRAWERPDQGVTDTRLPDDDAMCSFWRNIWSVPVSHTEGDWTREVERACDSIPEMGAIIISPQDVARAVRPLPNWKSPGPDGLHNFWIKWFQRSHVRLASQFQSALESGSLPQFLTTGITHLLHKSGSTAEPKNYRPITCLPTVYKVLTSILRAKINHHIDSNSIMSASQNGCRNGSRGTKELLLIDMAISQQVRRSRRDLSTCWIDYKKAYDSVPHTWLMRVLELYKVDATLRTFLMSCIGHWRTVLRYPGCRQIQGNSEPIKIERGIFQGDSLSPLWFCLALNPLSTLLEGSGLGYRLRRGGQVISHLLYMDDLKLFAPNNLQLMKLLKVTETFSSAIRMEFGVDKCAVMHVKRGEIMESVGTQLSDSIHLRSLSSTETYKYLGMSEALGINTADMKQSLRDRFFGRLNKVLSSLLSGGNKVRAFNGWVMPVLMYSFGILKWTQTELDALDRRVRALLTANRMHHPRSSVMRLYIPRKCGGRGFLNAKTLHNREICSLREYFLEVDEGMHRDVVSVDKGLTPLSLANENWRKPRVLDTNDRKEVWQGKELHGRFYRALHGPDVDFLASVSWLRFGDLFGETEGFVCAIMDEVMMTNNYRKYIVKDGTVDICRACHRPGESIRHIISGCSRLANGEYLHRHNLVARIIHQQLALKYNLVESEVPYYKYAPDPVLDNGNITLYWDRSIITDRTIVANKPDIVVIDRLERRAMIVDITVPHDENLVKAEKDKQFKYLDLAREVVDMWDVSTAVIVPIVVSANGLIANSLDKHLRRLSLGSWIKGLIQKAVLLDTARIVRRFLSQEP

SEQ ID NO: 30606 - protein, 959 aa, Noctua janthe
MHKKNKALVCALDSQLSNCFDSSKDLTDTHSILYCGAVAACRVAHVKFPNNDRATRPKFAVPAWQCRIERRIGEARALIGKLICFREGNTRPRVMGFVKRAFSGTDVSFRDYLARVTERIDFLKQKICAWASRIRRYKRRVERYTQNRTFRSDERWVRERPDQGVTDTRLPDDDAMYSFGRNIWSVPVSHTEGDWTREVERACDPIPEMGAIIISPQDVARAVRPLPNWKSPGPDGLHNFWIKWFQRSHVRLASQFQSALESGSLPQFLTTGITHLLHKSGSTAEPKNYRPITCLPTVYKVLTSILRAKINHHIDSNSIMSASQNGCRNGSRGTKELLLIDMAISQQVRRSRRDLSTCWIDYKKAYDSVPHTWLMKVLELYKVDATLRTFLMSCMGHWRTVLRYPGCRQIQGNSEPIKIERGIFQGDSLSPLWFCLALNPLSTLLEGSGLGYRLRRGGQVISHLLYMDDLKLFAPNNLQLMKLLKVTETFSSAIRMEFGVDKCAVMHVKRGEIMESVGTQLSDSIHLRSLSSTETYKYLGMSEALGINTADMKQSLRDRFFGRLNKVLSSLLSGGNKVRALNGWVMPVLMYSFGILKWTQTELDALDRRVRALLTANRRHHPRSSVMRLYIPRKCGGRGFLNAKTLHNREICSLREYFLEVDEGMHRDVVSVDKGLTPLSLANENWRKPRVLDTNDRKEVWQGKELHGRFYRALHGPDVDFLASVSWLRFGDLFGETEGFVCAIMDEVMMTKNYRKYIVKDGTVDICRACHRPGESIRHIISGCSRLANGEYLHRHNLVARIIHQQLALKYNLVESEVPYYKYAPDPVLDNGNITLYWDRSIITDRTIVANKPDIVVIDRLERRAMIVDITVPHDENLVKAEKDKQFKYLDLAREVVDMWDVSTAVIVPIVVSANGLIANSLDKHLRRLSLGSWIKGLIQKAVLLDTARIVRRFLSQEP

SEQ ID NO: 30607 - protein, 1203 aa, Noctua janthe
MLTRSRAKHQAHPPSPDSSLSSASQPPGRASIVSAVSPIAAVASSSSDEFFSPPSTPSPPRRRGRGRPPAGLGPRGQQAPNRVPAAGGNVSRMRWTQSINENVMRAYYGATEGGSNLTAYRGRMLSLFQVLEPGVSVSAQRLSDQVRVIQRNHMLDDTVLERLRFDSRSNLVIPASPMIAVQLQNVSSAPPRSEHDGEEDDDEVISVSTQCNAQLRSALEGAFREYRSTPPELRPRLPRLPMHKKNKALVCALDSQLSNCFDSSKDLADTHSILYCGAVAACRVAHVKFPNNDRATRPKFAVPAWQCRIERRIGKARALIGKLICFREGNTRPRVLRFVKRAFSGTDVSFRDYLARVTERIDFLKQKICAWASRIRRYKRRVERYTQNRTFRSDERWVYRAWERPDQGVTDTRLPDDDTMCSFWRNIWSVPVSHTEGDWTREVERACDSIPEMGAIIISPQDVARAVRPLPNWKSPGPDGLHNFWIKWFQRSHVRLASQFQSALESGSLPQFLTTGITHLLHKSGSTAEPKNYRPITCLPTVYKVLTSILRAKINHHIDSNSIMSASQNGCRNGSRGTKELLLIDMAISQQVRRSRRDLSTCWIDYKKAYDSVPHTWLMKVLELYKVDATLRTFLMLCMGHWRTVLRYPGCRQIQGNSEPIKIERGIFQGDSLSPLWFCLALNPLSTLLEGSGLGYRLRRGGQVISHLLYMDDLKLFAPNNLQLMKLLKVTETFSSAIRMEFGVDKCAVMHVKRGEIMESVGTQLSDSIHLRSLSSTETYKYLGMSEALGINTADMKQSLRDRFFGRLNKVLSSLLSGGNKVRAFNGWVMPVLMYSFGILKWTQTELDALDRRVRALLTANRMHHPRSSVMRLYIPRKCGGRGFLNAKTLHNREICSLREYFLEVDEGMHRDVVSVDKGLTPLSLANENWRKPRVLDTNDRKEVWQGKELHGRFYRALHGPDVDFLASVSWLRFGDLFGETEGFVCAIMDEVMMTNNYRKYIVKDGTVDICRACHRPGESIRHIISGCSRLANGEYLHRHNLVARIIHQQLALKYNLVESEVPYYKYAPDPVLDNGNITLYWDRSIITDRTIVANKPDIVVIDRLERRAMIVDITVPHDENLVKAEKDKQFKYLDLAREVVDMWDVSTAVIVPIVVSANGLIANSLDKHLRRLSLGSWIKGLIQKAVLLDTARIVRRFLSQEP

SEQ ID NO: 30608 - protein, 1206 aa, Noctua fimbriata
MITRSRAKQLQEAHTPSPGSSLSSASQPPGRATSVSTVSSVAAVASSSSDEFFSPPSTPPPSPRRRGRGRPPAGLGPRGQPAPNRVPAAGGNVSRMRWTQSINEQVMRAYYGATEGGSNLTAYRGRMLSLFQVLEPGVSVSAQRLSDQVRVIQRNHMLDDTVLDRLRSESRSNLVTPASPMTAVQLQNVTIASPRSDRGGEGDDDEVISVSTQCNAQLRSALESAFREYRSTPPELRPRLPRLPMHKKNKALVCALDSQLSNCFDTSKDLADTHSILYCGAVAACRVAHVKFPNNDRATRPKLAVPAWQCRIERRIGEARALIGKLICFREGNTRPRVMRFVRRAFSGTDVSFRDYLARVTERIDFLKQKICAWASRIRRYKRRVERYTQNRTFQSDERWVYRAWERPDQGVTDTRLPDDNAMCSFWRSIWSVPVSHTEGDWIREVERACDPIPEMGAIIISPQDVACAVRPLPNWKSPGPDGLHNFWIKWFQRSHVRLASQFQLALESGSLPQFLTTGITHLLHKSGSTAEPKNYRPITCLPTVYKVLTSILRAKINHHIDSNSIMSASQNGCRNGSRGTKELLLIDMAVSQQVRRSRRDLSTCWIDYKKAYDSVPHTWLMRVLELYKVDATLRTFLMSCMGHWRTVLRYPGCRQIQGNSEPIRIERGIFQGDSLSPLWFCIALNPLSTLLEGSGLGYRLRRDGQVISHLLYMDDLKLYAPNNLQLMKLLKVTETFSSSIRMEFGVDKCAVMHVKQGEIMESVGTQLSDSIHLRSLSSTETYKYLGMSEALGINTADMKQSLRERFFGRLNKVLSSLLSGGNKVRAFNGWVMPVLMYSFGILKWTQTELDALDTRVRVLLTANRMHHPRSSVMRLYIPRKCGGRGFLNAKTLHNREVCSLREYFLEADVEMHRDVVSVDKGLTPLSLANENWRKPRVLDTNDRKEVWQGKELHGRFYRALHGPDVDFLASVAWLRFGDLFGETEGFVCAIMDEVMMTNNYRKYIVKDGTVDICRACHRPGESIRHIISGCSRLANGEYLHRHNLVARIIHQQLALKYNLVESEVPYYKYVPDPVLDDGNITLYWDRSIVTDRTIVANKPDIVVIDRLERRAMIVDITVPHDENLVKAEKDKQFKYLDLAHEVVDIWDVSTAVIVPIVVSANGLIANTLDQHLRRLSLGSWIKGLIQKAVLLDTARIVRRFLSQEP

SEQ ID NO: 30609 - protein, 1203 aa, Noctua janthe
MLTRSRAKHQAHPPSPDSSLSSASQPPGRASIVSAVSPIAAVASSSSDEFFSPPSTPSPPRRRGRGRPPAGLGPRGQQAPNRVPAAGGNVSRMRWTQSINENVMRAYYGATEGGSNLTAYRGRMLSLFQVLELGVSVSAQRLSDQVRVIQRNHMLDDTVLERLRFDSRSNLVIPASPMIAVQLQNVSSAPPRSEHDGEEDDDEVISVSTQCNAQLRSALEGAFREYRSTPPELRPRLPRLPMHKKNKALVCALDSQLSNCFDSSKDLTDTHSILYCGAVAACRVAHVKFPNNDRATRPKFAVPAWQCRIERRIGEARALIGKLICFREGNTRPRVMRFVKRAFSGTDVSFRDYLARVTERIDFLKQKICAWASRIRRYKRRVERYTQNRTFRSDERWVYRAWERPDQGVTDTRLPDDDAMCSFWHNIWSVPVSHTEGDWTREVERACDSIPEMGAIIISPQDVARAVRPLPNWKSPGPDGLHNFWIKWFQRSHVRLASQFQSALESGSLPQFLTTGITHLLHKSGSTAEPKNYRPITCLPTVYKVLTSILRAKINHHIDSNSIMSASQNGCRNGSRGTKELLLIDMAISQQVRRSRRDLSTCWIDYKKAYDSVPHAWLMKVLELYKVDATLRTFLMSCMGHWRTVLHYPGCRQIQGNSEPIKIERGIFQGDSLSPLWFCLALNPLSTLLEGSGLGYRLRRGGQVISHLLYMDDLKLFAPNNLQLMKLLKVTETFSSAIRMEFGVDKCAVMHVKRGEIMESVGTQLSDSIHLRSLSSTETYKYLGMSEALGINTADMKQSLRDRFFGRLNKVLSSLLSGGNKVRAFNGWVMPVLMYSFGILKWTQTELDALDRRVRALLTANRMHHPRSSVMRLYIPRKCGGRGFFNAKTLHNREICSLREYFLEVDEGMHRDVVSVDKGLTPLSLANENWRKPRVLDTNDRKEVWQGKELHGRFYRALHGPDVDFLASVSWLRFGDLFGETEGFVCAIMDEVMMTNNYRKYIVKDGTVDICRACHRPGESIRHIISGCSRLANGEYLHRHNLVARIIHQQLALKYNLVESEVPYYKYAPDPVLDNGNITLYWDRSIITDRTIVANKPDIVVIDRLERRAMIVDITVPHDENLVKAEKDKQFKYLDLAREVVDMWDVNTAVIVPIVVSANGLIANSLDKHLRRLSLGSWIKGLIQKAVLLDTARIVRRFLSQEP

SEQ ID NO: 30610 - protein, 1203 aa, Noctua janthe
MLTRSRAKHQAHPPSPDSSLSSASQPPGRASIVSAVSPIAAVASSSSDEFFSPPSTPSPPRRRGRGRPPAGLGPRGQQAPNRVPAAGGNVSRMRWTQSINENVMRAYYGATEGGSNLTAYRGRMLSLFQVLEPGVSVSAQRLSDQVRVIQRNHMLDDTVLERLRFDSRSNLVIPASPMIAVQLQNVSSAPPRSEHDGEEDDDEVISVTTQCNAQLRSALEGAFREYRSTPPELRPRLPRLPMHKKNKALVCALDSQLSNCFDSSKDLADTHSILYCGAVAACRVAHVKFPNNDRATRPKFAVPAWQCRIERRIGKARALIGKLICFREGNTRPRVLRFVKRAFSGTDVSFRDYLARVTERIDFLKQKICAWASRIRRYKRRVERYTQNRTFRSDERWVYRAWERPDQGVTDTRLPDDDAMCSFWRNIWSVPVGHTEGDWTREVERACDSIPEMGAIIISPQDVARAVRPLPNWKSPGPDGLHNFWIKWFQRSHVRLASQFQSALESGSLPQFLTTGITHLLHKSGSTAEPKNYRPITCLPTVYKVLTSILRAKINHHIDSNSIMSASQNGCRNGSRGTKELLLIDMAISQQVRRSRRDLSTCWIDYKKAYDSVPHTWLMKVLELYKVDATLRTFLMSCMGHWRTVLLYPGCRQIQGNSEPIKIERGIFQGDSLSPLWFCLALNPLSTLLEGSGLGYRLRRGGQVISHLLYMDDLKLFAPNNLQLMKLLKVTETFSSAIRMEFGVDKCAVMHVKREEIMESVGTQLSDSIHLRSLSSTETYKYLGMSEALGINTADMKQSLRDRFFGRLNKVLSSLLSGGNKVRAFNGWVMPVLMYSFGILKWTQTELDALDRRVRALLTANRMHHPRSSVMRLYIPRKCGGRGFLNAKTLHNREICSLREYFLEVDEGMHRDVVSVDKGLTPLSLANENWRKPRVLDTNDRKEVWQGKELHGRFYRALHGPDVDFLASVSWLRFGDLFGETEGFVCAIMDEVMMTNNYRKYIVKDGTVDICRACHRPGESIRHIISGCSRLANGEYLHRHNLVARIIHQQLALKYNLVESEVPYYKYAPDPVLDNGNITLYWDRSIITDRTIVANKPDIVVIDRLERRAMIVDITVPHDENLVKAEKDKQFKYLDLAREVVDMWDVSTAVIVPIVVSANGLIANSLDKHLRRLSLGSWIKGLIQKAVLLDTARIVRRFLSQEP

SEQ ID NO: 30611 - protein, 1203 aa, Noctua janthe
MLTRSRAKHQAHPPSPDSSLSSASQPPGRASIVSAVSPIAAVASSSSDEFFSPPSTPSPPRRRGRGRPPAGLGPRGQQAPNRVPAAGGNVSRMRWTQSINENVMRAYYGATEGGSNLTAYRGRMLSLFQVLEPRVSVSAQRLSDQVRVIQRNHMLDDTVLERLRFDSRSNLVIPASPMIAVQLQNVSSAPPRSEHDGEEDDDEVISVSTQCNAQLRSALEGAFREYRSTPPELRPRLPRLPMHKKNKALVCALDSQLSNCFDSSKDLADTHSILYCGAVAVCRVAHVKFPNNDRATRPKFAVPAWQCRIERRIGKARALIGKLICFREGNTRPRVLRFVKRAFSGTDVSFRDYLARVTERIDFLKQKICAWASRIRRYKRRVERYTQNRTFRSDERWVYRAWERPDQGVTDTRLPDDDAMCSFWRNIWSVPVSHTEGDWTREVERACDSIPEMGAIIISPQDVARAVRPLPNWKSPGPDGLHNFWIKWFQRSHARLASQFQSALESGSLPQFLTTGITHLLHKSGSTAEPKNYRPITCLPTVYKVLTSILRAKINHHIDSNSIMSASQNGCRNGSRGTKELLLIDMAISQQVRRSRRDLSTCWIDYKKAYDSVPHTWLMKVLELYKVDATLRTFLMSCMGHWRTVLRYPGCRQIQGNSEPIKIERGIFQGDSLSPLWFCLALNPLSTLLEGSGLGYRLRRGGQVISHLLYMDDLKLFAPNNLQLMKLLKVTETFSSAIRMEFGVDKCAVMHVKRGEIMESVGTQLSDSIHLRSLSSTETYKYLGMSEALGINTADMKKSLRDRFFGRLNKVLSSLLSGGNKVRAFNGWVMPVLMYSFGILKWTQTELDALDRRVRALLTANRMHHPRSSVMRLYIPRKCGGRGFLNAKTLHNREICSLREYFLEVDEGMHRDVVSVDKGLTPLSLANENWRKPRVLDTNDRKEVWQGKELHGRFYRALHGPDVDFLAFVSWLRFGDLFGETEGFVCAIMDEVMMTNNYRKYIVKDGTVDICRACHRPGESIRHIISGCSRLANGEYLHRHNLVARIIHQQLALKYNLVESEVPYYKYAPDPVLDNGNITLYWDRSIITDRTIVANKPDIVVIDRLERRAMIVDITVPHDENLVKAEKDKQFKYLDLAREVVDMWDVSTAVIVPIVVSANGLIANSLDKHLRRLSLGSWIKGLIQKAVLLDTARIVRRFLSQEP

SEQ ID NO: 30612 - protein, 1203 aa, Noctua fimbriata
MITRSRAKQLQEAHTPSPGSSLSSASQPPRRATSVSTVSPVAAVASSSSDEFFSPPSTPPPSPRRRGRGRPPAGLGPRGQPAPNRVPAAGGNVSRMRWTQSINEQVMRAYYGATEGGSNLTAYRGRMLSLFQVLEPGVSVSAQRLSDQVRVIQRNHMLDDTVLDRLRSESRSNLVTPASPMTAVQLQNVTIASPRSDRGGEGDDDEVISVSTQCNAQLRSALESAFREYRSTPPELRPRLPRLPMHKKNKALMCALDSQLSNCFDTSKDLADTHSILYCGAVAACRVAHVKFPNNDRATRPKLAVPAWQCRIERRIGEARALIGKLICFREGNTRPRVMRFVRRAFSGTDVNFRDYLARVTERIDFLKQKICAWASRIRRYKRRVERYTQNRTFQSDERWVYRAWERPDQGVTDTRLPDDNAMCSFWRSIWSVPVSHTEGDWIREVERACDPIPEMGAIIISPQDVACAVRPLPNWKSPGPDGLYNFWIKWFQRSHVRLASQFQLALESGSLPQFLTTGITHLLHKSGSTAEPKNYRPITCLPTVYKVLTSILRAKINHHIDSNSIMSASQNGCRNGSRGTKELLLIDMAVSQQVRRSRRDLSTCWIDYKKAYDSVPHTWLMRVLELYKVDATLRTFLTSCMGHWRTVLRYPGCRQIQGNSEPIRIERGIFQGDSLSPLWFCIALNPLSTLLEGSGLGYRLRRDGQVISHLLYMDDLKLYAPNNLQLMKLLKVTETFSSSIRMEFGVDKCAVMHVKQGEIMESLGTQLSDSIHLRSLSSTETYKYLGMSEALGINAADMKQSLRERFFGRLHKVLSSLLSGGNKVRAFNGWVMPVLMYSFGILKWTQMELDALDRRVRVLLTANRMHHPRSSVMRLYIPRKCGGRGFLNVKTLHNREVCSLREYFLEADVGMHRDVVSVDKGLTPLSLANENWRKPRVLDTNDRKEVWQGKELHGRFYRALHGPDVDFLASVAWLRFGDLFGETEGFVCAIMDEVMMTNNYRKYIVKDGTVDICRACHRPGESIRHIISGCSRLANGEYLHRHNLVARIIHQQLALKYNLVESEVPYYKYVPDPVLDDGNITLYWDRSIVTDRTIVANKPDIVVIDQLERRAMIVDITVPHDENLVKAEKDKQFKYLDLAHEVVDIWDVSTAVIVPIVVSANGLIANTLDQHLRRLSLGSWIKGLIQKAVLLDTARIVRRFLS

SEQ ID NO: 30613 - protein, 1203 aa, Noctua janthe
MLTRSRAKHQAHPPSPDSSLSSASQPPGRASIVSAVSPIAAVASSSSDEFFSPPSTPSPPRRRGRGRLPAGLGPRGQQAPNRVPAAGGNVSRMRWTQSINENVMRAYYGATEGGSNLTAYRGRMLSLFQVLEPGVSVSAQRLSDQVRVIQRNHMLDDTVLERLRFDSRSNLVIPASPMIAVQLQNVSSAPPRSEHDGEEDDDEVISVSTQCNAQLRSALEGAFREYRSTPPELRPRLPRLPMHKKNKALVCALDSQLSNCFDSSKDLTDTHSILYCGAVAACRVAHVKFPNNDRATRPKFAVPAWQCRIERRIGEARALIGKLICFREGNTRPRVMRFVKRAFSGTDVSFRDYLARVTERIDFLKQKICAWASRIRRYKRRVERYTQNRTFRSDERWVYRAWERPDQGVTDTRLPDDDAMCSFWRNIWSVPVSHTEGDWTREVERACDSIPEMGAIIISPQDVARAVRPLPNWKSPGPDGLHNFWIKWFQKSHVRLASQFQSALESGSLPQFLTTGITHLLHKSGSTAEPKNYRPITCLPTVYKVLTSILRAKINHHIDSNSIMSASQNGCRNGSRGTKELLLIDMAISQQVRRSRRDLSTCWIDYKKAYDSVPHTWLMKVLELYKVDATLRTFLMSCMGHWRTVLHYPGCRQIQGNSEPIKIERGIFQGDSLSPLWFCLALNPLSTLLEGSGLGYRLRRGGQVISHLLYMDDLKLFAPNNLQLMKLLKVTETFSSAIRMEFGVDKCAVMHVKRGEIMESVGTQLSDSIHLRSLSSTETYKYLGMSEALGINTADMKQSLRDRFFGRLNKVLSSLLSGGNKVRAFNGWVMPVLMYSFGILKWTQTELDALDRRVRALLTANRMHHPRSSVMRLYIPRKCGGRGFLNAKTLHNREICSLREYFLEVDEGMHRDVVSVDKGLTPLSLANENWRKPRVLDTNDRKEVWQGKELHGRFYRALHGPDVDFLASVSWLRFGDLFGETEGFVCAIMDEVMMTNNYRKYIVKDGTVDICRACHRPGESIRHIISGCSRLANGEYLHRHNLVARIIHQQLALKYNLVESEVPYYKYAPDPVLDNGNITLYWDRSIITDRTIVANKPDIVVIDRLERRAMIVDITVPHDENLVKAQKDKQFKYLDLAREVIDMWDVNTAVIVPIVVSANGLIANSLDKHLRRLSLGSWIKGLIQKAVLLDTARIVRRFLSQEP

SEQ ID NO: 30614 - protein, 1206 aa, Noctua fimbriata
MITRSRAKQLQEAHTPSPGSSLSSASQPPGRATSVSTVSPVAAVASSSSDEFFSPPSTPPPSPRRRGRGRPPAGLGPRGQPAPNRVPAAGGNVSRMRWTQSINEQVMRAYYGATEGGSNLTAYRGRMLSLFQVLEPGVSVSAQRLSDQVRVIQRNHMLDDTVLDRLRSESRSNLVTPASPMTAVQLQNVTIASPRSDRDGEGDDDEVISVSTQCNAQLRSALESAFREYRSTPPELRPRLPRLPMHKKNKALVCALDSQLSNCFDTSKDLADTHSILYCGAVAACRVAHVKFPNNDRATRPKLAVPAWQCRIERRIGEARALIGKLICFREGNTRPRVMRFVRRAFSGTDISFRDYLARVTERIDFLKQKICAWASRIRRYKRRVERYTQNRTFQSDERWVYRAWERPDQGVTDTRLPDDNAMCSFWRSIWSVPVSHTEGDCIREVERACDPIPEMGAIIISPQDVACAVRPLPNWKSPGPDGLHNFWIKWFQRSHVRLASQFQLALESGSLPQFLTTGITHLLHKSGSTAEPKNYRPITCLPTVYKVLTSILRAKINHNIDSNSIMSASQNGCRNGSRGTKELLLIDMAVSQQVRRSRRDLSTCWIDYKKAYDSVPQTWLMRVLELYKVEATLRTFLMSCMGHWRTVLRYPGCRQIQGNSEPIRIERGIFQGDSLSPLWFCIALNPLSTLLEGSGLGYRLRRDGQVISHLLYMDDLKLYAPNNLQLMKLLKVTETFSSSIRMEFGVDKCAVMHVKQGEIMESVGTQLSDSIHLRSLSSTETYKYLGMSEALGINTADMKQSLRERFFGRLNKVLSSLLSGGNKVRAFNGWVMPILMYSFGILKWTQTELDALDRRVRVLLTANRMHHPRSSVMRLYIPRKCGGRGFLNAQTLHNREVCSLREYFLEADVGMHRDVVSVDKGLTPLSLANENWRKPRVLDTNDRKEVWQGKELHGRFYRALHGPDVDFLASVAWLRFGDLFGETEGFVCAIMDEVMMTNNYRKYIVKDGTVDICRACHRPGESIRHIISGCSRLANGEYLHRHNLVAKIIHQQLALKYNLVESEVPYYKYVPDPVLDDGNITLYWDRSIVTDRTIVANKPDIVVVDRLERRAMIVDITVPHDENLVKAEKDKQFKYLDLAHEVVDIWNVSTAVIVPIVVSANGLIANTLDQHLRRLSLGSWIKGLIQKAVLLDTARIVRRFLSQEP

SEQ ID NO: 30615 - protein, 1203 aa, Noctua janthe
MLTRSRAKHQAHPPSPDSSLSSASQPPGRPSIVSAVSPIAAVASSSSDEFFSPPSTPSPPRRRGRGRPPAGLGPRGQQAPNRVPAAGGNVSRMRWTQSINENVMRAYYGATEGGSNLTAYRGRMLSLFQVLEPGVNVSAQRLSDQVRVIQRNHMLDDTVLERLRFDSRSNLVIPASPMIAVQLQNVSSAPPRSEHDGEEDDDEFISVSTQCNAQLRSALEGAFREYRSTPPELRPRLPRLPMHKKNKALVCALDSQLSNCFDSSKDLADTHSILYCGAVAACRVAHVKFPNNDRATRPKFSVPAWQCRIERRIGKARALIGKLICFREGNTRPRVLRFVKRAFSGTDVSFRDYLARVTERIDFLKQKICAWASRIRRYKRRVERYTQNRTFRSDERWVYRAWERPDQGVTDTRLPDDDAMCSFWRNIWSVPVSHTEGDWTREVERACDSIPEMGAIIISPQDVARAVRPLPNWKSPGPDGLHNFWIKWFQRSHVRLASQFQSALESGSLPQFLTTGITHLLHKSGSTAEPKNYRPITCLPTVYKVLTSILRAKINHHIDSNSIMSASQNGCRNGSRGTKELLLIDMAISQQVHRSRRDLSTCWIDYKKAYDSVPHTWLMKVLELYKVDATLRTFLMSCMGHWRTVLRYPGCRQIQGNSEPIKIERGIFQGDSLSPLWFCLALNPLSTLLEGSGLGYRLRRGGQVISHLLYMDDLKLFAPNNLQLMKLLKVTETFSSAIRMEFGVDKCAVMHVKRGEIMESVGTQLSDSIHLRSLSSTETYKYLGMSEALGINTADMKQSLRDRFFGRLNKVLSSLLSGGNKVRAFNGWVMPVLMYSFGILKWTQTELDALDRRVRALLTANRMHHPRSSVMRLYIPRKCGGRGFLNAKTLHNRKICSLREYFLEVDEGMHRDVVSVDKGLTPLSLANENWRKPRVLDTNDRKEVWQGKELHGRFYRALHGPDVDFLASVSWLRFGDLFGETEGFVCAIMDEVMMTNNYRKYIVKDGTVDICRACHRPGESIRHIISGCSRLANGEYLHRHNLVARIIHQQLALKYNLVESEVPYYKYAPDPVLDNGNITLYWDRSIITDRTIVANKPDIVVIDRLERRAMIVDITVPLDENLVKAEKDKQFKYLDLAREVVDMWDVSTAVIVPIVVSANGLIANSLDKHLRRLSLGSWIKGLIQKAVLLDTARIVRRFLSQEP

SEQ ID NO: 30616 - protein, 1080 aa, Noctua janthe
MFSLFQVLEPGVSVSAQRLSDQVRVIQRNHMLDDTVLERLRFDSRSNLVIPASPMIAVQLQNVSSAPPRSEHDGEEDDDEVISVSTQCNAQLRSALEGAFREYRSTPPELRPRLPRLPMHKKNKALVCALDSQLSNCFDSSKDLADTHSILYCGAVAACRVAHVKFPNNDRATRPKFAVPAWQCRIERRIGKARALIGKLICFREGNTRPRVLRFVKRAFSGTDVSFRDYLARVTERIDFLKQKICAWASRIRRYKRRVERYTQNRTFRSDERWVYRAWERPDQGVTDTRLPDDDAMCSFWRNIWSVPVSHTEGDWTREVERACDSIPEMGAIIISPQDVARAVRPLPNWKSPGPDGLHNFWIKWFQRSHVRLASQFQSALESGSLPQFLTTGITHLLHKSGSTAEPKNYRPITCLPTVYKVLTSILRAKINHHIDSNSIMSASQNGCRNRSRGTKELLLIDMAISQQVRRSRRDLSTCWIDYKKAYDSVPHTWLMRVLELYKVDATLRTFLMSCMGHWRTVLRYPGCRQIQGNSEPIKIERGIFQGDSLSPLWFCLALNPLSTLLEGSGLGYRLRRGGQVISHLLYMDDLKLFAPNNLQLMKLLKVTETFSSAIRMEFGVDKCAVMHVKRGEIMESVGTQLSDSIHLRSLSSTETYKYLGMSEALGINTADMKQSLRDRFFGRLNKVLSSLLSGGNKVRAFNGWVMPVLMYSLGILKWTQTELDALDRRVRALLTANRMHHPRSSVMRLYIPRKCGGRGFLNAKTLHNREICSLREYFLEVDEGMHRDVVSVDKGLTPLSLANENWRKPRVLDTNDRKEVWQGKELHGRFYRALHGPDVDFLASVSWLRFGDLFGETEGFVCAIMDEVMMTNNYRKYIVKDGTVDICRACHRPGESIRHIISGCSRLANGEYLHRHNLVARIIHQQLALKYNLVESEVPYYKYAPDPVLDNGNITLYWDRSIITDRTIVANKPDIVVIDRLERRAMIVDITVPHDENLVKAEKDKQFKYLDLAREVVDMWDVSTAVIVPIVVSANGLIANSLDKHLRRLSLGSWIKGLIQKAVLLDTARIVRRFLSQEP

SEQ ID NO: 30617 - protein, 1203 aa, Noctua janthe
MLTRSRAKHQAHPPSPDSSLSSASQPPGRASIVSAVSPIAAVASSSSDEFFSPPSTPSPPRRRGRGRPPAGLGPRGQQAPNRVPAAGGNVSRMRWTQSINENVMRAYYGATEGGSNLTAYRGRMLSLFQVLEPGVSVSAQRLSDQVRVIQRNHMLDDTVLERLRFDSRSNLVIPASPMIAVQLQNVSSAPPRSEHDGEEDDDEVISVSTQCNAQLRSALEGAFREYRSTPPELRPRLPRLPMHKKNKALVCALDSQLSNCFDSSKDLADTHSILYCGAVAACRVAHVKFPNNDRATRPKFAVPAWQCRIERRIGKARALIGKLICFREGNTRPRVLRFVKRAFSGTDVSFRDYLARVTERIDFLKQKICAWASRIRRYKRRVERYTQNRTFRSDERWVYRAWERPDQGVTDTRLPDDDAMCSFWRNIWSVPVSRTEGDWTREVERACDSIPEMGAIIISPQDVARAVRPLPNWKSPGPDGLHNFWIKWFQRSHVRLASQFQSALESGSLPQFLTTGITHLLHKSGSTAEPKNYRPITCLPTVYKVLTSILRAKINHHIDSNSIMSASQNGCRNGSRGTKELLLIDMAISQQVRRSRRDLSTCWIDYKKAYDSVPHTWLMKVLELYKVDATLRTFLMSCMGHWRTVLRYPGCRQIQGNSEPIKIERGIFQGDSLSPLWFCLALNPLSTLLEGSGLGYRLRRGGQVISHLLYMDDLKLFAPNNLQLMKLLKVTETFSSAIRMEFGVDKCAVMHVKRGEIMESVGTQLSDSIHLRSLSSTETYKYLGMSEALGINTADMKQSLRDRFFGRLNKVLSSLLSGGNKVRAFNGWVMPVLMYSFGILKWTQTELDALDRRVRALLTANRMHHPRSSVMRLYIPRKCGGRGFLNAKTLHNREICSLREYFLEVDEGMHRDVVSVDKGLTPLSLANENWRKPRVLDTNDRKEVWQGKELHGRFYRALHGPDVDFLASVSWLRFGDLFGETEGFVCAIMDEVMMTNNYRKYIVKDGTVDICRACHRPGESIRHIISGCSRLANGEYLHRHNLVARIIHQQLALKYNLVESEVPYYKYAPDPVLDNGNITLYWDRSIITDRTIVANKPDIVVMDRLERRAMIVDITVPHDENLVKAEKDKQFKYLDLAREVVDMWDVSTAVIVPIVVSANGLIANSLDKHLRRLSLGSWIKGLIQKAVLLDTARIVRRFLSQEP

SEQ ID NO: 30618 - protein, 1110 aa, Ochropleura plecta
MRWTQSINENVMRAYYGATEGGSNLTAYRGRMLSLFQVLEPAVSVSAQRLSDQVRVIQRNHMLDDTVLDRLRLQSRSNLVMPASPVVAVHGDVSSAPLQSNRGSEEDDDEVISVSTQCNIQLRSALEVAFREYRSTLPELRPRLPRLPMHKKNKALVCALDSLLANCFDSSKDLADTHSILYCAAVAACRVANVKFPNNDRATRPKLSVPAWQCRIERRIGEARALIGKLICFREGNTRPRVMRFVRRAFSGTDTSSRDYLARVTERIDFLKQKISAWASRIRRFKRRVERYTQNRTFQSDERWVYRAWERPDQGVADTCLPDDDAMSSFWRSIWSVPVSHTEGDWTREIERACDPIPDMGAIIISPQDVARAVRPLPNWKSPGPDGLQNFWIKWFQRSHARLASQFQSALESGSLPQFLTTGITHLLHKSGSTTEPKNYRPITCLPTIYKVLTSILRGKINQHIESNSIMSPSQNGCRNGSRGTKELLLIDMAISQQVRRSRRNLSTCWIDYKKAYDSVPHTWLMRVLELYKVDATLRTFLMSCMGHWRTVLRYPGCRQMQRNSEPIRIERGIFQGDSLSPLWFCLALNPLSTLLEGSGLGYRLRRGGQVISHLLYMDDLKLVAPNNLQLMKLLKVTETFSSSIRMEFGVEKCAVMHVKRGEIMESAGIQLSDSIHLRSLSSTETYKYLGMSEALGINTADMKQSLKVRFFGRLNKVLSSLLSGGNKVRAFNGWVMPVLMYSFGILKWTQTELDALDRRVRTLLTANRMHHPRSSVMRLYIPRKCGGRGFLNAKTLHNREVCSLREYFLGTDVEMHRDVVSVDKGLTPLSLANENWRKPKVLDTNDRKEVWQSKELHGRFYRALHGPDVDFSASVSWLRFGNLFGETEGFVCAIMDEVMMTNNYRKYIVKDGTVDICRACCRPGESIRHIISGCSRLANGEYLHRHNLVARIIHQQLALKYNLVESEVPYYKYVPDPVLEDGNISLYWDRSIVTDRTIVANKPDIVVIDRLERRAMIVDITVPHDENLVKAEKDKQFKYLDLAREVVDMWHVNTAVIVPIVVSANGLIANSLDQHLRRLSLGSWIKGLIQKAVLLDTARIVRRFLSQES

SEQ ID NO: 30619 - protein, 1203 aa, Noctua janthe
MLTRSRAKHQAHPPSPDSSLSSASQPPGRASIVSAVSPIAAVASSSSDEFFSPPSTPSPPRRRGRGRPPAGLGPRGQQAPNRVPAAGGNVSRMRWTQSINENVMRAYYGATEGGSNLTAYRGRMLSLFQVLEPGVSVSAQRLSDQVRVIQRNHMLDDTVLERLRFDSRSNLVIPASPMIAVQLQNVSSAPPRSEHDGEEDDDEVISVSTQCNAQLRSALEGAFREYRSTPPELRPRLPRLPMHKKNKALVCALDSQLSNCFDSSKDLADTHSILYCGAVAACRVAHVKFPNNDRATRPKFAVPAWQCRIERRIGEARALIGKLICFREGNTRPRVMRFVKRAFSGTDVSFRDYLARVTERIDFLKQKICAWASRIRRYKRRVERYTQNRTFRSDERWVYRAWERPDQGVTDTRLPNDDAMCSFWRNIWSVPVSHTEGDWTREVERACDPIPEMGAIIISPQDVARAVRPLPNWKSPGPDGLHNFWIKWFQRSHVRLASQFQSALESGSLPQFLTTGITHLLHKSGSTAEPKNYRPITCLPTVYKVLTSILRAKINHHIDSNSIMSASQNGCRNGSRGTKELLLIDMAISQQVRRSRRDLSTCWIDYKKAYDSVPHTWLMKVLELYKVDATLRTFLMSCMGHWRTVLRYPGCRQIQGNSEPIKIERGIFQGDSLSPLWFCLALNPLSTLLEGSGLGYRLRRGGQVISHLLYMDDLKLFAPNNLQLMKLLKVTETFSSAIRMEFGVDKCAVMHVKRGEIMESVGTQLSDSIHLRSLSSTETYKYLGMSEALGINTADMKQSLRDRFFGRLNKVLSSLLSGGNKVRAFNGWVMPVLMYSFGILKWTQTELDALDRRVRALLTANRMHHPRSSVMRLYIPRKCGGRGFLNAKTLHNREICSLREYFLEVDEGMHRDVVSVDKGLTPLSLANENWRKPRVLDTNDRKEVWQGKELHGRFYRALHGPDVDFLASVSWLRFGDLFGETEGFVCAIMDEVMMTNNYRKYIVKDGTVDICRACHRPGESIRHIISGCSRLANGEYLHRHNLVARIIHQQLALKYNLVESEVPYYKYAPDPVLDNGNITLYWDRSIITDRTIVANKPDIVVIDRLERRAMIVDITVPHDENLVKAEKDKQFKYLDLAREVVDMWDVSTAVIVPIVVSANGLIANSLDKHLRRLSLGSWIKGLIQKAVLLDTARIVRRFLSQEP

SEQ ID NO: 30620 - protein, 1203 aa, Noctua janthe
MLTRSRAKHQAHPPSPDSSLSSASQPPGRPSIVSAVSPIAAVASSSSDEFFSPPSTPSPPRRRGRGRPPAGLGPRGQQAPNRVPAAGGNVSRMRWTQSINENVMRAYYGATEGGSNLTAYRGRMLSLFQVLEPGVSVSAQRLSDQVRVIQRNHMLDDTVLERLRFDSRSNLVIPASPMIAVQLQNVSSAPPRSEHDGEEDDDEVISVSTQCNAQLRSALEGAFREYRSTPPELRPRLPRLPMHKKNKALVCALDSQLSNCFDSSKDLADTHSILYCGAVAACRVAHVKFPNNDRATRPKFAVPAWQCRIERRIGKARALIGKLICFREGNTRPRVLRFVKRAFSGTDVSFRDYLARVTERIDFLKQKICAWASRIRRYKRRVERYTQNRTFRSDERWVYRAWERPDQGVTDTRLPDDDAMCSFWRNIWSVPVSHTEGDWTREVERACDSIPEMGAIIISPQDVARAVRPLPNWKSPGPDGLHNFWIKWFQRSHVRLASQFQSALESGSLPQFLTTGITHLLHKSGSTAEPKNYRPITCLPTVYKVLTSILRAKINHHIDSNSIMSASQNGCRNGSRGTKELLLIDMAISQQVRRSRRDLSTCWIDYKKAYDSVPHTWLMRVLELYKVDATLRTFLMSCMGHWRTVLRYPGCRQIQGNSEPIKIERGIFQGDSLSPLWFCLALNPLSTLLEGSGLGYRLRRGGQVISHLLYMDDLKLFAPNNLQLMKLLKVTETFSSAIRMEFGVDKCAVMHVKRGKIMESVGTQLSDSIHLRSLSSTETYKYLGMSEAFGINTADMKQSLRDRFFGRLNKVLSSLLSGGNKVRAFNGWVMPVLMYSFGILKWTQTELDALDRRVRALLTANRMHHPRSSVMRLYIPRKCGGRGFLNAKTLHNREICSLREYFLEVDEGMHRDVVSVDKGLTPLSLANENWRKPRVLDTNDRKEVWQGKELHGRFYRALHGPDVDFLASVSWLRFGDLFGETEGFVCAIMDEVMMTNNYRKYIVKDGTVDICRACHRPGESIRHIISGCSRLANGEYLHRHNLVARIIHQQLALKYNLVESEVPYYKYAPDPVLDNGNITLYWDRSIITDRTIVANKPDIVVIDRLERRAMIVDITVPHDENLVKAEKDKQFKYLDLAREVVDMWDVSTAVIVPIVVSANGLIANSLDKHLRRLSLGSWIKGLIQKAVLLDTARIVRRFLSQEP

SEQ ID NO: 30621 - protein, 1203 aa, Noctua janthe
MLTRSRAKHQAHPPSPDSSLSSASQPPGRPSIVSAVSPIAAVASSSSDEFFSPPSTPSPPRRRGRGRPPAGLGPRGQQAPNRVPAAGGNVSRMRWTQSINENVMRAYYGATEGGSNLTAYRGLMLSLFQVLEPGVSVSAQRLSDQVRVIQRNHMLDDTVLERLRFDSRSNLVIPASPMIAVQLQNVSSAPPRSEHDGEEDDDEVISVSTQCNAQLRSALEGAFREYRSTPPELRPRLPRLPMHKKNKALVCALDSQLSNCFDSSKDLADTHSILYCGAVAACRVAHVKFPNNDRATRPKFAVPAWQCRIERRIGKARALIGKLICFREGNTRPRVLRFVKRAFSGTDVSFRDYLARVTERIDFLKQKICAWASRIRRYKRRVERYTQNRTFRSDERWVYRAWERPDQGVTDTRLPDDDAMCSFWRNIWSVPVSHTEGDWTREVERACDSIPEMRAIIISPQDVARAVRPLPNWKSPGPDGLHNFWIKWFQRSHVRLASQFQSALESGSLPQFMTTGITHLLHKSGSTAEPKNYRPITCLPTVYKVLTSILRAKINHHIDSNSIMSAYQNGCRNGSRGTKELLLIDMAISQQVRRSRRDLSTCWIDYKKAYDSVPHTWLMRVLELYKVDATLRTFLMSCMGHWRTVLRYPGCRQIQGNSEPIKIERGIFQGDSLSPLWFCLALNPLSTLLEGSGLGYRLRRGGQVISHLLYMDDLKLFAPNNLQLMKLLKVTETFSSAIRMEFGVDKCAVMHVKRGEIMESVGTQLSDSIHLRSLSSTETYKYLGMSEALGINTADMKQSLRDRFFGRLNKVLSSLLSGGNKVRAFNGWVMPVLMYSFGILKWTQTELDALDRRVRALLTANRMHHPRSSVMRLYIPRKCGGRGFLNAKTLHNREICSLREYFLEVDEGMHRDVVSVDKGLTPLSLANENWHKPRVLDTNDRKEVWQGKELHGRFYRALHGPDVDFLASVSWLRFGDLFGETEGFVCAIMDEVMMTNNYRKYIVKDGTVDICRACHRPGESIRHIISGCSRLANGEYLHRHNLVARIIHQQLALKYNLVESEVPYYKYAPDPVLDNGNITLYWDRSIITDRTIVANKPDIVVIDRLERRAMIVDITVPHDENLVKAEKDKQFKYLDLAREVVDMWDVSTAVIVPIVVSANGLIANSLDKHLRRLSLGSWIKGLIQKAVLLDTARIVRRFLSQEP

SEQ ID NO: 30622 - protein, 1203 aa, Noctua janthe
MLTRSRAKHQAHPPSPDSSLSSASQPPGRASIVSAVSPIAAVASSSSDEFFSPPSTPSPPRRRGRGRPPAGLGPRGQQAPNRVPAAGGNVSRMRWTQSINENVMRAYYGATEGGSNLTAYRGRMLSLFQVLEPGVSVSAQRLSDQVRVIQRNHMLDDTVLERLRFDSRSNLVIPASPMIAVQLQNVSSAPPRSEHDGEEDDDEVISVSTQCNAQLRSALEGAFREYRSTPPELRPRLPRLPMHKKNKALVCALDSQLSNCFDSSKDLADTHSILYCGAVAACRVAHVKFPNNDRATRPKFAVPAWQCRIERRIGKARALIGKLICFREGNTRPRVLRFVKRAFSGTDVSFRDYLARVTERIDFLKQKICAWASRIRRYKRRVERYTQNRTFRSDERWVYRAWERPDQGVTDTRLPDDDAMCSFWRNIWSVPVSHTEGDWTREVERACDSIPEMGAIIISPQDVARAVRPLPNWKSPGPDGLHNFWIKWFQRSHVRLASQFRSALESGSLPQFLTTGITHLLHKSGSTAEPKNYRPITCLPTVYKVLTSILRAKINHHIDSNSIMSASQNGCRNGSRGTKELLLIDMAISQQVRRSRRDLSTCWIDYKKAYDSVPHTWLMKVLELYKVDATLRTFLMSCMGHWRTVLRYPGCRQIQGNSEPIKIERGIFQGDSLSPLWFCLALNPLSTLLEGSGLGYRLRRGGQVISHLLYMDDLKLFAPNNLQLMKLLKVTETFSSAIRMEFGVDKCAVMHVKRGEIMESVGTQLSDSIHLRSLSSTETYKYLGMSEALGINTADMKQSLRDRFFGRLNKVLSSLLSGGNKVRAFNGWVMPVLMYSFGILKWTQTELDALDRRVRALLTANRMHHPRSSVMRLYIPRKCGGRGFLNAKTLHNREICSLREYFLEVDEGMHRDVVSVDKGLTPLSLANENWRKPRVLDTNDRKEVWQGKELHGRFYRALHGPDVDFLASVSWLRFGDLFGETEGFVCAIMDEVMMTNNYRKYIVKDGTVDICRACHRPGESIRHIISGCSRLANGEYLHRHNLVARIIHQQLALKYNLVESEVPYYKYAPDPVLDNGNITLYWDRSIITDRTIVANKPDIVVIDRLERRAMIVDITVPHDENLVKAEKDKQFKYLDLAREVVDMWDVSTAVIVPIVVSANGLIANSLDKHLRRLSLGSWIKGLIQKAVLLDTARIVRRFLSQEP

SEQ ID NO: 30623 - protein, 1203 aa, Noctua janthe
MLTRSRAKHQAHPPSPDSSLSSASQPPGRASIVSAVSPIAAVASSSSDEFFSPPSTPSPPRRRGRGRPPAGLGPRGQQAPNRVPAAGGNVSRMRWTQSINENVMRAYYGATEGGSNLTAYRGRMLSLFQVLEPCVSVSAQRLSDQVRVIQRNHMLDDTVLERLRFDSRSNLVIPASPMIAVQLQNVSSAPPRSEHDGEEDDDEVISVSTQCNAQLRSALEGAFREYRSTPPELRPRLPRLPMHKKNKALVCALDSQLSNCFDSSKDLADTHSILYCGAVAACRVAHVKFPNNDRATRPKFAVPAWQCRIERRIGKARALIGKLICFREGNTRPRVLRFVKRAFSGTDVSFRDYLARVTERIDFLKQKICAWASRIRRYKRRVERYTQNRTFRSDERWVYRAWERPDQGVTDTRLPDDDAMCSFWRNIWSVPVSHTEGDWTREVERACDSIPEMGAIITSPQDVARAVRPLPNWKSPGPDGLHNFWIKWFQRSHVRLASQFQSALESGSLPQFLTTGITHLLHKSGSTAEPKNYRPITCLPTVYKVLTSILRAKINHHIDSNSIMSASQNGCRNGSRGTKELLLIDMAISQQVRRSRRDLSTCWIDYKKAYDSVPHTWLMKVLELYKVDATLRTFLMSCMGHWRTVLRYPGCRQIQGNSEPIKIERGIFQGDSLSPLWFCLALNPLSTLLEGSGLGYRLRRGGQVISHLLYMDDLKLFAPNNLQLMKLLKVTETFSSAIRMEFGVDKCAVMHVKRGEIMESVGTQLSDSIHLRSLSSTETYKYLGMSEALGINTADMKQSLRDRFFGRLNKVLSSLLSGGNKVRAFNGWVMPVLMYSFGILKWTQTELDALDRRVRALLTANRMHHPRSSVMRLYIPRKCGGRGFLNAKTLHNREICSLREYFLEVDEGMHRDVVSVDKGLTPLSLANENWRKPRVLDTNDRKEVWQGKELHGRFYRALHGPDVDFLASVSWLRFGDLFGETEGFVCAIMDEVMMTNNYRKYIVKDGTVDICRACHRPGESIRHIISGCSRLANGEYLHRHNLVARIIHQQLALKYNLVESEVPYYKYAPDPVLDNGNITLYWDRSIITDRTIVANKPDIVVIDRLERRAMIVDITVPHDENLVKAEKDKQFKYLDLAREVVDMWDVSTAVIVPIVVSANGLIANSLDKHLRRLSLGSWIKGLIQKAVLLDTARIVRRFLSQEP

SEQ ID NO: 30624 - protein, 1111 aa, Noctua janthe
MRWTQSINENVMRAYYGATEGGSNLTAYRGRMLSLFQVLEPGVSVSAQRLSDQVRVIQRNHMLDDTVLERLRFDSRSNLVIPASPMIAVQLQNVSSAPPRSEHDGEEDDDEVISVSTQCNAQLRSALEGAFREYRSTPPELRPRLPRLPMHKKNKALVCALDSQLSNCFDSSKDLADTHSILYCGAVAACRVAHVKFPNNDRATRPKFAVPAWQCRIERRIGKARALIGKLICFREGNTRPRVLRFVKRAFSGTDVSFRDYLARVTERIDFLKQKICAWASRIRRYKRRVERYTQNRTFRSDERWVYRAWERPDQGVTDTRLPDDDAMCSFWRNIWSVPVSHTEGDWTREVERACDSIPEMGAIIISPQDVARAVRPLPNWKSPGPDGLHNFWIKWFQRSHVRLASQFQSALESGSLPQFLTTGITHLLHKSGSTAEPKNYRPITCLPTVYKVLTSILRAKINHHIDSNSIMSASQNGCRNGSRGTKELLLIDMAISQQVRRSRRDLSTCWIDYKKAYDSVPHTWLMRVLELYKVDATLRTFLMSCMGHWRTVLRYPGCRQIQGNSEPIKIERGIFQGDSLSPLWFCLALNPLSTLLEGSGLGYRLRRGGQVISHLLYMDDLKLFAPNNLQLMKLLKVTETFSSAIRMEFGVDKCAVMHVKRGEIMESVGTQLSDSIHLRSLSSTETYKYLGMSEALGINTADMKQSLRDRFFGRLNKVLSSLLSGGNKVRAFNGWVMPVLMYSFGILKWTQTELDALDRRVRALLTANRMHHPRSSVMRLYIPRKCGGRGFLNAKTLHNREICSLREYFLEVDEGMHRDVVSVDKGLTPLSLANENWRKPRVLDTNDRKEVWQGKQLHGRFYRALHGPDVDFLASVSWLRFGDLFGETEGFVCAIMDEVMMTNNYRKYIVKDGTVDICRACHRPGESIRHIISGCSRLANGEYLHRHNLVARIIHQQLALKYNLVESEVPYYKYAPDPVLDNGNITLYWDRSIITDRTIVANKPDIVVIDRLERRAMIVDITVPHDENLVKAEKDKQFKYLDLAREVVDMWDVSTAVIVPIVVSANGLIANSLDKHLRRLSLGSWIKGLIQKAVLLDTARIVRRFLSQEP

SEQ ID NO: 30625 - protein, 1109 aa, Noctua janthe
MDSVHYENVMRAYYGATEGGSNLTAYRGRMLSLFQVLEPGVSVSAQRLSDQVRVIQRNHMLDDTVLERLRFDSRSNLVIPASPMIAVQLQNVSSAPPRSEHDGEEDDDEVISVSTQCNAQLRSALEGAFREYRSTPPELRPRLPRLPMHKKNKALVCALDSQLSNCFDSSKDLADTHSILYCGAVAACRVAHVKFPNNDRATRPKFAVPAWQCRIERRIGEARALIGKLICFREGNTRPRVMRFVKRAFSGTDVSFRDYLARVTKRIDFLKQKICAWASRIRRYKRRVERYTQNRTFRSDERWVYRAWERPDQSVTDTRLPDDDAMCSFWRNIWSVPVSHTEGDWTREVERACDSIPEMGAIIISPQDVARAVRPLPNWKSPGPDGLHNFWIKWFQRSHVRLASQFQSALESGSLPQFLTTGITHLLHKSGSTAEPKNYRPITCLPTVYKVLTSILRAKINHHIDSNSIMSASQNGCRNGSRGTKELLLIDMAISQQVRRSRRDLSTCWIDYKKAYDSVPHTWLMKVLELYKVDATLRTFLMSCMGHWRTVLRYPGCRQIQGNSEPIKIERGIFQGDSLSPLWFCLALNPLSTLLEGSGLGYRLRRGGQVISHLLYMDDLKLFAPNNLQLMKLLKVTETFSSAIRMEFGVDKCAVMHVKRGEIMESVGTQLSDSIHLRSLSSTETYKYLGMSEALGINTADMKQSLRDRFFGRLNKVLSSLLSGGNKVRAFNGWVMPVLMYSFGILKWTQTELDALDRRVRALLTANRMHHPRSSVMRLYIPRKCGGRGFLNAKTLHNREICSLREYFLEVDEGMHRDVVSVDKGLTPLSLANENWRKPRVLDTNDRKEVWQGKELHGRFYRALHGPDVDFLASVSWLRFGDLFGETEGFVCAIMDEVMMTNNYRKYIVKDGTVDICRACHRPGESIRHIISGCSRLANGEYLHRHNLVARIIHQQLALKYNLVESEVPYYKYAPDPVLDNGNITLYWDRSIITDRTIVANKPDIVVMDRLERRAMIVDITVPHDENLVKAEKDKQFKYLDLAREVVDMWDVSTAVIVPIVVSANGLIANSLDKHLRRLSLGSWIKGLIQKAVLLDTARIVRRFLSQEP

SEQ ID NO: 30626 - protein, 1111 aa, Noctua janthe
MRWTQSINENVMRAYYGATEGGNNLTAYRGRMLSLFQVLEPGVSVSAQRLSDQVRVIQRNHMLDDTVLERLRFDSRSNLVIPASPMIAVQLQNVSSAPPRSEHDGEEDDDEVISVSTQCNAQLRSALEGAFREYRSTPPELRPRLPRLPMHKKNKALVCALDSQLSNCFDSSKDLADTHSILYCGAVAACRVAHVKFPNNDRATRPKFAVPAWQCRIERRIGKARALIGKLICFREGNTRPRVLRFVKRAFSGTDVSFRDYLARVTERIDFLKQKICAWASRIRRYKRRVERYTQNRTFRSDERWVYRAWERPDQGVTDTRLPDDDAMCSFWRNIWSVPVSHTEGDWTREVERACDSIPEMGAIIISPQDVARAVRPLPNWKSPGPDGLHNFWIKWFQRSHVRLSSQFQSALESGSLPQFLTTGITHLLHKSGSTAEPKNYRPITCLPTVYKVLTSILRAKINHHIHSNSIMSASQNGCRNGSRGTKELLLIDMAISQQVRRSRRDLSTCWIDYKKAYDSVPHTWLMKVLELYKVDATLRTFLMSCMGHWRTVLRYPGCRQIQGNSEPIKIERGIFQGDSLSPLWFCLALNPLSTLLEGSGLGYRLRRGGQVISHLLYMDDLKLFAPNNLQLMKLLKVTETFSSAIRMEFGVDKCAVMHVKRGEIMESVGTQLSDSIHLRSLSSTETYKYLGMSEALGINTADMKQSLRDRFFGRLNKVLSSLLSGGNKVRAFNGWVMPVLMYSFGILKWTQTELDALDRRVRALLTANRMHHPRSSVMRLYIPRKCGGRGFLNAKTLHNREICSLREYFLEVDEGMHRDVVSVDKGLTPLSLANENWRKPRVLDTNDRKEVWQGKELHGRFYRALHGPDVDFLASVSWLRFGDLFGETEGFVCAIMDEVMMTNNYRKYIVKDGTVDICRACHRPGESIRHIISGCSRLANGEYLHRHNLVARIIHQQLALKYNLVESEVPYYKYAPDPVLDNGNITLYWDRSIITDRTIVANKPDIVVIDRLERRAMIVDITVPHDENLVKAEKDKQFKYLDLAREVVDMWDVSTAVIVPIVVSANGLIANSLDKHLRRLSLGSWIKGLIQKAVLLDTARIVRRFLSQEP

SEQ ID NO: 30627 - protein, 1203 aa, Noctua janthe
MLTRSRAKHQAHPPSPDSSLSSASQPPGRASIVSAVSPIAAVASSSIDEFFSPPSTPSPPRRRERGRPPAGLGPRGQQAPNRVPAAGGNVSRMRWTQSINENVMRAYYGATEGGSNLTAYRGRMLSLFQVLEPGVSVSAQRLSDQVRVIQRNHMLDDTVLERLRFDSRSNLVIPASPMIAVQLQNVSSAPPRSEHDGEEDDDEVISVSTQCNAQLRSALEGAFREYRSTPPELRPRLPRLPMHKKNKALVCALDSQLSNCFDSSKDLADTHSILYCGAVAACRVAHVKFPNNDRATRPKFAVPAWQCRIERRIGKARALIGKLICFREGNTRPRVLRFVKRAFSGTDVSFRDYLARVTERIDFLKQKICAWASRIRRYKRRVERYTQNRTFRSDERWVYRAWERPDQGVTDTRLPDDDAMCSFWRNIWSVPVSHTEGDWTREVERACDSIPEMGAIIISPQDVARAVRPLPNWKSPGPDGLHNFWIKWFQRSHVRLAFQFRSALESGSLPQFLTTGITHLLHKSGSTAEPKNYRPITCLPTVYKVLTSILRAKINHHIDSNSIMSASQNGCRNGSRGTKELLLIDMAISQQVRRSRRDLSTCWIDYKKAYDSVPHTWLMKVLELYKVDATLRTFLMSCMGHWRTVLRYPGCRQIQGNSEPIKIERGIFQGDRLSPLWFCLALNPLSTLLEGSGLGYRLRRGGQVISHLLYMDDLKLFAPNNLQLMKLLKVTETFSSAIRMEFGVDKCAVMHVKRGEIMESVGTQLSDSIHLRSLSSTETYKYLGMSEALGINTADMKQSLRDRFFGRLNKVLSSLLSVGNKVRAFNGWVMPVLMYSFGILKWTQTELDALDRRVRALLTANRMHHPRSSVMRLYIPRKCGGRGFLNAKTLHNREICSLREYFLEVDEGMHRDVVSVDKGLTPLSLANENWRKPRVLDTNDRKEVWQGKELHGRFYRALHGPDVDFLASVSWLRFGDLFGETEGFVCAIMDEVMMTNNYRKYIVKDGTVDICRACHRPGESIRHIISGCSRLANGEYLHRHNLVARIIHQQLALKYNLVESEVPYYKYAPDPVLDNGNITLYWDRSIITDRTIVANKPDIVVIDRLERRAMIVDITVPHDENLVKAEKDKQFKYLDLAREVVDMWDVSTAVIVPIVVSANGLIANSLDKHLRRLSLGSWIKGLIQKAVLLDTARIVRRFLSQEP

SEQ ID NO: 30628 - protein, 1203 aa, Noctua janthe
MLTRSRAKHQAHPPSPDSSLSSASQPPGRASIVSAVSPIAAVASSSSGEFFSPPSTPSPPRRRGRGRPPAGLGPRGQQAPNRVPAAGGNVSRMRWTQSINENVMRAYYGATEGGSNLTAYRGRMLSLFQVLEPGVSVSAQRLSDQVRVIQRNHMLDDTVLERLRFDSRSNLVIPASPMIAVQLQNVSSAPPRSEHDGEEDDDEVISVSTQCNAQLRSALEGAFREYRSTPPELRPRLPRLPMHKKNKALVCALDSQLSNCFDSSKDLADTHSILYCGAVAACRVAHVKFPNNDRATRPKFAVPAWQCRIERRIGKARALIGKLICFREGNTRPRVLRFVKRAFSGTDVSFRDYLARVTERIDFLKQKICAWASRIRRYKRRVERYTQNRTFRSNERWVYRAWERPDQGVTDTRLPDDDAMCSFWRNIWSVPVSHTEGDWTREVERACDSIPEMGAIIISPQDVARAVRPLPNWKSPGPDGLHNFWIKWFQRSHVRLASQFQSALESGSLPQFLTTGITHLLHKSGSTAEPKNYRPITCLPTVYKVLTSILRAKINHHIDSNSIMSASQNGCRNGSRGTKELLLIDMAISQQVRRSRRDLSTCWIDYKKAYDSVPHTWLMRVLELYKVDATLRTFLMSCMGHWRTVLRYPGCRQIQGNSEPIKIERGIFQGDSLSPLWFCLALNPLSTLLEGSGLGYRLRRGGQVISHLLYMDDLKLFAPNNLQLMKLLKVTETFSSAIRMEFGVDKCAVMHVKRGEIMESVGTQLSDSIHLRSLSSTETYKYLGMSEALGINTADMKQSLRDRFFGRLNKVLSSLLSGGNKVRAFNGWVMPVLMYSFGILKWTQTELDALDRRVRALLTANRMHHPRSSVMRLYIPRKCGGRGFLNAKTLHNREICSLREYFLEVDEGMHRDVVSVDKDLTPLSLANENWRKPRVLDTNDRKEVWQGKELHGRFYRALHGPDVDFLASVSWLRFGDLFGETEGFVCAIMDEVMMTNNYRKYIVKDGTVDICRACHRPGESIRHIISGCSRLANGEYLHRHNLVARIIHQQLALKYNLVESEVPYYKYAPDPVLDNGNITLYWDRSIITDRTIVANKPDIVVIDRLERRAMIVDITVPHDENLVKAEKDKQFKYLDLAREVVDMWDVSTAVIVPIVVSANGLIANSLDKHLRRLSLGSWIKGLIQKAVLLDTARIVRRFLSQEP

SEQ ID NO: 30629 - protein, 1206 aa, Noctua fimbriata
MITRSRAKQLQEAHTPSPGSSFSSASQPPRRATSVSTVSPVAAVASSSSDEFFSPPSTPPPSPRRRGRGRPPAGLGPRGQPAPNRVPAAGGNVSRMRWTQSINEQVMRAYYGATEGGSNLTAYRGRMLSLFQVLEPGVSVSAQRLSDQVRVIQRNHMLDDTVLDRLRSESRSNLVTPASPMSAVQLQNVTIASPRSDRGGEGDDDEVISVSTQCNAQLRSALESAFREYRSTPPELRPRLPRLPMHKKNKALMCALDSQLSNCFDTSKDLADTHSILYCGAVAACRVAHVKFPNNDRATRPKLAVPAWQCRIERRIGEARALIGKLICFREGNTRPRVMRFVRRAFSGTDVNFRDYLARVTERIDFLKQKICAWASRIRRYKRRVERYTQNRTFQSDERWVYRAWERPDQGVTDTRLPDDNAMCSFWRSIWSVPVSHTEGDWIREVERACDPIPEMGAIIISPQDVACAVRPLPNWKSPGPDGLHNFWIKWFQRSHVRLASQFQLALESGSLPQFLTTGITHLLHKSGSTAEPKNYRPITCLPTVYKVLTSILRAKINHHIDSNSIMSASQNGCRNGSRGTKELLLIDMAVSQQVRRSRRDLSTCWIDYKKAYDSVPHTWLMRVLELYKVDATLRTFLTSCMGHWRTVLRYPGCRQIQGNSEPIRIERGIFQGDSLSPLWFCIALNPLSTLLEGSGLGYRLRRDGQVISHLLYMDDLKLYAPNNLQLMKLLKVTETFSSSIRIQFGVDKCAVMHVKQGEIMESLGTQLSDSIHLRSLSSTETYKYLGMSEALGINAADMKQSLRERFFGRLHKVLSSLLSGGNKVRAFNGWVMPVLMYSFGILKWTQMELDALDRRVRVLLTANRMHHPRSSVMRLYIPRKCGGRGFLNVKTLHNREVCSLREYFLEADVGMHRDVVSVDKGLTPLSLANENWRKPRVLDTNDRKEVWQGKELHGRFYRALHGPDVDFLASVAWLRFGDLFGETEGFVCAIMDEVMMTNNYRKYIVKDGTVDICRACHRPGESIRHIISGCSRLANGEYLHRHNLVARIIHQQLALKYNLVESEVPYYKYVPDPVLDDGNITLYWDRSIVTDRTIVANKPDIVVIDRLERRAMIVDITVPHDENLVKAEKDKQFKYLDLAHEVVDIWDVSTAVIVPIVVSANGLIANTLDQHLRRLSLGSWIKGLIQKAVLLDTARIVRRFLSQEP

SEQ ID NO: 30630 - protein, 1111 aa, Noctua fimbriata
MRWTQSINEQVMRAYYGATEGGSNLTAYRGRMLSLFQVLEPGVSVSAQRLSDQVRVIQRNHMLDDTVLDRLRSESRSNLVTPASPMTAVQLQNVTIASPRSDRGGEGDDDEVISVSTQCNAQLRSALESAFREYRSTPPELRPRLPRLPMHKKNKALMCALDSQLSNCFDTSKDLADTHSILYCGAVAACRVAHVKFPNNDRATRPKLAVPAWQYRIERRIGEARALIAKLICFREGNTRPRVMRFVRRAFSGTDVNFRDYLARVTERIDFLKQKICAWASRIRRYKRRVERYTQNRTFQSDERWVYRAWERPDQGVTDTRLPDDNAMCSFWRSIWSVPVSHTEGDWIREVERACDPIPEMGAIIISPQDVACAVRPLPNWKSPGPDGLHNFWIKWFQRSHVRLASQFQLALESGSLPQFLTTGITHLLHKSGSTAEPKNYRSITCLPTVYKVLTSILRAKINHHIDSNSIMSASQNGCRNGSRGTKELLLIDMAVSQQVRRSRRDLSTCWIDYKKAYDSVPHTWLMRVLELYKVDATLRTFLMSCMGHWRTVLRYPGCRQIQGNSEPIRIERGIFQGDSLSPLWFCIALNPLSTLLEGSGLGYRLRRDGQVISHLLYMDDLKLYAPNNLQLMKLLKVTETFSSSIRMEFGVDKCAVMHVKQGEIMESLGTQLSDSIHLRSLSSTETYKYLGMSEALGINAADMKQSLRERFFGRLNKVLSSLLSGGNKVRAFNGWVMPVLMYSFGILKWTQMELDALDRRVRVLLTANRMHHPRSSVMRLYIPRKCGGRGFLNVKTLHNREVCSLREYFLEADVGMHRDVVSVDKGLTPLSLANENWRKPRVLDTNDRKEVWQGKELHGRFYRALHGPDVDFLASVAWLRFGDLFGETEGFVCAIMDEVMMTNNYRKYIVKDGTVDICRACHRPGESIRHIISGCSRLANGEYLHRHNLVARIIHQQLALKYNLVESEVPYYKYVPDPVLDDGNITLYWDRSIVTDRTIVANKPDIVVIDRLERRAMIVDITVPHDENLVKAEKDKQFKYLDLAHEVVDIWDVSTAVIVPIVVSANGLIANTLDQHLRRLSLGSWIKGLIQKAVLLDTARIVRRFLSQEP

SEQ ID NO: 30631 - protein, 868 aa, Hydraecia micacea
MRFVRRAFSGTDISSRDYLSRVTERIDFLKQKICAWANRIRRYRRRVDRYTQNRRFQSDERWVYRAWERPDQGVTDTRLPDDDAMCSFWRNIWSVPVSHTEGDWTGKIERACDLIPEMEALIISPQDVARAVRPLPNWKSPGPDGLHNFWIKWFKRSHVRLASQFQSALESGSLPQFLTTGITHLLYKSGSTADPKNYRPITCLPTIYKVLTSILRAKINKHIDTNSIMSVSQNGCKNGSRGTKELLLIDMTINQQVRRSRKDLSTCWIDYKKAYDSVPHTWLMRVLELYKVDTTLCTFLMSCMGQWRTVLRYPGCRNIQRNSEPIRIERGIFQGDSLSPLWFCLALNPLSTLLEDSGLGYRLRRGGQVISHLLYMDDLKLFAPNNLQLMELLKITETFSSAIRMEFGVDKCAVMHVKRGEIVESVGNQLSDSTNLRALSASDTYKYLGMSEALGINVTDMKQSLKERFFGRLKKVFNSLLSGGNKVRAFNDWVMPVLMYSFGILKWTQTELDALDRKVRTLLTANRIHHPRSSVMRLYIPRKCGGRGFLNAKTLHNREICSLREYFLETDVGMHRDVVVVDNGLTPLSLAKENWRKPVVLDTNDRMEVWQSKELHGRFFRALHGPDVDLLASVAWLRFGDLFGETEGFVCAIMDEVMMTNNYRRFIVKDGTVDICRACHRPGESIRHIISGCSRLANGEYLHRHNHVARIIHQQLAPKYSLVESEVPYYRYVPDPVLENGNITLYWDRSIITDRTIVANKPDIVVMDRLERRAMIVDITVPHDENLVKAEKDKQIKYLDLAREVVDMWDVDSAIIVPIVVTANGLIANSLDQHLRRLSLASWIKGLIQKAVLLDTARIVKRFLSLEP

SEQ ID NO: 30632 - protein, 1206 aa, Noctua fimbriata
MITRSRAKQLQEAHTPSPGSSFSSASQPPRRATSVSTVSPVAAVASSSSDEFFSPPSTPPPSPRRRGRGRPPAGLGPRGQPAPNRVPAAGGNVSRMRWTQSINEQVMRAYYGATEGGSNLTAYRGRMLSLFQVLEPGVSVSAQRLSDQVRVIQRNHMLDDTVLDRLRSESRSNLVTPASPMSAVQLQNVTIASPRSDRGGEGDDDEVISVSTQCNAQLRSALESAFREYRSTPPELRPRLPRLPMHKKNKALMCSLDSQLSNCFDTSKDLADTHSILYCGAVAACRVAHVKFPNNDRATRPKLAVPAWQCRIERRIGEARALIGKLICFREGNTRPRVMRFVRRAFSGTDVNFRDYLARVTERIDFLKQKICAWASRIRRYKRRVERYTQNRTFQSDERWVYRAWERPDQGVTDTRLPDDNAMCSFWRSIWSVPVSHTEGDWIREVERACDPIPEMGAIIISPQDVACAVRPLPNWKSPGPDGLHNFWIKWFQRSHVRLASQFQLALESGSLPQFLTTGITHLLHKSGSTAEPKNYRPITCLPTVYKVLTSILRAKINHHIDSNSIMSASQNGCRNGSRGTKELLLIDMAVSQQVRRSRRDLSTCWIDYKKAYDSVPHTWLMRVLELYKVDATLRTFLTSCMGHWRTVLRYPGCRQIQGNSEPIRIERGIFQGDSLSPLWFCIALNPLSTLLEGSGLGYRLRRDGQVISHLLYMDDLKLYAPNNLQLMKLLKVTETFSSSIRMEFGVDKCAVMHVKQGEIMESLGTQLSDSIHLRSLSSTETYKYLGMSEALGINAADMKQSLRERFFGRLHKVLSSLLSGGNKVRAFNGWVMPVLMYSFGILKWTQMELDALDRRVRVLLTANRMHHPRSSVMRLYIPRKCGGRGFLNVKTLHNREVCSLREYFLEADVGMHRDVVSVDKGLTPLSLANENWRKPRVLDTNDRKEVWQGKELHGRFYRALHGPDVDFLASVAWLRFGGLFGETEGFVCAIMDEVMMTNNYRKYIVKDGTVDICRACHRPGESIRHIISGCSRLANGEYLHRHNLVARIIHQQLALKYNLVESEVPYYKYVPDPVLDDGNITLYWDRSIVTDRTIVANKPDIVVIDRLERRAMIVDITVPHDENLVKAEKDKQFKYLDLAHEVVDIWDVSTAVIVPIVVSANGLIANTLDQHLRRLSLGSWIKGLIQKAVLLDTARIVRRFLSQEP

SEQ ID NO: 30633 - protein, 1111 aa, Noctua janthe
MRWTQSINENVMRAYYGATEGGSNLTAYRGRMLFLFQVLEPGVSVSAQRLSDQVRVIQRNHMLDDTVLERLRFDSRSNLVIPASPMIAVQLQNVSSAPPRSEHDGEEDDDEVISVSTQCNAQLRSALEGAFREYRSTPPELRPRLPRLPMHKKNKALVCALDSQVSNCFDSSKDLTDTHSILYCGAVAACRVAHVKFSNNDRATRPKFAVPAWQCRIERRIGEARALIGKLICFREGNTRPRVMRFVKRAFSGTDVSFRDYLARVTERIDFLKQKICAWASRIRRYKRRVERYTQNRTFRSDERWVYRAWERPDQGVTDTRLPNNDAMCSFWRNIWSVPVSHTEGDWTREVERACDPIPEMGAIIISPQDVARAVRPLPNWKSPGPDGLHNFWIKWFQRSHVRLASQFQSALESGSLPQFLTTGITHLLHKSGSTAEPKNYRPITCLPTVYKVLTSILRAKINHHIDNNSIMSASQNGCRNGSRGTKELLLIDMAISQQVRRSRRDLSTCWIDYKKAYDSVPHTWLMKVLELYKVDATLRTFLMSCMGHWRTVLRYPGCRQIQGNSEPIKIERGIFQGDSLSPLWFCLALNPLSTLLEGSGLGYRLRRGGQVISHLLYMDDLKLFAPNNLQLVKLLKVTETFSSAIRMEFGVDKCAVMHVKRGEIMESVGTQLSDSIHLRSLSSIGTYKYLGMSEALGINTADMKQSLRDRFFGRLNKVLSSLLSGGNKVRAFNGWVMPVLMYSFGILKWTQTELDALDRRVRALLTANRMHHPRSSVMRLYIPRKCGGRGFLNAKTLHNREICSLREYFLEVDEGMHRDVVSVDKGLTPLSLANENCRKPRVLDTNDRKEVWQGKELHGRFYRALHGPDVDFLASVSWLRFGDLFGETEGFVCAIMDEVMMTNNYRKYIVKDGTVDICRACHRPGESIRHIISGCSRLANGEYLHRHNLVARIIHQQLALKYNLVESEVPYYKYAPDPVLDNGNITLYWDRSIITDRTIVANKPDILVIDRLERRAMIVDITVPHDENLVKAEKDKQFKYLDLAREVVDMWDVSTAVIVPIVVSANGLIPNSLDKHLRRLSLGSWIKSLIQKAVLLDTARIVRRFLSQEP

SEQ ID NO: 30634 - protein, 868 aa, Noctua fimbriata
MRFVRRAFSGTDVSFRDYLARVTERIDFLKQKICAWASRIRRYKRRVERYTQNRTFQSDERWVYRAWERPDQGVTDTRLPDDNAMCSFWRSIWSVPVSHTEGDWIREVERACDPIPEMGAIIISPQDVACAVRPLPNWKSSGPDGLHNFWIKWFQRSHVRLASQFQLALESGSLPQFLTTGITHLLHKSGSTAEPKNYRPITCLPTVYKVLTSILRAKINHHIDSNSIMSASQNGCRNGSRGTKELLLIDMAVSQQVRRSRRDLSTCWIDYKKAYDSVPHTWLMRVLELYKVDATLRTFLMSCMGHWRTVLRYPGCRQIQGNSEPIRIERGIFQGDSLSPLWFCIALNPLSTLLEGSGLGYRLRRDGQVISHLLYMDDLKLYAPNNLQLMKLLKVTETFSSSIRMEFGVDKCAVMHVKQGEIMESVGTQLSDSIHLRSLSSTETYKYLGMSEALGINTADMKQSLRERFFGRLNKVLSSLLSGGNKVRAFNGWVMPVLMYSFGILKWTQTELDALDTRVRVLLTANRMHHPRSSVMRLYIPRKCGGRGFLNAKTLHNREVCSLREYFLEADVEMHRDVVSVDKGLTPLSLANENWRKPRVLDTNDRKEVWQGKELHGRFYRALHGPDVDFLASVAWLRFGDLFGETEGFVCAIMDEVMMTNNYRKYIVKDGTVDICRACHRPGESIRHIISGCSRLANGEYLHRHNLVARIIHQQLALKYNLVESEVPYYKYVPDPVLDDGNITLYWDRSIVTDRTIVANKPDIVVIDRLERRAMIVDITVPHDENLVKAEKDKQFKYLDLAHEVVDIWDVSTAVIVPIVVSANGLIANTLDQHLRRLSLGSWIKGLIQKAVLLDTARIVRRFLSQEP

SEQ ID NO: 30635 - protein, 1203 aa, Noctua janthe
MLTRSRAKHQAHPPSPDSSLSSASQPPGRPSIVSAVSPIAAVASSSSDEFFSPPSTPSPPRRRGRGRPPAGLGPRGQQAPNRVPAAGGNVSRMRWTQSINENVMRAYYGATEGGSNLTAYRGRMLSLFQVLEPGVSVSAQRLSDQVRVIQRNHMLDDTVLERLRFDSRSNLVIPASPMIAVQLQNVSSAPPRPEHDGEEDDDEVISVSTQCNAQLRTALEGAFREYRSTPPELRPRLPRLPMHKKNKALVCALDSQLSNCFDSSKDLADTHSILYCGAVAACRVAHVKFPNNDRATRPKFAVPAWQCRIERRIGKARALIGKLICFREGNTRPRVLRFVKRAFSGTDVSFRDYLARVTERIDFLKQKICAWASRIRRYKRRVERYTQNRTFRSDERWVYRAWERPDQGVTDTRLPDDDAMCSFWRNIWSVPVSHTEGDWTREVERACDSIPEMGAIIISPQDVARAVRPLPNWKSPGPDGLHNFWIKWFQRSHVRLASQFQSALESGSLPQFLTTGITHLLHKSGSTAEPKNYRPITCLPTVYKVLTSILRAKINHHIDSNSIMSASQNGCRNGSRGTKELLLIDMAISQQVRRSRRDLSTCWIDYKKAYDSVPHTWLMRVLELYKVDATLRTFLMSCMGHWRTVLRYPGCRQIQGNSEPIKIERGIFQGDSLSPLWFCLALNPLSTLLEGSGLGYRLRRGGQVISHLLYMDDLKLFAPNNLQLMKLLKVTETFSSAIRMEFGVDKCAVMHVKRGEIMESVGTQLSDSIHLRSLSSTETYKYLGMSEALGINTADMKQSLRDRFFGRLNKVLSSLLSGGNKVRAFNGWVMPVLMYSFGILKWTQTELDALDRRVRALLTANRMHHPRSSVMRLYIPRKCGGRGFLNAKTLHNREICSLREYFLEVDEGMHRDVVSVDKGLTPLSLANENWRKPRVLDTNDRKEVWQGKELHGRFYRALHGPDVDFLASVSWLRFGDLFGETEGFVCAIMDEVMMTNNYRKYIVKDGTVDICRACHRPGESIRHIISGCSRLANGEYLHRHNLVARIIHQQLALKYNLVESEVPYYKYAPDPVLDNGNITLYWDRSIITDRTIVANKPDIVVIDRLERRAMIVDITVPHDENLVKAEKDKQFKYLDLAREVGDMWDVSTAVIVPIVVSANGLIANSLDKHLRRLSLGSWIKGLIQKAVLLDTARIVRRFLSQEP

SEQ ID NO: 30636 - protein, 1080 aa, Noctua janthe
MLSLFQVLEPGVSVSAQRLSDQVRVIQRNHMLDDTVLERLRFDSRSNLVIPASPMIAVQLQNVSSAPPRSEHDGEEDDDEVISVSTQCNAQLRSALEGAFREYRSTPPELRPRLPRLPMHKKNKALVCALDSQLSNCFDSSKDLADTHSILYCGAVAACRVAHVKFPNNDRATRPKFAVPAWQCRIERRIGKARALIGKLICFREGNTRPRVLRFVKRAFSGTDVSFRDYLARVTERIDFLKQKICAWASRIRRYKRRVERYTQNRTFRSDERWVYRAWERPDQGVTDTRLPDDDAMCSFWRNIWSVPVSHTEGDWTREVERACDSIPEMGAIIISPQDVARAVRPLPNWKSPGPDGLHNFWIKWFQRSHVRLASQFQSALESGSLPQFLTTGITHLLHKSGSTAEPKNYRPITCLSTVYKVLTSILRAKINHHIDSNSIMSASQNGCRNGSRGTKELLLIGMAISQQVRRSRRDLSTCWIDYKKAYDSVPHTWLMRVLELYKVDATLRTFLMSCMGHWRTVLRYPGCRQIQGNSEPIKIERGIFQGDSLSPLWFCLALNPLSTLLEGSGLGYRLRRGGQVISHLLYMDDLKLFAPNNLQLMKLLKVTETFSSAIRMEFGVDKCAVMHVKRGEIMESVGTQLSDSIHLRSLSSTETYKYLGMSEALGINTADMKQSLRDRFFGRLNKVLSSLLSGGNKVRAFNGWVMPVLMYSFGILKWTQTELDALNRRVRALLTANRMHHPRSSVMRLYIPRKCGGRGFLNAKTLHNREICSLREYFLEVDEGMHRDVVSVDKGLTPLSLANENWRKPRVLDTNDRKEVWQGKELHGRFYRALHGPDVEFLASVSWLRFGDLFGETEGFVCAIMDEVMMTNNYRKYIVKDGTVDICRACHRPGESIRHIISGCSRLANGEYLHRHNLVARIIHQQLALKYNLVESEVPYYKYAPDPVLDNGNITLYWDRSIITDRTIVANKPDIVVIDRLERRATIVDITVPHDENLVKAEKDKQFKYLDLAREVVDMWDVSTAVIVPIVVSANGLIANSLDKHLRRLSLGSWIKGLIQKAVLLDTARIVRRFLSQEP

SEQ ID NO: 30637 - protein, 1112 aa, Noctua janthe
MRWTQSINENVMRAYYGATEGGSNLTAYRGRMLSLFQVLEPGVSVSAQRLSDQVRVTQRNHMLDDTVLERLRVDSQSNLVIPASPMIAVQLQNVSSAPPRSEHDGEEDDDEVISVSTQCNAQLRSALEGAFREYRSTPPELRPRLPRLPMHKKNKALVCALDSQLSNCFDSSKDLTDTHSILYCGAVAACRVAHVKFPNNDRATRPKFAVPAWQCRIERRIGEARALIGKLICFREGNTRPRVMRFVKRAFSGTDVSFRDYLARVTERIDFLKQKICAWASRIRRYKRRVERYTQNRTFLSDERWVLYRAWERPDQGVTDTRLPDDDAMCSFWRNIWSVHVSHTEGDWTREVERACDPIPETGAIIISPQDVARAVRPLPNWKSPGPDGLHNFWIKWFQRSHVRLASQFQSTLESGSLPQFLTTGITHLLHKSGSTAEPKNYRPITCLPTVYKVLTSILRAKINHHIDSNSIMSASQNGCRNGSRGTKELLLIDMAISQQVRRSRRDLSTCWIDYKKAYDSVPHTWLMKVLELYKVDATLRTFLMSCMGHWRTVLRYPGCRQIQGNSEPIKIDRGIFQGDSLSPLWFCLALNPLSTLLEGSGLGYRLRRGGQVISHLLYMDDLKLFAPNNLQLMKLLKVTETFSSAIRMEFGVDKCAVMHVKRGEIMESVGTQLSDSIHLRSLSSTETYKYLGMSEALGINTADMKQSLRDRFFGRLNKVLSSLLSGGNKVRAFNGWVMPVLMYSFSILKWTQTELDALDRRVRALLTANRMHHPRSSVMRLYIPRKCGGRGFLNAKTLHNREICSLREYFLEVDEGMHRDVVSADKGLTPLSLANENWRKPRVLDTNDRKEVWQGKELHGRFYRALDGPDVDFLASVSWLRFGDLFGETEGFVCAIMDEVMMANNYRKYIVKDGTVDICRACHRPGESIRHIISGCSRLANGEYLHRHNLVARIIHQQLALKYNLVESEVPYYKYAPDPDLDNGNITLYWDRSIITDRTIVANKPDIVVIDRLERRAMIVDITVPHDENLVKAEKDKQFKYLDLAREVVDMWDVNTAVIVPIVVSANGLIANSLDKHLRRLSLGSWIKGLIQKAVLLDTARIVRRFLSQEP

SEQ ID NO: 30638 - protein, 868 aa, Noctua fimbriata
MRFVRRAFSGTDVNFRDYLARVTERIDFLKQKICAWASRIRRYKRRVERYTQNRTFQSDERWVYRAWERPDQGVTDTRLPDDNAMYSFWRSIWSVPVSHTEGDWIREVERACDPIPEMGAIIISPQDVACAVRPLPNWKSPGPDGLHNFWIKWFQRSHVRLASQFQLALESGSLPQFLTTGITHLLHKSGSTAEPKNYRPITCLPTVYKVLTSILRAKINHHIDSNSIMSASQNGCRNGSRGTKELLLIDMAVSQQVRRSRRDLSTCWIDYKKAYDSVPHTWLMRVLELYKVDATLRTFLMSCMGHWRTVLRYPGCRQIQGNSEPIRIERGIFQGDSLSPLWFCIALNPLSTLLEGSGLGYRLRRDGQVISHLLYMDDLKLYAPNNLQLMKLLKVTETFSSSIRMEFGVDKCAVMHVKQGEIMESLGTQLSDSIHLRSLSSTETYKYLGMSEALGINAADMKQSLRERFFGRLNKVLSSLLSGGNKVRAFNGWVMPVLMYSFGILKWTQMELDALDRRVRVLLTANRMHHPRSSVMRLYIPRKCGGRGFLNVKTLHNREVCSLREYFLEADVGMHRDVVSVDKGLTPLSLANENWRKPRVLDTNDRKEVWQGKELHGRFYRALHGPDVDFLASVAWLRFGDLFGETEGFVCAIMDEVMMTNNYRKYIVKDGTVDICRACHRPGESIRHIISGCSRLANGEYLHRHNLVARIIHQQLALKYNLVESEVPYYKYVPDPVLDDGNITLYWDRSIVTDRTIVANKPDIVVIDRLERRAMIVDITVPHDENLVKAEKDKQFKYLDLAHEVVDIWDVSTAVIVPIVVSANGLIANTLDQHLRRLSLGSWIKGLIQKAVLLDTARIVRRFLSQEP

SEQ ID NO: 30639 - protein, 1205 aa, Noctua janthe
MLTRSRAKHQAHPPSPDSSLSSASQPPGRASIVSAVSPIAAVASSSSDEFFSPPSTPSPPRRRGRGRPPAGLGPRGQQAPNRVPAAGGNVSRMRWTQSINENVMRAYYGATEGGSNLTAYRGRMLSLFQVLEPGVSVSAQRLSDQVRVIQRNHMLDDTVLERLRFDSRSNLVIPASPMIAVQLQNVSSAPPRSEHDGEEDDDEVISVSTQCNAQLRSALEGAFREYRSTPPELRPRLPRLPMHKKNKALVCALDSQLSNCFDSSKDLTDTHSILYCGAVAACRVAHVKFPNNDRATRPKFAVPAWQCRIERRIGEARALIGKLICFREGNTVEYTRVMRFVKRAFSGTDVSFRDYLARVTERIDFLKQKICAWASRIRRYKRRVERYTQNRTFRSDERWVYRAWERPDQGVTDTRLPDDDAMCSFWRNIWSVPVSHTEGDWTREVERACDSIPEMGAIIISPQDVARAVRPLPNWKSPGPDGLHNFWIKWFQRSHVRLASQFQSALESGSLPQFLTTGITHLLHKSGSTAEPKNYRPITCLPTVYKVLTSILRAKINHHIDSNSIMSASQNGCRNGSRGTKELLLIDMAISQQVRRSRRDLSTCWIDYKKAYDSVPHTWLMKVLELYKVDATLRTFLMSCMGHWRTVLRYPGCRQIQGNSEQIKIERGIFQGDSLSPLWFCLALNPLSTLLEGSGLGYRLRRGGQVISHLLYMDDLKLFAPNNLQLMKLLKVTETFSSAIRMEFGVDKCAVMHVKRGEIMESVGTQLSDSIHLRSLSSTETYKYLGMSETLVINTADMKQSLRDRFFGRLNKVLSSLLSGGNKVRAFNGWVMPVLMYSFGILKWTQTELDALDRRVRALLTANRMHHPRSSVMRLYIPRKCGGRGFLNAKTLHNREICSLREYFLEVDEGMHRDVVSVNKGLTPLSLANENWRKPRVLDTNDRKEVWQGKELHGRFYRALHGPDVDFLASVSWLRFGDLFGETEGFVCAIMDEVMMTNNYRKYIVKDGTVDICRACHRPGESIRHIISGCSRLANGEYLHRHNLVARIIHQQLALKYNLVESEVPYYKYAPDPVLDNGNITLYWDRSIITDRTIVANKPDIVVIDRLERRAMIVDITVLHDENLVKAEKDKQFKYLELAREVVDMWDVSTAVIVPIVVSANGLIANSLDKHLRRLSLGSWIKGLIQKAVLLDTARIVRRFLSQEP

SEQ ID NO: 30640 - protein, 1111 aa, Noctua janthe
MRWTQSINENVMRAYYGATEGGSNLTAYRGRMLSLFQVLEPGVSVSAQRLSDQVRVIQRNHMLDDTVLERLRFDSRSNLVIPASPMIAVQLQNVSSAPPRSEHDGEEDDDEVISVSTQCNAQLRSALEGAFREYRSTPPELRPRLPRLPMHKKNKALVCALDSQLSNCFDSSKDLTDTHSVLYCGAVAACRVAHVKFPNNDRATRPKFAVPAWQCRIERRIGEARALIGKLICFREGNTRPRVMRFVKRAFSGTDVSFRDYLARVTERIDFLKQKICAWASRIRRYKRRVERYTQNRTFRSDERWVYRAWERPDQGVTDTRLPDDDAMCSFWRNIWSVPVSHTEGDWTREVERACDSIPEMGAIIISPQDVARAVRPLPNWKSPGPDGLHNFWIKWFQRSHVRLASQFQSALESGSLPQFLTTGITHLLHKSGSTAEPKNYRPITCLPTVYKVLTSILRAKINHHIDSNSIMSASQNGCRNGSRGTKELLLIDMAISQQVRRSRRDLSTCWIDYKKAYDSVPHTWLMRVLELYKVDATLRTFLMSCMGHWRTVLRYPGCRQIQGNSEPIKIERGIFQGDSLSPLWFCLALNPLSTLLEGSGLGYRLRRGGQVISHLLYMDDLKLFAPNNLQLMKLLKVTETFSSAIRMEFGVDKCAVMHVKRGEIMESVGTQLSDSIHLRSLSSTETYKYLGMSEALGINTADMKQSLRDRFFGRLNKVLSSLLSGGNKVRAFNGWVMPVLMYSFGILKWTQTELDALDRRVRALLTANRMHHPRSSVMRLYIPRKCGGRGFLNAKTLHNREICSLREYFLEVDEGMHRDVVSVDKGLTPLSLANENWRKPRVLDTNDRKEVWQGKELHGRFYRALHGPDVDFLASVSWLRFGDLFGETEGFVCAIMDEVMMTNNYRKYIVKDGTVDICRACHRPGESIRHIISGCSRLANGEYLHRHNLVARIIHQQLALKYNLVESEVPYYKYAPDPVLDNGNITLYWDRSIITDRTIVANKPDIVVIDRLERRAMIVDITVPHDENLVKAEKDKQFKYLDLAREVVDMWDVSTAVIVPIVVSANGLIANSLDKHLRRLSLGSWIKGLIQKAVLLDTARIVRRFLSQEP

SEQ ID NO: 30641 - protein, 1235 aa, Noctua fimbriata
MEHTKNGYGTHQKWKIGENTPKNNCHKSPMITRSRAKQLQEAHTPSPGSSLSSASQPPRRATSVNTVSPIAAVASSSSDEFFSPPSTPPPSPRRRGRGRPPAGLGPRGQPAPNRVPAAGGNVSRMRWTQSINEQVMRAYYGATEGGSNLTAYRGRMLSLFQVLEPGVSVSAQRLSDQVRVIQRNHMLDDTVLDRLRSESRSNLVTPASPMTAVQLQNVTIASPRSDRGGEGDDDEVISVSTQCNAQLRSALESAFREYRSTPPELRPRLPRLPMHKKNKALMCALDSQLSNCFDTSKDLADTHSILYCGAVAACRVAHVKFPNNDRATRPKLAVPAWQCRIERRIGEARALIGKLICFREGNTRPRVMRFVRRAFSGTDVNFRDYLARVTERIDFLKQKICAWASRIRRYKRRVERYTQNRTFQSDERWVYRAWERPDQGVTDTRLPDDNAMCSFWRSIWSVPVSHTEGDWIREVERACDPIPEMGAIIISPQDVACAVRPLPNWKSPGPDGLHNFWIKWFQRSHVRLASQFQLALESGSLPQFLTTGITHLLHKSGSTAEPKNYRPITCLPTVYKVLTSILRAKINHHIDSNSIMSASQNGCRNGSRGTKELLLIDMAVSQQVRRSRRDLSTCWIDYKKAYDSVPHTWLMRVLELYKVDATLRTFLTSCMGHWRTVLRYPGCRQIQGNSEPIRIERGIFQGDSLSPLWFCIALNPLSTLLEGSGLGYRLRRDGQVISHLLYMDDLKLYAPNNLQLMKLLKVTETFSSSIRMEFGVDKCAVMHVKQGEIMESVGTQLSDSIHLRSLSSTETYKYLGMSEALGINTADMKQSLRERFFGRLNKVLSSLLSGGNKVRAFNGWVMPVLMYSFGILKWTQTELDALDTRVRVLLTANRMHHPRSSVMRLYIPRKCGGRGFLNAKTLHNREVCSLREYFLEADVEMHRDVVSVDKGLTPLSLANENWRKPRVLDTNDRKEVWQGKELHGRFYRALHGPDVDFLASVAWLRFGDLFGETEGFVCAIMDEVMMTNNYRKYIVKDGTVDICRACHRPGESIRHIISGCSRLANGEYLHRHNLVARIIHQQLALKYNLVESEVPYYKYVPDPVLDDGNITLYWDRSIVTDRTIVANKPDIVVIDRLERRAMIVDITVPHDENLVKAEKDKQFKYLDLAHEVVDIWDVSTAVIVPIVVSANGLIANTLDQHLRRLSLGSWIKGLIQKAVLLDTARIVRRFLSQEP

SEQ ID NO: 30642 - protein, 1203 aa, Noctua janthe
MLTRSRAKHQAHPPSPDSSLSSASQPPGRASIVSAVSPIAAVASSSSDEFFSPPSTPSPPRRRGRGRPPAGLGPRGQQAPNRVPAAGGNVSRMRWTQSINENVMRAYYGATEGGSNLTAYRGRMLSLFQVLEPGVSVSAQRLSDQVRVIQRNHMLDDTVLERLRFDSRSNLVIPASPMIAVQLQNVSSAPPRSEHDGEEDDDEVISVSTQCNAQLRSALEGAFREYRSTPPELRPRLPRLPMHKKNKALVCALDSQLSNCFDSSKDLADTHSILYCGAVAACRVAHVKFPNNDRATRPKFAVPAWQCRIERRIGKARALIGKLICFREGNTRPRVLRFVKRAFSGTDVSFRDYLARVTERIDFLKQKICAWASRIRRYKRRVERYTQNRTFRSDERWVYRAWERPDQGVTDTRLPDDDAMCSFWRNIWSVPVSHTEGDWTREVERACDSIPEMGAIIISPQDVARAVRPLPNWKSPGPDGLHNFWIKWFQRSHVRLASQFQSALESGSLPQFLTTGITHLLHKSGSTAEPKNYRPITCLPTVYKVLTSILRAKINHHIDSNSIMSASQNGCRNGSRGTKELLLIDMAISQQVRRSRRDLSTCWIDYKKAYDSVPHTWLMKVLELYKVDATLRTFLMSCMGHWRTVLRYPGCRQIQGNSEPIKIERGIFQGDSLSPLWFCLALNPLSTLLEGSGLGYRLRRGGQVISHLLYMDDLKLFAPNNLQLMKLLKVTETFSSAIRMEFGVDKCAVMHVKRGEIMESVGTQLSDSIHLRSLSSTETYKYLGMSEALGINTADMKQSLRDRFFGRLNKVLSSLLSGGNKVRAFNGWVMPVLMYSFGILKWTQTELDALDRRVRALLTANRMHHPRSSVMRLYIPRKCGGRGFLNAKTLHNREICSLREYFLEVDEGMHRDVVSVDKGLTPLSLANENWRKPRVLDTNDRKEVWQRKELHGRFYRALHGPDVDFLASVSWMRFGDLFGETEGFVCAIMDEVMMTNNYRKYIVKDGTVDICRACHRPGESIRHIISGCSRLANGEYLHRHNLVARIIHQQLALKYNLVESEVPYYKYAPDPVLDNGNITLYWDRSIITDRTIVANKPDIVVIDRLERRAMIVDITVPHDENLVKAEKDKQFKYLDLAREVVDMWDVSTAVIVPIVVSANGLIANSLDKHLRRLSLGSWIKGLIQKAVLLDTARIVRRFLSQEP

SEQ ID NO: 30643 - protein, 1203 aa, Noctua janthe
MLTRSRAKHQAHPPSPDSSLSSASQPPGRASIVSAVSSIAAVASSSSDEFFSPPSTPSPPRRRGRGRPPAGLGPRGQQAPNRVPAAGGNVSRMRWTQSINENVMRAYYGATEGGSNLTAYRGRMLSLFQVLEPGVSVSAQRLSDQVRVIQRNHMLDDTVLERLRFDSWSNLVIPASPMIAVQLQNVSSAPPRSEHDGEEDDDEVIYVSTQCNAQLRSALEGAFREYRSTPPELRPRLPRLPMHKKNKALVCALDSQLSNCFDSSKDLADTYSILYCGAVAACRVAHVKFPNNDRATRPKFAVPAWQCRIERRIGKARALLGKLICFREGNTRPRVLRFVKRAFSGTDVSFRDYLARVTERIDFLKQKICAWASRIRRYKRRVERYTQNRTFRSDERWIYRAWERPDQGVTDTRLPDDDAMCSFWRNIWSVPVSHTEGDWTREVERACDSIPEMGAIIISPQDVARAVRPLPNWKSPGPDGLHNFWIKWFQRSHVRLASQFQSALESGSLPQFLTTGITHLLHKSGSTAEPKNYRPITCLPTVYKVLTSILRAKINHHIDSNSIMSASQNGCRYGSRGTKELLLIDMAISQQVRRSRRDLSTCWIDYKKAYDSVPHTWLMKVLELYKVDATLRTFLMSCMGHWRTVLRYPGCRQIQGNSEPIKIERGIFQGDSLSPLWFCLALNPLSTLLEGSGLGYRLRRGGQVISHLLYMDDLKLFAPNNLQLMKLLKVTETFSSAIRMEFGVDKCAVMHVKRGEIMESVGTQLSDSIHLRSLSSTETYKYLGMSEALGINTADMKQSLRDRFFGRLNKVLSSLLSGGNKVRAFNGWVMPVLMYSFGILKWTQTELDALDRRVRALLTANRMHHPRSSVMRLYIPRKCGGRGFLNAKTLHNREICSLREYFLEVDEGMHRDVVSVDKGLTPLSLANENWRKPRVLDTNDRKEVWQGKELHGRFYRALHGPDVDFLASVSWLRFGDLFGETEGFVCAIMDEVMMTNNYRKYIVKDGTVDICRACHRPGESIRHIISGCSRLANGEYLHRHNLVARIIHQQLALKYNLVESEVPYYKYAPDPVLDNGNITLYWDRSIITDRTIVANKPDIVVIDRLERRAMIVDITVPHDENLVKAEKDKQFKYLDLAREVVDMWDVSTAVIVPIVVSANGLIANTLDKHLRRLSLGSWIKGLIQKAVLLDTARIVRRFLSQEP

SEQ ID NO: 30644 - protein, 1203 aa, Noctua janthe
MLTRSRAKHQAHPPSPDSSLSSASQPPGRASIVSAVSPIAAVASSSSDEFFSPPSTPSPPRRRGRGRPPAGLGPRGQQAPNRVPAAGGNVSRMRWTQSINENVMRAYYGATEGGSNLTAYRGRILSLFQVLEPGVSVSAQRLSDQVRVIQRNHMLDDTVLERLRFDSRSNLVIPASPMIAVQLQNVSSAPPRSEHDGEEDDDEVISVSTQCNAQLRSALEGAFREYRSTPPELRPRLPRLPMHKKNKALVCALDSQLSNCFDSSKDLTDTHSILYCGAVAACRVAHVKFPNNDRATRPKFAVPAWQCRIERRIGEARALIGKLICFREGNTRPRVMRFVKRAFSGTDVSFRDYLARVTERIDFLKQKICAWASRIRRYKRRVERYTQNRTFRSDERWVYRAWERPDQGVTDTRLPDDDAMCSFWRNIWSVPVSHTEGDWTREVERACDSIPEMGAIIISPQDVARAVRPLPNWKSPGPDGLHNFWIKWFQRSHVRLASQFQSALESGSLPQFLTTGITHLLHKSGSTAEPKNYRPITCLPTVYKVLKSILRAKINHHIDSNSIMSASQNGCRNGSRGTKELLLIDMAISQQVRRSRRDLSTCWIDYKKAYDSVPHTWLMKVLELYKVDATLRTFLMSCMGHWRTVLHYPGCRQIQGNSEPIKIERGIFQGDSLSPLWFCLALNPLSTLLEGSGLGYRLRRGGQVISHLLYMDDLKLFAPNNLQLMKLLKVTETFSSAIRMEFGVDKCAVMHVKRGEIMESVGTQLSDSIHLRSLSSTETYKYLGMSEALGINTADMKQSLRDRFFGRLNKVLSSLLSGGNKVRAFNGWVMPVLMYSFGILKWTQTELDALDRRVRALLTANRMHHPRSSVMRLYIPRKCGGRGFLNAKTLHNREICSLREYFLEVDEGMHRDVVSVDKGLTPLSLANENWRKPRVLDTNDRKEVWQGKELHGRFYRALHGPDVDFLASVSWLRFGDLFGETEGFVCAIMDEVMMTNNYRKYIVKDGTVDICRACHRPGESIRHIISGCSRLANGEYLHRHNLVARIIHQQLALKYNLVESEVPYYKYAPDPVLDNGNITLYWDRSIITDRTIVANKPDIVVIDRLERRAMIVDITVPHDENLVKAEKDKQFKYLDLAREVVDMWDVSTAVIVPIVVSANGLIANSLDKHLRRLSLGSWIKGLIQKAVLLDTARIVRRFLSQEP

SEQ ID NO: 30645 - protein, 1206 aa, Noctua fimbriata
MITRSRAKQLQEAHTPSPGSSLSSASQPPRRATSVSTVSPVAAVASSSSDEFFSPPSTPPPSPRRRGRGRPPAGLGPRGQPAPNRVPAAGGNVSRMRWTQSINEQVMRAYYGATEGGSNLTAYRGRMLSLFQVLESGVSVSAQRLSDQVRVIQRNHMLDDTVLDRLRSESRSNLVTPASPMTAVQLQNVTIASPRSDRGGEGDDDEVISVSTQCNAQLRSALESAFREYRSTPPELRPRLPRLPMHKKNKALMCALDSQLSNCFDTSKDLADTHSILYCGAVAACRVAHVKFPNNDRATRSKLAVPAWQCRIERRIGEARALIGKLICFREGNTRPRVMRFVRRAFSGTDVNFRDYLARVTERIDFLKQKICAWASRIRRYKRRVERYTQNRTFQSDERWVYRAWERPDQGVTDTRLPDDNAMCSFWRSIWSVPVSHTEGDWIREVERACDPIPEMGAIIISPQDVACAVRPLPNWKSPGPDGLHNFWIKWFQRSHVRLASQFQLALESGSLPQFLTTGITHLLHKSGSTAEPKNYRPITCLPTVYKVLTSILRAKINHHIDSNSIMSASQNGCRNGSRGTKELLLIDMAVSQQVRRSRRDLSTCWIDYKKAYDSVPHTWLMRVLELYKVDATLRTFLTSCMGHWRTVLRYPGCRQIQGNSEPIRIERGIFQGDSLSPLWFCIALNPLSTLLEGSGLGYRLRRDGQVISHLLYMDDLKLYAPNNLQLMKLLKVTETFSSSIRMEFGVDKCAVMHVKQGEIMESLGTQLSDSIHLRSLSSTETYKYLGMSEALGINAADMKQSLRERFFGRLNKVLSSLLSGGNKVRAFNGWVMPVLMYSFGILKWTQMELDALDRRVRVLLTANRMHHPRSSVMRLYIPRKCGGRGFLNVKTLHNREVCSLREYFLEADVGMHRDVVSVDKGLTPLSLANENWRKPRVLDTNDRKEVWQGKELHGRFYRALHGPDVDFLASVAWLRFGDLFGETEGFVCAIMDEVMMTNNYRKYIVKDGTVDICRACHRPGESIRHIISGCSRLANGEYLHRHNLVARIIHQQLALKYNLVESEVPYYKYVPDPVLDDGNITLYWDRSIVTDRTIVANKPDIVVIDRLERRAMIVDITVPHDENLVKAEKDKQFKYLDLAHEVVDIWDVSTAVIVPIVVSANGLIANTLDQHLRRLSLGSWIKGLIQKAVLLDTARIVRRFLSQEP

SEQ ID NO: 30646 - protein, 1206 aa, Noctua fimbriata
MITRSRAKQLQEAHTPSPGSSLSSASQPPRRATSVSTVSPVAAVASSSSDEFFSPPSTPPPSPRRRGRGRPPAGLGPRGQPAPNRVPAAGGNVSRMRWTQSINEQVMRAYYGATEGGSNLTAYRGRMLSLFQVLEPGVSVSAQRLSDQVRVIQRNHMLDDTVLDRLRSESRSNLVTPASPMTAVQLQNVTIASPRSDRGGEGDDDEVISVSTQCNAQLRSALESAFREYRSTPPELRPRLPRLPMHKKNKALMCALDSQLSNCFDTSKDLADTHSILYCGAVAACRVAHVKFPNNDRATRPKLAVPAWQCRIERRIGEARALIGKLICFREGNTRPRVMRFVRRAFSGTDVNFRDYLARVTERIDFLKQKICAWASRIRRYKRRVERYTQNRTFQSDERWVYRAWERPDQGVTDTRLPDDNAMCSFWRSIWSVPVSHTEGDWIREVERACDPIPEMGAIIISPQDVACAVRPLPNWKSPGPDGLHNFWIKWFQRSHVRLASQFQLALESGSLPQFLTTGITHLLHKSGSTAEPKNYRPITCLPTVYKVLTSILRAKINHHIDSNSIMSASQNGCRNGSRGTKELLLIDMAVSQQVRRSRRDLSTCWIDYKKAYDSVPHTWLMRVLELYKVDATLRTFLTSCMGHWRTVLRYPGCRQIQGNSEPIRIERGIFQGDSLSPLWFCIALNPLSTLLEGSGLGYRLRRDGQVISHLLYMDDLKLYAPNNLQLMKLLKVTETFSSSIRMEFAVDKCAVMHVKQGEIMESLGTQLSDSIHLRSLSSTETYKYLGMSEALGINAADMKQSLRERFFGRLNKVLSSLLSGGNKVRAFNGWVMPVLMYSFGILKWTQMELDALDRRVRVLLTANRMHHPRSSVMRLYIPRKCGGRGFLNVKTLHNREVCSLREYFLEADVGMHRDVVSVDKGLTPLSLANENWRKPRVLDTNDRKEVWQGKELHGRFYRALHGPDVDFLASVAWLRFGDLFGETEGFVCAIMDEVMMTNNYRKYIVKDGTVDICRACHRPGESIRHIISGCSRLANGEYLHRHNLVARIIHQQLALKYNLVESEVPYYKYVPDPVLDDGNITLYWDRSIVTDRTIVANKPDIVVIDRLERRAMIVDITVPHDENLVKAEKDKQFKYLDLAHEVVDIWDVSTAVIVPIVVSANGLIANTLDQHLRRLSLGSWIKGLIQKAVLLDTARIVRRFLSQEP

SEQ ID NO: 30647 - protein, 1200 aa, Mythimna ferrago
MLTRSRAQQLNAQLTTSGPSLSSASQPPGPAPAVSPEIPVAAVASSSSDEYFSPPTTPPPARRRGRGRPPACLGPRGPPASDRVPAAGGSVQRMRWTQSINENVMRSYFGATEGGTNLTAYRGRMLSLFQVLEPAVNVSAQRLSDQVRVIQRNRMLDDAVLDRLRLESRNGRVSPVSPPAAVQRQPSVSPRPDHVGEDDDDGAISVSTQCNVRLRSALEDAFREYRSIPPELRPRLPRLPMHRKNRALVCALDSQLSNCFDSSEDLTDTHSILYCAAAAACRVAHVKIPNSDRATRPAKPAWQCRIERRIGEARALIGKLICFREGNTRPRVMRFVRRAFSGTDISPRDYLPRITERIDFLRQKVYAWANRIRRYKRRVERYTQNRAFQSNERWVYRAWERPDQSVIDTRLPDDDAMYSFWRSIWSVPVNHTEGDWTRKVERECELLPEMGAVTISPQDVARAVRPLPNWKSPGPDGLHNFWLKWFKSSHARLASQFQSALESGSLPQFLTTGITHLLHKSGSTAEPKNYRPITCLPTVYKVLTSILRDKINSHIETNSIMSASQNGCRNGSRGTKELLLIDVAISQQVRRSRRDLSTCWIDYKKAYDSVPHTWLMRVLELYKIDVTLRTFLMSCMGQWRTVLHYPGCRRVSENSEPLRIERGIFQGDSLSPLWFCLALNPLSTLLEGSGVGYRLRREGQVISHLLYMDDLKLFASNNLQLMELLKVTETFSSAIRMEFGLDKCAVMHVKRGEIMESVGTQLSDSIHLRSLCSTETYKYLGMSEALGINAADVKQSLRERFFGRLNKVLKSLLSGGNKVRAFNGWVMPVLMYSFGILKWTQTELDALDRRVRTLLTANRMHHPRSSVMRLYIPRKCGGRGFLNAKTLHNREVCSLRKYFLETDVGMHRDVVAVDKGLTPLSLANENWRKPIVMDINERKEVWKGKELHGRFYRALHGPDVDLLASVSWLRFGDLFGETEGFVFAIMDEVMMTNNYRKYIVKDGTVDICRACHRPGESIRHIISGCSHLANGDYLHRHNLVARIIHQQLALKYNLVESEVPYYRYVPDPVLENGSVILYWDRSIITDRTIVANKPDIVVIDRLERRTMIVDIAVPHDENLVKAEKDKQTKYLDLAREVVDMWEVDRAIIVPIVVTANGLIAKSLDQHLRRLSLGSWIKGLIQKAVLLDTARIVRRFLSQEP

SEQ ID NO: 30648 - protein, 1200 aa, Mythimna ferrago
MLTRSRARSQIAQPTSSGSSLSSASQPPGPAPAVSPEIPVAAVASSSSDEYFSPPTTPPPARRRGRGRPPACLGPRGPPASDRVLAAGGSVQRMRWTQSINENVMRSYFGATEGGTNLTAYRGRMLSLFQVLEPAVNVSAQRLSDQVRVIQRNRMLDDAVLDRLRLESRNGRVSPISPPAAVQRQPSVSPRPDHVGEDDDDEAISVSTQCNARLRSALEDAFREYRSIPPELRPRLPRLPMHRKNRALVCALDSQLSNCFDSSEDLSDTHSILYCAAAAACRVAHVKIPNNDRATRPAKPAWQCRIERRIGEARALIGKLICFREGNTRPRVMRFVRRAFSGTDISPRDYLPRITERIDFLKQKVYAWANRIRRYKRRVERYTQNHTFQSNERWVYRAWERPDQSVIDTRLPDDDAMYSFWRSIWSVPVNHTEGDWTREIERECELIPEMGAINISPQDVARAVRPLPNWKSPGPDGLHNFWLKWFQSSHARLASQFQSALESGSLPQFLTTGITHLLHKSGSTAEPKNYRPITCLPTVYKVLTSILRAKINNHIETNSIMSASQNGCRNGSRGTKELLLIDVAISQQVRRSRRDLSTCWIDYKKAYDSVPHTWLMRVLELYKVDATLRAFLMSCMGQWRTVLHYPGCRRVSENSEPLRIERGIFQGDSLSPLWFCLALNPLSTLLEGSGLGYRLRREGQVISHLLYMDDLKLFASNNLQLMELLKVTETFSSAIRMEFGLDKCAVMHVKRGEIMESVGTQLSDSIYLRSLCSTETYKYLGMSEALGINAADVKQSLRERFFGRLNKVLNSLLSGGNKVRAFNGWVMPVLMYSFGILKWTQTELDALDRRVRTLLTANRMHHPRSSVMRLYIPRKCGGRGFLNAKTLHNREVCSLRGYFLETDVGMHRDVVAVDKGLTPLSLANENWRKPIVMDTNERKEVWKGKELHGRFYRALHGPDVDLLASVSWLRFGDLFGETEGFVFAIMDEVMMTNNYRKYIVKDGTVDICRACHRPGESIRHIISGCSHLANGDYLHRHNLVARIIHQQLALKYNLVESEVPYYRYVPDPVLENGSVTLYWDRSIITDRTIVANKPDIVVIDRLERRTMIVDIAVPHDENLVKAEKDKQTKYLDLAREVVDMWEVDRAIIVPIVVTANGLIAKSLDQHLRRLSLGSWIKGLIQKAVLLDTARIVRRFLSQEP

SEQ ID NO: 30649 - protein, 1207 aa, Xestia xanthographa
MTRHRAKLQKEAHPPSPGSSLSSASQPPGRATPVSSVSPVAAVASSSSDEFFSPPSTPPPPPRGRRRGRGRPPAGLGPRGQQAPSRVPAAGGNVSRMRWTQSMNENVMRAYYGATEGGSNLTAYRSRMLSLFQVLEPAVSVEAQRLSDQVRVIQRNHMLDDTVLDRLRSESRSNLVTPASPMIAVQQQNIPSAPPRSDYDGEDDRDEVISVSTQCNAQLRSALEGAFREYRSTPPELRPRLPRLPMHNKNKALMCALDSQLSNCFDSSKDLTDTHSILYCGAVAACRVAHVKFPNNDGATRPKLAVPAWQCRIERRIGEARALIGKLICFREGNTRPRVMRFVRRAFSGTDISFRDYLARVTERIDSLKQKICAWASRIRRYKRRVERYTQNRTFQSDERWVYRAWERPDQGVTDTRLPDDSAMYSFWRNIWSVPVSHTEGDWTREVEQACDPIPEMGAIIISPEDVARAVRPLPNWKSPGPDGLHNFWIKWFQRSHARLASQFQSALESGSLPQFLTIGITHLLHKSGSAAEPKNYRPITCLPTVYKVLTSILRAKINQHIDSNSIMSASQNGCRNGSRGTKELLLIDMAISQQVRRSRKNLSTCWIDYKKAYDSVPHTWLMRVLELYKIDATLRTFLMSCMGHWRTVLRYPGCRQIQGNSEPIRIERGIFQGDSLSPLWFCLALNPLSTLLERSGLGYLLRRDGQVISHLLYMDDLKLFAPNNLQLMKLLKVTETFSSAIRMEFGVDKCAVMHVKRGEIMESEGTQLSDSIHLRSLSSTETYKYLGMSEALGINTADMKQSLRERFFGRLNKVLGSLLSGGNKVRAFNGWVMPVLMYSFGILKWTQTELDALDRRVRTLLTANRMHHPRSSVMRLYIPRKCGGRGFLSAKTLHNREVYSLREYFLEAEGEMHRDVVSVDKGLTPLSLANENWRKPKVLDTNDRKVEWQGKELHGRFYRVLHGPDVDFLASVSWLRFGDLFGETEGFICAIMDEVMMTNNYRKYIVKDGTVDICRACHRPGESIRHIISGCSSLANGEYLHRHNLVARIIHQQLALKYNLVESEVPYYKYAPDPVLDNGHITLYWDRPITTDRTVVANRPDIVVIDRLERRTMIVDITIPHDENLVKAEKDKQFKYLDLAREVVDMWDVGTAVIVPIVVSANGLIAKSLDQHLRRLSLGSWIKGLIQKAVLLDTARIVRRFLSQEP

SEQ ID NO: 30650 - protein, 868 aa, Mythimna impura
MRFVRRAFLGTGISPQEYMSRVTERIDFLKQKVCAWASRIRRYKRRVDRYSQNRMFQSDERWVYRAWERPEQNVIDGRRPDDFATITFWRNIWSVPVSHTEGDWMRDVERVCEAIPEMEKVVITPADVAKAVRPLPNWKSPGPDGLQNFWLKWFSNSHAPLASQFQSTLESGSLPEYLTIGVTHLLHKTGNPVEPKNYRPITCLSTVYKLLTSILRAKINRHIENNLIMSASQNGCRNGSRGTKELLLIDMAISQQARRSRKDLSTCWIDYKKAYDSVPHTWLMRVLELYKVDMTLRTFLESCMRQWKTVLRYPGCRPIQGNDEPIRIKRGIFQGDSLSPLWFCLALNPLSTLLEESGLGYRLRRGGQAISHLLYMDDLKLFAPSNLQLMELLKVTETFSSAIRMEFGVDKCAAMHVKRGEIMESEGIQLPDSIHLRSLSSTETYRYLGMSEALGINNADMKQSLKERFFGRLKKVLNSLLSGGNKVRAFNGWVMPVLMYSFGILKWTQTELDALDRRVRTLLTANRMHHPRSSVMRLYISRKCGGRGFLNAKTLHNREVCSLREYFLKTDVGMHRDVVAVDMGLTPLSMAKEDWRKPVILTTDDRKEIWKGKELHGRFYRALHEPDVDFLASVAWLRFSDLFGETEGFICAIMDEVILTNNYRRYIMKDGTVDVCRACHRPGESIRHIISGCSRLANGEYLHRHNQVARIIHQQLALKYNLVDSEVPYYKYVPDPVLENDHVTLYWDRSIITDRSIVANKPDIVVIDRLARRAVIVDVTIPHDENLVKAEKEKQIKYLDLAHEVVDMWNVNSAVIVPMVVTANGLIAKSFDDHLSKLSLRGWIKGLIQKAVLLDTARIVRRFLSLEP

SEQ ID NO: 30651 - protein, 1111 aa, Mamestra brassicae
MRWTQSMNENVMRAYYGSTEGGTNLTAYRVRMLSLFQDLEPTVNVSAQRLSDQVRVIQRNHRLDDAALDRLRSEVLNNLIISTPTQTAVQAPVNDAITPRPNNVSHEVDDRVVTVSSQCNDRLRSALEDALREYRSTPTELRPRLPRLPMHKKNRALVCALDSLLQNTFASSESLVDTHSILFCGAVAACRIANVKFPSYDEAIRPKPAAPAWQCRIERRIDEARALIGKLYCFREGNTRPRVMRFVRRAFLGTGISPRDFTSRVTERIDFLKQKVCAWANRIRRYKRRVDRYSQNRMFQSDERWVYRAWERPEQSVMDVCRPDDNTTSTFWRGIWSVPVCHTEGGWLRDVEHVCEAIPEMDTITITPLDVAKAVRPLPNWKSPGPDGLHNFWLKWYSSSHVLLASQFQSSLESGSLPQFLTTGVTHLLHKTGSPADPKNYRPITCLSTVYKLLTSILRAKINQHIERNSIMSASQNGCRKGSRGTKELLLIDMAISQQVRRSRKDLSTCWIDYKKAYDSVPHTWLMKVLELYKIDATLRTFLESCMRQWKTVLRYPGCRPIQGSDELVWIKRGIFQGDSLSPLWFCLALNPLSTLLEDSGLGYRLRRGGQAISHLLYMDDLKLFAPNNLRLMELLKVTETFSSSIRMEFGVDKCAVMHVKKGEIMESEGIQLSDFIQVRSLSSTETYKYLGVSEALGINGADMKQSLRERFFGRLKKVLNRLLSGGNKVRAFNGWVMPVLMYSYGILKWTQTELDALDRRVRTLLTANRMHHPRSSVMRLYIPRKCGGRGFLNAKTLHNCEVCNLRDFFLKTDVGMHRDVVAVDKGLTPLSMAKENWRKPVILTTDDRKEVWKGKELHGRFYRALHEPDVDFPASVSWLRFGDLFGETEGFVCAIMDEVILTNNCRRYIMKDGTVDVCRACHRPGESIRHIISGCSRLANGEYLHRHNQVARIIHQQLALKYQLVDSEVPCYKYVPDPVLENDHGTLYWDRSIITDRTIVANKPDIVVIDRLARRTMIIDVTIPHDVNLVKAEKEKQIKYLDLAHEVVDMWNVESAVIVPIVVTANGLLSKSFDDHLSKLSLRGWVKGLIQKAVLLDTARIVRRFLSLEP

SEQ ID NO: 30652 - protein, 1045 aa, Noctua janthe
MLDDTVLERLRFDSRSILVIPASPMIAVQLQNVSSAPPRSEHDGEEDDDEVISVSTQCNAQLRSALEGAFREYRSTPPELRPRLPRLPMHKKNKALVCALDSQLSNCFDSSKDLTDTHSILYCRAVAACRVAHVKFPNNDRAKRPKFAVPAWQCRIERRIGEARALIGKLICFREGNTRPRVMRFVKRAFSEPDVSFRDYLARVTERIDFLKQKICAWASRIRRYKRRVERYTQNRTFRSDERWVYRAWERPDQGVTDTRLPDDDAMCSFWRNIWSVPVSHTEGDWTREVERACQSIIISAQDVARAVRPLPNWKSPGPNGLHNFWIKWFQRSHVPLASQFQSALESGSLPQFLTTGITHLLHKTGSTAEPKNYRPLTCLPTVYKVLTSILRAKINHHIDSNSIMSASQNGCRNGSRGTKELLLIDMAISQQVRRSRRDLSTCWIDYKKAYDSVPHTWLMKVLELYKVDATLRTFLMSCMGHWRTVLRYPGCRQIQGNSEPIKIERGIFQGDSLSPLWFCLALNPLSTLLEGSGLGYRLRRGGQVISHLLYMDDLKLFAPNNNLQLMKLLKVTETFSSAIRMEFGVDKCAVMHVKRGEIMESVGTQLSDSIHLRSLSSTETYKYLGMSEALGINTADMKQSLRDRFFGRLNNVLSSLLSGGNKVRAFNGWVMPVLMYSFGILKWTQTELDALDRRVRALLTANRMHHPRSSVMRLYIPRKYGGRGFLNTKTLHNREVCNLREYFLEVDEGMHRDVVSVDKGLTPLSLANENWRKPRVLDTNDRKEVWQGKELHGRFYRALHGPDVDFLASVSWLRFGDLFGETEGFVCAIMDEVMMTNNYRKYFVKDGTVDICRACHRPGESIRHIISGCSRLANGEYLHRHNLVARIIHQQLALKYNLVESEVPYYKYAPDPVLDNGNITLYWDRSIITDRTIVANKPDIVVIDRLERRAMMVDITVPHDENLVKAEKDKHFKYLDLAREVVDMWDVSTAVIVPIVVSANGLIANSLDKHLRRLSLGSWIKGLIQKAVLLDTARIVRRFLSQEP

SEQ ID NO: 30653 - protein, 1201 aa, Euproctis similis
MLTRAKARLANALRPTPDSSLRSASQLPEPIPMSLAPVEASSSSSSDEYFSPLASPAPDRRKRRGRPPSSLGSRGPLVSNRIPAAGGEVHRMKWTQTINENVMRAYFGATRGGTNLTAYRSRMLLLFQDLEPAVNVSAQRLSDQVRVIQRSRLLDDVILERLRSESVQSSSDTSASQLINTITNTRKPTSSNRGIEVDDRIIDADAQYNNEELKKSLEDVIREYMFMPHNIRPPLPHLPTNRKNIALVSALDSILNSYLDNSNNLSDTHSILYCTALTACRVAGINISHNDSVTRPKPNKPSWQQRIESRIADARVLIGKLICFRSGNTRPRVMRFVKRAFLGTTYRPEEYMAQITERIDYLKQKICAWANRIRRYKKRYERYAVNRMFQRDQKLVYRDWERPLQATDVGPLPDAITTKNFWSSIWSAPVVHSEGAWICDVERACENITRMPSIKIAENDVRCAVRSLSNWKSPGPDGLYNFWLKWLRSSHARIATQFQEAIEKGTLPEFLTTGNTYLLHKTGSTTDPSNYRPITCLPSIYKLLTSILRSKITQHIEMNSVMSTSQNGCRKGGRGTKELLLIDMTINQQVRRRRGDLATAWIDYKKAFDSVPHTWLMRVLELYKVDRTLCTFLETCMRQWKTVLSYPGCRQSRDGGVPLKIQRGIFQGDSLSPLWFCLALNPLSTLLENSGLGYRLRRGSRCRSHLLYMDDLKLFASNRSQLVELLRVTQTFSSSINMGFGVDKCAVMHVKRGVIVESEGISLSDSTRFRSLSVTETYKYLGISQALCINEVSMKQLMRERFFGRLKKVLNSLLSGGNKVRAFNSWVMPVLMYSFGILKWTQTELDALDRKVRTLLTASRMHHPRSSVMRLYIPRRCGGRGFLNIKSLHNREVCSLRQFLLLADVDVIRDVVRVDDGFTPLALAKENWRKPVVLNTTDRLEVWRSKELHGRFYRALHGPDVDTLTSVSWLRFGDLFGETEGFVFAIMDEVMMTNNYRKYILKDGTVDICRACHCPGESIRHIVSGCSRLANGEYLHRHNQVARIIHQQIALKYNLVERGVPYYRYMPDPVLENGHITLYWDRSIVTDRTVVANRPDIVIVDRLERRAVIVDVTIPHDENLVKAEKDKQLKYLDLAHEISDMWDVDSTIIVPIVISVNGLIAKSLDQHLERLSLDSWIKGLMQKAVLLGTARIVRKFLSLGP

SEQ ID NO: 30654 - protein, 1200 aa, Mythimna ferrago
MLTRSRAQQLNAQLTTSGPLLSSASQPPGPAPAVSPEIPVAAVASSSSDEYFSPPTTPPPARRRGRGRPPACLGPRGPPASDRVPAAGGSVQRMRWTQSINENVMRSYFGATEGGTNLTAYRGRMLSLFQVLEPAVNVSAQRLSDQVRVIQRNRMLDDAVLDRLRLESRNGRVSPVSPPAAVQRQPSVSPRPDHVGEDDDDGAISVSTQCNVRLRSALEDAFREYRSIPPELRPRLPRLPMHRKNRALVCALDSQLSNCFDSSEDLTDTHSILYCAAAAACRVAHVKIPNSDRATRPAKPAWQCRIERRIGEARALIGKLICFREGNTRPRVMRFVRRAFSGTDISPRDYLPRITERIDFLRQKVYAWANRIRRYKRRVERYTQNRAFQSNERWVYRAWERPDQSVIDTRLPDDDAMYSFWRSIWSVPVNHTEGDWTRKIERECELLPEMGAVTISPQDVARAVRPLPNWKSPGPDGLHNFWLKWFKSSHARLASQFQSALESGSLPQFLTTGITHLLHKSGSTAEPKNYRPITCLPTVYKVLTSILRAKINSHIETNSIMSASQNGCRNGSRGTKELLLIDVAISQQVRRSRRALSTCWIDYKKAYDSVPHTWLMRVLELYKIDVTLRTFLMSCMGQWRTVLHYPGCRRVSENSEPLRIERGIFQGDSLSPLWFCLALNPLSTLLEGSGVGYRLRREGQVISHLLYMDDLKLFASNNLQLMELLKVTETFSSAIRMEFGLDKCAVMHVKRGEIMESVGTQLSDSIHLRSLCSTETYKYLGMSEALGINAADVKQSLRERFFGRLNKVLKSLLSGGNKVRAFNGWVMPVLMYSFGILKWTQTELDALDRRVRTLLTANRMHHPRSSVMRLYIPRKCGGRGFLNAKTLHNREVCSLRKYFLETDVGMHRDVVAVDKGLTPLSLANENWRKPIVMEINERKEVWKGKELHGRFYRALHGPDVDLLASVSWLRFGDLFGETEGFVFAIMDEVMMTNNYRKYIVKDGTVDICRACHRPGESIRHIISGCSHLANGDYLHRHNLVARIIHQQLALKYNLVESEVPYYRYVPDPVLENGSVTLYWDRSIITDRTIVANKPDIVVIDRLERRTMIVDIAVPHDENLVKAEKDKQTKYLDLAREVVDMWEVDRAIIVPIVVTANGLIAKSLDQHLRRLSLGSWIKGLIQKAVLLDTARIVRRFLSQEP

SEQ ID NO: 30655 - protein, 1174 aa, Mythimna ferrago
MLTRSRAQQLNTQLTTSGPSLSSASQPPGPAPAVSPEIPVAAVASSSSDEYFSPPTTPPPARRRGRGRPPACLGPRGPPASDRVPAAGGSVQRMRWTQSINENVMRSYFGATEGGTNLTAYRGRMLSLFQVLEPAVNVSAQRLSDQVRVIQRNRMLDDAVLDRLRLESRNGRVSPVSPPAAVQRQPSVSPRPDHVGEDDDDGAISVSTQCNVRLRSALEDAFWEYRSIPPELRPRLPRLPMHRKNRALVCALDSQLSNCFDSSEDLTDTHSILYCAAAAACRVAHVKIPNSDRATRPAKPAWQCRIERRIGEARALIGKLICFREGNTRPRVMRFVRRAFSGTDISPRDYLPRITERIDFLRQKVYALANRIRRYKRRVERYTQNRAFQSNERWVYRAWERPDQSVIDTRLPNDDAMYSFWRSIWSVPVNHTEGDWTRKVERDCELLPEMGAVTISPQDVARAVRPLPNWKSPGPDGLHNFWLKWFKSSHARLASQFQSALESGSLPQFLTTGITHLLHKSGSTAEPKNYRPITCLPTVYKVLTSILRAKINSHIETNSIMSASQNGCRNGSRGTKELLLIDVAISQQVRRSRKDLSTCWIDYKKAYDSVPHTWLMKVLELYKIDVTLRTFLMSCMGQWRTVLHYPGCRRVSDNSEPLRIERGIFQGDSLSPLWFCLALNPLSTLLEGSGVGYRLRREGQVISHLLYMDDLKLFASNNLQLMELLKVTETFSSAIRMEFGLDKCAVMHVKRGEIMESVGTQLSDSIHLRSLCSTETYKYLGMSEALGINAADVKQSLRERFFGRLNKVLKSLLSGGNKVRAFNGWVMPVLMYSFGILKWTQTELDALDRRVRTLLTANRMHHPRSSVMRLYIPRKCGGRGFLNAKTLHNREVCSLRKYFLETDVGMHRDVVAVDKGLTPLSLANENWRKPIVMDINERKEVWKGKELHGRFYRALHGPDVDLLASVSWLRFGDLFGETEGFVFAIMDEVMMTNNYRKYIVKDGTVDICRACHRPGESIRHIISGCSHLANGDYLHRHNLVARIIHQQLALKYNLVESEVPYYRYVPDPVLENGSVTLYWDRSIITDRTIVANKPDIVVIDRLERRTMIVDIAVPHDENLVKAEKDKQTKYLDLAREVVDMWEVDRAIIVPIVVTANGLIAKSLDQHLRRLSLGS

SEQ ID NO: 30656 - protein, 1226 aa, Mythimna impura
MLTRSRAKKANTHPTSSGSSLSSASQPPGPAPTVSPEIPVAAVASSSSDEYFSPPTTPPPARRRGRGRPPASLGSRGPPASDRVLAAGGSVQRMRWTQSINENVMRSYFGATEGGSNLTAYRGRMLSLFQVLEPAVNVSAQRLSDQVRVIQRNRMLDDAVLDRLRLESRSSRVSPASPQAAVQLQSNVSLRPDHVGENDDDGAISVSNQCNVRLRSALEDAFREYRFTPAELRPRLPRLPMHKKNRALVCALDSQLSNCFDSSEDLTDTHSILYCAAVAACRVARVKFPNSDRVTRPAVPAWQCRIERRIGEARALIGKLICFREGNTRPRVMRFVRRAFSGTDISPRDYLPHITERIDFLKQKVYAWANRIRRYKRRVERYTQNRTFQRNERWVYRAWERPDQGVIDTRLPDDDAMCSFWRSIWSVPVSHTEGDWIREIERTCDLIPEMGAITISPQDVARAVRPLPNWKSPGPDGLHNFWLKWFQRSHARLASQFQSALESGSLPQFLTTGITHLLHKSGSTAEPKNYRPITCLPTVYKVLTSILRAKINSHIEKNSIMSASQNGCRNGSRGTKELLLIDVAISQQVRRSRRDLSTCWIDYKKAYDSVPHTWLMRVLELYKVDATLRTFLMSCMRQWRTALHYPGCRQIRESSEPIRIERGIFQGDSLSPLWFCLALNPLSTLLEGSGLGYRLRRGGHVISHLLYMDDLKLYASNNLQLMELLKVTETFSSAIRMEFGLDKCAVMHVKRGEIMESVGTQLSDSIYIRSLCSTETYKYLGMSEALGINAADMKQSLRERFFGRLNKVLNSLLSGGNKVRAFNGWVMPVLMYSFGILKWTQTELDALDRRVRSLLTANRMHHPRSSVMRLYIPRKCGGRGFLNAKTLHNREICSLREYFLKTDEGMHRDVVAVDKGLTPLSLVNENWRKPTVMDTNERRAVWQGKELHGRFYRALHGPDVDLLASVSWLRFGDLFGETEGFVFAIMDEVMMTNNYRKYIVKDGTVDICRACHRPGESIRHIISGCPHLANGDYLHRHNLVARIIHQQLALKYNLVESEVPYYRYVPDPVLENGGVTLYWDRSIITDRTIVANKPDIVVIDRLERRTMIVDIAVPHDENLVKAEKDKQAKYLDLAREVVDMWEVDRAIIVPIVVTANGLIAKSLEQHLRRLSLGSWIKGLIQKAVLLDTARIPLSGALTTGSLDPVPDAGGLLFFIFLNVFFYYVCF

SEQ ID NO: 30657 - protein, 962 aa, Xestia xanthographa
MHNKNKALMCALDSQLSNCFDSSKDLADTHSILYCGAVAACRVAHVKFPNNDRATRPKLAVPAWQCRIEWRIGEARALIGTLICFREGNTRPRVMRFVRRAFSGTDISFRDYLACVTERIDSLKQKICAWASRIRRYKRRVERYTQNRTFQSDERWVYRAWERPDQGVTDTRLPDDSAMYSFWRNIWSVPVSHTEGDWTREVEQACDPIPEMGAIIISPQDVARAVRPLPNWKSPGPDGLHNFWIKWFQRSHARLASQFQSALESGSLPQFLTTGITHLLHKSGSAAEPKNYRPITCLPTVYKVLTSILRAKINQHIDSNSIMSASQNGCRNGSRGTKELLLIDMAISQQVRRSRKNLSTCWIDYKKAYDSVPHTWLMKVLELYKIDATLRTFLMSCMGHWRTVLRYPGCRQIQGNSEPIRIERGIFQGDSLSPLWFCLALNPLSTLLERSGLGYLLRRDGQVISHLLYMDDLKLFAPNNLQLMKLLKVTETFSSAIRMEFGVDKCAVMHVKRGEIMESEGTQLSDSIHLRSLSSTETYKYLDMSEALGINTADMKQSLRERFFGRLNKVLRSLLSGGNKVRAFNGWVMPVLMYSFGILKWTHTELDALDRRVRTLLTANRMHHPRSSVMRLYIPRKCGGRGFLNAKTLHNREVYSLRAYFLEADGEMHRDVVSVDKGLTPLSLANENWRKPKVLDTNDRKVEWQGKELHGRFYRALHGPDVDFLASVSWLRFGDLFGETEGFICAIMDEVMMTNNYRKYIVKDGTVDICRACHRPGESIRHIISGCSSLANGEYLHRHNLVARIIHQQLALKYNLVESEVPYYKYAPDPVLDNGHITLYWDRPITTDMTVVANRPDIVVIDRLERRTMIVDITIPHDENLVKAEKDKQFKYLDLAREVVDMWDVGTAVIVPIVVSANGLIAKSLDQHLRRLSLGSWIKGLIQKAVLLDTARIVRRFLSQEP

SEQ ID NO: 30658 - protein, 868 aa, Mythimna ferrago
MRFVRRAFSGTDISPRDYLPRITERIDFLRQKVYAWANRIRRYKRRVERYTQNRAFQSNERWVYRAWERPDQSVIDTRLPDDDAMYSFWRSIWSVPVNHTEGDWTRKVERECELLPEMGAVTISPQDVARAVRPLPNWKSPGPDGLHNFWLKWFKSSHARLASQFQSALESGSLPQFLTTGITHLLHKSGSTAEPKNYRPITCLPTVYKVLTSILRAKINSHIETNSIMSASQNGCRNGSRGTKELLLIDVAISQQVRRSRRDLSTCWIDYKKAYDSVPHTWLMRVLELYKIDVTLRTFLMSCMGQWRTVLHYPGCRRVSENSEPLRIERGIFQGDSLSPLWFCLALNPLSTLLEGSGVGYRLRREGQVISHLLYMDDLKLFASNNLQLMELLKVTETFSSAIRMEFGLDKCAVMHVKRGEIMESVGTQLSDSIHLRSLCSTETYKYLGMSEALGINAADVKQSLRERFFGRLNKVLKSLLSGGNKVRAFNGWVMPVLMYSFGILKWTQTELDALDRKVRTLLTANRMHHPRSSVMRLYIPRKCGGRGFLNAKTLHNREVCSLRKYFLETDVGMHRDVVAVDKGLTPLSLANENWRKPIVMDINERKEVWKGKELHGRFYRALHGPDVDLLASVSWLRFGDLFGETEGFVFAIMDEVMMTNNYRKYIVKDGTVDICRACHRPGESIRHIISGCSHLANGDYLHRHNLVARIIHQQLALKYNLVESEVPYYRYVPDPVLENGSVTLYWDRSIITDRTIVANKPDIVVIDRLERRTMIVDIAVPHDENLVKAEKDKQTKYLDLAREVVDMWEVDRAIIVPIVVTANGLIAKSLDQHLRRLSLGSWIKGLIQKAVLLDTARIVRRFLSQEP

SEQ ID NO: 30659 - protein, 952 aa, Blastobasis lacticolella
MSVSANNGADIRGHSINGATSFQCFLCPQARFFNTKRGLNIHIGKKHKENPNNIPSSCPNFNTTPPSSTNQDEPLWSYLSNLKRTVPVIKRIPRGARITVAHKLSSIIKNTIKENTKRAWTQLLTFPFYILNVNNENSKSLTTKIKLNCSENNPLDNFFQTSRFYHSYNKQRKIEEKVSDGDIKGAAQLLFSQDSLAPDSQETLIALKDKHPSAPQPDLTPPDLTTAAHLTANCDDVLTAVMSFKNGSAGGLDGLSPQHLKDLLCKSCGDAGAKLLEDLTALINVMLAGRVNSDIIDTLYGANLCALIKKDGGVRPIAVVTTLRRLASKISCKKFAPKLTSAFQPIQLGFGSKGGCEAAVHALRAFITHDQAEVVLKVDVKNAFNSVNRDTLLIEIKQQCPELLPYIWQCYNIPSKLMYKSHVLNSEVGCQQGDPLGPAIFSLAIHPIISKLQSKFNIWYLDDGTLGGEAATVLKDLHILTSEFQKIGLTLNFSKCELYLDPKLTDKEKIITEFDSTAPGIKILNDENLRLLGAPIMDESIPAFLKEKQSKFEIYCQELVKIKSHMALYILRFCLFVPEFTYFLRCSPIWKFENLILPLDNEIKSIFGKILNLNLNTRSWSQAALPIRLGGIGVRKISNVSLPAFLSSVHSTENLVSKILGPQHNFIQSSCCTDAKQAWESLCPSETPPESPIHQRLWDEPLCKKIQKDLIDSSATEISERESGFWLQAVPSLNIGTVLDNLSLSICLGLRLGVNLVHPHWCPCGAYVDSLGHHGLSCSRSAGRISRHAAINDVIRRALVTVNVPAVLEPNGTVRDDGKRPDGMTLIAWKRGRALVWDATCVDTLAPSHVTSTARNAGAAASAAEDLKRRKYESIAQDFIFQPFGVETLGPWGPDALKLFKVLSKKLIDTTGDRRAGAFLGQRISIAIQRGNAASFLGTIPRDNGVDDFFNT

SEQ ID NO: 30660 - protein, 956 aa, Blastobasis lacticolella
MPTQNDDDVRGNISDGVLTFQCPLCPQARCFNSKHGLNIHIGKKHKQNRTITIPSSCPFQNSATTSPTVQDEPLWSYLAELKESVPVIKRVPRGARIAVAQNLTNIIKTTVKENSKRAWTKLFTFTSEILNVDKENSSSLTNKIKQNCNSLTNNRFFRHNHRRIFNKVSKVEEKVSEGDIKGAAQLLFSQDSLAPDSRETLDALREKHPSAPQSNLTAPDLSSIHLTATCDDVLSAVMSFKNGSAGGLDGLSPQHLKDLLCKSCGDAGTRLLEQLTALINVMLAGKVNTEVIDILYGANLCALMKKEGGVRPIAVGTTIRRLASKICCKKLAPKLTSIFQPIQLGYGSKGGCEAAVHALRTFISSNQAEVVLKVDVKNAFNSVNRDTLLTEIKKECPELLRYIWQCYNSPSKLMYKSNVLNSEVGCQQGDPLGPAIFSLAIQPIISKLKSKLNVWYLDDGTLGGGVTTVLDDLELISTEFQNIGLSLNFSKCELYLDPNLINKPEIITNFDSKAPGIKILSEETLRLLGAPILDKSVPPFILEKQLKFQIYSEELLKIKSHMALFLLRFCLFVPQFTYFLRCSPFWRYDNLVIPLDNDIRTVISKILNLDLNSRAWSQASLPVRLGGIGVRKISSVSLPAFLSSVHSTENLVSKILGPHTSFIDSPCCTDAKKAWMSICPNESLPESPMHQRLWDEPLCKKILKDLLVSSANLSERARLLAVTERESGFWLQAVPSSNIGTVLDNLSLSICLGIRLGVNLVRPHYCPCGASVDPLGHHGLSCTRSAGRISRHAAINDIIRRALVTVNVPAVLEPKGTVRDDGKRPDGMTLIGWQRGKALVWDATCVDTLAPSHVASTGSCAGAAASAAEDLKRRKYVSLAQDFVFQPFGVETLGPWGPGAKKFFAELSIKLNDTTGDRRAGSFLGQRISIAIQRGNAASFLGTIPGDSGVDDFFNF

SEQ ID NO: 30661 - protein, 955 aa, Blastobasis adustella
MPTQNHDDIRGIISDGVLTFQCPLCSQARFFNSKNGLNIHIGKKHKKNPSISIPSSCPVQNSTTSSPTVQDEPLWSYLAELKQSVPVIKRVPRGARIAVAQNLTNIIKNTVKENSKRAWTKLFTFPFEILNVNKENSSSLTNKINQNCNITNKSFFRPNRRHIFNKERKVEEKVSEGDIKGAAQLLFSQDSLAPDSRETLDALREKHPSAPQSNLTAPDLSSTHLTATCDDVMSAVMSFKNGSAGGLDGLSLQHLKDLLCKSCGDAGLRLLEELTALINVMLAGKVNAQIIDILYGANMCALMKKDGGVRPIAVGTTIRRLASKICCKKLAPKLTSIFQPIQLGFGSKGGCEAAVHALRTFITNNQAEVVLKVDVKNAFNSVNRDTLLIEIKKQCPELLPYIWQCYNSASKLMYKSNVLNSEVGCQQGDPLGPAIFSLAIQPIISKLKSKLNVWYLDDGTLGGGVTTVLDDLQLISSEFQNIGLSLNFSKCELYLDPNLINKPKIITNFDSKAPGIKILSEETLRLLGAPILDKSVPPFLLEKQSKFQIYCEELLKIKSHMALFLLRFCLFVPQFTYFLRCSPIWQFDNLVIPLDNDIRTIISKILNLDLNSRAWSQASLPARLGGIGVRKISSISLPAFLSSVYSTENLVSKILGPHTSFIDSPCCTDAKKAWMSICPNESPPESPMHQRLWDEPLCKKILKDLLDSSASISERARLLAVTERESGFWLQAVPSSNIGTVLDNLSLSICLGLRLGVNLVRPHYCPCGASVDPLGHHGLSCTRSAGRISRHAAINDVIRRALVTVNVPAVLEPKGTVRDDGKRPDGMTLIGWQRGKALVWDATCVDTLAPSHVASTASCAGAAASAAEDLKRRKYESLAQDFVFQPFGVETLGPWGPGARKFFIELSKKLNDTTGDRRAGSFVGQRISIAIQRGNAASFLGTIPEGSGVDDFFMC

SEQ ID NO: 30662 - protein, 960 aa, Blastobasis lacticolella
MSVSANNDADIRGHSIDGATSFQCFLCPQARFFNTKRGLNIHIGKKHKQNPNNIPSSCPNFNTTPPSSTNQDEPLWSYLSKLKRAVPVIKRIPRGARITVAHKLSSIIKNTIKENSKRAWTQLLTFPFYILNVNNENSKSLTTKIKLNCSENNPLDNFFQTSRLYHSYNKQRKIEEKVSDGDIKGAAQLLFSQDSLAPDSQETLIALKDKHPSAPQPDLTPPDLTTAAHLTANCDDVLTAVMSFKNGSAGGLDGLSPQHLKDLLCKSCGDAGVKLLEDLTALINVMLAGRVNADIIETLYGANLCALIKKDGGVRPIAVGTTLRRLASKISCKKFAPKLTSTFQPIQLGFGSKGGCEAAVHALRAFITHDQAEVVLKVDVKNAFNSVNRDTLLIEIKQQCPELLPYIWQCYNIPSKLMYKSHVLNSEVGCQQGDPLGPAIFSLAIHPIISKLQSKLNIWYLDDGTLGGEAATVLKDLHILTSEFQKIGLTLNFSKCELYLDSKLTDKEKIITEFDSFAPGIKILNDENLRLLGARIMDESIPAFLKEKQSKFEIYCQELVKIKSHMALYILRFCLFVPEFTYFLRCSPIWKFENLILPLDNEIKSILGKILNLNLNTRSWSQAALPIRLGGIGVRKISNVSLPAFLPSVHSTENLISKILGPQHNFMQSSCCTDAKQAWESLCPSETPPESPIHQRLWDEPLCKKIQKDLIDSSASVSERARLLAVSERESGFWLQAVPSLNIGTVLDNLSLSICLGLRLGVNLVHPHWCPCGAYVDSLGHHGLSCSRSAGRISRHAAINDVIRRALVTVNVPAVLEPNGTVRDDGKRPDGMTLIAWKRGRALVWDATCVDTLAPSHVTSTARGAGAAASAAEDLKRRKYESLAQDFIFQPFGVETLGPWGPDALKFFKVLSKKLIDTTGDRRAGAFLGQRISIAIQRGNAASFLGTIPRDNSVDDFFNI

SEQ ID NO: 30663 - protein, 719 aa, Blastobasis lacticolella
MSFKNGSAGGLDGLSPQHLKDLLCKSCGDAGIRLLEQLTALINVMLAGKVNTEVIDILYGANLCALMKKEGGVRPIAVGTTIRRLASKICCKKLAPKLTSIFQPIQLGYGSKGGCEAAVHALRTFISSNQAEVVLKVDVKNAFNSVNRVTLLTEIKKQCPELLPYIWQCYNSPSKLMYKSNVLNSEVGCQQGDPLGPAIFSLAIQPIISKLKSKLNVWYLDDGTLGGGVTTVLDDLELISTEFQNIGLSLNFSKCELYLDPNLINKPEIITNFDSKAPGIKILSEETLRLLGAPILDKSLPPFILEKQLKFQIYSEELLKIKSHMALFLLRFCLFVPQFTYFLRCSPFWRYDNLVIPLDNDIRTVISKILNLDLNSRAWSQASLPVRLGGIGVRKISSVSLPAFLSSVHSTENLVSKILGSHTSFIDSPCCTDAKKAWMSICPNESLPESPMHQRLWDEPLCKKILKDLLVSSANLSERARLLAVTERESGFWLQAVPSSNIGTVLDNLSLSICLGIRLGVNLVRPHYCPCGASVDPLGHHGLSCTRSAGRISRHAAINDIIRRALVTVNVPAVLEPKGTVRDDGKRPDGMTLIGWQRGKALVWDATCVDTLAPSHVASTGSCAGAAASAAEDLKRRKYVSLAQDFVFQPFGVETLGPWGPGAKKFFAQLSIKLNDTTGDRRAGSFLGQRISIAIQRGNAASFLGTIPGDSGVDDFFNF

SEQ ID NO: 30664 - protein, 907 aa, Blastobasis adustella
MPTQNHDDIRGIISDGVLTFQCPLCSQTRFFNSKHGLNIHIGKKHKKIPSISIPSSCPVQNSTTSSPTVQDEPLWSYLAELKQSVPVVKRVPRGARIAVAQNLTNIIKNTVKENSKRAWTKLFTFPFEILNVNKENSSSLTNKIKQNCNITNKSFFRPNRRYIFNKERKVKEKVSEGDIKGAAQLLFSQDSLAPDSRETLDALREKHPSAPQSNQTAPDLSSTHLTATCDDVMSAVMSFKNGSAGGLDGLSPQHLKDLLCKSCWDAGLRLLEELTALINVMLAGKVNAQIIDILYGANMCALMKKDGGVRPIAVGTTIRRLASKICCKKLAPKLTSIFQPIQLGFGSKGGCEAAVHALRTFITNNQAEVVLKVDVKNAFNSVNRDTLLMEIKKQCPELLPYIWQCYNSPSKLMYKSNVLNSEVGCQQGDPLGPAIFSLAIQPIISKLKSKLNVWYLDDGTLGGGVTTVLDDLQLISSEFQNIGLSLNWSKCELYLDPNLINKPEIITNFDSKAPGIKILSEETLRLLGVPILDKSVPPFLLEKQSKFKIYCEELLKIKSHMALFLLRFCLFVPQFTYFLRCSPIWQFDNLVIPLDNDIRTIISKILNLDLNSRAWSQASLPALLGGIGVRKISSISLSAFLSSVYSTENLVSKILGPHTSFIDSPCCTDAKKAWMSICPNESPPESPMHQRLWDEPLCKKILKDLLDSSASISERARLLAVTERESGFWLQAVPSSNIGTVLDNLSLSICLGLRLGVNLVRPHYCPCGASVDPLGHHGLSCTRSAGRISRHAAINDVIRRALVTVNVPAVLEPKGTVRDDGKRPDGMTLIGWQRGKALVWDATCVDTLAPSHVASTASCGLSCGRPQAEEIRKSSARLRISAVWCGNVRTVGPRCEKVLYRTFKKIK

SEQ ID NO: 30665 - protein, 719 aa, Blastobasis lacticolella
MSFKNGSAGGLDGLSPQHLKDLLCKSCGDAGIRLLEELTALINVMLAGKVNTQVVDILYGANLCALIKKEGGVRAIAVGTTIRRLASKICCQKLAPKLTSIFQPIQLGYGSKGGCEAAVHALRTFISSNQAEVVLKVDVKNAFNSVNRDTLLTEIKKQCPELLPYIWQCYNSPSKLLYKSNVLNSEVGCQQGDPLGPAIFSLAIQPVISKLKSKLNVWYLDDGTLGGEVTTVLDDLELISTEFQNIGLSLNFSKCELYLDPNLINKPEIITNFDSKAPGIKILSEETLRLLGAPILDKSVPPFILEKQSKFQIYSEELLKIKSHMALFLLRFCLFVPQFTYFLRCSPFWRYDNLVIPLDNDIRTVISKILNLDLNSRAWSQASLPVRLGGIGVRKISSVSLPAFLSSVHSTENLVSKILGPHTSFIDSPCCTDAKKAWMSICPNESLPESPMHQRLWDEPLCKKNLKDLLVSSANLSERARLLAVTEQESGFWLQAVPSSNIGTVLDNLSLSICMGIRLAVNLVRPHYCPCGASVDPLGHHGLSCTRSAGRISRHAAINDIIRRALVTVNVPAVLEPKRTVRDDGKRPDGMTLIGWQRGKALVWDATCVDTLAPSHVASTGSCAGAAASAAEDLKRRKYVSLAQDFVFQPFGVETLGPWGPGAKKFFAELSKKLNDTTGDRRAGSFLGQRISIAIQRGNAASFLGTIPGDSGVDDFFNF

SEQ ID NO: 30666 - protein, 956 aa, Blastobasis lacticolella
MPTQNDDDVRGNISDGVLTFQCPLCPQARCFNSKHGLNIHIGKKHKQNRTITIPSSCPFQNSATTSPTVQDEPLWSYLAELKESVPVIKRVPRGARIAVAQNLTNIIKTTVKENSKRAWTKLFTFTFEILNVDKENSSSLTNKIKQNCNSLTNNRFFRHNHRRIFNKVSKVEEKVSEGDIKGAAQLLFSQDSLAPDSRETLDALRVKHPSAPQSNLTAPDLSSIHLTATCDDVLSAVMSFKNGSAGGLDGLSPQHLKDLLCKSCGDAGIRLLEQLTALINVMLAGKVNTEVIDILYGANLCALMKKEGGVRPIAVGTTIRRLASKICCKKLAPKLTSIFQPIQLGYGSKGGCETAVHALRTFISSNQAEVVLKVDVKNAFNSVNRDTLLTEIKKQCPELLPYIWQCYNSPSKLMYKSNVLNSEVGCQQGDPLGPAIFSLAIQPIISKLKSKLNVWYLDDGTLGGGVTTVLDDLELISTEFQNIGLSLNFSKCELYLDPNLINKPEIITNFDSKAPGIKILSEETLRLLGAPILDKSVPPFILEKQLKFQIYSEELLKIKSHMALFLLRFCLFVPQFTYFLRCSPFWRYDNLVIPLDNDIRTVISKILNLDLNSRAWSQASLPVRLGGIGVRKISSVSLPAFLSSVHSTENLVSKILGSHTSFIDSPCCTDAKKAWMSICPNESLPESPMHQRLWDEPLCKKILKDLLVSSANLSERARLLAVTERESGFWLQAVPSSNIGTVLDNLSLSICLGIRLGVNLVRPHYCPCGASVDPLGHHGLSCTRSAGRISRHAAINDIIRRALVTVNVPAVLEPKGTVRDDGKRPDGMTLIGWQRGKALVWDATCVDTLAPSHVASTGSCAGAAASAAEDLKRRKYVSLAQDFVFQPFGVETLGPWGPGAKKFFAELSIKLNDTTGDRRAGSFLGQRISIAIQRGNAASFLGTIPGDSGVDDFFNF

SEQ ID NO: 30667 - protein, 1499 aa, Phalera bucephala
MPIESLMPDRSKVRRQTKRDTIKAFGLLPDQKHFLLPISHAPLPHQLLPTLDPYRSLLLISSYPLLIQAKVEQRTPRAAWLRESLVTSMRTRDTRGPPVLFYPYHGERRALPWLTLISLATRGNTMITRSKLKNITQANLPTANETIQVSSSSISTATLSPMPVDNFNPNLPSSPQLSSSSSLFPSPNSSPNPFRTNFNFEQSSPTSSSMSVDVVQEANANNLGPAAGSSRARRKWTSEMNMFIWRTYLIITRLETSTRGYLGALHDSFTVQYPDMNASKQRIGDQRRAIVNNKLLPITILNQIRNEVASYLEQNEQPTPILTQEAGRMRWSNDINEAILRMFYEITELETNLTAHRKKLHDKFIEIYPHLSHISEQRISDQRRVIINNKMIPEHRIQEIRHEVEIQISNIRSHTNTNRLLVNNHAHIQTVTQENFLELSTDTSQLHSTIEKEVQYLPDTLQNSNSNNKEQQRPQNCQTPPATLSLDIQKIEQNFLETLDKFSNTEPKSRPYLPKQKSSRKLALIVEYIDKNILPNHLTTNQDFITFQNILYAAAYTAVSSNGTNINSNRTHNRGNLKPAWQRRLESKIEKFRTEIARLTQYIRGNRSNRIIVAVETIKNKYQTHSQHEITNTEPEHFLDTIKQKLSAAASRLRRYLTCTERKRQNSQFSNNEKTFYRNLKSNHRNNNNNTQNQTTPTPGALRRFWANIWENPVQHNKDAHWIHSVKENMTHIPNMQFDLISMETLIRVIKRTHNWKSPGTDNLHNYWYKKFTSIHSHLLNHLNIFIQSPHIMPKYISHGITYMLPKDTNTEDPSKYRPITCLQTINKILTACISEIIYKHLSEHKILAEQQKGCRKNSQGCKEQLTIDAITMNDAYKKKHNIHGMFIDYKKAFDSVPHSWLLQVLQLYKIHPTIIAFLESSMQNWQTVLKLKVSSDTTTTEPINIQRGIFQGDALSPLWFCLALNPLSDLLNKCNSGYKLSSITTFTISHLFYMDDIKIFADNINELFKLADITQQFSDDIHMQFGVDKCKILSVNNGKIEKNSYVLNNGEEIEPMDEYSVYKYLGFKQSRKIQQKQTKHEITQNFKNRVNQILKTHLNSKNTVKALNTYAIPILTYSFGIINWSKTDLNKLQRIINTSMTKHRKHHPKSSIERLTLPRYEGGRGLIDIQNLHNKQITTLRNYFHSKSNQSSLHKHVSEIDNKLTPLNLQDRRTQSNEKLTDRQCKIARWAEKSLHGRHRTDLNHSHVDKDKSNEWLIRGELFPETEGFMLAIQDQIIATRNYKKYIIKDTNLPTDLCRHCSSASETIQHITGACKSLVQTDYKHRHDQVAAIIHQRLAHQHQFINKKEPYYKYKPNLVLENRDVKIYWDRTIITDKTIHYNRPDITVHIKSSNTIYLIDIAIPNTHNIQSTISEKLTKYQDLAIELKTQWKANTVHIIPIVISSTGIIPNSLLQSLNLLGTPESTSYLLQKATILNTCRITRKFLRSSSISSSTFTI

SEQ ID NO: 30668 - protein, 1499 aa, Phalera bucephala
MPIESLMPDRSKVRRQTKRDTIKAFGLLPDQKHFLLPISHAPLPHQLLPTLDPYRSLLLISSYPLLIQAKVEQRTPRAAWLRESLVTSMRTRDTRGPPVLFYPYHGERRALPWLTLISLATRGNTMITRSKLKNITQANLPTANETIQVSSSSLSTATLSPMPVDNINPNLPSSPQLSSSSSLFPSPNSSPNPFRTNFNFEQSSPTSSSMSVDVVQEANANNLGPAAGSSRARRKWTSEMNMFIWRTYLIITRLETSTRGYLGALHDCFTVQYPDMNASKQRIGDQRRAIVNNKLLPITILNQIRNEVASYLEQNEQPTPILTQEAGRMRWSNDINEAILRMFYEITELETNLTAHRKKLHDKFIEIYPHLSHISEQRISDQRRVIINNKMIPEHRIQEIRHEVEIQISNIRSHTNTNRLLVNNHAHTQIVTQENFLELSTDASQLHSTIEKEVQYLPDTLQNSNSNNKEQQRPQNCQTPPATLSLDIQKIEQNFLETLDKFSKTEPTSRPYLPKQKSSRKLALIVEYIDKNILPNHLTTNQDFITFQNILYAAAYTAVSSNGTNINSNRTHNRGNFKPAWQRRLESKIEKFRTEIARLTQYIRGNRSNRIIVAVETIKNKYQTHSQHEITNTEPEHFLDTIKQKLSAAASRLRRYLTCTERKRQNSQFSNNEKTFYRNLKSNHRNNNNNTQNQTTPTPGALRRFWANIWENPVQHNKDAHWIHSVKENMTHIPNMQFDLISMETLIRVIKRTHNWKSPGTDNLHNYWYKKFTSIHSHLLNHLNIFIRSPHIMPKYISRGITYMLPKDTNTEDPSKYRPITCLQTINKILTACISEIIYKHLSEHKILAEQQKGCRKNSQGCKEQLTIDAITMNDAYKKKHNIHGMFIDYKKAFDSVPHSWLRQVLQLYKIHPTIIAFLESSMQNWQTVLKLKVSSDTTTTEPINIQRGIFQGDALSPLWFCLALNPLSDLLNKCNSGYKLSSITTFTISHLFYMDDIKIFADNINELFKLADITQQFSDDIHMQFGVDKCKILSVNNGKIEKNSYVLNSGEEIEPMDEYSVYKYLGFKQSRKIQQKQTKHEITQNFKNRVNQILKTHLNSKNTVKALNTYAIPILTYSFGIINWSKTDLNKLQRIINTSMTKHRKHHPKSSIERLTLPRYEGGRGLIDIQNLHNKQITTLRNYFHSKSNQSSLHKHVSEIDNKLTPLNLQDRRTQSNEKLTDRQCKIARWAEKSLHGRHRTDLNHSHVDKDKSNEWLIRGELFPETEGFMLAIQDQIIATRNYKKYIIKDTNLPTDLCRHCSSASETIQHITGACKSLVQTDYKHRHDQVAAIIHQRLAHQHQFINKKEPYYKYKPNLVLENRDVKIYWDRTIITDKTIHYNRPDITVHIKSSNTIYLIDIAIPNTHNIQSTISEKLTKYQDLAIELKTQWKANTVHIIPIVISSTGIIPNSLLQSLNLLGTPESTSYLLQKATILNTCRITRKFLTSSSISSSTFII

SEQ ID NO: 30669 - protein, 1158 aa, Phalera bucephala
MFYEITELETNLTAHRKKLHDKFIEIYPHLSHISEQRISDQRRVIINNKMIPEHRIQEIRHEVEIQISNIRSHTNTNRLLVNNHAHTQTVTQENFLELSTDTSQLHSTIEKEVQYLPDTLQNSNSNNKEQQRPQNCQTPPATLSLDIQKIEQNFLETLDKFSNTEPTSRPYLPKQKSSRKLALIVEYIDKNILPNHLTTNQDFITFQNILYAAAYTAVSSNGTNINSNRTHNRGNFKPAWQRRLESKIEKFRTEIARLTQYIRGNRSNRIIVAVETIKNKYQTHSQHEITNTEPEHFLDTIKQKLSAAASRLRRYLTCTERKRQNSQFSNNEKTFYRNLKSNHRNNNNNTQNQTTPTPGALRRFWANIWENPVQHNKDAHWIHSVKENMTHIPNMQFDLISMETLIRVIKRTHNWKSPGTDNLHNYWYKKFTSIHSHLLNHLNIFIQSPHIMPKYISHGITYMLPKDTNTEDPSKYRPITCLQTINKILTACISEIIYKHLSEHKILAEQQKGCRKNSQGCKEQLTIDAITMNDAYKKKHNIHGMFIDYKKAFDSVPHSWLLQVLQLYKIHPTIIAFLESSMQNWQTVLKLKVSSDTTTTEPINIQRGIFQGDALSPLWFCLALNPLSDLLNKCNSGYKLSSITTFTISHLFYMDDIKIFADNINELFKLADITQQFSDDIHMQFGVDKCKILSVNNGKIEKNSYVLNNGEEIEPMDEYSVYKYLGFKQSRKIQQKQTKHEITQNFKNRVNQILKTHLNSKNTVKALNTYAIPILTYSFGIINWSKTDLNKLQRIINTSMTKHRKHHPKSSIERLTLPRYEGGRGLIDIQNLHNKQITTLRNYFHSKSNQSSLHKHVSEIDNKLTPLNLQDRRTQSNEKLTDRQCKIARWAEKSLHGRHRTDLNHSHVDKDKSNEWLIRGELFPETEGFMLAIQDQIIATRNYKKYIIKDTNLPTDLCRHCSSASETIQHITGACKSLVQTDYKHRHDQVAAIIHQRLAHQHQFINKKEPYYKYKPNLVLENRDVKIYWDRTIITDKTIHYNRPDITVHIKSSNTIYLIDIAIPNTHNIQSTISEKLTKYQDLAIELKTQWKANTVHIIPIVISSTGIIPNSLLQSLNLLGTPESTSYLLQKATILNTCRITRKFLRSSSISSSTFTI

SEQ ID NO: 30670 - protein, 1348 aa, Lymantria dispar
MEINNKVYSLRSLPGGRRGASGAGAGCSSIRTIGDEELNRRVPIDKNVTADITTHHPQSPTSSSSLSSLFPSPISSPNSFQSSSSSSQMVDVVQEVNALINGPTTVKVRARRKWTIDMNKFIWRTYLITSRLETQTRGYLDPLHKAFTEKYPEMNASKQSVGDQRRAIVNNKLLSTEILNNIKSEVVTYLEHNPELNTQPILTQTSARMKWSNDINETILRIYYEITENETNMTAHRKKLHNKFIEIYPHLSHLSEQRISDQRRAIINNKMLAETRISQIKKYVETQTALTQDNLLQQHNTATTQTNHKEDTVSTLPRNLIYLSSKEQEDNTVDNHLISYDEIQQLFRTTLDNYKNTEPTTRPYLPRQKTSKKLAIIVDYINKNVLPNYLHEEQDFNSFHSILYSAAYTVVISNGSKINTEQASIQNYKPSWQRRLENKINKLRSDIARLTQYIKGNKSNRILRAIETIKKKYKIHAQYEHDNTEPEHFLDTLKQKLNAAASRLKRYLTCTTRKKQNTKFINTEKAFYRSLSPTSPNLNTHTQTLPTPENLQQFWANIWQNPVQHNKNANWMNTITEATNHIPSMKLEHITMETFSNIVKHIHNWKSPGTDNIHNYWLKKFTVTHRYLLHHLNTFIQSPHLMPDYVTHGVTYMLPKNMNNTKDPSNYRPITCLQTTYKILTACLSQTIYSHILEHDILAEQQKGCRKNSQGCKEQLIIDAITLNEASKNKKDIHSMFIDYRKAFDSVPHSWLLHILHIYKINPTIIDFLENSMRNWQTVLKLKTSTHCPVITTKPIRIQRGIYQGDSLSPLWFCLALNPLSSLLNTTEMGYKLTTRNSQFSLTHLLYMDDIKLFANNIEDLFHLADVTQQFSKDICMDFGVDKCKTLSIAEGQIQHNPYLLDTGVNIEPMDEYSTYKYLGFEQSRKILQKGTKELLTQKFKARLNMLLKTYLNSKNLVKAINTFAVPVLTYSFGIINWSQTELKNLQRTINTHMTKHRNHHPKSCIERLTLSRKEGGRGFIDIQNLHNKQITTLRNYFYEKSDHSSLHRHVTELDNKLTPLNLQDRHSQKNEKLVTTNEKITKWTNKSLHGRHRTDLSQSHVDEEKSNEWLKKGELFPETEGFILAIQDQIILTRNYKKFIIKDPNQISDVCRHCNSASETIQHITGACKSLVQSDYKHRHDQVAAIVHQHVAHRHRFINKKVPFYKYKPDTVLENKTCKIYWDRTIITDKTIHFNRPDIAVHDKSSNIVYIIDIAIPNSHNLQSTISEKLSKYQDLAIELKKQWKAHTVHIVPIVLSSTGIIPKALTESLDVLHMPVHTFHLLQKATILNTSRITRKFLTSSCISST

SEQ ID NO: 30671 - protein, 760 aa, Lymantria dispar
MNTITEATNHIPSMKLEHITMETFSNIVKHTHNWKSPGTDNIHNYWLKKFTVTHRYLLHHLNTFIQSPHLMPDYVTHGVTYMLPKNMNNTKDPSNYRPITCLQTTYKILTACLSQTIYSHILEHDILAEQQKGCRKNSQGCKEQLIIDAITLNEASKNKKDIDSMFIDYRKAFDSVPHSWLLHILHIYKINPTIIDFLENSMRNWQTVLKLKTSTHCPVITTEPIRIQRGIYQGDSLSPLWFCLALNPLSSLLNTTEMGYKLTTRNSQFSLTHLLYMDDIKLFANNIEDLFHLADVTQQFSKDICMDFGVDKCKTLSIAEGQIQHNPYLLDTGVNIEPMDEYSTYKYLGFEQSRKILQKGTKELLTQKFKARLNMLLKTYLNSKNLVKAINTFAVPVLTYSFGIINWSQTELKNLQRTINTHMTKHKNHHPKSCIERLTLSCKEGGRGFIDIQNLHNKQITTLRNYFYEKSDHSSLHRHVTELDNKLTPLNLQDRHSQKNEKLVTINEKITKWTNKSLHGRHRTDLSQSHVDEEKSNEWLKKGELFPETEGFILAIQDQIILTRNYKKFIISDPNQISDVCRHCNSASETIQHITGACKSLVQSDYKHRHDQVAAIVHQHLAHRHRFINKKVPFYKYKPDTVLENKTCKIYWDRTIITDKTIHFNRPDIVVHEKSSNIVYIIDIAIPNSHNLQSTISEKLSKYQDLAIELKKQWKAHTVHIMPIVLSSTGTKGHQRPSLKASTFYICLYTHSIYYKKLQF

SEQ ID NO: 30672 - protein, 777 aa, Lymantria dispar
MNTITEATNHIPSMKLEHITRETFSNIVKHIHNWKSPGTDNIHNYWLKKFTVTHRYLLHHLNTFIQSPHLMPDYVTHGVTYMLPKNMNNTKDPSNYRPITCLQTTYKILTACLSQTIYSHILEHDILAEQQKGCRKNSQGCKEQLIIDAITLNEASKNKKDIHSMFIDYRKAFDSVPHSWLLHILHIYKINPTIIDFLENSMRNWQTVLKLKTSTHCPVITTKPIRIQRGIYQGDSLSPLWFCLALNPLSSLLNTTEMGYKLTTRNSQFSLTHLLYMDDIKLFANNIEDLFHLADVTQQFSKDICMDFGVDKCKTLSIAEGQIQHNPYLLDTGVNIEPMDEYSTYKYLGFEQSRKILQKGTKELLTQKFKARLNMLLKTYLNSKNLVKAINTFAVPVLTYSFGIINWSQTELKNLQRTINTHMTKHRNHHPKSCIERLTLSRKEGGRGFIDIQNLHNKQITTLRNYFYEKSDHSSLHRHVTELDNKLTPLNLQDRHSQKNEKLVTTNEKITKWTNKSLHGRHRTDLSQSHVDEEKSNEWLKKGELFPETEGFILAIQDQIILTRNYKKFIIKDPNQISDVCRHCNSASETIQHITGACKSLVQSDYKHRHDQVAAIVHQHLAHRHRFINKKVPFYKYKPDTVLENKTCKIYWDRTIITDKTIHFNRPDIAVHDKSSNIVYIIDIAIPNSHNLQSTISEKLSKYQDLAIELKKQWKAHTVHIVPIVLSSTGIIPKALTESLDVLHMPVHTFHLLQKATILNTCRITRKFLTSSCISST

SEQ ID NO: 30673 - protein, 1346 aa, Lymantria dispar
MEINNKVYSLRSLPGGRRGASGAGAGCSSIRTIGDEELNRRVPIDKNVTADITTHHPQSPTSSSSLSSLFPSPISSPNSFQSSSSSQMVDVVQEVNALINGPTTVKVRARRKWTIYMNKFIWRTYLITSRLETQTRGYLDPLHKAFTEKYPEMNASKQSVGDQRRAIINNKLLSTEILNNIKSEVVTYLEHNPELNTQPILTQTSARMKWSNDINETILRIYYEITENETNMTAHRKKLHNKFIEIYPHLSHLSEQRISDQRRAIINNKMLAETRISQIKKYVETQTALTQDNLLQQHNTATTQTNHKEDTVSTLPRNLIYLSSKEQEDNTVDNHLISYDEIQQLFRTTLDNYKNTEPTTRPYLPRQKTSKKLAIIVDYINKNVLPNYLHEEQDFNSFQSILYSAAYTVVISNGSKINTEQASIQNYKPSWQRRLENKINKLRSDIARLTQYIKGNKSNRILRAIETIKKKYKIHAQYEHDNTEPEHFLDTLKQKLNAAASRLKRYLTCTTRKKQNTKFINTEKAFYRSLSPTSPNLNTHTQTLPTPENLQQFWANIWQNPVQHNKNTNWMNTITEATNHIPSMKLEHITIETFSNIVKHTHNWKSPGTDNIHNYWLKKFTVTHRYLLHHLNTFIQSPHLMPDYVTHGVTYMLPKNMNNTKDPSNYRPITCLQTTYKILTACLSQTIYSHILEHDILAEQQKGCRKNSQGCKEQLIIDAITLNEVSKNKKDIHSMFIDYRKAFDSVPHSWLYILHIYKINPTIIDFLENSMRNWQTVLKLKTSTHCPVITTEPIRIQRGIYQGDSLSPLWFCLALNPLSSLLNTTDMGYKLTTRNSQFSLTHLLYMDDIKLFANNIEDLFHLADVTQQFSKDICMDFGVDKCKTLSIAEGQIQHNPYLLDTGVNIEPMDEYSTYKYLGFEQSRKILQKGTKELLTQKFKARLNMLLKTYLNSKNLVKAINTFAVPVLTYSFGIINWSQTELKNLQRTINTHMTKHRNHHQKSCIERLTLSRKEGGRGFIDIQNLHNKQITTLRNYFYEKSDHSSLHRHVTELDNKLTPLNLQDRHSQKNEKLVTTNEKITKWTNKSLHGRHRTDLSQSHVDEEKSNEWLKKGELFPETEGFILAIQDQIILTRNYKKFIIKDPNQITDVCRHCNSASETIQHITGACKSLVQSDYKHRHDQVAAIVHQHLAHRHRFINKKVPFYKYKPDTVLENKTCKIYWDRTIITDKTIHFNRPDIAVHDKSSNIVYIIDIAIPDSHNLQSTISEKLSKYRDLAIELKKQWKAHTVHIVPIVLSSTGIIPKALTESLDVLHMPVHTFHLLQKATILNTCRITRKFLTSSCISST

SEQ ID NO: 30674 - protein, 1348 aa, Lymantria dispar
MEINNKVYSLRSLPGGRRGASGAGAGCSSIRTIGDEELNRRVPIDKNVTADITTHHPQSPTSSSSLSSLFPSPISSPNSFQSSSSSSQMVDVVQEVNALINGPTTVKVRARRKWTIDMNKFIWRTYLITSRLETQTRGYLDPLHKAFTEKYPEMNASKQSVGDQRRAIVNNKLLSTEILNNIKSEVVTYLEHNPELNTQPILTQTSARMKWSNDINETILRIYYEITENETNMTAHRKKLHNKFIEIYPHLSHLSEQRISDQRRAIINNKMLAETRISQIKKYVETQTALTQDNLLQQHNTATTQTNHKEDTVSTLPRNLIYLSSKEQEDNTVDNHLISYDEIQQLFRTTLDNYKNTEPTTRPYLPRQKTSKKLAIIVDYINKNVLPNYLHEEQDFNSFHSILYSAAYTVVISNGSKINTEQASIQNYKPSWQRRLENKINKLRSDIARLTQYIKGNKSNRILRAIETIKKKYKIHAQYEHDNTEPEHFLDTLKQKLNAAASRLKRYLTCTTRKKQNTKFINTEKAFYRSLSPTSPNLNTHTQTLPTPENLQQFWANIWQNPVQHNKNANWMNTITEATNHIPSMKLEHITMETFSNIVKHIHNWKSPGTDNIHNYWLKKFTVTHRYLLHHLNTFIQSPHLMPDYVTHGVTYMLPKNMNNTKDPSNYRPITCLQTTYKILTACLSQTIYSHILEHDILAEQQKGCRKNSQGCKEQLIIDAITLNEASKNKKDIHSMFIDYRKAFDSVPHSWLLHILHIYKINPTIIDFLENSMRNWQTVLKLKTSTHCPVITTKPIRIQRGIYQGDSLSPLWFCLALNPLSSLLNTTEMGYKLTTRNSQFSLTHLLYMDDIKLFANNIEDLFHLADVTQQFSKDICMDFGVDKCKTLSIAEGQIQHNPYLLDTGVNIEPMDEYSTYKYLGFEQSRKILQKGTKELLTQKFKARLNMLLKTYLNSKNLVKAINTFAVPVLTYSFGIINWSQTELKNLQRTINTHMTKHRNHHPKSCIERLTLSRKEGGRGFIDIQNLHNKQITTLRNYFYEKSDHSSLHRHVTELDNKLTPLNLQDRHSQKNEKLVTTNEKITKWTNKSLHGRHRTDLSQSHVDEEKSNEWLKKGELFPETEGFILAIQDQIILTRNYKKFIIKDPNQISDVCRHCNSASETIQHITGACKSLVQSDYKHRHDQVAAIVHQHLAHRHRFINKKVPFYKYKPDTVLENKTCKIYWDRTIITDKTIHFNRPDIAVHDKSSNIVYIIDIAIPNSHNLQSTISEKLSKYQDLAIELKKQWKAHTVHIVPIVLSSTGIIPKALTESLDVLHMPVHTFHLLQKATILNTCRITRKFLTSSCISST

SEQ ID NO: 30675 - protein, 1240 aa, Codatractus imalena
MFIWRTYLITSRLETHTRGYLDPLHRAFKEKYPEMNASKQRIGDQRRAIVNNKLLSTTTLRAIKDEVTKYLQENIQPLPSHTQASARMRWSDDINETLLRIYYEVTNLETDMTAHRQKMHSKFIQTYPHLTHLSEQRISDQRRVIVNNKMLPESKILQIRHDVATQLLISNPLSQFNENHSQNASSQLITDSIRVTPHQQTTLLFSQVTSHTNLAEQEIHTSNNRDFIDYDKIKQNFDVAFNTFKNTEPTLRPYLPRQKPSRKLAMIIDYLNKNILPNILTTGQDFITFQTILYSAAYTAVICNGTKINFTTTHKRDIRPPWQRRLENKIDVFRAEIARLTQYIRGNRSNKINNAIEKIKRKYQVHTQYENLNTELEHFLDTLKQKLNAASSRLRRYVTCTARKKQNIQFTNTEKSFYRDLTSNNQNLNLQQNRLSTAVNLHKFWGDIWENPVRHNFEAEWMNLINQTTKHIPNMNFEHIAIDTLEHVIKGTHNWKSPGTDNIHNYWYKKFTSIYPYLHKFLNTFIHSPYLMPQYITHGITYMLPKEINTEDPAKYRPITCLQTIYKILTACISKTIYTHLSEHNILAEQQKGCRKHSQGCKEQLTIDAIVLNEAYSKKQDIHSMFIDYRKAFDSVPHSWLIHILRLYKIHPNIISFIESSMRNWKTVLKIRQNNSTITTDPIRILRGIFQGDALSPLWFCLALNPLSTLLNNSNAGYNLKIAHNRFSLTHLLYMDDIKLYSDNIDDLFQLADIAQQFSTDICMEFGVDKCKILSVHKGQIQNNRYALQTGQDIEPMDESSSYKYLGFKQSRKILQKETKTEITNKFKFRLNLILKTHLNSRNIVKAINTFCIPILTYSFGIINWSQTDLKNLQRTINTYLTKHRKHHPKSSIERLTLPRKEGGRGVIDIQNLHNKQITSLRHYFHSKSQHSLLHSQVTQMDNKFTPLNLRNRNTQLNEALVTLEQKLAKWAGKSLHGRHRTDLSQNYVDKEKSNDWLMKGELFPETEGFMLAIQDQIIATKNYRKYIIKDTRQTSDLCRHCNSAPETIQHITGACKCLVQSDYKHRHDQVAAIIHQHLAHMYNFIIKKKPYYKYKPATILENQTSKIYWDRTIITDKTVHYNRPDITLHDKKSNTIYIIDVAIPNSHNILSTISDKLSKYQDLAIELKTQWKAQTVHIVPIVLSSTGIVPKTLTQSLDILRMPTHSHHLLQKAAILNTCRITRKFLTSSSVSSSSTYFI

SEQ ID NO: 30676 - protein, 1201 aa, Urbanus evona
MNASKQSIGDQRRAIVNNKLLSTATLLEIKDEVTNYLLENDQPLPTLTHASSRLRWSDEINETILRIYYEITELETNMTAHRKKLHDKFIETYPHLAHLSEQRISDQRRVIVNNKMLPEAKILQIRKEVETQIQISNTFTQINQNQSHNLSLQQTTNTTQIHNGVPLPSQAALYTNFGEQETHTNNCNNLINHETIKQQFHLALDTFKHTEPTLRPYLPRQKPSKKLALTVDYLNRHILPNILTTDPDFITLQTIVYSAAYTAVVCNGTKINSKWTFRNDVRPSWQRRLENKIGIYRTEIARLTQYIRGNRSNRMIIAVEKIRRKYQVHAQHEHINTELEHFLDTLKQKLNAASSRLRRYVTCTARKRQNTQFTNTEKSFYRGLTSNIQNTNMQKHSLPTSENLHKFWSNIWENPVQHNLEAEWLDFIKESTKNIPEMNFEDITLDTFVNVIKSTHNWKSPGTDNIHNYWYKKFTSIYPYLHKYLNIFIQSPHLMPYYITHGVTYMLPKESNTEDPAKYRPITCLQTFYKILTSCISKTIYAHLSQHDILAEQQKGCRKYSQGCKEQLTIDAIVINEAYTKKQDIHTMFIDYRKAFDSVPHSWLLHILRLYKINPNIVNFIESCMQNWKTTLKINQHSSTMTTDPIRILRGIFQGDALSPLWFCLSLNPLSTLLNNSNAGYNLKTTDDRFSLTHLLYMDDIKLYASSIDNLFQLADLAQQFSTDICMEFGVDKCKILSIHKGHIENNRYALEIGQDIEPLEENSSYKYLGFKQSRKILQKETKAEITNKFKHRLNLVLKTHLNSRNTIKAINTFCIPILTYSFGIIRWAQTDLKNLQRIINTHLTKHRKHHPKSSIERLTLPRREGGRGIIDIQNLHNKQISTLRHYFYTKAHDSLLHKQVIEIDNKLTPLNLRNRNSQLNETLITINQKVAKWAGKSLHGRHRTDLSQTYVDKEKSNDWLMRGELFPETEGFMLAIQDQIIATKNYRKYIIKDTTQISDLCRHCNSVSETIQHITGACKSLVQSDYKHRHDQAAAIVHQHLAHTYKFIPKKDPYYKYRPATILENHDTKIYWDRTIITDKTIHFNRPDITLHDKKSNTVYIIDIAIPNTHNIQSTISEKLSKYQDLAIELKTQWKANTVHIVPIVLSSTGIIPKTLTQSLDILNMPIHSHYLLQKATILNTCRITRKFLTSSSVSSTYFI

SEQ ID NO: 30677 - protein, 1363 aa, Spathilepia clonius
MSKKVYNLRPLSGGRRGASGADAGCSSMRTIGGEELNRRTPTENNATADIISHPSNSSNPSPLSSLFPSPASSPNSLQNPSYFDCSLSLTLSSSSSSPMTVDVVQEANVSHNVPTTAKSRARRKWTIEMNMFIWRTYLITTRLETHTRGYLDPFHKTFVEKYPEMNASKQSIGDQRRAIINNKLLSTTILQEIKDEVTKYLQHNEQPLPTLTQASARMRWSDDINETILRIYYDITELETNMTAHRKKLHNKFIETYPHLAHISEQRISDQRRVIVNNKMLPEARILQIKKEVEAKLRQSTLAQINENHSQNPSVQQIADTPQITKHIEISQAAIYTNCTEQENNTNNYNNSIQHETIKQQFNLALHTFKNTDPTLRPYLPRQKPSKKLAMTIDYLNTHILPNILTKDQDFVNFQTILYSAAYTAILYNGTKIKSSMTFRRDVRPAWQRRIENKIDIFRGEISRLTQYIRGNRSSRIITAVEKIKEKYRVHAQYDNINTELEHFLDTLKQKLNSAASRLRRYMACTARKRQNTQFTNAEKAFYRSLTSNKQSGNIQENRLPTAENLHKFWGKIWGNPVQHNVEAEWLQFVKETTKHIPEMNFEHITFDTLVSVIKDTHNWKSPGSDNIHNYWYKKFTNIHPYLHNYLNMFIQSPHLMPPFITHGVTYMLPKETNTEDPAKYRPITCLQTVYKILTACISKTIYIHLSEHGILAEQQKGCRKNSQGCKEQLTIDAIVTNKAFAEKEDIHTMFIDYRKAFDSIPHSWLLYALELYKINPHIINFVESCMKNWKTVLKIKLHSSTITTDPIQIQRGIFQGDALSPLWFCLSLNPLSTLLNYSKAGYNLKTTDDQFTLTHLLYMDDIKLYASSKDDLFKLADIAQQFSVDICMEFGVDKCRILSIHKGHIESNRYALQTGQDIEPLDENSTYKYLGFNQSRKIHQKETKTEITKKYRNRINLVLKTHLNSRNIVKAINTFCIPLLTYSFGIINWSQTDLKNLQRIINTHLTKHRKHHSKSSIERLTLPRKEGGRGIIDIQNLHNKQISTLRHFFHTKAQESLLHKLVTEIDAKLTPLNLSNKNEQPNEALITIDQKVAKWAGKSLHGRHRTDLSQTYVDKEKSNEWLMKGELFPETEGFMLAIQDQIIATRNYRKYIIKDTNQLSDSCRHCNSAPETIQHITGACKSLVQSDYRHRHDQVAAIVHQHLAHMHKFILKKDPYYKYKPATILENQTTKIYWDRTIITDKTIHYNRPDITLHDKKHNAVYIIDIAIPNSHNIQTTISEKLSKYQDLAIELKTQWKAHIVHIVPVVLSSTGLIPKTLTQSLDILRMPAHSHHLLQKATILNTCRITRKFLTSSSITSPYFI

SEQ ID NO: 30678 - protein, 1359 aa, Cecropterus dorantes
MSKRVYNLRPLPGGRRGASGADAGCSSMRTIGGEELSRRTPTDNNATADIISHHNNSTYSSPVSSLFPSPTSSLHPFHNLSYSDHSSSQPSSSSSPLTVDVVQEASASHDGPTTAKMRARRKWTVEMNTFIWRTYLITSRLETHMRGYLDPLHKAFVEKYPEMKASKQSIGDQRRAIVNNKLLSAATLQEIKDEVAIFFQKDEQPFPTVTQASGRMRWSDDLNEKILRIYYEVTNLETNMTAHRKKLHDKFIQTYPHLAHITAQRISDQRRVIVNNKMLSEAKILEIRHDVETQLRIFNTPSQLDEHDLQNTPFQSLTDTTQITPNEDNSLLPQVQMTEQVVHTNKNLIDHEKIKQHFNFALDNFKNIDPTLRPFLPRQKPSKRLALIVDYLNKNILPNILSSDQDFMEFQTIIYSAAYAAVICNGAKIYSNRTLRKDKKPPWQTRLETKIGIIRAEIARLTQYNRGNRSNRIKKAVDKIKMKYQVHAQYENMNTDLEHFMDTLKQKLNAASSRLRRYITCTARKKQNAQFSHTEKNFYRGLIPNSHNSNVQENRVPTLQSLHKYWSDIWGKPVKHNQEAHWINVINEETKYIPEMKFENITIDTLLHVIKGTHNWKSPGTDNIHNYWYKKFTSIHPHLHNHLNTFIRLPHLMPQYITHGVTYMLPKETNSEDPAKYRPITCLQTVYKILTACISTTIYSHLVDNEILAEQQKGCRKNSQGCKEQLTIDAIVINEAYFKKEDIHTMFVDYRKAFDSVPHSWLLQILRLYKINPNIIHFIESSMQNWKTVIKLRQHSSTIITDPIRILRGIFQGDALSPLWFCLALNPLSTLLNNSNAGYILKTTGNRFSLTHLLYMDDIKLYAGNICDLFQLADLTQQFSTDICMEFGVDKCKILSIHKGQIESNSYILETGLNIDSMDENDTYKYLGFQQSRKILQKETKAQIINKFKNRLNLVLKTHLNARNTVKAINTFCIPILTYSFGIIYWSQTDLKNLQRTINTHMTKHRKHHPKSSIERLILPRKEGGRGIIDIQNLHNKQISTLRHFFHTKLQHSLLHRQVTEKDMKLTPLNLADTNTQHNEVLNTIDQKIAKWAGKSLHGRHRTDLSQNYVDKEKSNDWLMRGELFPETEGFMLAIQDQIIVTKNYRKYIIKDTNQLSDLCRHCNSAPETIQHITGACKSLAQSDYKHRHDQVAAIVHQHLAYIYKFIQKKSPYYKYKPATILENQTTKIYWDRTIITDKTIHYNRPDITLHDKNKNTVYIIDIAIPNSHNIQSTISEKLSKYQDLAIELKTQWKAHVVHIVPIVLSSTGIIPKTLTQSLDILRMPTHSHHLLQKATILNTCRITRKFLTSSSISSTYCI

SEQ ID NO: 30679 - protein, 1368 aa, Epargyreus spanna
MSKRVYNLRPLPGGRRGASGADAGCSSMRTIGGEELNRRTLTEKNVTADIISHPSNSSIFSPSSSLFSSPTSSPNSSRNPSYLDRSSSVPLSSSSSPLTVDVVQEANASHNVPTTAKSRARRKWTIEMNMFIWRTYLITTRLETHTRGYLDSLHKAFIEKYPEMSASKQNIGDQRRAIVNNKLLSTNTLQEIKDEVTTYLQQNKQPLPSLTQTSARMRWSDEINETILRIYYEITELETNMTAHRKKLYNKFIQIYPHLAHISEQRISDQRRVIVNNKMLTDAKILEIRHTVETQLEKSNTLTHFNENYLQKTLLQPVTDTTEITRNEDIPQHSQVIPTNSTEQEIHTNNDRNHIDHAKIKEHFNLALNTFKNTEPTMRPYLPTQKSSKKLALIIDYINKNILPAILTDDQDFITFQTILYSAAYTAVICNGTKINSITSRTLRRDTRPPWQRRLESKIDIYRAEIGRLTQYIRGNRTNRIKTAVEKIKKKYQVHAQYENINTELEHFMDTLKQKLNTASSRLKRYITCTARKKQNTQFTSTEKAFYRGLTYNKQTSNERQECIGPTPENLHKFWSDIWENPVQHNLKADWINAIKEATKNIPEMIFEHITFETFVHVIKSTHNWKSPGTDNIHNYWYKKFTSIYPYLHNHLNKFIQSPQLMPQYITHGITYMIPKENNTEDPSKYRPITCLQTIYKILTACISKTIYSHLSDHDILAEQQKGCRKNSQGCKEQLTIDAIVINEAYSKKYDIHTLFIDYCKAFDSVPHSWLLQILQLYKINPSIVEFLETSMKNWKTVLKIRQPSSTITTDPIRILRGIFQGDTLSPLWFCLALNPLSTLLNNSTAGYNLITTDNRFTLTHLLYMDDIKLYAGNVIDLFQLADLTQQFSTDICMEFGVDKCKILSINKGQIETNKYALETGQDIEPMDVNSAYKYLGFKQSRKILQKETKAELTNKFRHRLNLVLKTHLNSRNMVKAINTFSIPILTYSFGIINWTQTDLKNLQRTINTHLTKHRKHHPKSSIERLTLPRKEGGRGIIDIQNLHNKQISSLRHYFHSKSQHSLLHKQVAEIDSRLTPLNLKNTNSQSNEALITVDQKIAKWVGKSLHGRHRTDLSQNYVDKEKSNDWLMRGELFPETEGFMLAIQDQIIATKNYRKFIIKDTNQPSDLCRHCNSAPETIQHITGACKSLVQSDYKHRHDQIAAIVHQHLAHRYNFILKKNPYYKYKPAIILENQTCKIYWDRTIITDKTIHFNRPDITLHDKKSNIVYIIDIAIPNSHNIQSTISEKLTKYQDLAIELKTQWKARIVHIVPIVLSSTGIIPKTLTQSLNILQMPTHSHHLLQKATILNTCRITRKFLTSSSISSTYSI

SEQ ID NO: 30680 - protein, 1369 aa, Venada nevada
MSKRMYNLRPLPGGRRGASGADAGCSSMRTIGGKELNRRTPTDQNVTADIINSHHTNSSSSSPLSSLFPSPTSSPNPFQNPSYSDRSLSLPLSSASSSPLTVDVVQEANASHDRPTTVKLRARRKWTVEMNTFIWRTYLITSRLETHTRGYLDSLHRAFIEKYPEMNASKQSIGDQRRAIVNNKLLPITTLEEIKEDVAKYLQQNEQPLPTLTRASTRMRWSDDINETILRIYYETTKLETDMTAHRKKLHSKFIQIYPQLSHLSEQRISDQRRVIVNNKMLPEAKIIEIRHDVERQLQIFSSLTQSNESNLQYTSLPPITDTTQITSHEEVVPIHSEVTMNTNLVEQEIHTNNNRNSIEHDKIKQCFNLALDTFKNTEPTLRPYLPRQKPSKKLALIIDYLNTHILPNLLTTDQDFITFHTILYSAAYTAVICNGTKINFIRTHKRDSKAPWQRRLENKIDIFRAEIARLTQYIRGNRSNKIIAAVEKIKTKYQVHAQYENINTKLEHFLDTLKQKLNAASSRLRRYLKCTARKNQNTQFTNTEKSFYRGLTSNSTNSNLKENRLPTPENLHKYWSDIWENPVQHNLKAEWINVINETTKYIPDMNFEHITLDTLIHVIKGTHNWKSPGTDNIQNYWYKKFTSIYPYLHNYLNTFIQSPFLMPKFITHGVTYMIPKETNAEDPAKYRPITCLQTIYKMLTSCISKTIYTHISEHNILAEQQKGCRKNSQGCKEQLTIDAIVLKEACTKRQDIHSMFIDYRKAFDSVPHSWLLHILRLYKIHPNIIKFIESSMQNWTTVLKVKQLSSTITTDPIRILRGIFQGDALSPLWFCLALNPLSTLLNNSNAGYNLQTTNNRFSLTHLLYMDDIKLYAGSIDDLFQLADIAQQFSTDICMDFGVDKCKILSIHKGQIESNRYALQTGQNIEPMDENDTYKYLGFRQSRKIIQKETRAEITHKFKTRLNLILKSHLYSRNIIKAINTFCIPVLTYSFGIINWSQSDLKNLQRTINTHMTKHRKHHPKSSIERLILPRKEGGRGIIDIQNLHNKQITSLRHYFHTKTEHSLLHTQVTEIDDKLTPLNLRNRNSQQNEALITLDQKLAKWVGKSLHGRHRTDLSQTYVDKEKSNYWLTRGELFPETEGFMLAIQDQIIATKNYRKYIIKDTNQLSDLCRHCNSAPETIQHITGACKSFVQSNYKHRHDQVAAIVHQHLAHMYNFIREKNPYYKYKPVTILENQTSKIYWDRTIITDKTIHYNRPDITLHDKKSNTVYIIDIAIPNSHNIQSTISEKLSKYQDLAIELKTQWKAHIVHVVPIVLSSTGIIPKTLTQSLNILRMPTHLLHLLQKAVILNTCRITRKFLTSSSVSSSYFI

SEQ ID NO: 30681 - protein, 860 aa, Epargyreus clarus
MDTLKQKLNTASSRLKRYITCTARKKQNTQFTSTEKAFYRGLTYNKQTSNARQECIGPTPENLHKFWSDIWENPVQHNLKAEWINVIKEATKNIPEMIFEHITFETFVHVIKSTHNWKSPGTDNIHNYWYKKFTSIYPYLHNHLNKFIQSPQLMPQYITHGITYMIPKENNTEDPSKYRPITCLQTIYKILTACISKTIYSHLSDHDILAEQQKGCRKNSQGCKEQLTIDAIVINEAYSKKHDIHTLFIDYCKAFDSVPHSWLLQILQLYKINPSIVEFLETSMKNWKTVLKIRQPSSTITTDPIRILRGIFQGDALSPLRFCLALNPLSTLLNNSTAGYNLITTDNRFSLTHLLYMDDIKLYAGNVNDLFQLADLTQQFSTDICMEFGVDKCKILSINKGHIETNKYALESGQDIEPMDVNSAYKYLGFKQSRKILQKETKAELTNKFKHRLNLVLKTHLNSRNMVKAINTFSIPILTYSFGIINWTQTDLKNLQRTINTHLTKHRKHHPKSSIERLTLPRKEGGRGIIDIQNLHNKQISSLRHYFHSKSQHSLLHKQVAEIDSRLTPLNLKNTNSQSNEALITVDQKIAKWVGKSLHGRHRTDLSQNYVDKEKSNDWLMRGELFPETEGFMLAIQDQIIATKNYRKFIIKDTNQPSDLCRHCNSAPETIQHITGACKSLVQSDYKHRHDQVAAIVHQHLAHRYNFILKKNPYYKYKPATILENQTCKIYWDRTIITDKTIHFNRPDITLHDKKSNIVYIIDIAIPNSHNIQSTISEKLTKYQDLAIELKTQWKARIVHIVPIVLSSTGIIPKTLTQSLNILQMPTHSHHLLQKATILNTCRITRKFLTSSSISSTYSI

SEQ ID NO: 30682 - protein, 1368 aa, Epargyreus clarus
MSKRVYNLRPLPGGRRGASGADAGCSSMRTIGGEELNRRTPTEKNVTADIISHPSKSSISSPSSSLFPSPTSSPNSSRNPSYLDRSSSVPLSSSSSPLTVDVVQEANASHNVPTTAKSRARRKWTIEMNMFIWRTYLITTRLETHTRGYLDSLHKAFIEKYPEMSASKQNIGDQRRAIVNNKLLSTNTLQEIKDEVTTYLQQNKQPLPSLTQTSARMRWSDEINETILRIYYEITELETNMTAHRKKLYNKFIQIYPHLAHISEQRISDQRRVIVNNKMLTDAKILEIRHTVETQLEKSNTFTQFNENYVQNTLLQPVTDTTEITTNEDIPQHSQVIPTNSTEQEIHTNNHRNHIDHAKIKEHFNLALDTFKNTDPTMRPYLPTQKSSKKLALIVDYINKNILPAILTDDQDFITFQTILYSAAYTAVICNGTKINSITSRTLRRDTRPPWQRRLESKIDIYRAEIGRLTQYIRGNRTNRIKTAVEKIKKKYQVHAQYENINTELEHFMDTLKQKLNTASSRLKRYITCTARKKQNTQFTSTEKAFYRGLTYNKQTSNARQECIGPTPENLHKFWSDIWENPVQHNLKAEWINVIKEATKNIPEMIFEHITFETFVHVIKSTHNWKSPGTDNIHNYWYKKFTSIYPYLHNHLNKFIQSPQLMPQYITHGITYMIPKENNTEDPSKYRPITCLQTIYKILTACISKTIYSHLSDHDILAEQQKGCRKNSQGCKEQLTIDAIVINEAYSKKHDIHTLFIDYCKAFDSVPHSWLLQILQIYKINPSIVEFLETSMKNWKTVLKIRQPSSTITTDPIRILRGIFQGDALSPLWFCLALNPLSTLLNNSTAGYNLITTDNRFSLTHLLYMDDIKLYAGNLNDLFQLADLTQQFSTDICMEFGVDKCKILSINKGHIETNKYALETGQDIEPMDVNSAYKYLGFKQSRKILQKETKAELTNKFKHRLNLVLKTHLNSRNMVKAINTFSIPILTYSFGIINWTQTDLKNLQRTINTHLTKHRKHHPKSSIERLTLPRKEGGRGIIDIQNLHNKQISSLRHYFHSKSQHSLLHKQVAEIDSRLTPLNLKNTNSQSNEALITVDQKIAKWVGKSLHGRHRTDLSQNYVDKEKSNDWLMRGELFPETEGFMLAIQDQIIATKNYRKFIIKDTNQPSDLCRHCNSAPETIQHITGACKSLVQSDYKHRHDQVAAIVHQHLAHRYNFILKKNPYYKYKPATILENQICKIYWDRTIITDKTIHFNRPDITLHDKKSNIVYIIDIAIPNSHNIQSTISEKLTKYQDLAIELKTQWKARIVHIVPIVLSSTGIIPKTLTQSLNILQMPTHSHHLLQKATILNTCRITRKFLTSSSISSTYSI

SEQ ID NO: 30683 - protein, 1334 aa, Cecropterus dorantes
MRTIGGEELSRRTPTDNNATADITSHPSNSSESSPLSSLFPSPISSPNLFQSSSYLDRSLSSSSSPLTVDVVQEANASHDVPTTAKLRARRKWTVEMNKFIWRTYLITSRLETQTRGYLDPLHRAFIEKYPEMNASKQSIGDQRRAIVNNNLLPTTTLREIREEVNKYLQQNVQPPPTLTQTAARMRWSVEINETILRIYFEITELETNMTAHRKRMHDKFIETYPHLAHLSEQRISDQRRVIVNNKMLSEARILQIKQEVKRQIQTSNTSKQISQDHLQNSSLHQITDTTQTIIHEDIPPSTQDRGLIFTEQEIHTCNSSNFIDQETIKRQFNLAVDTFKNTDPTLRPYLPRQKPSKKLALTIDYINKNILPNSLSTEHDFITFQTILYSAAYTAVLCNGTKLNSRKTLTTDCRPPWQRRLENKISIFRAEIARLTQYIRGNRSNKIMIAVEKIKIKYQVHSQYENINTHLEHFLDTLKQKLNAASSRLRRYVTCTARKKQNMQFTNTEKAFYRGLSSNKQNINTQKNKIPTAENLHKFWGNIWEKPVQHNAEAEWLNVINETTKNIPIMDFEYLTLDILVHVIKGTHNWKSPGTDHLHNYWYKKFTCIYPYLLNHLNTFIQSPHLMPHYITHGVTYMLPKESNTEDPAKYRPITCLQTIYKILTACISKTIYAHLTQNDILAEQQKGCRKNSQGCKEQLTIDAIVINEAYTTKQDIHTMFIDYRKAFDSVPHSWLLHILRLYKINPNIINFIESCMQNWKTILKIRQHTSTITTDPIRILRGIFQGDALSPLWFCLSLNPLSTLLNNSNAGYNLETTDDRFSLTHLLYMDDIKLYASNIDDLFQLADLAQQFSMDICMEFGVDKCKILSIYRGQIENNKYALETGQDIEPLDESSSYRYLGFRQSRKILQKDTKTEITNKFKHRLNLVLKTHLNSRNVIKAINTFCIPILTYSFGIINWSQTELKNLQRIINTHLTKYRKHHPKSSIERLTVPRKEGGRGIIDIQNLHNKQIFTLRHYFHIKAHDSVLHKQVTEIDNKLTPLNLRNRDTQPNETLITLDQKIAKWAGKSLHGRHRTDLSQTYVDKEKSNDWLTKGELFPETEGFMLAIQDQIIVTKNYRKYIIKDTNQLSDLCRHCNSAPETIQHITGACKSLVQSDYKHRHDQVAAIVHQHLAHMYKFIPKKVPYYKYKPATVLENQNTKIYWDRTIITDKTIHFNRPDITLYDKKNNAIYIIDIAIPNSHNIQPTISEKLSKYQDLAIELKTQWKAQVVHIVPIVLSSTGIVPKTLTQSLDILRMPTHSHYLLQKATILNTCRITRKFITSSSVSSSYFI

SEQ ID NO: 30684 - protein, 1360 aa, Chioides albofasciatus
MSKRVYNLRPLPGGRRGASGADAGCSSMRTIGGEELNRRTPTEKIATAGIISHPSNSSNSSPLSSLFPSPVSSPSTFQNDFHSDRSSSTVSLSSSSPLSVDVVQGANASHDGPTTTKSRARKKWTVEMNTFIWRTYLITSQLETHTRGYLDALHKAFMEKYPEMNASKQRIGDQRRAIVNNKLLPTTTLQEIKDEVTKYLQQNEQPLPTLAQSSTRMRWSDEINEMILRIYYEITDLETNMTAHRNKLHSKFIETYPHLAHLSEQRISDQRRVIVNNKMLSEARILQIRKEVETKIQISNIQLQINENNAQHADSTQITTHNDAPPPSQVATYTNFAEQNNHTHNDSNFIDYEIIKQQFNLALDSFKNTEPTSRPYLPRQKPSKKFALTIEYINKNILPNILNTEQDFITTQTILYSAAYTAVLCNGAKINSNRIITKDIRPPWQRRLEKKIDIFRAEIARLTQYIHGNRSNRIVTAVEKIKIKYQVHAQYENVNTDLDQFLDTLKQKLNAASSRLKRYITCTARKKQNTQFTNTEKSFYRSLTPNKQNTNMHENRLPTAENLRMFWGNIWENPVQHNEEAEWLNFISESTNHIPEMNFDLITLDTLVNVIKGTHNWKTPGTDNIHNYWYKKITSIYPYLHKHLNTFIQSPNLMPQYITHGVTYMLPKETNTEDPAKYRPITCLQTIYKILTACISKTIYAHLSEHDILAEQQKGCRKYSQGCKEQLTIDAVTMNAAFTKKQDIHTMFIDYRKAFDSVPHSWLLHILRLYKINPNIINFIESCMQNWKTILKIRHHAAVITTDPIRILRGIFQGDALSPLWFCLCLNPLSTLLNNCNAGYNLKITDDRFSLTHLLYIDDIKLFAGNIDDLFHLADLAQQFSLDICMEFGVDKCKILSVYNGQIEYNRYALETGQDIEPLDENSTYRYLGFKQSRKILQKETKAEITNKFKNRLNLVLKTHLNSRNLVKAINTFCIPILTYSFGIINWSQTDLKNLQRIINTHLTKHRKHHPKSSIERLTLPRKEGGRGIIDIQNLHNKQISTLRNYFYTKTDTSPLHKHVIETDNKLTPLNLKNRNAQHNETLITIDQKVAKWVGKSLHGRHRTDLSQTYVDKEKSNEWLMKGELFPETEGFMLAIQDQIIATKNYRKYIIKDTDQVSDLCRHCNSAPETIQHITGACKSLVQSDYKHRHDQVAAIVHQHLAHKYKFICKKDPYYKYKPATVLENQTTKIYWDRTIITDKTIHYNRPDITLHDKKNNTVYIIDIAIPNTHNIQSTISEKLSKYQDLAIELKTQWKAQIVHIVPIVLSSTGIIPKTLTQSLNILQMPAHSHHLLQKATILNTCRMTRKFLTSSSVSSSYFI

SEQ ID NO: 30685 - protein, 1351 aa, Polygonus leo
MSKSMYNLRPLPGGRRGASGADAGCSSMRTISGKELNRRAPTEKIVTADVITPHNTDSSNSSPTSSLFPSPNSSLHSLSLSLSLSSSPSTVDVVQEANAQYNGPTTAMSRARRKWTIEMNMFIWRNYLILSRLETQTRGYLDLLHAAFTEKYPEINASKQRIGDQRRAIVRNKLLSDTTFKEIKDEVAKHLDKTESLPLTLTQTSARMRWSDEINKTILRIYYEVTQLESNMTAYRKKLHDKFICTYPHLRHLSEQRISDQRRIIVNNKMLSEAQILQIKRDVEIQLQKSNTRTHTIHSHNTLSPTNADTTDIVTDSPIPQTTIQRNFEEQQDCTNTSILIDHDRIKQEFDVALDIFKKTEPTLRPYLPRQKPSKKLALIVEYINKNILPNFLSTDQDFTDFQTIVYSAAYTAVSCNRTHNNLVRTHTTDPRPPWQRRLENKIDKLRAEIARLTQYIRGNRSTRIIIAVENIKSKYQVHAQHENVNTELEHFLDTLKQKLNAAASRLKRYLICTARKKQNTQFTNTEKIFYRDLTSKKQNSHIHGNRMPTAETLHKFWADIWENPVQHNLNAEWIDNIKETTKQIPEMSFEYITIDTFLDVIKNIHNWKSPGTDNIHNYWYKKFTTLHLHLHSHLNKFIQSPRLMPQYITHGVTHMVPKDTNTEDPAKYRPITCLQTIYKILTACISKTIYAHLLHNNILAEQQKGCRKNSQGCKEQLTIDAIVINESYNKKRDIHSMFIDYRKAFDSVPHSWLVYILTLYKISPTIIHFIETSMKNWKTVLKIKQNSSIITTEPICILRGIYQGDALSPLWFCLSLNPLSTLLNNSNAGYSLKTTDNRLSFSHLLYMDDIKLYASNIANLFHLADIVQTFSTDICMEFGVDKCKILSINRGKIENNSYSLETGQDIEAMDKNSYYKYLGFKQSRKIHQKETKAEITTKFKNRLNLIFKTHLNSKNIVKAVNTFVIGILTYSFGIINWSQTDIKNLQRVINTYMTKHRKHHPKSSIERLTLPRKVGGRGIIDLQNLHNKQISTLRHYFHTKSEHSFLHKQVIELDKKLTPLNLSDRNTQTNESLITIDQKVAKWASKSLHGRHRTELTQNYVDVEKSNEWLVKGELFPETEGFMLAIQDQIIATKNYRKYIIKDPNQLSDLCRHCSSAPETTQHITGACKSLVQSDYKHRHDQVAAIVHQHLAHRYKFIHKKEPYYKYKPATILENQSIKIYWDRTIITDKTIHYNRPDITLHDKTTNNIYIIDIAILNSHNIQSTISEKLSKYQDLAIELKTQWKADVVHIVPIVLSSTGIIPKTLTQNLKILHMPTYSHYLLQKAVILNTCRITRKFLTAASVSSSYSI

SEQ ID NO: 30686 - protein, 1368 aa, Epargyreus clarus
MSKRVYNLRPLPGGRRGASGADAGCSSMRTIGGEELNRRTPTEKNVTADIISHPSNSSISSPSSSLFPSPTSSPNSSRNPSYLDRSSSVPLSSSSSPLTVDVVQEANASHNVPTTAKSRARRKWTIEMNMFIWRTYLITTRLETHTRGYLDSLHKAFIEKYPEMSASKQNIGDQRRAIVNNKLLSTNTLQEIKDEVTTYLQQNKQPLPSLTQTSARMRWSDEINETILRIYYEITELETNMTAHRKKLYNKFIQIYPHLAHISEQRISDQRRVIVNNKMLTDAKILEIRHTVETQLEKSNTLTQFNENYLQNTLLQPVTDTTEITTNEDIPQHSQVIPTNSTEQEIHTNNQRNHIDHAKIKEHFNLALDTFKNTEPTMRPYLPTQKSSKKLALIVDYINKNILPAILTDDQDFITFQTILYSAAYTAVICNGTKINSITSRTLRRDTRPPWQRRLESKIDIYRAEIGRLTQYIRGNRTNRIKTAVEKIKKKYQVHAQYENINTELEHFMDTLKQKLNTASSRLKRYITCTARKKQNTQFTSTEKAFYRGLTYNKQTSNARQECIGPTPENLHKFWSDIWENPVQHNLKAEWINVIKEATKNIPEMIFEHITFETFVHVIKSTHNWKSPGTDNIHNYWYKKFTSIYPYLHNHLNKFIQSPQLMPQYITHGITYMIPKENNTEDPSKYRPITCLQTIYKILTACISKTIYSHLSDHDILAEQQKGCRKNSQGCKEQLTIDAIVINEAYSKKHDIHPLFIDYCKAFDSVPHSWLLQILQLYKINPSIVEFLETSMKNWKTVLKIRQPSSTITTDPIRILRGIFQGDALSPLWFCLALNPLSTLLNNSTAGYNLITTDNRFSLTHLLYMDDIKLYAGNVNDLFQLADLTQQFSTDICMEFGVDKCKILSINKGHIETNKYALETGQNIEPMDVNSAYKYLGFKQSRKILQKETKAELTNKFKHRLNLVLKTHLNSRNMVKAINTFSIPILTYSFGIINWTQTDLKNLQRTINTHLTKHRKHHPKSSIERLTLPRKEGGRGIIDIQNLHNKQISSLRHYFHSKSQHSLLHKQVAEIDSRLTPLNLKNTNSQSNEALITVDQKIAKWVGKSLHGRHRTELSQNYVDKEKSNDWLMRGELFPETEGFMLAIQDQIIATKNYRKFIIKDTNQPSDLCRHCNSAPETIQHITGACKSLVQSDYKHRHDQVAAIVHQHLAHRYNFILKKNPYYKYKPATILENQTCKIYWDRTIITDKTIHFNRPDITLHDKKSNIVYIIDIAIPNSHNIQSTISEKLTKYQDLAIELKTQWKARIVHIVPIVLSSTGIIPKTLTQSLNILQMPTHSHHLLQKATILNTCRITRKFLTSSSISSTYSI

SEQ ID NO: 30687 - protein, 1365 aa, Urbanus proteus
MSKRVYNLRPLPGGRRGASGAGAGCSSMRTIGGEELNRRTSTENNATADIISHPNHPPNSSPLSSLFSSPISSPNPFQNPFYLDHSSSVPLSSPSSSSPLTVDVVQEANASRNEPTTAKSRARRKWTTEMNKFIWRTYLITSRLETHTRGYLDPLHKAFIDKYPEMNASKQSIGDQRRAIVNNKLLPTATLLEIKNEVTNHLQANDQPLPTVTYASSRMRWSDEINETILRIYYEITELETNMTAHRKKLHDKFIETYPHLANLSEQRISDQRRVIVNNKMLPEARILQIRQEVERQIQISNSFTQINQNQSQNLSLQTIHTTATHNEVPLLSQPALDTNFTEQETHINICNNLIDHETIKQQFHLALDTFKHTEPTLRPYLPRQKPSKKFALIVDYLNSNILPNILTTDPDFITLQTIIYSAAYTAVVCNGTKIKSRFTFRNDVRPPWQRRLENKISIYRAKIARLMQYIRGNRSNRIIIAVEKIRRKYQVHAQYENINTELEHFLDTLKQKLNAASSRLRRYVTCTTRKRQNTQFTNTEKSFYRGLTSNFRNTNMQENRLPTPENLHNFWSNIWENPVQHNVDAEWLEFIKESTKNIPAMSFEDIALDTLVNVIKDTHNWKSPGSDNIHNYWYKKFTSTHPYLHKHLNIFIRSPHLMPYYITHGVTYMLPKDSNTEDPSKYRPITCLQTFYKILTSCISKTIYAHLSQHDILAEQQKGCRKNSQGCKEQLTIDAIVINEAHTKKQDIHTMFIDYRKAFDSVPHSWLLHILKLYKINPNIINFIESCMQNWKTTLKIKQHSSTITTDPIRILRGIFQGDALSPLWFCLSLNPLSTLLNNSNAGYNLKTTDDRFSLTHLLYMDDIKLYASNIDDLFQLADLAQKFSTDICMEFGVDKCKILSIYKGHIENNSYALESGQDIEPLDENSSYRYLGFKQSRKILQKETKAEITNKFKHRLNLVLKTHLNSRNIIKAINTFCIPILTYSFGIISWSQTDLKNLQRIINTHLTKHRKHHPKSSIERLTLPRREGGRGIIDVQNLHNKQISTLRQYFYTKTHYSRLHKQVIEIDNKLTPLNLRNRNAQLNETLITVNQKVAKWAGKSLHGRHRTDLSQTYVDKEKSNDWLMRGELFPETEGFMLAIQDQIIATKNYRKYIIKDTNQISDLCRHCNSASETIQHITGACKSLVQSDYKHRHDQVAAIVHQHLAHKYKFISKKDPYYKYRPATILENQDTKIYWDRTIITDKTIHFNRPDITLHDKKNNTVYIIDIAIPNTHNIQSTISEKLSKYQDLAIELKTQWKAHIVHIVPIVLSSTGIIPKTLTQSLDIINMPIHSHHLLQKATILNTCRITRKFLTSSSVSSTYFI

SEQ ID NO: 30688 - protein, 1364 aa, Autochton longipennis
MSKRVYNLRPLPGGRRGASGADAGCSSMRTIGGEELSRRTPTEKNTTADINPRTRNSSQSSPLSSLFPFPVSSPNLSLNSSYLDRSLSVPLTSSSPSPLTVDVVQEAIASQDVPTTAKLRARRKWTIEMNKFIWRTYLITSRLETHTRGYLEPLYKTFIEKYPEMNASKQSIGDQRRAIVNNKLLPTTTLREIRDEVTKYLQQNAQPPPTLIQASARMRWSEEINETILRIYYQITNLETNMTAHRKKLHDKFIETYPHLAHLSEQRISDQRRVIVNNKMLPEARILQIRQEVEIQISNTPTQISENHLQNSSLQQIADSTQLITHEDVPLPSQGRGINYIEQEIHTHSSSNLIDHETIERQFNLTLDTFNNTDPTLRPFLPRQKPSKKLALTIDYLNNNILPNILTTDLDFITLQTILYSAAYTAVLCNGTKINYSKTFRNDCRPPWQRRLENKINIFRAEIARLTQYIRGNRSNKIMIAVEKIKSKYKLHSQYENLNTELEHFLDTLKQKLNAASSRLRRYVTCTARKKQNAQFTNTEKAFYRGLTSNNQNIHMQEHKIPTAENLHRFWGNIWENPVQHNIEAEWLNCINKTTKNIPIMHFEHITLDTFVQVIKGTHNWKSPGTDNIHNYWYKKLTSIYPYLLNHLNTFIQSPHLMPQYITHGVTYMLPKENNSEDPAKYRPITCLQTIYKILTSCISKIIYTHLAQHNILAEQQKGCRKNSQGCKEQLTIDAIVINEAYAAKQDIHTMFIDYRKAFDSVPHSWLLHVLRLYKINPNIVLFIESCMQNWKTILKIRQRSSTITTDPIRILRGIFQGDAFSPLWFCLSLNPLSTLFNNSNAGYSLKTTDDRFSLTHLLYMDDIKLYASNVDDLFQLADLAQQFSIDICMEFGVDKCKILSIYKGKIENNKYALETGQNIEPLDENSSYRYLGFKQSRKILQKETKAEITNKFKYRLNLVFKTHLNSRNIIKAINTFCIPILTYSFGIIKWSQTELKNLQRIINTHLTKYRKHHPKSSIERLTLPRKEGGRGIIDIQNLHNKQIFTLRHYFYTKAHDSILHKQATKIDNKLTPLNLRNRNAQPNETLINVDQKVAKWAGKSLHGRHRTDLSQTYVDKEKSNDWLTKGELFPETEGFMVAIQDQVIVTKNYRKYIIKDTNQHSDLCRRCNSAPETIQHITGACKSLVQSDYKHRHDQVAAIVHQHLAHMHKFIIKKDPYYKYKPATVLENKNTKIYWDRTIITDKTIHYNRPDITLHDKKTNAVYIIDIAIPNSHNIQPTISEKLSKYQDLAIELKTQWKAQIVHIVPIVLSSTGIVPKTLSQSLDILGMPAHSHHLLQKATILNTCRLTRKFLTSSLVSSSYFI

SEQ ID NO: 30689 - protein, 764 aa, Ectomis asine
MNFDHISMDTFIEVVKSTHNWKSPGTDNIHNYWYKKFTNIYPHLHHYLNTFINSPHIMPQYITHGVTYMIPKDTYTDDPAKYRPITCLQTIYKILTACVSKTVYAHLSDHDVLAEQQKGCRKNSQGCKEQLTIDAIVLNEAYTKKRDIHTMFIDYRKAFDSVPHSWLLHILQLYKINPTIINFLQSSMQNWNTVLKLKKHSSIITTKPIQILRGIYQGDALSPLWFCLSLNPLSTLFNICNAGYNLKTTDNQFLLTHLLYMDDIKLYAENISDLFKLADMAQMFSTDICMEFGVDKCKILSINKGHIESNTYALESGHNIEPMDENSCYKYLGFKQSRKILQKQTKAEMINKFRKRLNLILKTHLNSRNIIKAINTFGISILTYSFGVINWSQSDLKNLQRIINTHMTKHRKHHSKSSIERLTLPRKEGGRGIIDIQNLHNKQIFTLRHYFYTKSQHSLLHKQLTEIDNKFTPLNLKNKSIQPKATLTTTDQKVAKWAGKSLHGRHRTELSQNYVDIEKSNGWLIKGELFPETEGFLLAIQDQVIATRNYRKYIIKNTNQHSDLCRHCNSAAETIQHITGACKSLAQSDYKHRHDQVAAIVHQHLAHLYNFIDKKVAYYKYKPVAVLENQFSKIYWDRTIITDKTIYYNRPDITVHDKTNNIVYVIDIAIPNSHNIQSTISEKLSKYQDLAIELKTQWRADVVHIVPIVLSSTGVIPKTLTESLTGLRMPTHLHYLLQKATILNTCRITRKFLTSSSISCTYTI

SEQ ID NO: 30690 - protein, 1291 aa, Urbanus sp.
MSSPNPFQNPSYLDQSSSIPLSSESSSPLTVDVVQEANASRNGPTTAKSRARRKWTTEMNKFIWRTYLITSRLETHTRGYLDPLHKAFVDKYPEMNASKQSIGDQRRAIVNNKLLPTATLLEIKDEVTNYLQENDQPLPTLTHASSRMRWSDEINETILRIYYEITELETNMTAHRKKLHDKFIETYPHLAHLSEQRISDQRRVIVNNKMLPEARILQIRHEVETQIQISNTFTQINQNQSQNLSLQQTIDTTQINNEVPSSLDTNLTEQETHANICNNLIDHETIKQQFHLALDTFKRTEPTLRPFLPRQKPSKKLALIVDYLNRNILPNILTTDPDFITLQTILYSAAYTAVVCNGTKINSRWTFRNDVRPPWQRRLENKIGIYRAEIARLTQYIRGNRSNRIIIAVEKIRRKYQIHAQYENLNTKLEHFLDTLKQKLNAASSRLRRYVTCTVRKRQNTQFTNTEKSFYRGLTSNIRNTNMQENRLPTSENLHKFWSNIWENPVQHNLDAEWLEFIKESTKNIPIMSFEDIALDTFVNVIKGTHNWKSPGSDNIHNYWYKKFTSIHPYLHKHLNIFIRSPHLMPDYITQGVTYMLPKDSNTEDPAKYRPITCLQTFYKILTSCISKTIYAHLSQHDILAEQQKGCRKNSQGCKEQLTIDAIVINEAHSKKQDIHTMFIDYRKAFDSVPHSWLLHILRLYKINPNIINFIESCMQNWKTTLKIKQHSSITTTDPIRILRGIFQGDALSPLWFCLSLNPLSTLLNNSNAGYNLKTTDDRFSLTHLLYMDDIKLYASNIDDLFLLADLAQKFSTDICMEFGVDKCKILSIYKGRIENNRYALETGQDIEPLDENSSYRYLGFKQSRKILQKETKAEITNKFKNRLNLVLKTHLNSRNIIKAINTFCIPILTYSFGIIRWSQTELKNLQRIINTHLTKHRKHHPKSSIERLTLPRREGGRGITDVQNLHNKQISTLRHYFYSKAHDSLLHKQVIEIDNKLTPLNLTNRNGQLNETLITINQKVAKWAGKSLHGRHRTDLSQTYVDKEKSNDWLMKGELFPETEGFMLAIQDQIIATKNYRKYIIKDTNQISDLCRHCNSASETIQHITGACKSLVQSDYKHRHDQVAAIVHQHLAHKYKFIPKKDPYYKYRPATILENHDTKIYWDRTIITDKTIHFNRPDITLHNKKNNTVYIIDIAIPNTHNIQSTISEKLSKYQDLAIELKTQWKANTVHIVPIVLSSTGIIPKTLTQSLDILNMPKHSHHLLQKATILNTCRITRKFLTSSSVSSTYFI

SEQ ID NO: 30691 - protein, 990 aa, Lobotractus valeriana
MRPYLPRQKPSKKLALTINYLNEHILPNILTVDQDFITFQTILYSAAYTAVTCNGTRIKMNSVGSYERGIKPPWQRRLENKIDIFRAEIARLTQYIHGNRSNRIMTSVEKIKRKYLVHAQYENINTELEHFLDTLKQKLNAASSRLRRYVTCTARKKQNTQFTNTEKSFYRGLASNNKNSNIQENRLPTAENLHKFWSDIWENPVQHNLEAEWIKVINERTKHIPDMTFKNITIDTLVHVIKGTHNWKSPGSDNIHNYWYKKFTTIYPYLHNYLNTFIQSPYLMPQYITHGITYMLPKEINTEDPAKYRPITCLQTFYKIFTACISNTIYTHLSDHNILAEQQKGCRKNSQGCKEQLTIDAIVLNEAYTKKQDIYTMFIDYRKAFDSVPHSWLLHILQLYKIHPNIINFIESSMQNWKTILKVKQHSSTIITDPIRILRGIFQGDALSPLWFCLALNPLSTLLNNSNAGYNLKTTDNRFSLTHLLYMDDIKLYAGNIDDLFTLADIAQQFSRDICMEFGVDKCKILSIHKGQIESNRYALQAGQGIEAMDDNSTYKYLGFRQSRRIAQKETKAEITTKFKNRLNLIFKTHLNSRNIVKAINTFCIPILTYSFGIINWSQTDLKRLQRTINTHMTKHRKHHPKSSIERLTLPRKEGGRGIIDIQNLHNKQITSLRHYFHTKSQHSLLHTQIAEIDNKLTPLNLRNRNTQLNEALITMDQKLAKWAGKSLHGRHRTDLSQNYVDKEKSNDWLMKGELFPETEGFMLAIQDQIIATKNYRKYILKDTNQLSDLCRHCNSGPETIQHITGACKSLVQSDYKHRHDQVAAIIHQHLAHMYKFILKKNPYYKYKPATILENQTSKIYWDRTIITDKTVHYNRPDITLHDKKSNIVYIIDIAIPNSHNIQSTISEKLSKYQDLAIELKTQWKAHIVHIVPIVLSSTGIIPKTLTQSLDILRMPTHSHYLLQKATILNTCRITRKFLTSSSVSSTYFI

SEQ ID NO: 30692 - protein, 1365 aa, Epargyreus clarus
MSKRVYNLRPLPGGRRGASGADAGCSSMRTIGGEELNRRTPTEKNVTADIISHPSKSSISSPSSSLFPSPTSSPNSSRNSSYLDRSSSVPLSSSSSPLTVDVVQEANASHNVPTTAKSRARRKWTIEMNTFIWRTYLITTRLETHTRGYLDSLHKAFIEKYPEMSASKQNIGDQRRAIVNNKLLSTNTLQEIKDEVTTYLQQNKQPLPSLTQTSARMRWSDEINETILRIYYEITELETNMTAHRKKLYNKFILIYPHLAHISEQRISDQRRVIVNNKMLTDAKILEIRHTVETQLEKSNTLTQFNENYVQNTLLQTVTDTTEITTNEDIPQHSQVIPTNSTEQEIHTNNHRNHIDHAKIKEHFNLALDTFKNTDPTMRPYLPTQKSSKKLALIVDFINKNILPAILTDDQDFITFQTILYSAAYTAVICNGTKINSITSRRDTRPPWQRRLESKIDIYRAEIGRLTQYIRGNRTNRIKTAVEKIKKKYQVHAQYENINTELEHFMDTLKQKLNTASSRLKRYITCTARKKQNTQFTSTEKAFYRGLTYNKQTSNARQECIGPTPENLHKFWSDIWENPVQHNLKAEWINVIKEATKNIPEMIFEHITFETFVHVIKSTHNWKSPGTDNIHNYWYKKFTSIYPYLHNHLNKFIQSPQLMPQYITHGITYMIPKENNTEDPSKYRPITCLQTIYKILTACISKTIYSHLSDHDILAEQQKCCRKNSQGCKEQLTIDAIVINEAYSKKHDIHTLFIDYCKAFDSVPHSWLLQILQLYKINPSIVEFLETSMKNWKTVLKIRQPSSTITTDPIRILRGIFQGDALSPLWFCLALNPLSTLLNNSTAGYNLVTTDNRFSLTHLLYMDDIKLYAGNLNDLFQIADLTQQFSTDICMEFGVDKCKILSINKGHIETNKYALETGQDIEPMDVNSAYKYLGFKQSRKILQKETKAELTNKFKHRLNLVLKTHLNSRNMIKAINTFSIPILTYSFGIINWTQTDLKNLQRTINTHLTKHRKHHPKSSIERLTLPRKEGGRGIIDIQNLHNKQISSLRHYFHSKSQNSLLHKQVAEIDSRLTPLNLKNTNSQSNEALITVDQKIAKWVGKSLHGRHRTDLSQNYVDKEKSNDWLMRGELFPETEGFMLAIQDQIIATKNYRKFIIKDTNQPSDLCRHCNSAPETIQHITGACKSLVQSDYKHRHDQVAAIVHQHLAHRYNFILKKNPYYKYKPATILENQTCKIYWDRTIITDKTIHFNRPDITLHDKKSNIVYIIDIAIPNSHNIQSTISEKLTKYQDLAIELKTQWKARIVHIVPIVLSSTGIIPKTLTQSLNILQMPTHSHHLLQKATILNTCRITRKFLTSSSISSTYSI

SEQ ID NO: 30693 - protein, 763 aa, Aguna metophis
MNFEHITTDIFLNVIKGIHNWKSPGSDNLHNYWYKKLTSIHPYLHNYLNTFIQSPHLMPEYITHGITYMLPKESDTEDPAKYRPITCLQTIYKILTSCISKSIYSHLSEYDILVEQQKGCRKNSQGCKEQLTIDAIVINNAHTRKRDIHSMFIDYRKAFDSVPHSWLLHTLRLYKINPNIINFIKFSMRNWKTKLKIKQDSATITTDPIRILRGIFQGDALSPLWFCLALNPLSTLLNNSNAGYDLNTTDSRFSLTHLLYMDDIKLYADNIDNLFQLADLAEQFSTDICMEFGVDKCKILSIHKGKMESNRFALQTGQNIEPMDENNTYKYLGFKQSRKILHKETKVEIINKFKIRLNLVLKTYLNSRNMIKAINTFCIPILTYSFGIINWSQTDLKNLQRTINTHLTKHRKHHPKSSIERLTLPRQEGGRGIINIQNLHNKQITTLRHYFHTKSLYSFLHKQVSEIDKKLTPLNLRNRNTLRNEVLITKDQKIAKWAGKSLHGRHRTDLCQNYVDKEKSNDWLMKGELFPETEGFMLAIQDQIIATKNYRKHIIKDTNQLSDLCRHCNSAPETIQHITGACKSLVQSDYKHRHDQVAAIVHQHLAHMYKFIIKRSPYYKYKPDTILENQTSKIYWDRTIITDKTIHFNRPDVTLHDKKNNTVYIIDIAIPNTHNIQSTISEKLSKYQDLAIELKTQWKAHTVHIVPIVLSSTGIIPNTLTQSLNILRMPANSHQLLQKTTILHTCRITRKFLIMFIFTSRSI

SEQ ID NO: 30694 - protein, 1368 aa, Epargyreus clarus
MSKRVYNLRPLPGGRRGASGADAGCSSMRTIGGEELNRRTPTEKNVTADIISHPSKSSISSPSSSLFPSPTSSPNSSRNPSYLDRSSSVPLSSSSSPLTVDVVQEANASHNVPTTAKSRARRKWTIEMNMFIWRTYLITTRLETHTRGYLDSLHKAFIEKYPEMSASKQNIGDQRRAIVNNKLLSTNTLQEIKDEVTTYLQQNKQPLPSLTQTSARMRWSDEINETILRIYYEITELETNMTAHRKKLYNKFIQIYPHLAHISEQRISDQRRVIVNNKMLTDAKILEIRHTVETQLEKSNTLTQFNENYVQNTLLQPVTDTTEITTNEDIPQHSQVIPTNSTEQEIHTNNHRNHIDHAKIKEHFNLALDTFKNTDPTMRPYLPTQKSSKKLALIVDFINKNILPAILTDDQDFITFQTILYSAAYTAVICNGTKINSITSRTLRRDTRPPWQRRLESKIDIYRAEIGRLTQYIHGNRTNRIKTAVEKIKKKYQVHAQYENINTELEHFMDTLKQKLNTASSRLKRYITCTARKKQNTQFTSTEKAFYRGLTYNKQTSNARQECIGPTPENLHKFWSDIWENPVQHNLKAEWINVIKEATKNIPEMIFEHITFETFVHVIKSTHNWKSPGTDNIHNYWYKKFTSIYPYLHNHLNKFIQSPQLMPQYITHGITYMIPKENNTEDPSKYRPITCLQTIYKILTACISKTIYSHLSDHDILAEQQKGCRKNSQGCKEQLTIDAIVINEAYSKKHDIHTLFIDYCKAFDSVPHSWLLQILQLYKINPSIVEFLETSMKNWKTVLKIRQPSSTITTDPIRILRGIFQGDALSPLWFCLALNPLSTLLNNSTAGYNLITTDNRFSLTHLLYMDDIKLYAGNLNDLFQLAHLTQQFSTDICMEFGVDKCKILSINKGHIETNKYALETGQDIEPMDVNSAYKYLGFKQSRKILQKETKAELTNKFKHRLNLVLKTHLNSRNMVKAINTFSIPILTYSFGIINWTQTDLKNLQRTINTHLTKHRKHHPKSSIERLTLPRKEGGRGIIDIQNLHNKQISSLRHYFHSKSQHSLLHKQVAEIDSRLTPLNLKNTNSQSNEALITVDQKIAKWVGKSLHGRHRTDLSQNYVDKEKSNDWLMRGELFPETEGFMLAIQDQIIATKNYRKFIIKDTNQPSDLCRHCNSAPETIQHITGACKSLVQSDYKHRHDQVAAIVHQHLTHRYNFILKKNPYYKYKPATILENQTCKIYWDRTIITDKTIHFNRPDITLHDKKSNIVYIIDIAIPNSHNIQSTISEKLTKYQDLAIELKTQWKARIVHIVPIVLSSTGIIPKTLTQSLNILQMPTHSHHLLQKATILNTCRITRKFLTSSSISSTYSI

SEQ ID NO: 30695 - protein, 859 aa, Urbanus velinus
MDTLKQKLNAASSRLRRYVTCTTRKRQNTQFTNTEKSFYRGLTSNSRNTNMQENRLPTSENLHKFWSNIWENPVQHNVDAEWLEFIKESTKNIPVMSFEDIALDTLVNVIKGTHNWKSPGSDNIHNYWYKKFTSIHPHLHKHLNIFIRSPHLMPYYITHGVTYMLPKDSNTEDPSKYRPITCLQTFYKIFTSCISKTIYAHLSQHDILAEQQKGCRKNSQGCKEQLTIDAIVINEAHTKKEDIHTMFIDYRKAFDSVPHSWLLHILRLYKINPNIINFIESCMQNWKTTLKIKQHSSTTTTDPIRILRGIFQGDALSPLWFCLSLNPLSTLLNNSNAGYNLKTTDDRFSLTHLLYMDDIKLYASNIDDLFQLADLAQKFSTDICMEFGVDKCKILSIYKGHIENNSYALESGQDIEPLDENSSYRYLGFKQSRKILQKETKAEITNKFKNRLNLVLKTHLNSRNIIKAINTFCIPILTYSFGIISWSQTDLKNLQRIINTHLTKHRKHHPKSSIERLTLPRREGGRGIIDVQNLHNKQISTLRQYFYTKTHYSRLHKQVIEIDNKFTPLNLRNRNAQLNETLITINQKVAKWAGKSLHGRHRTDLSQTYVDKEKSNDWLMRGELFPETEGFMLAIQDQIIATKNYRKYIIKDTNQISDLCRHCNSASETIQHITGACKSLVQSDYKHRHDQVAAIVHQHLAHKYKFIPKKDPYYKYRPVTILENQDTKIYWDRTIITDKTIHFNRPDITLHDKKNNTVYIIDIAIPNTHNIQSTISEKLSKYQDLAIELKTQWKANTVHIVPIVLSSTGIIPKTLTQSLDILNMPIHSHHLLQKATILNTCRITRKFLTSSSVSSTYFI

SEQ ID NO: 30696 - protein, 1243 aa, Codatractus alcaeus
MNMFIWRTYLITSRLETHTRGYLDALHRAFIEKYPEMNASKQRIGDQRRAIVNNKLLSTTILNEIKDEVTKYLQKNKQPLPSHTQAAARMQWSDDINEIILRIYYEVTELETNMTGHRHKLHSKFIQTYPHLSHLTPQRISDQRRVIVNNKMLPEAKILQIRHDVEMQLQISNTLTRFNDDHSQNISLPSITDTTQMLLHEEDISISQEAIHRNRANQETHTNNNNNFIDYDKIKQHFDVALDTFNNTEPTLRPYLPKQKPSKKLALTINYLDKHILPNILSADQDFMTFQTILYSAAYTAVIFNGTRIKINSVRSHAKDIRPPWQRRLENKIKIYRAEIGRLTQYSRGNRSNKIITAVERIKSKYQVHAQYEQVNTELEHFLDTLKQKLNAASSRLRRYVTCTARKQQNTQFSNTEKLFYRNLTSINQNSNMHKSKLPTAENLRKYWSDIWETPVQHNLETEWVKFINEKTKYIPDMTFEHISIDTLTQVIKGTHNWKSPGTDNLHNYWYKKFTSIYPYLHNYLNTFIQSPHLMPKYITHGITYMLPKEINTEDPAKYRPITCLQTIYKILTACISKMIYNHLSDHNILAEQQKGCRKNSQGCKEQLTIDAIVLNDAYSKKQNIHNMFIDYRKAFDSVPHSWLVHILRLYKIHPNIIYFLESSMRNWKTMLKIRQDSYTITTEPICILRGIFQGDALSPLWFCLALNPLSTLLNNSNVGYNLKTTDNRFSLTHLLYMDDIKLYAGNIADLFTLADIAQQFSTDICMEFGVDKCKILSVQKGHIQNNRYALQTGQDIVAMDEQSTYKYLGFRQSRKIVHKETKAEITSKFKYRLNLIFKTHLNSRNIVKAINTFCIPILTYSFGIINWSQTDLKNLQRTINTHMTKHRKHHPKSSIERLTLPRKEGGRGIIDIQNLHNKQITSLRHYFHTKSKHSLLHTQVIEMDNKLTPLNLRNRNTQHNESLITLDQKLAKWVGKSLHGRHRTDLSQNYVDKEKSNDWLMKGELFPETEGFMLAIQDQIIATKNYRKHIIKDTNQLTDLCRHCNSAPETIQHITGACKFLVQSDYKHRHDQVASIIHQHLAHMYNFIDKKKPYYKYKPAAILENQTTKIYWDRTIITDKTIHYNRPDITLHDKKSNTIYIIDVAIPNNHNIQSTISAKLSKYQDLAIELKTQWKAHTIHIVPIVLSSTGIVPKTLTQSLNILRMPTHSHHLLQKATILNTCRITRKFLTSSSVSSSSTYFI

SEQ ID NO: 30697 - protein, 1362 aa, Cecropterus bathyllus
MSKRVYNLRPLPGGRRGASGADAGCSSMRTIGGEELNRRTSTEKNVTADVISHHTNSSNTSPLSSLFPSPNSSPNPFQNPSNLQPSTSSLSSSPLTVDVVQETNVSHHEPTTAKSRARRKWTIEMNKFIWRTYLITSRLETHTRGYLDPLHKAFIEKYPEMNASKQSIGDQRRAIVNNKLLPTTTLREIRDAVTKQLQQNAQSPPTLIQASARMRWSDEINEKILRIYYEITELETNMTAHRKKLHDKFIETYPHLAHLSEQRISDQRRVIVNNKMLPEARIIQIRQEVKTQIEKSNTFTQISPNHSHNSTLLQIADTTQTILHDDVAPPSPGFSVTEQETHTYNSSKFINHERIQREFNLALDTFKNTDPTLRPYLPRQKPSKKLALTIDYLNKNILPNILSTEQDFITLQTILYSAAYTAVLCNGTKINSSKTFRSDCRPPWQRRLENKIRIFRAEIGRLTQYILGNRSNRIMIAVEKIKRKYQVHSQYENINTELEHFLDTLKQKLNAASSRLKRYITCTARKKQNTQFTYTEKAFYRGLSSNNQNINIDENKIPTAENLHKFWGNIWEKPVQHNVEAEWLNVINETTKNIPIMDFKHLTLDIFVQVVKGTHNWKSPGTDNIHNYWYKKITSIYPYLLNHLNTFIQSPHLMPHYITHGVTYMLPKESNTEDPAKYRPITCLQTIYKILTACISKTIYAHLTQHDILAEQQKGCRINSQGCKEQLTIDAIVINEAYTVKKDIHTMFIDYRKAFDSVPHSWLLHILRLYKINPSIIFFLQSCMQNWKTILKIKQRSSTITTDPIRILRGIFQGDALSPLWFCLSLNPLSTLLNNSNAGYNLETTDDRFSLTHLLYMDDIKLYASNVDDLFQLADLAQQFSIDICMEFGVDKCKILSIYKGQIVNNKYALETGQDIEPLDENSSYRYLGFKQSRKILQKETKAEITNKFKHRLNLVLKTHLNSRNIVKAINTFCISILTYSFGIINWSQTELKNLQRIINTHLTKYRKHHPKSSIERLTVPRKEGGRGIIDIQNLHNKQIFTLRHFFHTKVHHSILHKQVTEIDNKLTPLNLRNRNTQPSEILITTDQKIAKWAGKSLHGRHRTDLSQTYVDKDKSNDWLTKGELFPETEGFMLAIQDQIIVTKNYRKYIIKDTNQLSDLCRHCNSAPETIQHITGACKSLAQSDYKHRHDQVAAIVHQHLAHTYKFIHKKDPYYKYKPAAVLENENTKIYWDRTIITDKTIHFNRPDITLHDKKSNTVYIIDIAIPNSHNIQPTISEKLSKYQDLAIELKTQWKAHIVHIVPIVLSSTGIVPKTLTQSLDILRMPAHSHHLLQKATILNTCRITRKFLTSSSVTVSSSYFI

SEQ ID NO: 30698 - protein, 1366 aa, Autochton zarex
MSKRVYNLRPLPGGRRGASGADAGCYSMRTIGGEELNRRTPTENNATAGIISHPNSSTNSSPLSSLFPSPTSSPNSFHNPSYSDHSSSLPSSSSSSSPLTVDVVQEANASHDVPTTAKLRARRKWTIEMNKFIWRTYLITSRLEANTRGYLDSLHKAFIEKYPEMNASKQSIGDQRRAIVNNKLLPTTTLREIRDEVSTYLQQNVQPPPTLIQSASARMRWSDEINETILRIYYEITELETNMTAHRKKLHDKFIETYPHLAHLSEQRISDQRRVIVNNKMLPKTRIIQIRQEVEAQLQISNTSTQISENLIQNSSLQAADTTQTIIHDDVSPPSRGRGFSSSEQEIHTYSSNFIDQEKVEQQFNLALETFKNTDPTLRPYLPRQKPSKKLALTIDYLNKNVLPNILTIDQDFITFQTILYSAAYTAVLCNGTKINSSKTYTTECRPPWQRRLENKISVFRAEIARLTQYIRGNKSNKITKAVENIKRKYQVHSQYEKINIESEHFLDTLKQKLNAASSRLRRYVACTARKKQNTQFTNTEKAFYRGLTSNNKNINIIQENSIPTAENLHKFWSNIWENPVQHNIEAEWLKVINETTKNIPIMHFEHITLDIFVHVIKGTHNWKSPGTDNIHNYWYKKLTSIYPYLLNHLNTFIQSPHLMPHYITHGVTYMLPKENNTEDPAKYRPITCLQTIYKILTACISKTIYTHLEQHNILAEQQKGCRKNSQGCKEQLTIDAIVINKAYTAKQNIHTMFIDYRKAFDSVPHSWLLHILRLYKINPNIVNFIESCMQNWKTILKIRQRSSTTTTDPIQILRGIFQGDALSPLWFCLSLNPLSALLNNSNAGYNLETSDDRFILTHLLYMDDIKLYASNLNDLFQLADLAQQFSIDICMEFGVDKCKILSIHKGQIENNKYALDTGQDIEPLDENSSYKYLGFKQSRKLLQKETKADITNKFKHRLNLVLKTHLNSRNIIKAINTFCIPILTYSFGIVNWSQTELKNLQRIINTHLTKHRKHHPKSSIERLTVPRKEGGRGIIDIQNLHNKQIFTLRHYFHDKSHYSILHKQVTEIDNKLTPLNLRNRNAQPNETLITIDQKVAKWASKSLHGRHRTDLSQTYVDKEKSNDWLTKGELFPETEGFMIAIQDQIIVTKNYRKYIIKDTNQLSDLCRHCNSAPETIQHITGACKSLVQSDYKHRHDQVAAIVHQHLAHMYKFILKKDPYYKYKPATVLENHNTKIYWDRTIITDKTIHYNRPDITLHDKKNNTIYIIDIAIPNSHNIQPTISEKLSKYQDLAIELKTQWKAHVVHIVPIVLSSTGIVPKTLSQSLDILRMPAHSHHLLQKATILNTCRITRKFLTSSSVSSSYFI

SEQ ID NO: 30699 - protein, 1368 aa, Epargyreus clarus
MSKRVYNLRPLPGGRRGASGADAGCSSMRTIGGEELNRRTPTEKNVTADIISHPSNSSISSPSSSLFPSPTSSPNSSRNPSYLDRSSSVPLSSSSSPLTVDVVQEANASHNVPTTAKSRARRKWTIEMNMFIWRTYLITTRLETHTRGYLDSLHKAFIEKYPEMSASKQNIGDQRRAIVNNKLLSTNTLQEIKDEVTTYLQQNKQPLPSLTQTSARMRWSDEINETILRIYYEITELETNMTAHRKKLYNKFIQIYPHLAHISEQRISDQRRVIVNNKMLTDAKILEIRHTVETQLQKSNTLTQFNENYLQNTLLQPVTDTTEITTNEDIPQHSQVIPTNSTEQEIHTNNHRNHIDHAKIKEHFNLALDTFKNTEPTMRPYLPTQKSSKKLALIVDYINKNILPAILTDDQDFITFQTILYSAAYTAVICNGTKINSITSRTLRRDTRPPWQRRLESKIDIYRAEIGRLTQYIHGNRTNRIKTAVEKIKKKYQVHAQYENINTELEHFMDTLKQKLNTASSRLKRYITCTARKKQNTQFTSTEKAFYRGLTYNKQTSNARQECIGPTPENLHKFWSDIWENPVQHNLKAEWINVIKEATKNIPEMIFEHIPFETFVHVIKSTHNWKSPGTDNIHNYWYKKFTSIYPYLHNHLNKFIQSPQLMPQYITHGITYMIPKENNTEDPSKYRPITCLQTIYKILTACISKTIYSHLSDHDILAEQQKGCRKNSQGCKEQLTIDAIVINEAHSKKHDIHTLFIDYCKAFDSVPHSWLLQILQLYKINPSIVEFLETSMKNWKTVLKIRQPSSTITTDPIRILRGIFQGDALSPLWFCLALNPLSTLLNNSTAGYNLITTDNRFSLTHLLYMDDIKLYAGNVNDLFQLADLTQQFSTDICMEFGVDKCKILSINKGHIETNKYALETGQDIEPMDVNSAYKYLGFKQSRKILQKETKAELTNKFKHRLNLVLKTHLNSRNMVKAINTFSIPILTYSFGIINWTQTDLKNLQRTINTHLTKHRKHHPKSSIERLILPRKEGGRGIIDIQNLHNKQISSLRHYFHSKSQHSLLHKQVAEIDSRLTPLNLKNTNSQSNEALITVDQKIAKWVGKSLHGRHRTDLSQNYVDKGKSNDWLMRGELFPETEGFMLAIQDQIIATKNYRKFIIKDTNQPSDLCRHCNSAAETIQHITGACKSLVQSDYKHRHDQVAAIVHQHLAHRYNFILKKNPYYKYKPATILENQTCKIYWDRTIITDKTIHFNRPDITLHDKKSNIVYIIDIAIPNSHNIQSTISEKLTKYQDLAIELKTQWKARIVHIVPIVLSSTGIIPKTLTQSLNILQMPPHSHHLLQKATILNTCRITRKFLTSSSISSTYSI

SEQ ID NO: 30700 - protein, 859 aa, Autochton pseudocellus
MDTLKQKLNAASSRLRRYITCTDRKKQNAQFTNTEKAFYRGLTPKNQNSNVQENRVPTIENLHKYWSDIWGKPVQHNVEAEWINVINEETKHIPEMKFEHITTDTLLHVIKGTHNWKSPGTDNIHNYWYKKFTSIHPHLHNHLNTFIRLPHLMPKYIIHGVTYVIPKETNAEDPAKYRPITCLQTVYKILTACISKTIYSHLIDNEILAEQQKGCRKNSQGCKEQLTIDAIVINEAYSKKEDIHSMFIDYRKAFDSVPHSWLLKILRLYKINPNIIHFIESSMQNWKTVIKLRQHSSTIITDSIHILRGIFQGDALSPLWFCLALNPLSTLLNNSNAGYILKTTGNRFSLSHLLYMDDIKLYAGNKYDLFRLADLTQQFSTDICMEFGIDKCKILSIYKGQIESNSYVLETGLNIDSMDENSTYKYLGYRQSRKILQKETKVEITNKFKNRLNLVLKTHLNARNTVKAINTFCIPILTYSFGIINWSQTDLKNLQRTINTHMTKHRKHHPKSSIERIILPRKEGGRGIIDIQNLHNKQISTLRHFFHTKSQHSLLHRQVTDIDMKLTPLNLGDTNTQPNEALNTTDQKIAKWAGKSLHGRHRTDLSQNYVDKEKSNDWLMRGELFPETEGFMLAIQDQIIATKNYRKYIIKDTNQLSDLCRHCNSAPETIQHITGACKSLAQSDYRHRHDQVAAIVHQHLAYMYKFIQKKNPYYKYKPATILENQTTKIYWDRTIITDKTICYNRPDITLHDKKRNTVYIIDIAIPNSHNIQSTISEKLSKYQDLAIELKTQWKAHVVHIVPIVLSSTGIIPKTLTQSLDILRMPTHSHHLLQKATILNTCRITRKFLTSSSISSTYFI

SEQ ID NO: 30701 - protein, 1293 aa, Ochropleura plecta
MNTRSKTKKQLQAKLPQIDDETSQPSSSSPSSLFPSIPSSSQSFRVTPTPSCSSISIQSADVVQETNSVDDTVPTAKAATSRRKWTIEMNKFILRTYLHLTTMETDKNAYLPPLHTKFLEKYPAMQVSRQRIGDQRRAIVQKKLLPQDTIDQIYEEVRSELQIIHTQIQQHSTQPCTQSGQRMRWTNEYNETIITIYYTITQLETNKTAYRKKLHEEFINTYPELAHITEQRLSDQVRAIINNKYIHENRLKEIKNQVTSELRNRNTNTQNIEDVNHYHRNTQTQDDSEQILADTPINFLTSNIILNNSIDSDIASRTVVNIDDENFLDNIHAGQFVRTQTNFDPVPEIESTFHQAQQNFNDTHPTNRPYIPKQKTSRKFSAIVTYINTVILPKHVNVDTEFTKLQTIIYCAAWTAATCNGAKISDSAQNERRPNTQRKPKWQIRLEKKIENLRANIGRLTHFNNGCRSPKLIAAVEDIKIKYQLHAQYENSNTQIAHFMDTLKQKLSATSSRLKRYITCTNRKIQNTKFINNEKIFYRNLTTNYSGTTNQSLETPTSETLRQFWANIWENPVQHNNRADWVNAATPEIPEMEFECIPIDTFIDVIKRTHNWKSPGSDNIHNYWYKKFSSLHPFLHNHLNSFIQSPQLLPQYITHGVTYMIPKDTNDTANPANYRPITCLQTFYKILTACVSEIVYEHLTKNNILAEQQKGCRKNSQGCKEQLTIDGITMNSAVKSRKDIHTMFIDYQKAFDSVPHSWLLRVLSLYKIHPTLKQFLETSMQNWQTVLKINSSSTTVATEPIRIKRGIFQGDALSPLWFCMALNPLSLLLDKTGAGFTMENNNTQYTLTHLMYMDDIKLYAADIVALYQLADATQLFSDDICMSFGVDKCKILSIVKGKIQNNSYTLLSGESIEPMDEQSTYKYLGFKQSRQIQQKMSKQELLKKFSHRLNLILKSNLNSRNTVKAINTFAIPILTYSFGIIRWSKTDIKTLQRTIHTLLTKHRKHHPKSCIQRLTLPRQEGGRGLIDINNLHNKQILSLRAYFHNKSENSPLHKQVTEAGKKLTPLNLQNRNTQINEHIVSTQQKITAWSEKALHGRHRAFLSQPHVDKIKSNEWLKRGELFPETEGFMLAIQDQIICTRNYRKYIMKDTNQPTDLCRHCNTASETIQHITGACTSLAQTDYKHRHDQVAAIIHQQLAFKYKLVNEMIPYYKYKPEVTLENNHQKLYWDRTIITDKTIHYNRPDITVHDKTNKTVYLIDIAIPNSKLQYLKSLVNIKILPLKLKPNGEHRLFI

SEQ ID NO: 30702 - protein, 1277 aa, Xestia xanthographa
MNKFILRTYLHLTSMETDKNAYLPPLHTKFIEKYPAMQVSRQRIGDQRRAIVQKKLLPQDTIDQIYEEVRAELQMIHTQIQQHSTQPSTQSGKRMRWTNEYNETIIRIYFTATQLETNKTAYRKKIHEEFINKYPELAHITEQRLSDQVRAIIKNKYIHENRLEEIKNQVASELSNSNSYTQNIEDINHDHWNIQTQNDSEQPATNTNFFDTPNNTLTTNKILNNSTDTNIVSQTVVNIDDENFLNNIDVGQYGPAQTNFDTTPETNPEIESRFHQAQINFNCTHPTNRPYIPKQKTSRKFSAIVSYINTVILPKHVNADTEFAKLQTIIYCAEWTAATCNGAKISDPIQNERRPYTQRKPKWHIRLEKKIENLRANIGRLTHFINGCRSKKLIAAVEEIKIKYQLHAQYENPNTELAHFLDTLKQKLSSASSRLKRYITCTNRKVENTTFINNEKIFYRNLTSNNKDTNNQSLETPTPETLREFWANIWENPVHHNNQADWVKEATPVIPDMEFEFIPIETFRDVIKRTHNWKSPGTDNIHNYWYKKFSSIHPFLYNHLNTFIQSPHLLPQYITHGVTYMIPKDTNDTKNPAKYRPITCLQTLYKILTACVSEIIYEHLTKNNILAEQQKGCRKNSQGCKEQLTIDAITMNSAVKSRKDIHPMFIDYQKAFDSVPHSWLLHVLNLYKIHPTLKQFLGTSMQNWQTVLKMNSSSSTVATEPICIRRGIFQGDALSPLWFWMALNPLSHLLDQTGTGFTLDSNNTQYTLTHLMYMDGIKLYAADKEALYQLADATQQFSDDICMSFGVDKCKMLSIVKGKFQNNSYTLLSGASIEPMDEQSTYKYLGFKQSRQIQQKISKQELLKKFTHRLNLILKSNLNSRNTIKAINTFAIPILTYSFGIIRWSKTDIKKLQRTIHTLLTKHRKHHPKSCIQRLTLPRQEGGRGLIDIHNFHNKQILLLRAYFHNKSETSSLHKQVTETDNKLTPLNLQNRNTQINEHIVSTQQKIAAWSEKALHRRHRPCLSQPHVDKIKSNEWLKRGELFPDTEGFMLAIQDQIIATRNYRKYIIKDPNQPTDLCRHCNNASETIQHITGACKSLAQTDYKHRHDQVAAIIHQQLAFKYKLVSEMIPYYKYKPEVALENNDQKIYWDRTIITDKTIHYNRPDITVHDKINKTVYLIDIAIPNSHNIQATISEKLSKYQDLAIEIKTQWKVQTVHIVPIVLSSTGIIPKSLTQSLNTLQMPNHTLYMLQKATILNTCRITRNFLTSATLSSTFSI

SEQ ID NO: 30703 - protein, 1323 aa, Ochropleura plecta
MLYNFGFGSSNFSRLCLVHIFRFWQFFNNNNNTNSVDDTVPTAKAATSRRKWTIEMNKFILRTYLHLTTMETDKNAYLPPLHTKFLEKYPAMQVSRQRIGDQRRAIVQKKLLPQDTIDQIYEEVRSELQIIHTQIQQHSTQPCTQSGQRMRWTNEYNETIITIYYTITQLETNKTAYRKKLHEEFINTYPELAHITEQRLSDQVRAIINNKYIHENRLKEIKNQVTSELRNRNTNTQNIEDVNHYHRNTQTQDDSEQILADTPINFLTSNIILNNSIDSDIASRTLVNIDDENFLDNIHAGQFLRTQTNFDPVPEIESTFHQAQQNFNDTHPTNRPYIPKQKTSRKFSAIVTYINTVILPKHVNVDTEFTKLHTIIYCAAWTAATCNGAKISDSAQNERRPNTQRKPKWQIRLEKKIENLRANIGRLTHFNNGCRSPKLIAAVEDIKIKYQLHAQYENSNTQIAHFMDTLKQKLSATSSRLKRYITCTNRKIQNTKFINNEKIFYRSLTTNYRGTTNQSLETPTSETLRQFWANIWENPVQHNNRADWVNAATPEIPEMEFECIPIDTFIDVIKRTHNWKSPGSDNIHNYWYKKFSSLHPFLHNHLNSFIQSPQLLPQYITHGVTYMIPKDTNDTANPAKYRPITCLQTFYKILTACVSEIVYEHLTKNNILAEQQKGCRKNSQGCKEQLTIDAITMNSAVKSRKDIHTMFIDYQKAFDSVPHSWLLHVLSLYKIHPTLKQFLETSMQNWQTVLKINSSSTTVATEPIRIKRGIFQGDALSPLWFCMALNPLSFLLDKTGAGFTMENNNTQYTLTHLMYMDDIKLYAADIVALYQLADATQLFSDDICMSFGVDKCKILSIVKGKIQNNSYTLLSGESIEPMDEQSTYKYLGFKQSRQIQQKMSKQELLKKFSHRLNLILKSNLNSRNTVKAINTFAIPILTYSFGIIRWSKTDIKTLQRTIHTLLTKHRKHHPKSCIQRLTLPRQEGGRGLIDINNLHNKQILSLRAYFHNKSENSPLHKQVTEADKKLTPLNLQNRNTQINEHIVSTQQKITAWSEKALHGRHRAFLSQPHVDKIKSNEWLKRGELFPETEGFMLAIQDQIICTRNYRKYIMKDTNQPTDLCRHCNTASETIQHITGACTSLAQTDYKHRHDQVAAIIHQQLAFKYKLVNEMIPYYKYKPEVTLENNHQKLYWDRTIITDKTIHYNRPDITVHDKTNKTVYLIDIAIPNSHNIQTTISEKLSKYQDLAIEIKTQWRAQTVHIVPIVLSSTGIIPKSLTQSLNTLQMPTHTLYMLQKATILNTCRITRKFLTSSTISSTFSI

SEQ ID NO: 30704 - protein, 913 aa, Noctua janthe
MAKHVGRLTHYINGCRSKKLIAAVEEIKIKYQLHAQHENPNTEIAHFLDTLKQKLSAASSRLKRYITCTNRKVQNTRFINNEKIFYRNLTSNNKDTTNQSLETPTPEILREFWANIWENPVHHNNHADWVKETTPEIPEMEFEFIPIETFIDVIKRTHNWKSPGTDNIHNYWYKKFSSIHPFLYNHLNTFIKSPHLLPQYITHGVTYMIPKDTDDTKNPAKYRPITCLQTLYKILTACISEIVYEHLTKNNILAEQQKGCRKNSQGCKEQLTIDAITMNSAVKTRKDIHTMFIDYQKAFDSVPHSWLLHVLNLYKIHPTLKQFLETSMQNWQTVLKINSSSSTVATESICIRRGIFQGDALSPLWFCMALNPLSHLLDQTGAGFSLESNNIQYTLTHLMYMDDIKLYAADKEALYQLADATQQFSNDICMSFGVDKCKILSIVKGKIQYNSYTLLSGASIEPIDEHSTYKYLGFKQSRQIQQKMSKQELLKKFSHRLNLILKSNLNSRNTIKAINTFAIPILTYSFRIIRWSKTDIKKLQRTIHTLLTKHRKHHPKSCIQRLTLPRQEGGRGLHNLHNKQILSLRAYFHNKSETSSLHKQITETDNKLTPLNLQNRNTQINEHIVSVQQKIAAWSEKALHGRHRACLNQPHVDKIKSNEWLKRGELFPETEGFMLAIQDQIIATRNYRKYIIKDPNQPTDLCRHCNNASETIQHITGACKSLAQTDYKHRHDQVAAIIHQQLAFKCKLVSEMIPYYKYKPEVALENNDQKIYWDRTIITDKTIHYNRPDITVHDKTNKTVYLIDIAIPNTHNIQTTISEKLSKYQDLAIEIKTQWKVQTVHIVPIVLSSTGIIPKSLTQSLNTLQMPNHTAKSHHSQHLSNHPKFFDFFHIIIHFLYLNFTLHPWFRPACKVS

SEQ ID NO: 30705 - protein, 1300 aa, Noctua pronuba
MPRAAWLGERLVASVPTLDNRGPPVLFTLATVNAGLCCGRLFKSLATRGINMNTRSKTKKQLQAKLPQIDDETSQPSSSSPSSLFASISSSSQSFRVTPTPSSSSISIQSVDVVQETNFVDDTVPAARTATSRRKWSIDMNKFILRTYLHLTHMETDKNAYLPSLHTKFLEKYPDMQVGRQRIGDQRRAIVQKKLLPQETIDQIYEEVRAELQIVHTQIQQHSTQPKTPINTQPGQRMKWTNEYNEAIIRIYYTTTQLETNKTAYRKHLHEGFINIYPELAHLTEQRLSDQLRAIINNKYIHTNRLGEIKNQVATELKNNNTNTQNIEHINNDLQQPDENIHSLSTEYTNIYTPTTSNNILLNNSSDTNIVSQTPINTVEENLLNHIDIGLFEPAQNNFDAVLEKNLEIEAIFQQAQQLFFNTHPTSRPYIPKQKTSKKFSAIVTYINSVILPNNVNVDTDFIKLQTTIYCAAWTAATCNGAKISDTQNESRTYIKRKPKWQIRIDKKIQSLRANIGRLTHFMNGSRSPKLIAAVEEIKKKYQVHAQYEDSNTQLVHFLDTLKQKLNAASSRLKRYLKCTNRKVQNTKFINNEKIFYRNLTTNNRDTTNQSLETPTSETLREFWANLWENPVNHNHQADWINEATPEIPEMEFEFIPIGTFIDVIKRTHNWKSPGTDNIHNYWYKKFTSIHPFLHNHLNTFIHSPHLLPSYITHGVTYMIPKDINDTINPAKYRPITCLQTIYKILTACLSEVVYEHLTKNNILSEQQKGCRKNSQGCKEQLTIDAVTMNSAVKSKTDIHTMFIDYQKAFDSVPHSWLLNVLSLYKIHPALKKFLEISMQNWQTVLKINSSSATVATEPIHIKRGIFQGDALSPLWFCMALNPLSQLLDKTDAGYTLTNINTQYTLTHLMYMDDIKLYAADKNALFALADTTQQFSDDICMSFGVDKCKMLSVVKGKVQNNSYTLGSGQVIEPMDEHSTYKYLGFKQSRQIHQKMTKQELINKYSHRLNLILKTNLNSKNTIKAINTFAIPILTYSFGIIRWSNTDIKKLQRTLNTSLTKHRKHHPKSSIQRLTLPRQEGGRGLIDIHNLHNKQIHSLRAYFHNKSENSSLHKHVTENDTKLTPLNLHNRNTQINELLISTPEKIATWSAKALHGRHRAYLSQPHVDKAKSNEWLKRGELFPETEGFMLAIQDQIIATRNFRKYIIKDPHQPTDLCRHCNTASETIQHITGACKSLAQTDYKHRHDQVAAIIHQHLAFKYKLISEMKPYYKYKPELILDNNNQKIYWDRTIMTDKTTTFQ

SEQ ID NO: 30706 - protein, 1412 aa, Ochropleura plecta
MLRAAWLGERLVANVPTLDNRGPPVLFTLATVNAGLCCGRLCKSLASRGNNMNTRSKTKKILLANLPQMDDETSHFSSSSSSSLFPSIPSSSQSFRVTPTPSSPSISIQSVDVVQETNIVEDTVPTARTARSRRKWSIDMNKFILRTYLHLTHIETDKNAYLPSLHTKFLEKYPDMQVGRQRIGDQRRAIVQKKLLPQETIDQIYEEVRAELQIVHTQIQHSTQSMTQNNTQPGQRMKWTNEYNEAIIRIYYTTTQLETNKTAYRKHLHEGFINIYPELAHVTEQRLSDQVRAIINNKYIPNDRLEEIKNQVALELRNNNINIEHINNDLQQSDENVLSLNTQYTNIHITDTTNNIIVLNNNSDTNTVSQTPIHTVDENFLNQIDIGLFEPTQNNLNGAPEKNLEIEATFQQAQQLFSDTHPTSRPFIPKQKTSKKFSAIVTYINSIILPNIVNIDTDFTQLQTIIYCAAWTAATRNGAKISDTQNESRTYIKRKPKWQIRMDKKIQSLRANIGRLTHFINGSRSPKLIAAVEEIKKKYQVHAQYEDPNTQLVHFLDTLKQKLNAFSSRLKRYLTCTNRKVQNSKFVNNEKTFYRNLTTNNRDTNNQNLETPTPESLREFWANIWENPVNHNHQADWINEVTTDTPEMEFEFIPIETFIDVIKRTHNWKSPGTDNIHNYWYKKFSSIHPFLHNHLNTFIQSPHLLPSYITHGVTYMIPKDSNDTINPAKYRPITCLQTIYKILTACLSEVVYEHLTKNNILSEQQKGCRKNSQGCKEQLTIDAVTMSSAVKSKTDIHTMFIDYQKAFDSVPHSWLLNVLSLYKIHPTLKHFLETTMQSWQTVLKINSLSSTVATEPIHIKRGIFQGDALSPLWFCMALNPLSHLLDKTGAGYALTNINTHYTLTHLMYMDDIKLYAADKNELFELADTTQQFSDDICMSFGVDKCKILSVVKGKVQNNSYTLGSGQIIEPIDELSSYKYLGFKQSRQIHQKMIKQELVNKFSHRLNLVLKTSLNSKNTIKAINTFAIPILTYSFGIIRWSNTDIKKLQRTVNTTLTKHRKHHPKSSIHRITLPRQEGGRGLIDIHNLHNKQILSLRSYFHNKSENSTLHKHVTENDIKLTPLNLHNRNTQINEQIINTQEKIAAWSAKALHGRHRAFLSQPHVDKAKSNEWLKRGELFPETEGFMLAIQDQIIATRNYRKYIIKDPHQPTDLCRHCNTASETIQHITGACKSLAQTDYKHRHDQVAAIIHQQLAFQHKLVSEMQPYYKYKPEIILENNNHKIYWDRTIVTDKTIHFNRPDITLHDKANKIVYLIDIAIPNSHNIQTTMSEKLNKYQDLAIEIKTQWKAQTVHIVPIVLSSTGIVPKSLMQSLNTLHMPSHTLHLLQKATILNTCRITRKFLTSSTISSTFSI

SEQ ID NO: 30707 - protein, 1362 aa, Mythimna ferrago
MNTRSKTKKQLQASMPQIDDETMQPFSLSPSSLFPSISSSSQSFRVTPTPSSSSIQSADVVQETNFVEDTVPTARTVTSRRKWSIEMNKFILRTYLYLTNMDTDKNAYLPSLHAKFLEKYPDMQVSRQRIGDQRRAIVLRKLLPQDTIDQIYEEVRAELQICHTQIQQHSTQSNTQFSQRMSWTNEHNEAIIRIYYNVTQLETNETVYRKHLREEFINIYPELAHVSEQRLSDQVRAIINNVYIDTKRLKEIRNQVAVELENTNTNAQNTEQTSGDNLNTQLQIESDLSVTIANFPDTPTNTLTTNMALNDSTGADIVLDSLASIEDDNNLLNNINISQSEPIYLNSISESSTEIEATFQQAQLSFNDTHPTNRPYIPKQKTSRKFTAIVNYINTVILPKHVNGNTEFITLQTIIYCAAWTAAVCNGAKISDSTQNERHTYKYRKPKWQIRLEKKIEYLRVNIGRLTHFINGSRSPRLVAAVEQIKSKYQLHAQHENSNTQIEHFLDTLKQKLSAASSRLKRYITCTNRKVENTKFKNNEKIFYRNLMSNNRDTTNQSLDTPSPETLREFWANIWENPVNHNDHADWVSDATTEIPDMEFEFISLDTFIGVIKRIHNWKSPGTDNIHNYWYKKFSSIHPFLYNHLNTFIQSPHLLPKYITHGVTYMIPKDKNDTINPAKYRPITCLQTFYKILTACVSEIVYDHLIKNNILAEQQKGCRKHSQGCKEQLTIDAIAMNSAVKSRKDIHTMFIDYQKAFDSVPHSWLLHVLKLYKIHPTLKQFLETSMRNWQTVLKINSSATTVATEPISIKRGIFQGDALSPLWFCMALNPLSHLLDKTDVGFTLANHDTQYKLTHLMYMDDIKLYAADKEALFQLADTTQLFSDDICMSFGVDKCKILSVVKGKIQNNSYTLGSGESIEPMDEHSTYKYLGFKQSRQIQQKLSKEELLKKFSHRLNLILKSNLNSKNTIKAINTFAIPILTYSFGIIQWSKTDIKKLQRTVHTLLTKHRKHHPKSCIQRLTLPRQEGGRGLIDIQNLHNKQIHSLRLYFHYKSENSLLHKQVSDIDKKLTPLNLQNKNTQINEQITSTQQKIAAWSEKALHGRHRAALSQPHVDKLMSNEWLKRGELFPETEGFMLAIQDQIIATRNYRKYIMKDQNQPTDFCRHCNSASETIQHITGACKSLVQTDYKHRHDQVASIIHQHLAYKYKLVTEMMPYYKYNPEIILENKDIKIYWDRTIITDKTIHYNRPDITVHDKTNKIVYLIDIAIPNSHNVQTTISEKLSKYQDLAIEIKTQWKAQTVHIVPIVLSSTGIIPKSLAQSLETLHMPAQTLYMLQKATILNTCRITRKFLTSSTLTTTFSI

SEQ ID NO: 30708 - protein, 765 aa, Noctua pronuba
MEFEFIPIATFIEVIKRTHNWKSPGTDNIHNYWYKKFSSIHPFLHNHLNTFIHSPHLLPSYITHGVTYMIPKDINDTINPAKYRPITCLQTIYKILTACLSEVVYEHLTKNNILSEQQKGCRKNSQGCKEQLTIDAVTMNRAVKSKTDIHTMFIDYQKAFDSVPHSWLLNVLSLYKIHPTLKNFLEISMQNWQTVLKINSSSATVATEPIHIKRGIFQGDALSPLWFCMALNPLSQLLDKTDAGYTLTNINTQYTLTHLMYMDDIKLYAADKNALFVLADTTQQFSDDICMSFGVDKCKMLSVVKGKVQNNSYTLGSGQVIEPMDEHSTYKYLGFKQSRQIHQKMTKQELVNKYSHRLNLILKTNLNSKNTIKAINTFAIPILTYSFGIIRWSNTDIKKLQRTLNTSLTKHRKHHPKSSIQRLTLPRQEGGRGLIDIHNLHNKQIHSLRAYFHNKSENSSLHKHVTENDTKLTPLNLHNRNTQINELLISTPEKIAAWSAKALHGRHRAYLSQPHVDKAKSNEWLKRGELFPETEGFMMAIQDQIIATRNFRKYIIKDPHQPTDLCRHCNTASETIQHITGACKSLAQTDYKHRHDQVAAIIHQHLAFKYKLISEMKPYYKYKPELILDNYNHKIYWDRTIITDKTIHFNRPDITLHDKVNKTVYLIDIAIPNSHNIQTTISEKLSKYQDLAIEIKTQWEAQTVHIVPIVLSSTGIVPKSLTQSLNTLHMPPHTLQLLQKATILNTCRITRKFLTSSTISSSFSI

SEQ ID NO: 30709 - protein, 1384 aa, Ectomis octomaculata
MKTTAQKKTKNKNFYHQDSVVKTRTYNLRPLPGGRRGASGADARCFSMRSISDEELNRRASTKKNATAEINPHHTNSSRSSPSSLFQSSISSPYHFSQNSSSPPSSSSLSSPSSHLAVDVVQEANAFHNGPTIVIPRARRKWTLEMNMFIWRTYLILSRLETRTRGYLDPLHKAFIEKYPEINVSKQRIGDQRRAILRNKLLSTSILQSIKDEVTEYLEIYETPQPALSQISTSSRMHWSDEVNETILRIYYEVTELETNMTAYRKKLHSKFIQTYPNLAHLTEQRISDQKRAIVNNKMLSEAKIDHIRHDIRTRLQTSNILALPNVSKNTLTHTNTDTTEVVTDVEVDRSFSHTNIHKNLEEQENHTNYINFLDHEKIKQEFHLALNNFKKTEATLRPYLPRQKPSRKLALIVEYINKNILPAILTSEQDFTAFQTIVYSAAYTAVVCNGSKINFARSHKKDFKPPWQRRLETKINNLRAEIARLIQYIRGNKSNRIIKEVEKIKIKYQVHAQHENVNTQLEHFMDTLKQKLNAAASRLKRYLTCTARKKQNTQFTNAEKVFYRNLTSDTRNSNIQESRAPTAENLRSYWGNIWENPVQHNTEAKWIDVINESTKQVHEMHFEYISIETLVDVIKNTHNWKSPGTDNIHNYWLKKFTTLHPYLRSHLNTFIRSPHLMPEYITHGVTYMLPKDTNIENPANYRPITCLQTIYKILTSCISKTIYAHLSDNNILAEQQKGCRKNSQGCKEQLTIDAIVISEAYTKKQDIHCMFIDYRKAFDSVPHSWLLHILKLYKISPIIINFIESSMKNWKTVLKLKQSSSTITTDPIRILRGIYQGDALSPLWFCISLNPLSALLNNTNAGYNLQTTDNQFSLTHLLYMDDIKLYASNIRNLFDLADIAQTFSTDICMDFGVDKCKILSINKGQIEKNKYALESGLDIEAMNENSYYKYLGFKQSRKIHHKETKTEIINRFKIRLNLILKTHLNSRNTVKAINTFGIGILTYSFGIINWTQTDLKNLQRIINTHMTKHRKHHPKSSIERLTLPRRKGGRGIIDIKNLHNRQISALRQYFYSKSEHSLLHKQITEIDKKLTPLNLKDKNTQPNETLDTIEQKITKWASKSLHGRHRTELSQNYVDEEKSNDWLMKGELFPETEGFMLAVQDQVITTRNYMKYIVKDNNQVSDLCRHCNSAPETIQHITGACKSLVQSDYRHRHDQVAAIVHQYLAHRYKFIQKKRSYYKYKPATVLENQSVKIYWDRTIITDKTIHFNRPDITVHDKTTDNIYIIDIAIPNSHNVKSTIAEKLSKYQDLAIELKTQWRAHVVHIVPIVLSSTGVIPKTLTQSLNILSMPTHLQSLLQKATILNTCRITRKFLTSASVSSTYSV

SEQ ID NO: 30710 - protein, 1394 aa, Acronicta aceris
MITRSKTKKSLQANRLHTDDEQMHVSSSSSTKSLFPSITSSSPSFCISPTPSSSISIQSADVAQETKFVNKPVPTTSTATTRRKWSIEMNKFILRTYLHLTNMETDNNAYLPPLHTKFLEKYPNMQVSRQRIGDQRRAIVQKKLLPQETIDQIYDEVRAELQLIQTQIQQHSTQYSIPINTQLSQRMKWTNEYNEAIMRIYYRITQIETNKTAYRKHLHEEFINLYPNLTHITEQRLADQRRAIINNKYIKDARLSEIKKQVTEELLYTNTQLENNHEHSNTYFIEHSEERENTLNTQNTNTYESCSTYTADLPLNSSINTDEITQTPTDTQNTELTHTEDNFLNNINIGQLDSTQTQLDAATEINPELEDTFQQALKHFTNIHLTNRSYIPKQKSSKKFAAIVKYINTIIFPKYANGDTDFITLQNLIYCGAWTAAKCNGAKISLIPQIEHQTRTHRKPNWQIRLEKKIGNLRANIGRLTQYIRGNRNRKVIKAVEAIKTKYQLHAQYENSNTQLEHFLDTLKQKLNAASSRLKRYITCTNRKVQNTKFSNSEKTFYRNLTSQNSNQNIETPSADTLRDFWANLWENPVLHNQHANWINETETQITQMEFEFIPIETFIDVIKRTHNWKSPGTDNIHNYWYKKFTYLYPYIYNHLNTFIKSPHLLPTYITQGVTYMIPKDINDTVNPAKYRPITCLQTLYKILTACISEVISKHLTEHDILAEQQKGCRKKSQGCKEQLTIDAITMNSAVKNKKDIHTMFIDYQKAFDSVPHSWLIHVLNLYKIHPTLISFLKTSMLNWQTVLKINQISTTLTTEPISIQRGIFQGDALSPLWFCLALNPLSHLLNKTDVGFTLKNNGSQYTLSHLMYMDDIKLYANSKNTLYKLADTTQKFSQDICMQFGVDKCKILSVSKGKIQNNEYALEIGEVIEPMDEHSTYKYLGFKQTRQIQHKMIKQELLKKFTHRLNLVLKTHLNSKNIIKAINTFAIPILTYSFGIIQWSKSDIKQLQRTINTHLTKHRKHHPKSCIQRLTLPRQEGGRGLIDVHNLHNKQILSLRTYFHDKAAHSPLHKHAIETDKKLTPLNLQDKHTQANEQLISTQQKLALWADKALHGRHRAYLSLPHVDKSKSNEWLRRGELFPETEGFMLAIQDQIIATRNYRKFIIKDPNQPTDLCRHCNNASETIQHITGACKSLAQTDYKHRHDQVASIIHQHLAHKYKLITDMNPYYKYKPEIILENQHHKMYWDRTIITDKTIHYNRPDITVHDKAKKIVYLIDIAIPNSHNIQSTISEKVNKYQDLAIEIKTQWKAQTVHIVPIVLSSTGIIPKSLTQSLNTLNMPTYTLHILQKATILNTCRITRKFLTSSTLSSTFSYIENVDDSVEELHTLGFGPHVR

SEQ ID NO: 30711 - protein, 1365 aa, Xestia c-nigrum
MNTRSKTKKQLQAKLPQIDDETSSTPSSLCSSISSSSQSFRVTPTPSFSSISIQSADVVQETNFVDDTVPAARTATSRRKWSIDMNKFILRTYLHLTHMETDKNAYLPSLHTKFLEKYPDMQVGRQRIGDQRRAIVQKKLLPQETIDQIYEEVRVELQTVYTQIQQHSTQSKTPINTQPGQRMKWTNEYNEAVIRIYYTITQLETNKTAYRKHLHEEFINIYPELTHLTEQRLSDQVRAIINNKYIHSNRLKEIKNQVASELRNNNINTQNTEHITNVLQQPDENMFSASTQCININVSNTTTNTPATSNITLLNNSSDTNIVSQTLTADEHFLNHIDIGLFEPSPNNFDAAPEKNLEIEATFQQAQQLFSDTHPTSRPYIPKQKTSKKFSAIVTYINSVILPNNVNVDTDFAKLQTTIYCAAWTAATCNGAKISDTQNESRTYNKRKPKWQIRMDKKIQSLRANIGRLTHFINGSRSPKLIAAVEKIKKNYQIHAQYEDSNTQLVHFLDTLKQKLNAASSRLKRYLKCTNRKVQNSKFINNEKTFYRNLATNSSETTNQSLETPSSETLREFWANIWENPVNHNHQADWINEVTPEIPEMEFEFIPIVTFIDVIKRTHNWKSPGTDNIHNYWYKRFSSIHPFLHNHLNAFIHSPHLLPSYITHGVTYMIPKDVNDTKNPAKYRPITCLQTIYKILTACLSEVVYEHLTNNNILSEQQKGCRKNSQGCKEQLTVDAITMNSAVKSKKDIHTMFIDYQKAFDSIPHSWLLKILSLYKIHPTLKNFLEISMQNWQTVLKINSSSSTVATEPIHIRRGIFQGDALSPLWFCMALNPLSHLLDKTDAGYTLTNITTHYTLTHLMYMDDIKLYAPDKNALFILADTTQQFSDDICMSFGVDKCKILSIVNGKVQNNSYTLGSGQSIEPMDEHSTYKYLGFKQSRQIHQKTTKQDLLSKFSHRLNLILKTNLNSKNTIKAINTFAVPILTYSFGIIRWSNTDIKKLQRTINTSLTKHRKHHPKSSIHRLTLPRQEGGRGLIDIHNLHNKQIHSLRSYFYNKSENSSLHKHVTENDRKLTPLNLHDRNTQINEIPITTQEKITAWSAKALHGRHRAYLSQPHVDKTKSNEWLKRGELFPETEGFMLAIQDQIIATRNYRKYIIKDPHQPTDLCRHCNTVSETIQHITGACKSLAQTDYKHRHDQVAAIIHQHLAFKYKFINEMKPYYKYKPEITLENRNQKIYWDRTIITDKTIHFNRPDITLHDKTSKTVYLIDIAIPNSHNIQTTISEKLSKYQDLAIEIKTQWEAQTVHIVPIVLSSTGIVPKSLMQSLNTLHMPPHTLHLLQKATILNTCRITRKFLTSSTISSTFSI

SEQ ID NO: 30712 - protein, 1382 aa, Myrinia binoculus
MKSTTRPRPQVPGGSSDLPDSDESRAGTGSRGVYNLRARKPRQTTQAFQKDSDLQCDKERTSSLSSIGSLFQTPISSPNSFELPVSPQSSTVTSMFVDVVQETEVDNPAPTTHNKRARKRWSDDMNKFIWRTYLRITRIETINLKSYLPSLHQQFTEKFPAMQATRQRVGDQRRAILRNQLLSLDALNQIKTEVKEELESTEVLPTTPTSQISNTQNINTSNTSQKGKMSWSDTLNETLIRCYYEVTELGKNLTAYRRKLRNNFIDIYPHLSNLSEQRISDQQRAILNNKYISDEKLLHIRKEVETQLYVNKSLVDMQPHAEISHVRDITMVTQNEQEIERGEETAQSQTHFSSTQNHKECLATHMQEKLQTEFTNNFNHFINTNPTSRAYIPKQKASKKLAMIVAYINKNILPDFLKSDQSFVTLQTIIYTAAFTAAKCNGTRIGTTRECNIKQRIKPSWQKRLEGKIRLLRADIGRLTQYIRGNKNKRIIKTVENIKIKYQIHTQHENINIELKDFLDTLKQKLNAASSRLKRYSTCTERKQQNNDFKNNEKGFYRNISTQHNNVHVNSKTIDTPTANVLREFWANIWEHPVEHNTTADWANPSDKVSMPNIEMEFENIPMDIFVKVIRNTHNWKAPGTDNIHNFWYKKLTSTHPYIHNNINTFLQFPDTMPGYITEGVTFMLPKDQNDTRNPSKYRPITCLQTIYKLITGCVSEIIYEHLTKYNILAEQQKGCRKNSQGCKEQLTIDSIAMNTAATQKRDIYTMFIDYQKAYDSIPHSWLIQTLQIYKIHPTITSFLKSSMNNWQTSLKIKQDTHFIITEPIQIKRGIFQGDALSPLWFCLALNPLSELLNQTNLGFKFNNSAIEGNLTHLMYMDDIKLFANTKDELFELVDITQKFSKDIHMDFGVDKCKILSVHNGKIERNNYVLETGESIEPLDQYSTYKYLGFKQSRQIHHNSIKLEITNKFKYRLNLLLKTFLNSKNTIKAINTYAIPILTYSFGIIRWTKTDLKKLQRIISTHLTKNRKHHPKACTQRLTLPRKEGGRGLIDIANLHNTQIKTLRHYFHLKAEETNLHKYATGADNKLTPLNLKYKQTQKNEHITNADEKIATWAGKVLHGRHRAHICQQYVDKEKSNEWLKTGELFPETEGFMIAIQDEIILTRNYKKHILKDPKQVNDLCRHCNASPETIQHITGGCRSLAQTDYKHRHDQVAAIIHQQLAYRYKMIPKMIQYYKYKPESVLEDKKYKIYWDRTIITDKTIHFNRPDITVHDKINKTVYLIDVAIPNSHNIQNTTSEKLNKYQDLAIELRTQWKVQTIHIIPIILSSTGIIPKTLLQSLNTLNMPSYTLHMLQKATILNTCRITRKFLTSSTISSATLAIQ

SEQ ID NO: 30713 - protein, 1390 aa, Heliothis virescens
MRLRNRVLPQAGTEANRDGESRPMASSLGCPSYSGGGTVSQPAAQSQTAAVSHDDESSCSSLYSSIPSSSQSFCISPSPSSSSASIQSVDVVQETISVTEPVPTTSTATIRRKWSIEMNEFILRTYLQLTNMETDTKTYLQPLHTQFLAKYPHMQVSRQRIGDQRRAIVQKKLLPQNTINQIYNEIRDQLQITPTQTQSHSTQTNAPLTTKPGQRMKWSNELNESIIRIYYTITELETNKTSYRKHLHEEFINQYPQLSHISEQRLSDQQRVIINNKYINSERLAEIKRQVSEQLKNSNTQINDQSNTQTQLNTENYNEGSHTLNTGNTNTQNTNIPEDTLSTVRQTHISFDIGHEDIINNIDVDSFIPFQNNLITTSEPNPEIEETFEQAKQYFLHTNPTSRPYIPKQKTSKKFSTIVNYIDTKILPNNVNTNTDFNTLQSIIYCAAWTAAKCNGAKISQHIQNQNRRNKQRKPNWQTRLEKKINNLRANIARLTQFIRGTRSQKIIAAVEVIKSTYHLHAQHEDPNTQAEHFLDTLKQKLNAAASRLRRYITCTNRKTQNTKFNNNEKIFYRNLTSNNNTNEQNQDTPSPEILREFWANIWENPVEHNRHAEWINQVSSEISDMNFEFIPINTFIDVLKRTHSWKSPGTDNIHNYWYKKFTTIHPLIHQHINTFVNSPHLLPTYITHGVTYMIPKDMNDTVNPAKYRPITCLQTLYKILTACVSEVIYTHLITHNILAEQQKGCRKNSQGCKEQLTIDAITTNSAVKGKKEIHAMFIDYQKAFDSVPHSWLLHVLDIYKIHPTLKLFLQTSMQNWQTSLRINQGSTSISTEPISIKRGIFQGDALSPLWFCMALNPLSHLLNKSEIGYTLTDNNTLYNLSHLMYMDDIKLYASNTNDLFKLADTTQQFSNDICMQFGVDKCKILSIVKGKIQNNSYTLQSGESIQPVDQHSTYKYLGFKQSRQIQQKITKQELHKKFTHRINLILKSNLNSRNTIKAINTYAIPILTYSFGIIQWSNTDIQKLQRTVNTLFTKHRKHHPKSCIQRLTLPRQEGGRGLIDIHNLHNKQIATLRTYFHNKTEHSPLHRHITNTDIQLTPLNLHDRNPQTNETVTSTQHKITAWSSKALHGRHRAFLSQPHVDKVKSNEWLRRGELFPETEGFMLAIQDQVIATRNYRKYIIKDQNQPTDLCRHCNTASETIQHITGACKSLVQTDYKHRHDQVAAIIHQHLAYKYKLTDKMIPYYKYKPETVLENRNLKIYWDRTIITDKTIHYNRPDITVHDKSTKTVYLIDIAIPNSHNIQTTISEKLSKYQDLAIELKTQWKAQTVHIVPIVLSSTGIIPKSLTQSLNTLHMPAHTLHMLQKATILNTCRITRKFLTSSTLSSTFSI

SEQ ID NO: 30714 - protein, 1416 aa, Noctua janthe
MPRAAWLGERLVASVPTLDNRGPPVLFTLATVNAGLCCGRPFKSLATRGINMNTRSKTKKQLQAKMPQIDDEISQPSSSSPSSLFPSIPSLSQSFRVTPTPSSSSISIQSADVVQETNFVDDAVPSAKAATSRRKWSIEMNKFILRTYLQLTSIETDKNAYLPPLHTKFLEKYPAMQVSRQRIGDQRRAIVQKKLLPQDTIDQIYEEVRAELQMIHTQIQQHSTQPSTQSGQRMRWTKEYNETLIRIYFTATQLETNKTAYRKKLHEEFINKYPELAHITEQRLSDQVRAIINNKYIHDNRLKEIKNQVASEFRNSNTNTQSIEDINRDHWDTQTQDDSEQPATNTNFSDTPINTLTTNIILNNSTDTNIVSQTVVNINDENFLQNIDVGQFGPTQTNFDTATETNPEIESTFHQAQINFNCTHPTNRPYIPKQKTSRKFSAIVSYINTVILPKYVNANTEFIKLQTIIYCAAWTAATCNGAKISDLTQNERRPYTQTKPKWQIRLEKKIDNLRANIGRLTHFINGCRSKKLIAAVEEIKIKYQLHAQHENPNTEIAHFLDTLKQKLSAASSRLKRYITCTNRKVQNTRFINNEKVFYRNLTSNNKDITNQSLETPTPEILREFWANIWENPVHHNNHADWVKETTPEIPEMEFEFIPIETFIDVIKRTHNWKSPGTDNIHNYWYKKFSSIHPFLYNHLNTFIKSPHLLPQYITHGVTYMIPKDTNDTKNPAKYRPITCLQTLYKILTACISEIVYEHLTKNNILTEQQKGCRKNSQGCKEQLTIDAITMNSAVKSRKDIHTMFIDYQKAFDSVPHSWLLHVLNLYKIHPTLKQFLETSMQNWQTVLKINSSSSTVATEPICIRRGIFQGDALSPLWFCMALNPLSHLLDQTGAGFSLESNNTQYTLTHLMYMDDIKLYAADKEALYQLADATQQFSNDICMSFGVDKCKILAIVKGKIQNNSYTLLSGASIEPIDKQSTYKYLGFKQSRQIQQKMSKQELLKKFSHRLNLILKSNLNSRNTIKAINTFAIPILTYSFGIIRWSKTDIKKLQRTIHTLLTKHRKHHPKSCIQRLTLPRQEGGRGLIDIHNLHNKQILSLRAYFHNKSETSSLHKQITETDNKLTPLNLQNRNTQINEHIVSAQQKIAAWSEKALHGRHRACLSQPHVDKIKSNEWLKRGELFPETEGFMLAIQDQIIATRNYRKYIIKDPNQPTDLCRHCNNASETIQHITGACKSLAQTDYKHRHDQVAAIIHQQLAFKYKLVSEMIPYYKYKPEVALENNDQKIYWDRTIITDKTIHYNRPDITVHDKTNKTVYLIDIAIPNTHNIQTTISEKLSKYQDLAIEIKTQWKVQTVHIVPIVLSSTGIIPKSLTQSLNTLQMPNHTLYMLQKATILNTCRITRKFLTSSTLSSTFSI

SEQ ID NO: 30715 - protein, 1184 aa, Xestia xanthographa
MKWTNEYNEAVIRIYYTTTQLETNKTAYRKHLHEEFINIYPELAHLTEQRLSDQVRAIINNKYIHTNRLEEIKNQVASELRNNNTNIQHTELINNDLQQPDENMYSLSTQHTNINISDRTTNTPTTSNITLLNNSSDTNIVSQTHTVVDDNFLNHIDIGIFEPTQNNFDAAPEKNLEIEAAFQQAQQLFSNTHPTSRPYIPKQKTSKKFSLIVTYINSVILPNNVNVDTDFVKLQTAIYCAAWTAATCNGAKISDTQNESRTYIKRKPKWQIRIEKKILSLRANIGRLTHFINGSRSPKLIAAVEQIKKKYQVHAQYEDSNTQLVHFLDTLKQKLNAASSRLKRYLKCTNRKVQNTKFINNEKIFYRNLTTTNRDTTNQSLETPTSETLREFWANIWENPVNHNHQADWINEVTPDIPEMEFEFIPIGTFIDVIKRTHNWKSPGTDNIHNYWYKKFSSIHPFLHNHLNTFIHSPHLLPSYVTHGVTYMIPKDINDTINPAKYRPITCLQTIYKILTACLSEVVYEHLTKHNILSEQQKGCRKNSQGCKEQLTIDAVTMNSAVKSKTDIHTIFIDYQKAFDSVPHSWLLDILSLYKIHPTLKHFLEISMQNWQTVLKINSSSSTVATEPIHIKRGIFQGDALSPLWFCMALNPLSHLLDKTDAGYTLTNITTHYTLTHLMYMDDIKLYAPDKNALFVLADTTQQFSDDICMSFGVDKCKILSVVKGKVQNNSYTLGSGQSIEPMDEQSAYKYLGFKQSRQIHQKMTKQELVNKFSYRINLILKTNLNSKNTIKAINTFAIPILTYSFGIIRWSNTDIKKLQRTINTSLTKHRKHHPKSSIQRLTLPRQEGGRGLIDIHNLHNKQIHSLRAYFHNKSENSPLHKHVTENDMKLTPLNLHNRNTQINELLITTQEKIAAWSAKALHGRHRAYLSQPHVDKAKSNEWLKRGELFPETEGFMLAIQDQIIATRNYRKYIIKDPHQPTDLCRHCNTASETIQHITGACKSLAQTDYKHRHDQVASIIHQHLAFKYKLISEMKPYYKYKPEITLENRNQKIYWDRTIITDKTIHFNRPDITLHDKTNKTVYLIDIAIPNSHNIQTTISEKLSKYQDLAIEIKTQWEAQTVHIVPIVLSSTGVVPKSLTQSLNTLDISPHTLHLLQKATILNTCRITRKFLTSSTISSTFSI

SEQ ID NO: 30716 - protein, 1401 aa, Craniophora ligustri
MQGSAVVDRKSLATRGINMITRSKTKKVIQANVPLIDDNHTQVSSSSSTISLIQSISSSSQFICVSPTPSASTSIKSADVAQETIFVDKPVPTTSTVTTRRKWSSEMNEFILRTYLHLTNMETDINAYLSPLHVKFLEKYPNMQVSRQKIGDQRRAIVQKKLLPQTKINQIYDDVREELQLIHTHIQQHSTQLQISTNTQPTQRMKWTNAYNETIMRIYYKITQLETNKTAYRKALHEEFISLYPSFAHITEQRLSDQRRAIINNNYINNARLAEIKKQVAEELQYRNTQTEIIHNIQPNTYIQNSLEHADNYGLTLNTQNTNINIRSDTPINTQTTNFLSTNSIDSDIVAQTPLDTHNMEIIQIEDNFLNNIDTGQTDSTPIHSNNIETNPDIENTFQQAQLYFADTHPTNRPYIPKQKTSRKFIAIVTYINNIIFPKYTNVNSDFITLQTIIYCGAWTAAKCNGAKISHIPQNENLTRSKRKPNWQIRLEKKIGSLRANIGRLTPYIRGNRSSKVVAAVEAIKTKYENHAQYENSNTEMVHFLDTLKQKLNAASSRLKRYITCTNRKAQNAKFVNNEKNFYRNLTSTNTDNSNQNLQTPPADTLRNFWADIWENPVLHNHHADYINETATDITHMEFEFIPIETFIDVIKRTHNWKSPGSDNIHNYWYKKFTNLHPYIHNHLNTFIQSPQLLPTYITHGVTYMIPKDKNDTLNPAKYRPITCLQTIYKILTACISEEVYKHLINNDILAEQQKGCRKNSQGCKEQLTIDAIIMNNAVKNKKDICTMFIDYQKAFDSVPHSWLLHVLNLYKIHPTLISFLKTSMLNWQTVLKINQASTTLTTEPISIQRGIFQGDALSPLWFCLALNPLSYLLNKTSTGFTLTNNDTHYTLSHLMYMDDIKLYASDTISLNKLADITQQFSQDIRMQFGVDKCKMFSVTKGKIEYNRYTLESGESIEPMDEQSTYKYLGFKQSRQIHQKTTKQEMLKKFSHRLNLVLKTQLNSKCIIKAINTFAIPILMYSFGIIQWSKTDIKQLQRTINTHLTKHRKHHPKSCLQRLTLPRQEGGRGLIDVHNLHNKQIISLRAYFHDKAAHSPLHKHIIETDKKLTPLNLQDKNTQINEHLISTQQKHTLWSDKALHGRHRAYLSLPHVDKDKSNEWLRRGELFPETEGFMLAIQDQIIVTRNYRKYIIKDPNQPTDLCRHCNSASETIQHITGACKSLAQTDYKHRHDQVASIIHQHLAYKHKLILDMNPYYKYKPETVLENRHLKIYWDRTIITDKTIHYNRPDITVHDKTNKTVYLIDIAIPNSHNIQSTISEKLNKYQDLAIEIKTQWRAETVHIVPIVLSSTGIVPKSLTESLNILDMPTYTLHMLQKATILNTCRITRKFLSSSTLSSTFSI

SEQ ID NO: 30717 - protein, 1365 aa, Xestia c-nigrum
MNTRSKTKKQLQAKLPQIDDETSSTPSSLFPSISSSSQSFRVTPTPSFSSISIQSADVVQETNFVDDTVPAARTATSRRKWSIDMNKFILRTYLHLTHMETDKNAYLPSLHTKFLEKYPDMQVGRQRIGDQRRAIVQKKLLPQETIDQIYEEVRVELQTVYTQIQQHSTQSKTPTNTQPGQRMKWTNEYNEAVIRIYFTITQLETNKTAYRKHLHEEFINIYPELTHLTEQRLSDQLRAIINNKYIHTNRLTEIKKQVASELKNNNTNTQNTEHINNVLQQPDENMFSPSTQCININVSNTTTNTPATSNITLLNNSSDTNIVSQTLTADEHFLNHIDIGLFEPTPNNFDAAPEKNLEIETTFQQAQQLFSDTHPTSRPYIPKQKTSKKFSAIVTYINSVILPNNVNADTDFAKLQTTIYCAAWTAATCNGAKISDTQNESRTYIKRKPKWQIRMDKKIQSLRANIGRLTHFINGSRSPKLIAAVEKIKKNYQVHAQYQDSNTQLVHFLDTLKQKLNAASSRLKRYLKCTNRKVQNSKFINNEKIFYRNLATNNSETTNQSLETPTSETLQEFWANIWENPVNHNHQADWINEVTPEIPEMEFEFIPIPTFIDVIKRTHNWKSPGTDNIHNYWYKRFSSIHPFLHNHLNAFIHSPHLLPSYITHGVTYMIPKDVNDTKNPAKYRPITCLQTIYKILTACLSEVVYEHLTNNNILSEQQKGCRKNSQGCKEQLTVDAITMNSAVKSKKDIHTMFIDYQKAFDSIPHSWLLKILSLYKIHPTLKHFLEISMQNWQTVLKINSSSSIVATEPIHIRRGIFQGDALSPLWFCMALNPLSHLLDKTDAGYTLTNITTHYTLTHLMYMDDIKLYAPDKNALFILADTTQQFSDDICMSFGVDKCKILSIVNGKVQNNSYTLGSGQLIEPMDEQSTYKYLGFKQSRQIHQKMTKQDLLSKFSHRLNLILKTNLNSKNTIKAINTFAIPILTYSFGIIRWSNTDIKKLQRTVNTSLTKHRKHHPKSSIHRLTLPRQEGGRGLIDIHNLHNKQIHSLRSYFYNKSENSSLHKHVTENDRKLTPLNLHDRNTQINEVPITTQEKITAWSAKALHGRHRAYLSQPHVDKTKSNEWLKRGELFPETEGFMLAIQDQIIATRNYRKYIIKDPHQPTDLCRHCNTVSETIQHITGACKSLAQTDYKHRHDQVAAIIHQHLAFKYKFISEMKPYYKYKPEITLENRNQKIYWDRTIITDKTIHFNRPDITLHDKTNKTVYLIDIAIPNSHNIQTTISEKLSKYQDLAIEIKTQWEAQTVHIVPIVLSSTGIVPKSLMQSLNTLHMPPHTLHLLQKATILNTCRITRKFLTSSTISSTFSI

SEQ ID NO: 30718 - protein, 765 aa, Xestia xanthographa
MEFEFIPIETFIDVIKRTHNWKSPGTDNIHNYWYKKFSSIHPFLYNHLNTFIQSPHLLPQYITHGVTYMIPKDTNDTKNPAKYRPITCLQTLYKILTACVSEIVYEHLTKNNILAEQQKGCRKNSQGCKEQLTIDAITMSSAVKSKKDIHTMFIDYQKAFDSVPHSWLLHVLNLYKIHPTLKQFLGTSMQNWQTVLKINSSSSTVATEPICIRRGIFQGDALSPLWFCMALNPLSHLLDQTGTGFTLDSNNTQYTLTHLMYMDDIKLYAADKEALYQLADATQQFSEDICMSFGVDKCKILSIVKGKFQNNSYTLLSGASIEPMDEQSTYKYLGFKQSRQIQQKMSKQELLKKFTHRLNLILKSNLNSRNTIKAINTFAIPILTYSFGIIRWSKTDIKKLQRTIHTLLTKHRKHHPKSCIQRLTLPRQEGGRGLIDIHNLHNKQILSLRAYFHNKSETSLLHKQVTETDNKLTPLNLQNRNTQINEHIVSTQQKITEWSEKALHGRHRACLSQPHVDKIKSNEWLKRGELFPETEGFMLAIQDQIIATRNYRKYIIKDPNQPSDLCRHCNNASETIQHITGACKSLAQTDYKHRHDQVAAIIHQQLAFKYKLVSEMIPYYKYKPEVALENNDQKIYWDRTIITDKTIHYNRPDITVHDKTNKTVYLIDIAIPNSHNIQATISEKLSKYQDLAIEIKTQWKVQTVHIVPIVLSSTGIIPKSLTQSLNTLQMPNHTLYMLQKATILNTCRITRKFLTSSTLSSTFSI

SEQ ID NO: 30719 - protein, 1371 aa, Noctua pronuba
MNTRSKTKKQLQAKLPQLDDETSQPSSSSPSSLFPSIPSSSQSFRVTPTPSSSSISIQSVDVVQETNFVDDTVPAARTATSRRKWSIDMNKFILRTYLHLTHMETDKNAYLPSLHTKFLEKYPDMQVGRQRIGDQRRAIVQKKLLPEETIEQIYEEVRAELQIVHTQIQQHCIQSKTPINTQPGQRMKWTNEYNEAIIRIYYTTTQLETNKTAYRKHLHEEFINIYPELAHLTEQRLSDQVRAIINNKYIHTNRLEEIKNQVATELRNNNTNTQNIQHINNDLQQPDQNIHSLSTQYTNVHISCTTTNTPTTNNVMLLNNNPETNIASQTFINTDEENFLNHVDIGQHEPTQSNFDASSEKNQEIEATFQQAQELFSDKHPTNRPYIPKQRTSKKFSAIVTYINSVILTNCVNVETDFIKLQNVIYCAAWTAAICNGAKISSTQNESRTYIKRKPKWQIRLEKKIQYLRASIGRLTHFNNGSRSPKLIAAVIEIKTKFQLHAQYEDPNTQTTHFLDTLKQKLNAASSRLKRYLTCTNRKMQNSKFSNNEKVFYRNLATNNSDTTTPSLDTPTPEILREFWANIWENPVCHNHRAVWVNEPAPEIPEMEYEFIPIGTFIAVIKRTHNWKSPGTDNIHNYWYKKFTSIHPFLHNHLNTFIQSPNLLPPYLTHGVTYMIPKDISDTLNPAKYRPITCLQTLYKILTACVSEVLYEHLTKNNILAEQQKGCRKNSQGCKEQLTIDAITMNTAIKSKTDIHTMFIDYQKAFDSVPHSWLLHVLNLYKIHPILKHFLEISMQNWQTVLKINSSSSNVATEPIRIKRGIFQGDALSPLWFCMALNPLSHLLDKTDGGLKLAANDTDYTLTHLMYMDDIKLYSADKNALFQLADATQRFSDDICMSFGVDKCKILSVVKGKVQNNSYVLGSGESIEPMDEQSTYKYLGFNQCRQIQHKMIKQELLKKFSHRLNLILKTNLNSKNTVKAINTFAIPILTYSFGIIRWSKTDIRKLQRTINTTLTKHRKHHPKSSIQRLTLPRQEGGRGLIDIHNLHNKQILSLRAYFHNKSENSSLHKHVTEQDKKLTPLNLHNRNTQTNEQLINTQDKIAAWSVKALHGRHRAFMSQPHVDKAKSNEWLKRGELFPETEGFMLAIQDQIIATRNYRKYIIKDPHQPTDLCRHCNTASETIQHITGACKSLAQTDYKHRHDQVAAIIHQQLAFKYKLISEMKPYYKYKPEIILDNNNQKIYWDRTIITDKTIHFNRPDITLHDKVNKTVYLIDIAIPNSHNIQTTISEKLSKYQDLAIEIKTQWEAQTVHIVPIVLSSTGIIPKSLMQSLNTLHMPPHTLQLLQKATILNTCRITRKFLTSSTISSSFSI

SEQ ID NO: 30720 - protein, 1394 aa, Helicoverpa armigera
MGFKPIKLTSYAMRLRNRVLPQAGTGANRDGESRPTASSLGCPSYSGGGTVSQPTAQSQTAAVPHDDESSCSSLFSSIPSSSQSFCISPSPSLSSASIQSVDVVQETNFVNEPVPNTSTAPIRRKWTKEMNEFILRTYLHLTILETDTKTYLQPLHTQFSSKFPHMQVSRQRVGDQRRAIVNKKLLPQDAIDRIYEEVRGQLHVSPTQTQQHSTQNNTLHTGQRMKWGNELNESIMRIYYTITELETNKTSYRKYLHEQFISQYPQLSHITEQRLSDQQRAIVNNKYINSSRLAEIKRQVSEQLRISINRIEDQSNTQTLPNTENYNDDYQTLNTELANTQNPNLQIHSEPHITFDIGQDDLINNIDIEAFIPSQNNTNTASEFNPIIEDTFTQAKLYFLDTHPTNRPYIPKQKTSKKFSVIVNYIDTKILPNNVNADTNFNTLQSIIYCAAWTAAKCNGAKISEQIQNQNRRNIQKKPKWRIRLEKKIDKLRANIGRLTQYSRGNRSRKVITAVETVKSTYQLHAQHEDSNTQIEHFLDTLKQKLNAAASRLRRYVTCTERKTQNAQFTNNEKIFYRNITSNGNTNQHTLETPTPENLRDFWANIWENPVEHNNNSEWLNQVSSEISEMNYEFIPIDTFIDVLKRTHSWKSPGTDNLHNYWYKKFTRIHPLIHNHLNTFIQSPHLLPAYITQGVTYMIPKDINDTVNPAKYRPITCLQTLYKILTACISEVMYTHLTTHNILAEQQKGCRKNSQGCKEQLIIDAITTNSAVKSKKEIHAMFIDYQKAFDSVPHSWLLHVLNIYKIHPTLKQFLEISMQNWQTTLKINQGSSSVSTEPISIKRGIFQGDALSPLWFCMALNPLSHLLDKANIGYTLTDDNTQYTLSHLMYMDDIKLYADDRNHLYELADITQKFSNDIRMQFGVDKCKVLSIVKGKIQNNTYTLETGESVQPVDQNSTYKYLGFKQSRQIQQKLTKQELQKKFSHRLNLILKTNLNSRNTTKAINTFAIPILTYSFGIVQWSNTDIIKLQRTINTQLTKHRKHHPKSCVQRLVLPRQEGGRGLIDINNLHNKQISTLRNYFHNKTEHSPLHRLVTNIDKQLTPLNLHDRNTQTNENLTSTQHKIAAWSNKALHGRHRAFLSQPHVDKTKSNEWLRRGELFPETEGFMLAIQDQIIATRNYRKFIIKDPNQITDLCRHCNSASETIQHITGACKSLAQTDYKHRHDQVAAIIHQHLGYRYKLLDKMIPYYKYKPETILENRNQKIYWDRTIITDKTIHYNRPDITVHDKTTKTVYLIDIAIPNSHNIQSTISEKLAKYQDLAIEIKTQWKAQTVHIVPIVMSSTGIIPKTLTQSLNILQMPPYTLHMLQKATILNTCRITRKFLTSSTLSSTISI

SEQ ID NO: 30721 - protein, 1369 aa, Noctua pronuba
MNTRSKTKKQLQAKLPQLDDETSQSSSSSPSSLFPSIPSSSQSFRVTPTPSSSSISIQSVDVVQETNFVDDTVPAARTATSRRKWSIDMNKFILRTYLHLTHMETDKNAYLPSLHTKFLEKYPEMQVGRQRIGDQRRAIVQKKLLPQETIEQIYEEVRAELQIVHTQIQQHCIQSKTLINTQHGQRMKWTNEYNEAIIRIYYTTTQLETNKTAYRKHLHEEFINIYPELAHLTEQRLSDQVRAIINNKYIHTNRLEEIKNQVATELRNNNTQNIQHINNDLQQPDQNIHSLSTQYTNAHISCTTTNTPTINNVILLNNSPETNIASQTFINTDEENFLNHVDIGQHELTQSNFDASSEKNQEIEATFQQAQQLFSDTHPTNRPYIPKQRTSKKFSAIVTYINSVILTNCVNVETDFIKLQNVIYCAAWTAAICNGAKISGTQNESRTYIKRKPKWQIRLEKKIQYLRASIGRLTHFNNGSRSPKLIAAVIEIKKKYQLHAQYEDPNTQTTHFLDTLKQKLNATSSRLKRYLTCTNRKMQNSKFSNNEKVFYRNLATNNSDTTTQSLNTPTPEILREFWANIWENPVCHNHRAVWVNEPAPEIPEMEYEFIPIATFIDVIKRTHNWKSPGTDNIHNYWYKKFTSIHPFLHNHLNTFIQSPNLLPPYLTHGVTYMIPKDISDTLNPAKYRPITCLQTLYKILTACVSEVLYEHLTKNNILAEQQKGCRKNSQGCKEQLTIDAITMNTAIKSKTDIHTMFIDYQKAFDSVPHSWLLHVLNLYKIHPILKHFLEISMQNWQTVLKINSSSSNVATEPIPIKRGIFQGDALSPLWFCMALNPLSHLLDKTDGGLKLATNDTDYTLTHLMYMDDIKLYSADKNALFRLADTTQQFSDDICMSFGVDKCKILSVVKGKVQNNSYVLGSGESIEPMDEQSTYKYLGFNQCRQIQHKMIKQELLKKFSHRLNLILKTNLNSKNTVKAINTFAIPILTYSFGIIRWSKTDIRKLQRTINTTLTKHRKHHPKSSIQRLTLPRQEGGRGLIDIHNLHNKQILSLRAYFHNKSENSSLHKHVTEQDKKLTPLNLHNRNTQTNEQLINTQDKIAAWSVKALHGRHRAFMSQPHVDKAKSNEWLKRGELFPETEGFMLAIQDQIIATRNYRKYIIKDPHQPTDLCRHCNTASETIQHITGACKSLAQTDYKHRHDQVAAIIHQQLAFKYKLISEMKPYYKYKPEIILDNNNQKIYWDRTIITDKTIHFNRPDITLHDKVNKTVYLIDIAIPNSHNIQTTISEKLSKYQDLAIEIKTQWEAQTVHIVPIVLSSTGIIPKSLMQSLNTLHMPPHTLQLLQKATILNTCRITRKFLTSSTISSSFSI

SEQ ID NO: 30722 - protein, 1398 aa, Noctua pronuba
MPRAAWLGERLVASVPTLDNRGPPVLFTLAAVNAGLCCGRPFKSLATRGINMNTRSKTKKQLQAKLPQIDDETSQPCSSSPSSLFPSISSSSQSFRVTPTPSSSSISIQSADVVQETNFVDDTVPTARAATSRRKWSIEMNKFILRTYLHLTNMETDKNAYLPPLHTKFLEKFPAMQVSRQRIGDQRRAIVQKKLLPQDTIDQIYEEVRAELQMIHTQIQQHSTQPSTQSGQRMRWTKEYNETIIRIYLTATQLETNKTAYRKKLHEEFINNYPELAHITEQRLSDQVRAIVNNKYIHDNRLKEIKNQVASELRDSNTNTQNIENINHDHWDTQTQEDSEQPATNTNFSDTPINTLTTNIILNNSTDTNIVSQTVVNIDDSDTAPETNPEIESTFHQAQINFNYSHPTNRPYIPKQKTSRKFSAIVSYINTVILPKYVNADTEFTKLQTIIYCAAWTAATCNGAKISDPTQNERRPYTQRKPKWQIRLEKKIENLRANIGRLTHFINGCRSQKIIAAVEEIKIKYQLHAQHENPNTEIAHFLDTLKQKLSAASSRLKRYITCTNRKVQNTRFINNEKIFYRNLTSNNKDTTNQSLETPTSGTLREFWANIWENPVHHNNHADWVKEATPEIPEMEFEFIPIDTFIDVIKRTHNWKSPGTDNIHNYWYKKFSSIHPFLYNHLNTFIQSPHLLPQYITHGVTYMIPKDTNDTKNPAKYRPITCLQTLYKILTACVSEIVYEHLTKNNILAEQQKGCRKNSQGCKEQLTIDAITMNSAVKSRKDIHTMFIDYQKAFDSVPHSWLLHVLNLYKIHPTLKQFLGTSMQNWQTVLKINSSSSTVATEPICIRRGIFQGDALSPLWFCMALNPLSHLLDQTGAGFTLESNNTQYMLTHLMYMDDIKLYAADKEALYQLADATQQFSNDICMSFGVDKCKIMSIVKGKIQNNSYTLLSGASIEPIDEQSTYKYLGFKQSRQIQQKMSKQELLKKFSHRLNLILKSNLNSRNTIKAINTFAIPILTYSFGIIRWSKTDIKKLQRTIHTLLTKHRKHHPKSCIQRLTLPRQEGGRGLIDIHNLHNKQILSLREYFHNKSETSSLHKQITETDNKLTPLNLQNRNTQINEHIISTQQKIAPWSEKALHGRHRACLSQPHVDKIKSNEWLKRGELFPETEGFMLAIQDQIIATRNYRKYIIKDPNQPTDLCRHCSSASETIQHITGACKSLAQTDYKHRHDQVAAIIHQQLAFKYKLVSEMIPYYKYKPEVALENKDQKIYWDRTIITDKTIHYNRPDITVHDKTNKTVYLIDIAIPNSHNIQTTISEKLSKYQDLAIEIKTQWKVQTVHIVPIVLSSTGIIPKSLSQSLNTLQMPNHTLYMLQKATILNTCRITRKFLTSSTLSSTFSI

SEQ ID NO: 30723 - protein, 1386 aa, Spodoptera exigua
MPTLETRGPPVSFTLATVNAGLCCGRLFRSLATRGNHMITRSKLKKLSQPDDESSQSSSSSSRSLFPSVSSSSQSFCVSPTPSTSTVQSVDVVQLTNSVDEAVPTTSTAKTRRKWTTDMNEFILRNYLLLTNLETDKNAYLPSLHIKFLEKYPSMEVSRQRIGDQRRAIVQKKLLPQSKIDQIYNQVRAQLQITPIRQQHLTPTQVTNIQPGQRMKWTNEYNETIMNIYYKITFLETNKTAYRKSLHEQFINIHPELSHITEQRLSDQVRAITNNKYITVKRLAEIKKQVSEQLIRETNTNHHLNRHSNIPEHPDGSNQAHSFISDTLTHTNDISHDVNINTDNTITPNSLNVDDNFLNDIQLEQFDTIHANQNETEINQELEDLFQQAYEYFIYTDPTKRPYIPKQRTSRKFSTIVNYINNIIFPKYANTDTDFNNLQTIIYSAAWTAAKYNGAKISYTVQTERQTTTRKPKWQIRLEQKIRGLRANIGKLSQYIRGIRSQRLVAAVEVIKAKYQLHAQYENPNTHMTHYLDTMKQKLNAASSRLRRYLTCTNRKLENSRFTNNEKFFYRNLASNSTLTQNIQTPSAETLREFWAGIWENPVYHNNTAAWIHEANLDHEGMEFETIPIDTFINVIKHTHNWKSPGTDHIHNYWYKKFTSLHPYLHNHLNTFIQTPHLLPTYITQGITYMIPKDMNDTTNPAKYRPITCLQTFYKIITACISELINNHLTKYETLAEQQKGCRKYSQGCKEQLTIDAVIMNHTVKSKTDIHTMFIDYQKAFDSVPHSWLLQVLNLYKIHPTIKLFLQSTMQNWQTVLSINQTTAKIVTQPIYIKRGIFQGDALSPLWFCMALNPLSHLLNRTNAGYTLTNNGTQYILTHLMYMDDIKLYAADQMLLSHLADVTQQFSTDICIQFGVDKCKVMSVVKGKVENNSYTLQTGQTIEPMEEHDTYKYLGFRQSRQIQHKNTRQELIRKFTHRLNLILKTNLNARNTIKAINTFAIPILTYSFGIIQWSKTNTRKLQQTINATLTKHRKHHPKSCIQRLTLTRKEGGRGLIDIQNLHNKQISSLRTYFHSKSEHSLLHTHIVETDKNFTPLNLQSRDRQTNEIIVNDEDKIALWSEKALHGRHRSFLSQPHVDKIKSNEWLKRGELFPETEGFMLAIQDQVIATRNYRKYIMKDPNQQNDLCRHCNLASETIQHVTGACKSLAQTDYKHRHDQVSAIIHQHLAYRYSLVDQITAYYKYKPETILENRNCKIYWDRTIVTDKTIHFNRPDITVHDKQNKIVYLIDIAIPNSHNIQSTISEKLSKYQDLAIEIKTQWRVQTVHIVPIVLSTTGIIPKSLTQSLNTLQMPAYTLHTLQKATILNTCRITRKFLTSSTLTSTYSI

SEQ ID NO: 30724 - protein, 1416 aa, Noctua pronuba
MPRAAWLGERLVASVPTLDNRGPPVLFTLAAVNAGLCCGRPFKSLATRGNNMNTRSKTKKQLQAKLPQIDDETSQPSSSSPSSLFPSISSSSQSFRVTPTPSSSSISIQSADVVQETNFVDDTVPTARAATSRRKWSIEMNKFILRTYLHLTNMETDKNAYLPPLHTKFLEKFPAMQVSRQRIGDQRRAIVQKKLLPQDTIDQIYEEVRAELQMIHTQIQQHSTQPSTQSGQRMRWTKEYNETIIRIYLTATQLETNKTAYRKKLHEEFINNYPELAHITEQRLSDQVRAILNNKYIHDNRLKEIKNQVASELRNSNTNTQNIENINHDQWDTQTQEDSEQPATNTNFSDTPINTLTTNIILNNSTDTNIVSQTVVNIDDENFLQNIDVGQFGPNQTNSDTAPETNPEIESTFHQAQINFNYTHPTNRPYIPKQKTSRKFSAIVSYINTVILPKYVNADTEFTKLQTIIYCAAWTAATCNGAKISDPTQNERRPYTQRKPKWQIRLEKKIENLRANIGRLTHFINGCRSEKIIAAVEEIKIKYQLHAQHENPNTEIAHFLDTLKQKLSAASSRLKRYITCTNRKVQNTRFINNEKIFYRNLTSNNKDTTNQSLETPTSGTLREFWANIWENPVHHNNHADWVKEATPEIPEMEFEFIPIDTFIDVIKRTHNWKSPGTDNIHNYWYKKFSSIHPFLYNHLNTFIQSPHLLPQYITHGVTYMIPKDTNDTKNPAKYRPITCLQTLYKILTACVSEIVYKHLTKNNILAEQQKGCRKNSQGCKEQLTIDAITMNSAVKSRKDIHTMFIDYQKAFDSVPHSWLLHVSNLYKIHPTLKQFLGTSMQNWQTVLKINSSSSTVATEPICIRRGIFQGDALSPLWFCMALNPLSHLLDQTGAGFTLESNNTQYMLTHLMYMDDIKLYAADKEALYQLADATQQFSNDICMSFGVDKCKIMSIVKGKIQNNSYTLLSGASIEPIDEQSTYKYLGFKQSRQIQQKMSKQELLKKFSHRLNLILKSNLNSRNTIKAINTFAIPILTYSFGIIRWSKTDIKKLQRTIHTLLTKHRKHHPKSCIQRLTLPRLEGGRGLIDINNLHNKQILSLREYFHNKSETSSLHKQITEIDNKLTPLNLQNRNTQINEHIVSTQQKIAAWSEKALHGRHRACLSQPHVDKIKSNEWLKRGELFPETEGFMLAIQDQIIATRNYRKYIIKDPNQPTDLCRHCNSASETIQHITGACKSLAQTDYKHRHDQVAAIIHQQLAFKYKLVSEMIPYYKYKPEVALENKDQKIYWDRTIITDKTIHYNRPDITVHDKTIKTVYLIDIAIPNSHNIQTTISEKLSKYQDLAIEIKTQWKVQTVHIVPIVLSSTGIIPKSLSQSLNTLQMPNHTLYMLQKATILNTCRITRKFLTSSTLSSTFSI

SEQ ID NO: 30725 - protein, 1363 aa, Mythimna impura
MNTRSKTKKQLLASMPQIDDETSQIFSLSPSSLFSSIPSSSQSFRVTPTPSSSSIQSADVVQETNSVDDTVPTARTATSRRKWSIEMNKFILRTYLYLTNMDTDKNAYLPSLHTKFLEKYPDMQVSRQRIGDQRRAIVQKKLLPQDTIDQIYEEVRVELQMFHTRIQQHSTQSNTQYSQRMRWTYEHNEAIIRIYYTVTQLETNKTAYRKHLREEFINIYPELTHLTEQRLSDQVRAIINNAYIDTKKLEEIKNQVAIELENPNTNDQNTEQTSGDHLNTQLQTELDLLGTYANFSDTPTNTLTTNVFLNNSAGLDILESQVNTEEDNNFLNNINIAQSEPMQANFNFISESNTEIEATFQQAQLNFNDTHPTNRPYIPKQKTSKKFSAIVSYINTVILPKHVNGDTEFIKFQTIIYCAAWTAATCNGAKIAGSTQNEHRTYTFRKLKWQIRLEKRIQNLRANIGRLTHFINGSRSQKLVAAVEQIKLKYQLHAQHENSNTQIEHFLDTLKQKLSAASSRLKRYITCTNRKVQNTKFKSNEKIFYRNLTSNNRDTTNQTLDTPSSESLRQFWANIWENPVYHNDRADWVSDATTEIPEMEFEVIPIGRFIEVIKRTHNWKSPGTDNIHNYWYKKFSSIHPFLYNHLNTFIKSPHLLPIYITHGVTYMIPKDTNDTINPAKYRPITCLQTLYKILTACISEVIYEHLTKNNILAEQQKGCRKHSQGCKEQLTIDAIAMKSAVKSRKDIHTMFIDYQKAFDSVPHSWLLRVLDLYKIHPTLKQFIKMSMQNWQTVLKINSSSATVATEPIHINRGIFQGDALSPLWFCMALNPLSHLLDKTDVGFTLTNNNTQYKLTHLMYMDDIKLYAADREALFRLADTTQIFSDDICMSFGVDKCKILSVVKGRIQNNSYSLGSGELIEPMDEHSNYKYLGFKQSRQIQQKLSKQELLKKFSHRLNLILKSNLNSRNTIKAINTFAIPILTYSFGILHWSKTDIKKTQRTLHTLLTKHRKHHPKSCIQRLTLPRQEGGRGLIDIHNLHNKQIHSLRVYFHCKSENSLLHKHVSETDKKLTPLNLQNKNTQINEHIVSTQQKIAAWSDKALHGRHRTSLSQPHVDKIMSNEWLKRGELFPETEGFMLAIQDQIVATRNYRKYIMKDQNQQTDSCRRCNSASETIQHITGACKSLAQTDYKYRHDQVGAIIHQNLAYKHKFVTDKVPYYKYTPETILESQDIKIYWDRTIITDKTIHYNRPDITVHDKTNKTVYLIDIAIPNSHNIQTTISEKLGKYQDLAIEIKTQWKARTVHIVPIVLSSTGVIPKSLTQSLNTIQMPAQILYMLQKATILNTCRITRKFLTSSTLTSTFSI

SEQ ID NO: 30726 - protein, 857 aa, Ochropleura plecta
MDTLKQKLSATSSRLKRYITCTNRKVQNTKFINNEKIFYRNLTSNNRDTTNQSLETPTSETLRQFWANIWENPVQHNNSADWVNEATPEIPEMEFEFIPIDTFIDVIKRTHNWKSPGSDNIHNYWYKKFSSLHPFLHNHLNTFIQSPHLLPQYITHGVTYMIPKDTNDTTNPAKYRPITCLQTIYKILTACVSEIVYEHLTKNNILAEQQKGCRKNSQGCKEQLTIDSITMNSAVKSRKDIHTMFIDYQKAFDSVPHSWLLHVLSLYKIHPTLKQFLETSMQNWQTVLKINSPSTTVTTEPIRIKRGIFQGDALSPLWFCMALNPLSLLLDKTGGGFTMENNNTQYTLTHLMYMDDIKLYADDEVALYQLADATQQFSDDICMSFGVDKCKILSIVKGKILNNSYTLLSGESIEPMDEQSTYKYLGFKQSRQIQQKMSKQELLKKFSHRLNLILKSNLNSRNTVKAINTFAIPILTYSFGIIRWSKTDIKTLQRTIHTHLTKHRKHHPKSCIQRLTLPRQEGGRGLIDINNLHNKQILSLRAYFHNKSENSPLHKQVTEADKKLTPLNLQNRNTQINEHIVSTQQKITAWSEKALHGRHRACLSQPHVDKIKSNEWLKRGELFPETEGFMLAIQDQIISTRNYRKYIIKDTNQPTDLCRHCNTASETIQHITGACKSLAQTDYKHRHDQVAAIIHQQLAFKYKLVNEMIPYYKYKPEVTLENNNQKLYWDRTIITDKTIHYNRPDITVHDKTNKTVYLIDIAIPNSHNIQTTISEKLSKYQDLAIEIKTQWKAQTVHIVPIVLSSTGIIPKSLTQSLNTLQMPTHTLYMLQKATILNTCRITRKFLTSSTISSTFSI

SEQ ID NO: 30727 - protein, 1365 aa, Xestia xanthographa
MNTRSKTKKQLQAKLPHIDDETSQPSSSSPSSLFPSIPSSSQSFRVTPTPSSSSISIQSADVVQETGFVDDTVPSAKAATSRRKWSIEMNKFILRTYLHLTSMETDKNAYLPPLHTKFIEKYPAMQVSRQRIGDQRRAIVQKKLLPQDTIDQIYEEVRAELQMIHTQIQQHSTQPSTQSGQRMRWTNEYNETIIRIYFTATQLETNKTAYRKKLHEEFINKYPELAHITEQRLSDQVRAIIKNKYIHDNRLEEIKNQVASELSNSNSYTQNIEDINHDHWNTQTQNDSEQPATNTNFFDTPNNTLTTNIILNNSTDTNIVSQTVVNIDDELFLNNIDVGQYGPAQTNFDTTPETNPEIESRFHQAQINFNCTHPTNRPYIPKQKTSRKFSAIVSYINTVILPKHVNADTEFAKLQTIIYCAAWTAATCNGAKISDPIQNERRPYTQKKPKWHIRLEKKIENLRANIGRLTHFINGCRSQKLIAAVEEIKIKYQLHAQYENPNTELAHFLDTLKQKLSAASSRLKRYITCTNRKVENTKFINNEKFFYRNLTSNNKDNTNQSLETPTSETLREFWANIWENPVHHNNHAEWVKEATPEIPEMEFEFIPIETFIDVIKRTHNWKSPGTDNIHNYWYKKFSSIHPFLYNHLNTFIQSPHLLPQYITHGVTYMIPKDTNDTKNPAKYRPITCLQTLYKILTACVSEIVYEHLTKNNILAEQQKGCRKNSQGCKEQLTIDAITMSSAVKSKKDIHTMFIDYQKAFDSVPHSWLLHVLNLYKIHPTLKQFLGTSMQNWQTVLKINSSSSTVATEPICIRRGIFQGDALSPLWFCMALNPLSHLLDQTGTGFTLDSNNTQYTLTHLMYMDDIKLYAADKEALYQLADATQQFSEDICMSFGVDKCKILSIVKGKFQNNSYTLLSGASIEPMDEQSTYKYLGFKQSRQIQQKMSKQELLKKFTHRLNLILKSNLNSRNTIKAINTFAIPILTYSFGIIRWSKTDIKKLQRTIHTLLTKHRKHHPKSCIQRLTLPRQEGGRGLIDIHNLHNKQILSLRAYFHNKSETSLLHKQVTETDNKLTPLNLQNRNTQINEHIVSTQQKITEWSEKALHGRHRACLSQPHVDKIKSNEWLKRGELFPETEGFMLAIQDQIIATRNYRKYIIKDPNQPTDLCRHCNNASETIQHITGACKSLAQTDYKHRHDQVAAIIHQQLAFKYKLVSEMIPYYKYKPEVALENNDQKIYWDRTIITDKTIHYNRPDITVHDKTNKTVYLIDIAIPNSHNIQATISEKLSKYQDLAIEIKTQWKVQTVHIVPIVLSSTGIIPKSLTQSLNTLQMPNHTLYMLQKATILNTCRITRKFLTSSTLSSTFSI

SEQ ID NO: 30728 - protein, 832 aa, Noctua fimbriata
MQNSKFSNNEKVFYRNLATNNSDTTTQSLDTPAPEILREFWAHIWENPVCHNHQANWVNEPAPEIPEMEYDFIPIGTFIDVIKRTHNWKSPGSDNIHNYWYKKFTSIHPFLHNHLNTFIQSPNLLPPYLTHGVTYMIPKDISDTLNPAKYRPITCLQTLYKILTACVSEVLYEHLTKNNILAEQQKGCRKNSQGCKEQLTIDAITMNSAIKSKTDIHTMFIDYRKTFDSVPHSWLLHVLNLYKIHPTLKHFLETSMQNWQTVLKINSSSSSVATEPIRIKRGIFQGDALSPLWFCMALNPLSHLLDKTVGGFTLATNDTHYTLTHLLYMDDIKLYSADKNTLFQLADTTQQFSNDICMSFGVDKCKILSVVKGKVQNNSYILGSGESIEPMDEQSTNKYLGFNQSRQIQHKMIKQELLKKFSHRLNLILKTNLNSKNTVKAINTFAIPILTYSFGIIRWSKTDIRKLQRTINTTLTKHRKHHPKSSIQRLTLPRQEGGRGLIDIHNLHNKQILSLRAYFHNKSENSSLHKHVTEQDTKLTPLNLHNRNTQTNEILISTQDKIAAWSVKALHGRHRAYMSQPHVDKAKSNEWLKRGELFPETEGFMLAIQDQIIATRNYRKYIIKDPHQPTDLCRHCNTASETIQHITGACKSLAQTDYKHRHDQVAAIIHQQLAFKYKLISEMKPYYKYKPEIILDNNNQKIYWDRTIITDKTIHFNRPDITFHDKVSKTVYLIDIAIPNSHNIQTTISEKLSKYQDLAIEIKTQWEAQTVHIIPIVLSSTGIVPKSLLQSLNTLHMPPHTLQLLQKATILNTCRITRKFLTSSTISSTFSI

SEQ ID NO: 30729 - protein, 1422 aa, Noctua fimbriata
MPRAAWLGERLVASVPTLDNRGPPVLFSLAAVNAGLCCGRLFKSLATRGISMNTRSKTKKQLQAKLPQIDDETSQSSSSSPSSLFPSIPSSSQSFLVTPTPSSSSISIQSVDVVQETNFVDDTVPAARTVTSRRKWSIDMNKFILRTYLHLTHMETDKNAYLPSLHTKFLEKYPDMQVGRQRIGDQRRAIVQKKLLSQETIDQIYEEVRAELQIVHTQIQQHSTQSKAPINTQPGQRMKWTNEYNEAIIRIYYTTTQLETNKTAYRKHLHEGFINIYPELAHLTEQRLSDQVRAIINNKYIHTNRLDEIKNQVAIELRNSNTYTQNIQHINNDSQQPDENIHSLSTQYTNIHISGTTTNTATTNSVILLNNSTETNIASQTFINTDEENFLNHIDIGHHEPTQINSDASFEKNQEIETTFQQAQQLFSDTQSTNRPYIPKQRTSKKFSAIVTYINSVILTNCVNVDTDFIKLQNVIYCAAWTAATCNGAKILGTQNVSRTYIKRKPKWQIRLEKKIQNLRASIGRLTHFNNGSRSPKLIAAVKEIKKKYQLHAQYEDPNTQTTHFLDTLKQKLNAASSRLKRYLTCTNRKMQNSKFSNNEKVFYRNLATNNSDTTTQSLDTPAPEILREFWAHIWENPVCHNHQANWVNEPAPEIPEMEYDFIPIGTFIDVIKRTHNWKSPGTDNIHNYWYKKFTSIHPFLHNHLNTFIQSPNLLPPYLTHGVTYMIPKDISDTLNPAKYRPITCLQTLYKILTACVSEVLYEHLTKNNILAEQQKGCRKNSQGCKEQLTIDAITMNSAIKSKTDIHTMFIDYRKAFDSVPHSWLLHVLNLYKIHPTLKHFLETSMKNWQTVLKINSSSSSVATEPIRIKRGIFQGDALSPLWFCMALNPLSHLLDKTVGGFTLATNDTHYTLTHLLYMDDIKLYSADKNTLFQLADTTQQFSNDICMSFGVDKCKILSVVKGKVQNNSYILGSGESIEPMDEQSTYKYLGFNQSRQIQHKMIKQELLKKFSHRLNLILKTNLNSKNTVKAINTFAIPILTYSFGIIRWSKTDIRKLQRTINTTLTKHRKHHPKSSIQRLTLPRQEGGRGLIDIHNLHNKQILSLRAYFHNKSENSSLHKHVTEQDTKLTPLNLHNRNTQTNEILISTQDKIAAWSVKALHGRHRAYMSQPHVDKAKSNEWLKRGELFPETEGFMLAIQDQIIATRNYRKYIIKDPHQPTDLCRHCNTASETIQHITGACKSLAQTDYKHRHDQVAAIIHQQLAFKYKLISEMKPYYKYKPEIILDNNNQKIYWDRTIITDKTIHFNRPDITFHDKVSKTVYLIDIAIPNSHNIQTTISEKLSKYQDLAIEIKTQWEAQTVHIIPIVLSSTGIVPKSLMQSLNTLHMPPHTLQLLQKATILNTCRITRKFLTSSTISSTFSI

SEQ ID NO: 30730 - protein, 1365 aa, Mythimna ferrago
MNTRSKTKKQLQASMPQIDDETMQPFSLSPSSLFPSISSSSQSFRVTPTPSSSSIQSADVVQETNFVEDTVPTARTVTSRRKWSIDMNKFILRTYLYLTNMDTDKNAYLPSLHAKFLEKYPDMQVSRQRIGDQRRAIVLKKLLPQDTIDQIYEEVRAELQICHTQIQQHSTKSNTQFSQRMRWTNEHNEAIIRIYYNVTQLETNKTVYRKHLREEFINIYPELAHVLEQRLSDQVRAIINNVYIDTKRLKEIRNQVAEELENTNTNAQNTEQTSGDNLNTQLQIESDLSSIVPTIANFPDTPTNTLTTNVALNDSTGADTVLDSLANIEDDNNFLNNIHISQSEPIYLNSISESSTEIEATFKQAQLNFNDTHPTNRPYIPKQKTSRKFTAIVNYINTVILPKHVNSNTEFITLQTIIYCAAWTAAVCNGAKISDSTQNERHTYKYRKPKWQIRLEKKIEYLRVNIGRLTHFINGSRSPRLVAAVEQIKSKYQLHAQHENSNTQIEHFLDTLKQKLSAASSRLKRYITCTNRKVENTKFKNIEKIFYRNLMSNNRDTTNQSLDTPSPETLREFWANIWENPVNHNDHADWVSDATTEIPDMEFEFISLDTFIGVIKRIHNWKSPGSDNIHNYWYKKFSSIHPFVYNHLNTFIQSPHLLPKYITHGVTYMIPKDKNDTINPAKYRPITCLQTFYKILTACVSEIVYDHLIKNNILAEQQKGCRKHSQGCKEQLTIDAIAMNSAVKSRKDIHTMFIDYQKAFDSVPHSWLLHVLKLYKIHPTLKEFLETTMQNWQTVLKINSSATTVATQPISIKRGIFQGDALSPLWFCMALNPLSHLLDKTDVGFTLANHDTQYKLTHLMYMDDIKLYAADKEALFQLADTTQLFSDDICMSFGVDKCKILSVVKGKIQNNSYILGSGESIEPMDEQSTYKYLGFKQSRQIQQKLSKEELLKKFSHRLNLILKSNLNSKNTIKAINTFAIPILTYSFGIIQWSKTDIKKLQRIVHTLLTKHRKHHPKSCIQRLTLPRQEGGRGLIDIQNLHNKQIHSLRLYFHYKSENSLLHKQVSDIDKKLTPLNLQNKNTQINEHITSTQQKIAAWSEKALHGRHRAALSQPHVDKLMSNEWLKRGELFPETEGFMLAIQDQIIATRNYRKYIMKDQNQPTDFCRHCNSASETIQHITGACKSLVQTDYKHRHDQVASIIHQHLAYKYKLVTEMMPYYKYNPEIILENKDIKIYWDRTIITDKTIHYNRPDITVHDKTNKIVYLIDIAIPNSHNVQTTISEKLIKYQDLAIEIKTQWKAQTVHIVPIVLSSTGIIPKSLAQSLETLHMPAQTLYMLQKATILNTCRITRKFLTSSTLTTTFSI

SEQ ID NO: 30731 - protein, 1412 aa, Ochropleura plecta
MLRAAWLGERLVANVPTLDNRGPPVLFTLATVNAGLCCGRLCKSLASRGNNMNTRSKTKKILLANLPQMDDETSHFSSSSSSSLFPSIPSSSQSFRVTPTPSSPSISIQSVDVVQETNIVEDTVPTARTARSRRKWSIDMNKFILRTYLHLTHIETDKNAYLPSLHTKFLEKYPDMQVGRQRIGDQRRAIVQKKLLPQETIDQIYEEVRAELQIVHTQIQHSTQSMTQNNTQPGQRMKWTNEYNEAIIRIYYTTTQLETNKTAYRKHLHEGFINIYPELAHVTEQRLSDQVRAIINNKYIPNDRLEEIKNQVALELRNNNINIEHINNDLQQSDENVLSLNTQYTNIHITDTTNNIIVLNNNSDTNTVSQTPIHTVDENFFNQIDIGLFEPTQNNLNGAPEKNLEIEATFQQAQQLFSDTHPTSRPFIPKQKTSKKFSAIVTYINSIILPNIVNIDTDFTQLQTIIYCAAWTAATRNGAKISDTQNESRTYIKRKPKWQIRMDKKIQSLRANIGRLTHFINGSRSPKLIAAVEEIKKKYQVHAQYEDPNTQLVHFLDTLKQKLNASSSRLKRYLTCTNRKVQNSKFVNNEKTFYRNLTTNNRDTNNQNLETPTPESLREFWANIWENPVNHNHQADWINEVTTDTPEMEFEFIPIETFIDVIKRTHNWKSPGTDNIHNYWYKKFSSIHPFLHNHLNTFIQSPHLLPSYITHGVTYMIPKDSNDTINPAKYRPITCLQTIYKILTACLSEVVYEHLTKNNILSEQQKGCRKNSQGCKEQLTIDAVTMSSAVKSKTDIHTMFIDYQKAFDSVPHSWLLNVLSLYKIHPTLKHFLETTMQSWQTVLKINSLSSTVATEPIHIKRGIFQGDALSPLWFCMALNPLSHLLDKTGAGYALTNINTHYTLTHLMYMDDIKLYAADKNELFELADTTQQFSDDICMSFGVDKCKILSVVKGKVQNNSYTLGSGQIIEPIDELSSYKYLGFKQSRQIHQKMIKQELVNKFSHRLNLVLKTSLNSKNTIKAINTFAIPILTYSFGIIRWSNTDIKKLQRTVNTTLTKHRKHHPKSSIHRITLPRQEGGRGLIDIHNLHNKQILSLRSYFHNKSENSTLHKHVTENDIKLTPLNLHNRNTQINEQIINTQEKIAAWSAKALHGRHRAFLSQPHVDKAKSNEWLKRGELFPETEGFMLAIQDQIIATRNYRKYIIKDPHQPTDLCRHCNTASETIQHITGACKSLAQTDYKHRHDQVAAIIHQQLAFQHKLVSEMQPYYKYKPEIILENNNHKIYWDRTIVTDKTIHFNRPDITLHDKANKIVYLIDIAIPNSHNIQTTMSEKLNKYQDLAIEIKTQWKAQTVHIVPIVLSSTGIVPKSLMQSLNTLHMPSHTLHLLQKATILNTCRITRKFLTSSTISSTFSI

SEQ ID NO: 30732 - protein, 1374 aa, Phlogophora meticulosa
MQGSAVVDFKSLANRGNKMNTRSKTKKQLQANQPQIDDETSQLSSSSPSSLFSSIPSSSQSFRITPTPSLSSFSIQSADVVQETNFVDDTVPIARTATSRRKWTIEMNKFILRTYLHLTNMDTDKNAYLPSLHTKFLEKYPAMQVSRQRIGDQRRAIVQKKLLPQDTIDQIYEEARAELQMVHTQIQQHATQSNTQFGQRMKWTNEYNEAIIRIYYTTTQLETNKTAYRKHLHEGFINTYPELAHITEQRLSDQVRAIINNRYINTNRLEEIKNQVTLELRNSNTDTQHTEHLNSDFLNTQSQNDLEPLDTNTLTTNVLPSNNPNTVTVPQTIVNTDEINFLNNIDSDISGPTEPNFPAALEINPEIEATFYQAQQNFINTHPTHRPYIPKQKTSRKFSTIVTYLNTVILPKHVNGDTEFIKLQTLIYCAAWTAATCNGAKIFEISSQNERGAYKQRKPKWQIRLDNKIKHLRANIGRLSHFINGNRSPHLIAAVEQIKIKYQLHAQHENSNTQIEHFLDTLKQKLSAAASRLKRYITCTNRKVQNTKFTNNEKTFYRNLTSHNITSNQNLETPSSETLRDFWANIWENPVCHNNHADWVNEASPEILEMEYEFIPVETFIDVIKRAHNWKSPGTDNIHNYWYKKFSSIHPFLHNHLNTFIQSPHLLPTYITHGVTYMIPKDINDTINPAKYRPITCLQTLYKILTACVSEVVYEHLSKNNILAEQQKGCRKNSQGCKEQLTIDAIIMNSAVKSRKDIHTMFIDYQKAFDSVPHSWLSHVLNLYKINPKIKQFLETTMQNWKTVLKINSSSSTVATEPISIKRGIFQGDALSPLWFCMALNPLSHLLDKTDAGFILSNNNTQYTLTHLMYMDDIKLYAADKKSLFKLADTTQQFSDDICMSFGVDKCKILSIEKGKILNNNYILASGETIEPMDEQSTYKYLGFKQSRQIQQKISKQELLKKFSHRLSLVLKSSLNSRNTIKAINTFAIPILTYSFGIIRWSKTDIKKLQRTVNTLLTKHRKHHPKSCIQRLTLPRQEGGRGLIDIYNLHNKQILTLRAYFHGKSENSSLHKQVTETDKKLTPLNLQNRNTLTNEHIVSTEQKIAAWSQKALHGRHQAYLSQPHVDKIKSNEWLKRGELFPETEGFMVAIQDQIIATRNYRKYIIKDRNQPTDTCRHCNSASETIQHITGACKSLAQTDYKHRHDQVAAIIHQHLAHKYKLIGEMIPYYKYTPETILENRNQKIYWDRTIITDKTIHYNRPDITVHDKSNKIVYLIDIAIPNSHNIQTTISEKLSKYQDLAIEIKTQWKAQTVHIVPIVLSSTGVVPKALTQSLNTLHMPSHTLHMLQKATILNTCRITRKFLTSSTLSSTFLI

SEQ ID NO: 30733 - protein, 1356 aa, Phlogophora meticulosa
MNTRSKTKKQLQANQPQIDDETSQLSSSSPSSLFSSIPSSSQSFRITPTPSLSSFSIQSADVVQETNFVDDTVPIARNATSRRKWTIEMNKFILRTYLHLTNMDTDKNAYLPSLHTKFLEKYPAMQFSRQRIGDQRRAIVQKKLLSQDTIDQIYEEARAELQMVHTQIQQHSTQSNTQFGQRMKWTNEYNEAIIRIYYTTTQLETNKTAYRKYLHEGFITIYPELAHITEQRLSDQVRAIINNRYININRLAEIKNQVALELRNSNTDTQNTEHTNSDYLNTQSQNDLEHLDPNTLTTNILPSNNPNTVTTTHTPNTEEVHFLNDIDNDLFGATETNFPAAPEINPEIEATFHQAQQHFINTHPTHRPYIPKQKTSRKFSTIVSYLNTVILPKHVNVDTEFIKLQTIIYCAAWTAATCNGAKISEISAQNERGTFRQRKPKWQIRLENKIKNLRANIGRLTHFINGSRSQHLIAAVEQIKIKYQLHAQHENSNTQIEHFLDTLKQKLSAAASRLKRYVTCTNRKVQNTKFTNNEKTFYRNLTSNNMETTNQSLETPSSETLRDFWANIWENPVCHNNHADWVNEASPEILEMKFDFIPVETFIDVIKRAHNWKSPGTDNIHNYWYKKFSSIHPFLHNHLNTFIQSPHLLPTYITHGVTYMIPKDMNDTINPAKYRPITCLQTLYKILTACVSEVIYEHLTKNNILSEQQKGCRKNSQGCKEQLTIDAIIMNSAVKSRKDIHTMFIDYQKAFDSVPHSWLSHVLNLYKINPKIKQFLETTMQNWKTVLKINSSSSTVATEPISIKRGIFQGDALSPLWFCMALNPLSHLLDKTDAGFILSNNNTQYTLTHLMYMDDIKLYAADKKSLFQLADTTQQFSDDICMSFGVDKCKILSIEKGKILNNNYTLASGESIEPMDEQSTYKYLGFKQSRQIQQKISKQELLKKFSHRLSLVLKSSLNSRNTIKAINTFAIPVLTYSFGIIRWSKTDIKKLQRTVNTLLTKHRKHHPKSCIQRLTLPRQEGGRGLIDINNLHNKQILTLRAYFHGKSENSSLHKQVTETDIKLTPLNLQNRNTLTNEHIVSTEQKIAAWAQKALHGRHRAYLSQPHVDKIKSNEWLKRGELFPETEGFMLAIQDQIIATRNYRKYIIKDRNQPTDTCRHCNSASETIQHITGACKSLAQTDYKHRHDQVAAIIHQHLAHKYKLIGEMVPYYKYKPETILENRNQKIYWDRTIITDKTIHYNRPDITVHDKSNKIVYLIDIAIPNSHNIQTTISEKLSKYQDLAIEIKTQWQAQNVHIVPIVLSSTGVVPKALTQSLNTLHMPSHTLHMLQKATILNTCRITRKFLTSSTLSSTFLI

SEQ ID NO: 30734 - protein, 1365 aa, Xestia xanthographa
MNTRSKTKKQLQAKLPHIDDETSQPSSSSPSSLFPSIPSSSQSFRVTPTPSSSSISIQSADVVQETDFVDDTVPSAKAATSRRKWSIEMNKFILRTYLHLTSMETDKNAYLPPLHTKFIEKYPAMQVSRQRIGDQRRAIVQKKLLPQDTIDQIYEEIRAELQMIHTQIQQHSTQPSTQSGQRMRWTNEYNETIIRIYFTATQLETNKTAYRKKLHEEFINKYPELAHITEQRLSDQVRAIIKNKYIHDNRLEEIKNQGASELSNSNSYTQNIEDINHDHWNTQTQNDSEQPATNTNFFDTPNNTLTTNIILNNSIDTNIVSQTVVNIDDEIFLNNIDVGQYGPAQTNFDTTPETNPEIESRFHQAQINFNCTHPTNRPYIPKQKTSRKFSAIVSYINTVILPKHVNADTEFAKLQTIIYCAAWTAAICNGAKISDPIQNERRPYTQRKPKWHIRLEKKIENLRANIGRLTHFTNGCRSQKLIAAVEEIKIKYQLHAQYENPNTELAHFLDTLKQKLSAASSRLKRYIKCTNRKVENTKFINNEKFFYRNLTSNNKDNTNQSLETPTSETLREFWANIWKNPVHHNNHADWVKEATPEIPEMEFEFIPIETFIDVIKRTHNWKSPGTDNIHNYWYKKFSSIHPFLYNHLNTFIQSPHLLPQYITHGVTYMIPKDTNDTKNPAKYRPITCLQTLYKILTACVSEIVYEHLTKNNILAEQQKGCRKNSQGCKEQLTIDAITMSSAVKSKKDIHTMFIDYQKAFDSVPHSWLLHVLNLYKIHPTLKQFLGTSMQNWQTVLKINSSSSTVATEPICIRRGIFQGDALSPLWFCMALNPLSHLLDQTGTGFTLDSNNTQYTLTHLMYMDDIKLYATDKEELYQLADATQQFSEDICMSFGVDKCKILSIVKGKFQNNSYTLLSGASIEPMDEQSTYKYLGFKQSRQIQQKMSKQELLKKFTHRLNLILKSNLNSRNTIKAINTFAIPILTYSFGIIRWSKTDIKKLQRTIHTLLTKHRKHHPKSCIQRLTLPRQEGGRGLIDIHNLHNKQILSLRAYFHNKSETSSLHKQVTEIDNKLTPLNLQNRNIQINEHIVSTQQKIAEWSEKALHGRHRACLSQPHVDKIKSNEWLKRGELFPETEGFMLAIQDQIIATRNYRKYIIKDPNQPTDLCRHCNNASETIQHITGACKSLAQTDYKHRHDQVAAIIHQQLAFKYKLVPEMIPYYKYKPEVALENNDQKIYWDRTIITDKTIHYNRPDITVHDKTNKTVYLIDIAIPNSHNIQATISEKLSKYQDLAIEIKTQWKVQTVHIVPIVLSSTGIIPKSLTQSLNTLQMPNHTLYMLQKATILNTCRITRKFLTSSTLSSTFSI

SEQ ID NO: 30735 - protein, 1361 aa, Spodoptera frugiperda
MITRSKLKKQSEATPQLDDESSQFSSSSSTSLFPSISSTSQSFCVSPTPSSSSTIQSVDVVQLANSVDEAVPTTKTAKTRRKWTTDMNEFILRNYLLLTNMETDKNAYLPSLHTKFLEKFPSVEVSRQRIGDQRRAIVQKKLLPQTTIDQIYEQVRTELQITPIRQHHSTITHVTPINNTLNNIQPGQRMKWTNEYNETIMKIYYKITYLETNKTAYRKSLHEQFITVFPELSHITEQRLSDQVRAIINNKYINVNRLAEIKKQVSEQLIHETDTNQHLSTHSYIAEYPEENIHTQPFISNTHTDMHTNNVSQDTNTNTDTIIPTHSPNTDDNFLNDIQLEQLDTIHTNTEINQEIEDLFQQAHQYFADTDPTNRPYIPKQKTSRKFSATVNYINNNILPKYATIDTDFNNLQTIIYSAAWTAAKYNGAKITYTVQTERQTINTRKRKWQTRLERKIKGLRANIGRLSQYIKGNRSPRLVAAVEIIKAKYRLHAQYENPNTQMTHFLDTMKQKLNAASSRLRRYLTCTNRKLENSRFANNEKFFYRNLTSTGTLTQNVQTPSAETLREFWAGIWENPVCHNHTASWIHDVDLEHEGMQFECIPIDIFLNVIKNTQNWKSPGTDHIHNYWYKKFTTLHPFLHNHLNTFIQSPHLLPTYITQGITYMIPKDTNDSTNPAKYRPITCLQTFYKILTACISNIIYDHLAKHNILAEQQKGCRKYSQGCKEQLTIDAVVMNHAVKSKSDIHTMFIDYQKAFDSVPHSWLLHVLNLYKIHPTIKSFLQSSMQNWQTILKINQSTTTIITQPINIKRGIFQGDALSPLWFCMALNPLSHLLNKTNAGYILTNNSSQYTLSHLMYMDDIKLYAADQMLLSHLADVTQQFSIDICMQFGVDKCKVMSVVKGKFENNSYTLETGQTIEPMEEHDTYKYLGFRQSRQIQHKNTRQELIKKFTHRLNLILKTNLNARNTIKAINTFAIPILTYSFGIIQWSKTNTRKLQRIINTSLTKHRKHHPKSCIQRLILPRKEGGRGLIDIQNLHNKQISSLRSYFHSKSDHSPLHRHVVETDKNFTPLNLQNRDPQTNEIIVSDEDKIAVWSQKALHGRHRSFLSQPHVDKIKSNEWLKRGELFPETEGFMLAIQDQIIATRNYRKFIMRDPNQQNDLCRHCNLASETIQHITGACKSLAQTDYKHRHDQVSAIIHQHLAYKYSLIDQMVAYYKYKPETILENRNYKIYWDRTIVTDKTIHFNRPDITVHDKINKTVYLIDIAIPNSHNIQSTISEKLSKYQDLAIEIKTQWRAQTVHIVPIVLSTTGIIPKSLIQSLNTLHMPTYTLHTLQKATILNTCRITRKFLTSSTLSSTYSI

SEQ ID NO: 30736 - protein, 1394 aa, Spodoptera frugiperda
MPTLEIRGPPVSFTLATVNAGLCCGRLFRSLATRGNHMITRSKLKKQSEATPQLDDESSQFSLSSSTSLFPSISSTSQSFCVSPTPSSSSTIQSVDVVQLANSVDEAVPTTKTAKTRRKWTTDMNEFILRNYLLLTNMDTDKNAYLPSLHTKFLEKFPSMEVSRQRIGDQRRAIVQKKLLPQTTIDQIYEQVRTELQITPIRQHHSTITHVTPINNTQPGQRMKWTNEYNETIMKIYYKITYLETNKTAYRKSLHEQFITAFPELSHITEQRLSDQVRAIINNKYINVNRLAEIKKQVSEQLLQETDTNQHLSTHSYISEYSDENIHTQPIISNTHTDIHTNNVPQDTNTNTDTITPTHSPNIDSYFLNDIHLEQFDTIHRNTEINQEIDDLFQQAHQYFADTDPTNRPYIPKQKTSRKFSATVNYINNNILPKYATIDTDFNNLQTIIYSAAWTAAKYNGAKISYTVQTERQTTNTRKRKWQTRLERKIKGLRANIGRLSQYIKGNRSPRLVAAVEIIKAKYRLHAQYENPNTQMTHFLDTMKQKLNAASSRLRRYLTCTNRKLENSRFANNEKFFYRNLTSTGTLTQNVQTPSAETLREFWADIWENPVCHNHTADWIHQVDLEHEGMQFEFIPIDLFLNVIKNTQNWKSPGTDHIHNYWYKKFTTLHPFLHNHLNTFIQSPHLLPTYITQGITYMIPKDTNDSTNPAKYRPITCLQTFYKILTACISNIIYDHLTKHNILAEQQKGCRKYSQGCKEQLTIDAVFMNHAVKSKADIHTMFIDYQKAFDSVPHSWLLHVLNLYKIHPTIKSFLQSSMQNWQTVLKVNQPTTTIITQPINIKRGIFQGDALSPLWFCMALNPLSHLLNKTNAGYTLTNNSTQYTLSHLMYMDDIKLYAADEMLLSHLADVTQQFSTDICMQFGVDKCKVMSVVKGKFKNNSYTLETGQTIEPMEEHDTYKYLGFRQSRQIQHKNTRQELIKKFTHRLNLILKTNLNARNTIKAINTFAIPILTYSFGIIQWSKTNTRKLQRIINTTLTKHRKHHPKSCIQRLILPRKEGGRGLIDVQNLHNKQISSLRSYFHSKSEHSPLHRHVAETDKNFTPLNLHNRDTQTNEIIVTDEDKIAVWSQKALHGRHRSFLSQPHVDKIKSNEWLKRGELFPETEGFMLAIQDQIIATRNYRKFIMRDPNQQNDLCRHCNLASETIQHITGACKSLAQTDYKHRHDQVSAIIHQHLAYKYSLIDQMVPYYKYKPETILENRNYKIYWDRTIVTDKTIHFNRPDITVHDKINKTVYLIDIAIPNSHNIQSTISEKLSKYQDLAIEIKTQWRAQTVHIVPIVLSTTGIIPKSLTQSLNTLHMPTYTLHTLQKATILNTCRITRKFLTSSTLSSTYSI

SEQ ID NO: 30737 - protein, 1417 aa, Amphipyra berbera
MRTLDNGGPPVLYTLATVNAGLCRGRLIRSLATRGNKMITRSKIKKTIQANLPHIDDKTTQVSLSSSTKSLFPSIPSSSPPFCISPPPSSSTSIQSADVAQETNSVNEPVPTTSTATARRKWSIEMNKFILRTYLHLTNMETDTNAYLPPLHTKFLEKYPNMQVSRQRVGDQRRAIIQKKLLPQKTIDQIYDEVRSELQIIQTQIQQHPTQYTTPVNTQSGTRMKWTNECNESIIRIYYRITQLETNKTAYRKYLYEEFINQYPDLSHITEQRLADQRRAIINNKYIKNDRLAEIKKQVAEELRHTNTQTENTNNEPLNIQPESNIEYPDEYSYTPSTSHINTINSYTLTNTLTTDVPLNNSAYTDLITQTLTDPQNTSEENLLNNIHIEQTDPTQTNLDVAPESNPEIDDTFQQAQQYFTDTHPTNRPYIPKQKTSRKFSATVKYINTIILPKYVNVDTDFNTLQNAIYCAAWTAAKCNGAKLSHLAQSEHRTRPHRKPNWQIRLEMKIGNLRANIGRLTQFIRGNRNRKVVAAVEAIKIKYQLHAQHENSNTQIDHFLDTLKQKLNAASSRLKRYKTCTDRKVQNTKFINNEKIFYRNLTSMNKDASSNQNIETPSPESLREFWANIWEIPVHHNTHADWINETSSQIPEMEFELIPIDTFIDVIKRTHNWKSPGTDNIHNYWYKKFTSIHPYIHNHINTFIRSPHLLPTYITHGITYMIPKDINDTINPAKYRPITCLQTLYKILTACISEVVYKHLTEHNILAEQQKGCRKNSQGCKEQLTIDAIVMNTAVKNKKDIHTMFIDYQKAFDSVPHSWLLHVLHLYKIHPTLISFLHTSMQNWQTVLKINQASATLTTEPISIQRGIFQGDALSPLWFCLALNPLSDLLDKTDVGFTLKNNDTQYTLTHLMYMDDIKLYAADKTSIFKLADTTQQFSQDIHMQFGVDKCKILSITKGKIQNNSYTLGSGESIEPMDEQSTYKYLGFKQSRQIQQKITKQELLKKFSYRLNLILKTHLNSRNTIKAINTFAIPILTYSFGIIQWTKTDIKKLQRTINTHFTKHRKHHPKSCIQRLTLPRQEGGRGLIDIHNLHNKQILSLRAYFHDKSEHSPLHKHTTNLDKKLTPLNLQDRNTQTNEHITSTQQKITAWADKALHGRHRAYLSLSHVDKEKSNEWLRRGELFPETEGFMLAIQDQIIATRNYRKYIIKDPNQPTDLCRHCNTASETIQHITGACKSLAQTDYKHRHDQVAAIIHQNLAYKNKLISEVNPYYKYKPETILENRNHKIYWDRTIITDKTIHYNRPDITVHDKTNKTVYLIDIAIPNSHNIQTTISDKLSKYQDLAIEIKTQWKAQTVHIVPVVLSSTGIIPKSLTQSLNTLHMPTYTLHMLQKATILNTCRITRKFLTSSTLASTYSI

SEQ ID NO: 30738 - protein, 1364 aa, Noctua janthe
MNTRSKTKKQLQAKLPQIDDETSQPSSSSPSSLFPSIPSSSQSFRVTPTPSSSSISIQSVDVVQETNFVDDTVPTARTATSRRKWSTDMNKFILRTYLHLTHMETDKNAYLPSLHTKFLEKYPDMQVGRQRIGDQRRAIVQKKLLPQETIDQIYEEVRAELQIVHTQIQQHSTQSKTPINTQAGQRMKWTNEYNEAIIRIYYTSTELETNKTAYRKHLHEEFINIYPELAHLTEQRLSDQVRAIINNKYIHTNRLEEIKNQVATELRNINTNTQNIEHINNDLQPPDENIHSLSTQYANIYTPTTNNSILLNNSSDTNIVSQTLINTVDESFLNHIDIGLFEPIRNNLNAAHEKNLEIEATFQQAQQLFSDTHPTSRPYIPKQKTSKKFCAIVTYINSVILPNNVNVDTDFIKMQTTIYCAAWTAATCNGAKISDTQNESRTYIKRKPKWQIRIEKKIQSLRSNIGRLTHFINGSRSPKLIAAVEEIKKKYQVHAQYEDSNTQLVHFLDTLKQKLNAASSRLKRYLKCTNRKVQNTKFINNEKIFYRNLATNNRDTSNQSLETPTSETLREFWANIWENPVNHNHQADWINEVTPEIPEMEFEFIPIGTFIDVIKRTHNWKSPGTDNIHNYWYKKFSSIHPFLHNHLNTFIHSPHLLPSYITHGVTYMIPKDINDTINPAKYRPITCLQTIYKILTACLSEVVYEHLTKNNILSEQQKGCRKNSQGCKEQLTIDAVTMNSAVKSKTDIHTMFIDYQKAFDSVPHSWLLNVLSLYKIHPTLKKILQMSMQNWQTVLKINSSSSTVATEPIHIKRGIFQGDALSPLWFCMALNPLSHLLDKTATGFTLTNSNTQYTLTHLMYMDDIKLYAADKNALVVLADTTQQFSDDFCMSFGVDKCKMLSVVKGKIQNNSYTLGSGQLIEPMDEQSTYKYLGFKQSRQIHQKMTKQELVNKYSHRLNLILKTNLNSKNTIKAINTFAIPILTYSFGIIRWSNTDIKKLQRTLNTSLTKYRKHHPKSSIHRLTLPRQEGGRGLIDIHNLHNKQINSLRAYFHNKSESSALHKHVTENDTKLTRLNLHNRNTQINELVISTAEKIAAWSAKALHGRHRAYLSQPHVDKAKSNEWLKRGELFPETEGFMLAIQDQIIATRNYRKYIIKDPHQPTDLCRQCNTASETIQHITGACKSLAQTDYKHRHDQVASIIHQHLAFKYQLISEMKPYYKYKPELILDNNNQKIYWDRTIITDKTIHFNRPDITLHDKANKTVYLIDIAIPNSHNIQTTISEKLSKYQDLAIEIKTQWKAQTVHIVPIVLSSTGIVPKSLMQSLNTLHMPSHTLQLLQKATILNTCRITRKFLTSSTISSTFSI

SEQ ID NO: 30739 - protein, 1373 aa, Acronicta aceris
MITRSKTKKSLQANRLNTDDEQMHVSSSSSTKSLFPSITSSSPSFCISPTPSSSISIQSADVAQETKFVNKPVPTTSTATTRRKWSIEMNKFILRTYLHLTNMETDNNAYLPPLHTKFLEKYPNMQVSRQRIGDQRRAIVHKKLLPQETIDQIYNEVRAELQLIQTQIQQHSTQCSIPINTQLSQRMKWTNEYNEAIMTIYYRITQIETNKTAYRKHLHEEFINLYPNLTHITEQRLADQRRAIINNKYIKDARLSEIKKQVTEELLYTNTQLENNHEHSNTYFIEHSEERENTLNTQNTNTYESCSTYTADLPLNSSINTDEITQTPTDTQNTELTHTEDNFLNNINIGQLDSTQTQLDAATEINPELEDTFQQALKHFTNIHLTNRSYIPKQKSSKKFAAIVKYINTIVFPKYANGDTDFITLQNLIYCGAWTAAKCNGAKISLIPQIEHRTRTHRKPNWQIRLEKKIGNLRANIGRLTQYIRGNRSRKVIKAVEAIKTKYQLHAQYENSNTQLEHFLDTLKQKLNAASSRLKRYITCTNRKVQNTKFSNSEKTFYRNLTSQNSNQNIETPSADTLRDFWANLWENPVLHNQHANWINETETQITQMEFEFIPIETFIDVIKRTHNWKSPGTDNIHNYWYKKFTYLYPYIYNHLNTFIKSPHLLPAYITQGVTYMIPKDINDTVNPAKYRPITCLQTLYKILTACISEVISKHLTEHDILAEQQKGCRKKSQGCKEQLTIDAITMNSAVKNKKDIHTMFIDYQKAFDSVPHSWLIHVLNLYKIHPTLISFLKTSMLNWQTVLKINQISTTLTTEPISIQRGIFQGDALSPLWFCLALNPLSHLLNKTDVGFTLKNNGSQYTLSHLMYMDDIKLYANSKNTLYKLADTTQKFSQDICMQFGVDKCKILSVSKGKIQNNGYALEIGEVIEPMDEHSTYKYLGFKQTRQIQHKMIKQELLKKFTHRLNLVLKTHLNSKNIIKAINTFAIPILTYSFGIIQWSKSDIKQLQRTINTHLTKHRKHHPKSCIQRLTLPRQEGGRGLIDVHNLHNKQILSLRTYFHDKAAHSPLHKHAIETDKKLTPLNLQDKHTQANEQLISTQQKLALWADKALHGRHRAYLSLPHVDKSKSNEWLRRGELFPETEGFMLAIQDQIIATRNYRKFIIKDPNQPTDLCRHCNNASETIQHITGACKSLAQTDYKHRHDQVASIIHQHLAHKYKLITDMNPYYKYKPEIILENQHHKMYWDRTIITDKTIHYNRPDITVHDKANKIVYLIDIAIPNSHNIQSTISEKLNKYQDLAIEIKTQWKAQTVHIVPIVLSSTGIIPKSLTQSLNTLNMPTYTLHILQKATILNTCRITRKFLTSSTLSSTFSI

SEQ ID NO: 30740 - protein, 1413 aa, Ochropleura plecta
MLRAAWLGERLVANVPTLDNRGPPVLFTLATVNAGLCCGRLCKSLASRGNNMNTRSKTKKILLANLPQMDDETSHFSTSSSSSLFPSIPSSSQSFRVTPTPSSPSISIQSVDVVQETNIVEDTVPTARTAKSRRKWSIDMNKFILRTYLHLTHIETDKNAYLPSLHTKFLEKYPDMQVGRQRIGDQRRAIVQKKLLPQETIDQIYEEVRAELQIVHTQIQQHSTQSMTQNNTQPGQRMKWTNEYNEAIIRIYYTTTQLETNKTAYRKHLHEGFINIYPELAHLTEQRLSDQVRAIINNKYIHNDRLEEIKNQVALELRNNNINIEHINNDLQQSDENILSLNTQYTNIHISDTTNNIIVLNNNSDTNTVSQTPIHTVDENFLNHIDMGLFEPTQNNLDGAPEKNLEIEATFQQAQQLFSDTHPTSRPFIPKQKTSKKFSAIVTYINSIILPNIVNFDTDFIQLQTIIYCAAWTAATCNGAKLSDTQNESRTYIKRKPKWQIRMDKKIQSLRANIGRLTHFINGSRSPKLIAAVEEIKKKYQIHAQYEDPNTQLVHFLDTLKQKLNASSSRLKRYLTCTNRKVQNSKFINNEKTFYRNLTTNNRDTNNQNLETPTPESLREFWANIWENPVNHNHQADWINEVTPDTPEMEFEFIPIETFIDVIKRTHNWKSPGTDNIHNYWYKKFSSIHPFLHNHLNTFIQSPHLLPSYITHGVTYMIPKDSNDTINPAKYRPITCLQTIYKILTACLSEVVYEHLTKNNILSEQQKGCRKNSQGCKEQLTIDAVTMSSAVKSKTDIHTMFIDYQKAFDSVPHSWLLNVLSLYKIHPTLKHFLETTMQSWQTVLKINSLSSTVATEPIHIKRGIFQGDALSPLWFCMALNPLSHLLDKTEAGYALTNINTHYMLTHLMYMDDIKLYAADKNALFELADTTQQFSDDICMSFGVDKCKILSIVKGKIQNNSYTLGSGQIIEPIDELSSYKYLGFKQSRQIHQKMIKQELVNKFSHRLNLVLKTSLNSKNTIKAINTFAIPILTYSFGIIRWSNTDIKKLQRTVNTTLTKHRKHHPKSSIHRITLPRQEGGRGLIDIHNLHNKQILSLRSYFHNKSENSKLHKHVTENDLKLTPLNLHNRNTQINEQLINTQEKIAAWSAKALHGRHRAFLSQPHVDKAKSNEWLKRGELFPETEGFMLAIQDQIIATRNYRKYIIKDPHQPTDLCRHCNTASETIQHITGACKSLAQTDYKHRHDQVAAIIHQQLAFQHKLVSEMKPYYKYKPEIILENNNHKIYWDRTIVTDKTIHFNRPDITLHDKVNKIVYLIDIAIPNSHNIQTTMSEKLNKYQDLAIEIKTQWKAQTVHIVPIVLSSTGIVPKSLTQSLNTLHMPSHTLHLLQKATILNTCRITRKFLTSSTISSTFSI

SEQ ID NO: 30741 - protein, 1412 aa, Ochropleura plecta
MLRAAWLGERLVANVPTLDNRGPPVLFTLATVNAGLCCGRLCKSLASRGNNMNTRSKTKKILLANLPQMDDETSHFSSSSSSSLFPSIPSSSQSFRVTPTPSSPSISIQSVDVVQETNIVEDTVPTARTARSRRKWSIDMNKFILRTYLHLTHIETDKNAYLPSLHTKFLEKYPDMQVGRQRIGDQRRAIVQKKLLPQETIDQIYEEVRAELQIVHTQIQHSTQSMTQNNTQPGQRMKWTNEYNEAIIRIYYTTTQLETNKTAYRKHLHEKFINIYPELAHVTEQRLSDQVRAIINNKYIPNDRLEEIKNQVALELRNNNINTEHINNDLQQSDENVLSLNTQYTNIHITDTTNNIIVLNNNSDTNTVSQTPIHTVDENFLNQIDIGLFEPTQNNLNGAPEKNLEIEATFQQAQQLFSDTHPTSRPFIPKQKTSKKFSAIVTYINSIILPNIVNIDTDFTQLQTIIYCAAWTAATCNGAKISDTQNESRTYIKRKPKWQIRMDKKIQSLRANIGRLTHFINGSRSPKLIAAVEEIKKKYQVHAQYEDPNTQLVHFLDTLKQKLNASSSRLKRYLTCTNRKVQNSKFINNEKTFYRNLTTNNRDTNNQNLETPTPESLREFWASIWENPVNHNHQADWINEVTTDTPEMEFEFIPIETFIDVIKRTHNWKSPGTDNIHNYWYKKFSSIHPFLHNHLNTFIQSPHLLPSYITHGVTYMIPKDSNDTINPAKYRPITCLQTIYKILTACLSEVVYEHLTKNNILSEQQKGCRKNSQGCKEQLTIDAVTMSSAVKSKTDIHTMFIDYQKAFDSVPHSWLLNVLSLYKIHPTLKHFLETTMQSWQTVLKINSLSSTVATEPIHIKRGIFQGDALSPLWFCMALNPLSHLLDKTGVGYALTNINTHYTLTHLMYMDDIKLYAADKNALFELADTTQQFSDDICMSFGVDKCKILSVVKGKVQNNSYTLGSGQIIEPIDELSSYKYLGFKQSRQIHQKMIKQELVNKFSHRLNLVLKTSLNSKNTIKAINTFAIPILTYSFGIIRWSNTDIKKLQRTVNTTLTKHRKHHPKSSIHRITLPRQEGGRGLIDIHNLHNKQILSLRSYFHNKSENSTLHKHVTENDIKLTPLNLHNRNTQINEQIINTQEKIAAWSAKALHGRHRAFLSQPHVDKAKSNEWLKRGELFPETEGFMLAIQDQIIATRNYRKYIIKDPHQPTDLCRHCNTASETIQHITGACKSLAQTDYKHRHDQVAAIIHQQLAFQHKLVSEMQPYYKYKPEIILENNNHKIYWDRTIVTDKTIHFNRPDITLHDKANKIVYLIDIAIPNSHNIQTTMSEKLNKYQDLAIEIKTQWKAQTVHIVPIVLSSTGIVPKSLMQSLNTLHMPSHTLHLLQKATILNTCRITRKFLTSSTISSTFSI

SEQ ID NO: 30742 - protein, 765 aa, Mythimna impura
MEFEFIPIETFIEVIKRTHNWKSPGTDNIHNYWYKKFSSIHPFLYNHLNTFIQSPHLLPIYITHGVTYMIPKDINDTTNPAKYRPITCLQTLYKILTACVSEVVYEHLIKNNILAEQQKGCRKNSQGCKEQLTIDAIAMNSAVKCRKDIHTMFIDYQKAFDSVPHSWLLHVLNLYKIHPTLKQFLETSMQNWQTVLKIHSSSTTVATEPISIKRGIFQGDALSPLWFCMALNPLSHLLDKTDVGFTLVNHNTQYKLTHLMYMDDIKLYAADKGALFQLADTTQLFSDDICMSFGVDKCKILSVVKGKIQNNSYTLGSGESIDPMDEQSTYKYLGFKQSRQIQQKLSKQELLKKFSHRLNLILKSNLNSRNTIKAINTFAIPILTYSFGIIKWSKTDIKKLQRTVHILLTKHRKHHPKSCIQRLTLPRQEGGRGLIDIQNLHNKQIHSLRVYFHYKSENSLLHKQISDIDKKLTPLNLQNRNTQINEHITSTQQKIAAWSEKALHGRHRASLSQPHVDKLMSNEWLKRGELFPETEGFMLAIQDQIVATRNYRKYIMKDQNQPTDFCRHCNSASETIQHITGACKSLVQTDYKHRHDQVVAIIHQHLAYKYKLVTEMMPYYKYTPEIILESKDIKIYWDRTIITDKTIHYNRPDITVHDKTNKTVYLIDIAKPNSHNVQTTISEKLSKYQDLAIEIKTQWKAQTVHIVPIVLSSTGIIPKSLAQSLNTLQMPAQTLYMLQKATILNTCRITRKFLTSSTLTSTFSI

SEQ ID NO: 30743 - protein, 1356 aa, Phlogophora meticulosa
MNTRSKTKKQLQANQPQIDDETSQLSSSSPSSLFSSIPSSSQSFRITPTPSLSSFSIQSADVVQETNFVDDTVPIARNATSRRKWTIEMNKFILRTYLHLTNMDTDKNAYLPSLHTKFLEKYPAMQVSRQRIGDQRRAIVQKKLLSQDTIDQIYEEARAELQMVHTQIQQHSTQSNTQFGQRMKWTNEYNEAIIRIYYTTTQLETNKTAYRKYLHEGFITIYPELAHITEQRLSDQVRAIINNRYININRLAEIKNQVALELRNSNTDTQNTEHTNSDYLNTQSQNDLEHLDPNTLTTNILPSNNPNTVTTTHTPNTEEVHFLNDIDNDLFGATETNFPAAPEINPEIEATFHQAQQHFINTHPTHRPYIPKQKTSRKFSTIVSYLNTVILPKHVNVDTEFIKLQTIIYCAAWTAATCNGAKISEISAQNERGTFRQRKPKWQIRLENKIKNLRANIGRLTHFINGSRSQHLIAAVEQIKIKYQLHAQHENSNTQIEHFLDTLKQKLSAAASRLKRYVTCTNRKVQNTKFTNNEKTFYRNLTSNNMETTNQSLETPSSETLRDFWANIWENPVCHNNHADWVNEASPEILEMKFDFIPVETFIDVIKRAHNWKSPGTDNIHNYWYKKFSSIHPFLHNHLNTFIQSPHLLPTYITHGVTYMIPKDMNDTINPAKYRPITCLQTLYKILTACVSEVIYEHLTKNNILSEQQKGCRKNSQGCKEQLTIDAIIMNSAVKSRKDIHTMFIDYQKAFDSVPHSWLSHVLNLYKINPKIKQFLETTMQNWKTVLKINSSSSTVATEPISIKRGIFQGDALSPLWFCMALNPLSHLLDKTDAGFILSNNNTQYTLTHLMYMDDIKLYAADKKSLFQLADTTQQFSDDICMSFGVDKCKILSIEKGKILNNNYTLASGESIEPMDEQSTYKYLGFKQSRQIQQKISKQELLKKFSHRLSLVLKSSLNSRNTIKAINTFAIPVLTYSFGIIRWSKTDIKKLQRTVNTLLTKHRKHHPKSCIQRLTLPRQEGGRGLIDINNLHNKQILTLRAYFHGKSENSSLHKQVTETDIKLTPLNLQNRNTLTNEHIVSTEQKIAAWAQKALHGRHRAYLSQPHVDKIKSNEWLKRGELFPETEGFMLAIQDQIIATRNYRKYIIKDRNQPTDTCRHCNSASETIQHITGACKSLAQTDYKHRHDQVAAIIHQHLAHKYKLIGEMVPYYKYKPETILENRNQKIYWDRTIITDKTIHYNRPDITVHDKSNKIVYLIDIAIPNSHNIQTTISEKLSKYQDLAIEIKTQWQAQNVHIVPIVLSSTGVVPKALTQSLNTLHMPSHTLHMLQKATILNTCRITRKFLTSSTLSSTFLI

SEQ ID NO: 30744 - protein, 1401 aa, Craniophora ligustri
MQGSAVVDRKSLATRGINMITRSKTKKVIQANVPLIDDNHTQVSSSSSTISLIQSISSSSQFICVSPTPSTSTSIKSADVAQETIFVDKPVPTTSTVTTRRKWSSEMNEFILRTYLNLTNMETDINAYLSPLHVKFLEKYPNMQVSRQRIGDQRRAIVQKKLLPQTKINQIYDDVREELQLIHTHIQQHSTQLQISTNTQPTQRMKWTNAYNETIMRIYYKITQLETNKTAYRKALHEEFISLYPSFAHITEQRLSDQRRAIINNNYINNARLAEIKKQVAEELQYRNTQTEIIHNIQPNTYIQNSLEHADNYGLTLNTQNTNINIRSDTPINTQTTNFLSTNSIDSDIVAQTPLDTHNMENIQIEDNFLKNIDTGQTDSTPIHSNNIETNPDIENTFQQAQLYFADTHPTNRPYIPKQKTSRKFIAIVTYINNIIFPKYTNVNSDFITLQTIIYCGAWTAAKCNGAKISHIPQNENLTRSKRKPNWQIRLEKKIGSLRANIGRLTQYIRGNRSSKVVAAVEAIKTKYENHAQYENSNTEMVHFLDTLKQKLNAASSRLKRYITCTNRKAQNAKFVNNEKNFYRNLTSTNTDNSNQNLQTPPADTLRNFWADIWENPVLHNHHADYINETATDITHMEFEFIPIETFIDVIKRTHNWKSPGSDNIHNYWYKKFTNLHPYIHNHLNTFIQSPQLLPTYITHGVTYMIPKDKNDTLNPAKYRPITCLQTIYKILTACISEEVYKHLINNDILAEQQKGCRKNSQGCKEQLTIDAIIMNNAVKNKKDICTMFIDYQKAFDSVPHSWLLHVLNLYKIHPTLISFLKTSMLNWQTVLKINQASTTLTTEPIFIQRGIFQGDALSPLWFCLALNPLSYLLNKTSTGFTLTNNDTHYTLSHLMYMDDIKLYASDTISLNKLADITQQFSQDIRMQFGVDKCKMFSVTKGKIEYNRYTLESGESIEPMDEQSTYKYLGFKQSRQIHQKTTKQEMLKKFSHRLNLVLKTQLNSKCIIKAINTFAIPILTYSFGIIQWSKTDIKQLQRTINTHLTKHRKHHPKSCLQRLTLPRQEGGRGLIDVHNLHNKQIISLRAYFHDKAAHSPLHKHIIETDKKLTPLNLQDKNTQINEHLISTQQKHTLWSDKALHGRHRAYLSLPHVDKDKSNEWLRRGELFPETEGFMLAIQDQIIVTRNYRKYIIKDPNQPTDLCRHCNSASETIQHITGACKSLAQTDYKHRHDQVASIIHQHLAYKHKLILDMNPYYKYKPETVLENRHLKIYWDRTIITDKTIHYNRPDITVHDKTNKTVYLIDIAIPNSHNIQSTISEKLNKYQDLAIEIKTQWRAETVHIVPIVLSSTGIVPKSLTESLNILDMPTYTLHMLQKATILNTCRITRKFLSSSTLSSTFSI

SEQ ID NO: 30745 - protein, 1250 aa, Xestia c-nigrum
MNTRSKTKKQLQAKLPQIDDETSSTPSSLFPSISSSSQSFRVTPTPSFSSISIQSADVVQETNFVDDTVPAARTATSRRKWSIDMNKFILRTYLHLTHMETDKNAYLPSLHTKFLEKYPDMQVGRQRIGDQRRAIVQKKLLPQETIDQIYEEVRDELQTVYTQIQQHSTQSKAPTNTQPGQRMKWTNEYNEAVIRIYFTITQLETNKTAYRKHLHEEFINIYPELTHLTEQRLSDQVRAIINNKYIHTNRLTEIKKQVASELKNNNTNTQNTEHINNVLQQPDENMFSPSTQCININVSNTNTNTPATSNITLLNNSSDTNIVSQTLTADEHFLNHIDIGLFEPTPNNFDAAPEKNLEIETTFQQAQQLFSDTHPTSRPYIPKQKTSKKFSAIVTYINSVILPNNVNADTDFAKLQTTIYCAAWTAATCNGAKISDTQNESRTYIKRKPKWQIRMDKKIQSLRANIGRLTHFINGSRSPKLIAAVEKIKKNYQVHAQYQDSNTQLVHFLDTLKQKLNAASSRLKRYLKCTNRKVQNSKFINNEKIFYRNLATNNSETTNQSLETPTSETLREFWANIWENPVNHNHQADWINEVTPEIPEMEFEFIPIPTFIDVIKRTHNWKSPGTDNIHNYWYKRFSSIHPFLHNHLNAFIHSPHLLPSYITHGVTYMIPKDVNDTKNPAKYRPITCLQTIYKILTACLSEVVYEHLTNNNILSEQQKGCRKNSQGCKEQLTVDAITMNSAVKSKKDIHTMFIDYQKAFDSIPHSWLLKFLSLYKIHPTLKHFLEISMQNWQTVLKINSSSSIVATEPIHIRRGIFQGDALSPLWFCMALNPLSHLLDKTDAGYTLSNITTHYTLTHLMYMDDIKLYAPDKNALFILADTTQQFSDDICMSFGVDKCKILSIVNGKVQNNSYTLGSGQLIEPMDEQSTYKYLGFKQSRQIHQKMTKQDLLSKFSHRLNLILKTNLNSKNTIKAINTFAIPILTYSFGIIRWSNTDIKKLQRTINTSLTKHRKHHPKSSIHRLTLPRQEGGRGLIDIHNLHNKQIHSLRSYFYNKSENSSLHKHVTENDRKLTPLNLHDRNTQINEVPITTQEKITAWSAKALHGRHRAYLSQPHVDKTKSNEWLKRGELFPETEGFMLAIQDQIIATRNYRKYIIKDPHQPTDLCRHCNTVSETIQHITGACKSLAQTDYKHRHDQVAAIIHQHLAFKYKFISEMEPYYKYKPEITLENRNQKNLLGQDYYNRQNYTFQ

SEQ ID NO: 30746 - protein, 1387 aa, Spodoptera exigua
MPTLETRGPPVSFTLATVNAGLCCGRLFRSLATRGNHMITRSKLKKLSQPDDESSQSSSSSSRSLFPSVSSSSQSFCVSPTPSSSSTVQSVDVVQLTNSVDEAVPTTSTAKTRRKWTTDMNEFILRNYLLLTNLETDKNAYLPSLHIKFLEKYPSMEVSRQRIGDQRRAIVQRKLLPQSKIDQIYNQVRAQLQITPIRQQHLTTTQVTNIQPGQRMKWTNEYNETIMKIYYKITFLETNKTAYRKSLHEQFINIHPELSHITEQRLSDQVRAITNNKYITVKRLAEIKKQVSEQLIHETNTNHHLNRHSNIPEYPDGSNQAHSFISDTLTHTNDISHDVNINTDNTITPNSLNVDDNFLNDIQLEQFDTIDANQNETEINQELEDLFQQAYEYFIDTDPTKRPYIPKQRTSRKFSIIVNYINNIIFPKYANTDTDFNNLQTIIYSAAWTAAKYNGAKISYTVQTERQTTTRKPKWQIRLEQKIRSLRANIGKLSQYIRGIRSQRLVAAVEVIKAKYQLHAQYENPNTHMTHYLDTMKQKLNAASSRLRRYLTCTNRKLENSRFTNNEKFFYRNLTSNSTLTQNIQTPSAETLREFWAGIWENPVYHNNTAAWIHEANLDHEGMEFETIPIDTFINVIKHTHNWKSPGTDHIHNYWYKKFTSLHPYLHNHLNTFIQTPHLLPTYITQGITYMIPKDMNDTTNPAKYRPITCLQTFYKIITACISELINNHLTKYETLAEQQKGCRKYSQGCKEQLTIDAVIMNHAVKSKTDIHTMFIDYQKAFDSVPHSWLLQVLNLYKIHPTIKLFLQSTMQNWQTVLSINQTTAKIVTQPIYIKRGIFQGDALSPLWFCMALNPLSHLLNRTNAGYTLTNNGTQYILTHLMYMDDIKLYAADQMLLSHLADVTQQFSTDICMQFGVDKCKVMSVVKGKVENNSYTLQTGQTIEPMEEHDTYKYLGFRQSRQIQHKNTRQELIRKFTHRLNLILKTNLNARNTIKAINTFAIPILTYSFGIIQWSKTNTRKLQQTINATLTKHRKHHPKSCIQRLTLTRKEGGRGLIDIQNLHNKQISSLRTYFHSKSEHSLLHTHIVETDKNFTPLNLQSRDTQTNEIIVNDEDKIALWSEKALHGRHRSFLSQPHVDKIKSNEWLKRGELFPETEGFMLAIQDQVIATRNYRKYIIKDPNQQNDLCRHCNLASETIQHVTGACKSLAQTDYKHRHDQVSAIIHQHLAYRYSLVDQITAYYKYKPETILENRNCKIYWDRTIVTDKTIHFNRPDITVHDKVNKIVYLIDIAIPNSHNIQSTISEKLSKYQDLAIEIKTQWRVQTVHIVPIVLSTTGIIPKSLTQSLNTLQMPAYTLHTLQKATILNTCRITRKFLTSSTLTSTYSI

SEQ ID NO: 30747 - protein, 1417 aa, Amphipyra berbera
MRTLDNGGPPVLYTLATVNAGLCRGRLIRSLATRGNKMITRSKIKKTIQANLPHIDDETTQVSLSSSTKSLFPSIPSSSPPFCISPSPSSSTSIQSADVAQETNSVNEPVPTTSTATARRKWSIEMNKFILRTYLHLTNMETDTNAYLPPLHTKFLEKYPNMQVSRQRVGDQRRAIIQKKLLPQKTIDQIYDEVRSELQIIQTQIQQHPTQYTTPVNTQSGTRMKWTNECNESIIRIYYRITQLETNKTAYRKYLYEEFINQYPDLSHITEQRLADQRRAIINNKYIKNDRLAEIKKQVAEELRHTNTQTENTNNEPLNIQPESNIEYPDEYSYTPSTSHINTINSYTLTNTLTTDVPLNNSAYTDLITQTLTDPQNASEENLLNNIHIEQTDPTQTNLDVAPESNPEIDDTFQQAQQYFTDTHPTNRPYIPKQKTSRKFSATVKYINTIILPKYVNVDTDFNTLQNAIYCAAWTAAKCNGAKLSHLAQSEHRTRSHRKPNWQIRLEMKIGNLRANIGRLTQFIRGNRNRKVVAAVEAIKIKYQLHTQHENSNTQIDHFLDTLKQKLNAASSRLKRYKTCTDRKVQNTKFINNEKIFYRNLTSMNKDASSNQNIETPSPESLREFWANIWEIPVHHNTHADWINETSSQIPEMEFELIPIDTFIDVIKRTHNWKSPGTDNIHNYWYKKFTSIHPYIHNHINTFIRSPHLLPTYITHGITYMIPKDINDTINPAKYRPITCLQTLYKILTACISEVVYKHLTEHNILAEQQKGCRKNSQGCKEQLTIDAIVMNTAVKNKKDIHTMFIDYQKAFDSVPHSWLLHVLHLYKIHPTLISFLHTSMQNWQTVLKINQASATLTTEPITIQRGIFQGDALSPLWFCLALNPLSDLLDKTDVGFTLKNNDTQYTLTHLMYMDDIKLYAADKTSIFKLADTTQQFSQDIHMQFGVDKCKILSITKGKIQNNSYTLGSGESIEPMDEQSTYKYLGFKQSRQIQQKITKQELLKKFSYRLNLILKTHLNSRNTIKAINTFAIPILTYSFGIIQWSKTDIKKLQRTINTHFTKHRKHHPKSCIQRLTLPRQEGGRGLIDIHNLHNKQILSLRAYFHDKSEHSPLHKHTTNLDKKLTPLNLQDRNTQTNEHITSTQQKITAWADKALHGRHRAYLSLSHVDKEKSNEWLRRGELFPETEGFMLAIQDQIIATRNYRKYIIKDPNQPTDLCRHCNTASETIQHITGACKSLAQTDYKHRHDQVAAIIHQNLAYKNKLISEMNPYYKYKPETILENRNHKIYWDRTIITDKTIHYNRPDITVHDKTNKTVYLIDIAIPNSHNIQTTISDKLSKYQDLAIEIKTQWKAQTVHIVPVVLSSTGIIPKSLTQSLNTLHMPTYTLHMLQKATILNTCRITRKFLTSSTLASTYSI

SEQ ID NO: 30748 - protein, 1278 aa, Agrochola circellaris
MNKFILRTYLHLTSMETDKNAYLPSLHTKFLEKYPAMQVSRQRIGDQRRAIVQKKLLPQDTIDQIYEEVRAELQMVHTQIQQHSTQSHTQTGQRMKWTNEYNETIMKIYYTATKLETNKTAYRKYLHEEFINKYPELTHITEQRLSDQVRAILNNKYINPIRLEEIKSQIAAELRESNTNTQNIEYISIDHLNIQTQKDLEQPDTNPYFTDTPINTLTTHISLNNSTDTDIVSQNFVNTDDGNFLNNIHIGQFGPTLTNFDAAPEINIEIEDIFQQAQHNFLDTLPTNRPYIPKQKTSRKFSAIVTYINTVILPKHVNVDTEFIKLQTIIYCAAWTAATCNGVKILSDSTQNERHTYTQRKPKWQIRLEKKIENLRANIGRLTHFINGSRSQKLIAAVEEIKKKYQLHSQHENSNTQIEHFLDTLKQKLSAASSRLKRYITCSNRKVQNIKFTNNEKIFYRNLTSNNRDTTNQTLETPSSETLREFWANIWENPVYHNNRADWVNETTQEIPEMEFEFIPIDTFIDVIKRTHNWKSPGTDHIHNYWYKKLSYIHPFLHNHLNTFIQSPNLLPTYITQGVTYMIPKDMNDTINPAKYRPITCLQTLYKILTACVSEVVYEHLTKNNILAEQQKGCRKNSQGCKEQLTIDAITMNSAVKNRKDIHTMFIDYQKAFDSVPHSWLLHVLNLYKIHPTLKLFLETSMQNWQTVLKINSSSSTVATEPIYIKRGIFQGDALSPLWFCMALNPLSHLLDKTDAGFILANNDTQYTLTHLMYMDDIKLYAADKKALFQLADTTQQFSDDICMSFGVDKCKILSILKGKIQNNSYTLTSGESIEPMDEQSTYKYLGFKQSRQIQQKMAKQELQKKFSHRLNLILKSNLNSRNTIKAINTFAIPILTYSFGIIRWSKTDIKKLQRTVNILLTKHRKHHPKSCIQRLTLPRKEGGRGLIDIHNLHNKQILSLRAYFHNQSEHSSLHKQVTETDKKLTPLNLQNRNTQINEQIVSTQQKISEWSAKALHGRHRAYLSQPHVDKVKSNEWLKRGELFPETEGFMLAIQDQIVATRNYRKYIIKDQHQPTDLCRHCNTASETIQHITGACKSLAQTDYKHRHDQVAAIIHQQLAYKYKLVSEMIPYYKYKPEIILESKDQKIYWDRTIITDKTIHYNRPDLTVHDKTNKTVYLIDIAIPNSHNIQTTISEKLSKYQDLAIEIKTQWKAQTVHIVPIVLSSTGIIPKSLTQSLNTLQMPFHTLYMLQKATILNTCRITRKFLTSSTLSSTFSI

SEQ ID NO: 30749 - protein, 1190 aa, Phlogophora meticulosa
MVHTQIQQHATQSNTQFGQRMKWTNEYNEAIIRIYYTTTQLETNKTAYRKHLHEGFINTYPELAHITEQRLSDQVRAIINNRYINTNRLEEIKNQVTLELRNSNTDTQHTEHLNSDFLNTQSQNDLEPLDTNTLTTNVLPSNNPNTVTVPQTIVNTDEINFLNNIDSDISGPTEPNFPAALEINPEIEATFYQAQQNFINTHPTHRPYIPKQKTSRKFSTIVTYLNTVILPKHVNGDTEFIKLQTLIYCAAWTAATCNGAKIFEISSQNERGAYKQRKPKWQIRLDNKIKHLRANIGRLSHFINGNRSPHLIAAVEQIKIKYQLHAQHENSNTQIEHFLDTLKQKLSAAASRLKRYITCTNRKVQNTKFTNNEKTFYRNLTSHNITSNQNLETPSSETLRDFWANIWENPVCHNNHADWVNEASPEILEMEYEFIPVETFIDVIKRAHNWKSPGTDNIHNYWYKKFSSIHPFLHNHLNTFIQSPHLLPTYITHGVTYMIPKDINDTINPAKYRPITCLQILTACVSEVVYEHLSKNNILAEQQKGCRKNSQGCKEQLTIDAIIMNSAVKSRKDIHTMFIDYQKAFDSVPHSWLSHVLNLYKINPKIKQFLETTMQNWKTVLKINSSSSTVATEPISIKRGIFQGDALSPLWFCMALNPLSHLLDKTDAGFILSNNNTQYTLTHLMYMDDIKLYAADKKSLFKLADTTQQFSDDICMSFSVDKCKILSIEKGKILNNNYILASGETIEPMDEQSTYKYLGFKQSRQIQQKISKQELLKKFSHRLSLVLKSSLNSRNTIKAINTFAIPILTYSFGIIRWSKTDIKKLQRTVNTLLTKHRKHHPKSCIQRLTLPRQEGGRGLIDIYNLHNKQILTLRAYFHGKSENSSLHKQVTETDKKLTPLNLQNRNTLTNEHIVSTEQKIAAWSQKALHGRHQAYLSQPHVDKIKSNEWLKRGELFPETEGFMVAIQDQIIATRNYRKYIIKDRNQPTDTCRHCNSASETIQHITGACKSLAQTDYKHRHDQVAAIIHQHLAHKYKLIGEMIPYYKYTPETILENRNQKIYWDRTIITDKTIHYNRPDITVHDKSNKIVYLIDIAIPNSHNIQTTISEKLSKYQDLAIEIKTQWKAQTVHIVPIVLSSTGVVPKALTQSLNTLHMPSHTLHMLQKATILNTCRITRKFLTSSTLSSTFLI

SEQ ID NO: 30750 - protein, 1364 aa, Noctua fimbriata
MNTRSKTKKQLQAKLPQIDDETSQPSSSSPSSLFPSIPSSSQSFRVTPTPSSSSISIQSVDVVQETNFVDDTVPAARTATSRRKWSTDMNKFILRTYLHLTHMETDKNAYLPSLHTKFLEKYPDMQVGRQRIGDQRRAIIQKKLLPQETIDQIYEEVRTELQVVHTQIQQNSTQSKTPINTQPGQRMKWTNEYNEAIIRIYYTSTELETNKTAYRKHLHEGFINIYPELAHLTEQRLSDQVRAIINNKYIHTNRLEEIKKQVATELRNINTNTQNIEHINNDLQQPDENIHSLSTQYTNIYTPTTSNRIFLNNSSDTNIVSQTLTNTVDESFLNHIDIGLFEPTQNNLDAAPEKNLEIEATFQQAQQLFSDTHPTSRPYIPKQKTSKKFSAIVTYINSVILPNNVNVDTEFIKMQTTIYCAAWTAATCNGAKISDTQNESRTYIKRKPKWQIRIDKKIQSLRSNIGRLTHFINGSRSPKLIAAVEEIKKKYQVHAQYEDSNTQLVHFLDTLKQKLNAASSRLKRYLKCTNRKVQNTKFINNEKIFYRNLATNNRDTTNQSLETPRSETLREFWANIWENPVNHNHQADWINEITPEIPEMEFEFIPIGTFIDVIKRTHNWKSPGTDNIHNYWYKKFSCIHPFLHNHLNTFIHSPHLLPSYITHGVTYMIPKDINDTINPAKYRPITCLQTIYKILTACLSEVVYEHLTKNNILSEQQKGCRKNSQGCKEQLTIDAVTMNSAIKSKTDIHTMFIDYQKAFDSVPHSWLLNVLSLYKIHPTLKNFLEISMQNWQTVLKINSSSSTVATEPIHIKRGIFQGDALSPLWFCMALNPLSHLLDKTDAGYKLTNINTQYTLTHLMYMDDIKLYAADKNALVVLADTTQQFSDDICMSFGVDKCKMLSVVKGKIQNNSYTLGSGQLIEPMDEQSTYKYLGFKQSRQIHQKMTKQELVNKYSHRLNLILKTNLNSKNTIKAINTFAIPILTYSFGIIRWSNTDIKKLQRTLNTSLTKHRKHHPKSSIHRLTLPRQEGGRGLIDIHNLHNKQIHSLRAYFHNKAESSALHKHVTENDTKLTPLNLHNRNTQINELLISTPEKIAAWSAKALHGRHQAYLSQPHVDKAKSNEWLKRGELFPETEGFMLAIQDQIIATRNYRKYIIKDPHQPTDLCRHCNTVSETIQHITGACKSLAQTDYKHRHDQVAAIIHQHLAFKYKLISEMKPYYKYKPELILDNNNQKIYWDRTIITDKTIHFNRPDITLHDKVNKTVYLIDIAIPNSHNIQTTISEKLSKYQDLAIEIKTQWKAQTVHIVPIVLSSTGIVPKSLMQSLNTLHMPPHTLQLLQKATILNTCRITRKFLTSSTISSTFSI

SEQ ID NO: 30751 - protein, 1370 aa, Noctua janthe
MNTRSKTKKQLQAKLPQIDDETSQPSSSSPSSLFPSIPSSSQSFRVTPTPSSSSISIQSVDVVQETNFVDDTVPTARTATSRRKWSTDMNKFILRTYLHLTHMETDKNAYLPSLHTKFLEKYPDMQVGRQRIGDQRRAIVQKKLLPQETIDQIYEEVRAELQIVHTQIQLLLYLSMDSTQSKTPINTQAGQRMKWTNEYNEAIIRIYYTSTELETNKTAYRKHLYEEFINIYPELAHLTEQRLSDQVRAIINNKYIHTNRLEEIKNQVATELRNINTNTQNIEHINNDLQPPDENIHSLSTQYANIYTPTTSNSILLNNSSDTNIVSQTLINTVDESFLNHIDIGLFEPTQNNLNAAHEKNLEIEATFQQAQQLFSDTHPTSRPYIPKQKTSKKFSAIVTYINSVILPNNVNVDTDFIKMQTTIYCAAWTAATCNGAKISDTQNESRTYIKRKPKWQIRIEKKIQSLRSNIGRLTHFINGSRSPKLIAAVEEIKKKYQVHAQYEDSNTQLVHFLDTLKQKLNAASSRLKRYLKCTNRKVQNTKFINNEKIFYRNLATNNRDTSNQSLETPTSETLREFWANIWENPVNHNHQADWINEVTPEIPEMEFEFIPIGTFIDVIKRTHNWKSPGTDNIHNYWYKKFSSIHPFLHNHLNTFIHSPHLLPSYITHGVTYMIPKDINDTINPAKYRPITCLQTIYKILTACLSEVVYEHLTKNNILSEQQKGCRKNSQGCKEQLTIDAVTMNSAVKSKTDIHTMFIDYQKAFDSVPHSWLLNVLSLYKIHPTLKNFLQMSMQNWQTVLKINSSSSTVATEPIHIKRGIFQGDALSPLWFCMALNPLSHLLDKTATGFTLTNSNTPYTLTHLMYMNDIKLYAADKNALVVLADTTQQFSDDICISFGVDKCKMLSVVKGKIQNNSYTLGSGQLIEPMDEQSTYKYLGFKQSRQIHQKMTKQELVNKYSHRLNLILKTNLNSKNTIKAINTFAIPILTYSFGIIRWSNTDIKKLQRTLNTSLTKYRKHHPKSSIHRLTLPRQEGGRGLIDIHNLHNKQIHSLRAYFHNKSESSALHKHVTENDTKLTPLNLHNRNTQINELVISTAEKIAAWSAKALHGRHRAYLSQPHVDKAKSNEWLKRGELFPETEGFMLAIQDQIIATCNYRKYIIKDPHQPTDLCRHCNTASETIQHITGACKSLAQTDYKHRHDQVASIIHQHLAFKYQLISEMKPYYKYKPELILDNNNQKIYWDRTIITDKTIHFNRPDITLHDKANKTVYLIDIAIPNSHNIQTTISEKLSKYQDLAIEIKTQWKAQTVHIVPIVLSSTGVVPKSLMQIFNTLHMPSHTLQLLQKATILNTCRITRKFLTSSTISSTFSI

SEQ ID NO: 30752 - protein, 1362 aa, Ochropleura plecta
MNTRSKTKKQLQANLPQIDDETSQPSSSSPSSLFPSIPSSSQSFRVTPTPSCSSISIQSADVVQETNSVDDTVPTAKAATRRRKWTIEMNKFILRTYLHLTTMETDKNAYLPPLHTKFLEKYPAMQVSRQRIGDQRRAIIQKKLLPQDTIDQIYEEVRSELQIIHTQIQQHSTQPCTQPGQRMRWTNECNETIITIYYTITQLETNKTAYRKKLHEEFIIKYPELAHITEQRLSDQVRAIINNKYIHENRLIEIKNQVTSELSNRNTNTQNIEDLNNYHRNSQTQDDSEQILATNTSFSDTPINSHLSNIILNNSIDSDIASRTVVNIDDENFLDNIHAGQFVPTQTNFDPVPEIESTFHQAQQNFNDTHPINRPYIPKQKTSRKLSAIVTYINTVILPKHLNVDTEFTKLQTIIYCAAWTAATCNGAKISDPAQNERRPNTQRKPKWQIRLEKKIENLRANIGRLTHFNNGCRSPKLIAAVEDIKIKYQLHAQYENSNTQIAHFMDTLKQKLTATSSRLKRYITCTNRKVQNTKFINNEKIFYRNLTSNNRDTTNQSLETPTSETLRQFWANIWENPVQHNNSADWVNEATPEIPEMEFEFIPIDTFIDVIKRTHNWKSPGSDNIHNYWYKKFSSLHPFLHNHLNTFIQSPHLLPQYITHGVTYMIPKDTNDTTNPAKYRPITCLQTIYKILTACVSEIVYEHLTKNNILAEQQKGCRKNSQGCKEQLTIDSITMNSAVKSRKDIHTMFIDYQKAFDSVPHSWLLHVLSLYKIHPTLKQFLETSMQNWQTVLKINSPSTTVTTEPIRIKRGIFQGDALSPLWFCMALNPLSLLLDKTGGGFTMENNNTQYTLTHLMYMDDIKLYADDEVALYQLADATQQFSDDICMSFGVDKCKILSIVKGKIQNNSYTLLSGESIEPMDEQSTYKYLGFKQSRQIQQKMSKQELLKKFSHRLNLILKSNLNSRNTVKAINTFAIPILTYSFGIIRWSKTDIKTLQRTIHTHLTKHRKHHPKSCIQRLTLPRQEGGRGLIDINNLHNKQILSLRAYFHNKSENSPLHKQVTEADKKLTPLNLQNRNTQINEHIVSTQQKITAWSEKALHGRHRACLSQPHVDKIKSNEWLKRGELFPETEGFMLAIQDQIISTRNYRKYIIKDTNQPTDLCRHCNTASETIQHITGACKSLAQTDYKHRHDQVAAIIHQQLAFKYKLVNEMIPYYKYKPEVTLENNHQKLYWDRTIITDKTIHYNRPDITVHDKTNKTVYLIDIAIPNSHNIQTIISEKLSKYQDLAIEIKTQWRAQTVHIVPIVLSSTGIIPKSLTQSLNTLQMPTHTLYMLQKATILNTCRITRKFLTSSTISSTFSI

SEQ ID NO: 30753 - protein, 1362 aa, Ochropleura plecta
MNTRSKTKKQLQANLPQIDDETSQPSSSSPSSLFPSIPSSSQSFRVTPTPSCSSISIQSADVVQETNSVDDTVPTAKAATRRRKWTIEMNKFILRTYLHLTTMETDKNAYLPPLHTKFLEKYPAMQVSRQRIGDQRRAIIQKKLLPQDTIDQIYEEVRSELQIIHTQIQQHSTQPCTQPGQRMRWTNECNETIITIYYTITQLETNKTAYRKKLHEEFIIKYPELAHITEQRLSDQVRAIINNKYIHENRLIEIKNQVTSELSNRNTNTQNIEDLNNYHRNSQTQDDSEQILATNTSFSDTPINSHLSNIILNNSIDSDIASRTVVNIDDEIFLDNIHAGQFVPTQTNFDPVPEIESTFHQAQQNFNDTHPINRPYIPKQKTSRKLSAIVTYINTVILPKHLNVDTEFTKLQTIIYCAAWTAATCNGAKISDPAQNERRPNTQRKPKWQIRLEKKIENLRANIGRLTHFNNGCRSPKLIAAVEDIKIKYQLHAQYENSNTQIAHFMDTLKQKLSATSSRLKRYITCTNRKVQNTKFINNEKIFYRNLTSNNRDTTNQSLETPTSETLRQFWANIWENPVQHNNSADWVNEATPEIPEMEFEFIPIDTFIDVIKRTHNWKSPGSDNIHNYWYKKFSSLHPFLHNHLNTFIQSPHLLPQYITHGVTYMIPKDTNDTTNPAKYRPITCLQTIYKILTACVSEIVYEHLTKNNILAEQQKGCRKNSQGCKEQLTIDSITMNSAVKSRKDIHTMFIDYQKAFDSVPHSWLLHVLSLYKIHPTLKQFLETSMQNWQTVLKINSPSTTVTTEPIRIKRGIFQGDALSPLWFCMALNPLSLLLDKTGGGFTMENNNTQYTLTHLMYMDDIKLYADDEVALYQLADATQQFSDDICMSFGVDKCKILSIVKGKIQNNSYTLLSGESIEPMDEQSTYKYLGFKQSRQIQQKMSKQELLKKFSHRLNLILKSNLNSRNTVKAINTFAIPILTYSFGIIRWSKTDIKTLQRTIHTHLTKHRKHHPKSCIQRLTLPRQEGGRGLIDINNLHNKQILSLRAYFHNKSENSPLHKQVTEADKKLTPLNLQNRNTQINEHIVSTQQKITAWSEKALHGRHRACLSQPHVDKIKSNEWLKRGELFPETEGFMLAIQDQIISTRNYRKYIIKDTNQPTDLCRHCNTASETIQHITGACKSLAQTDYKHRHDQVAAIIHQQLAFKYKLVNEMIPYYKYKPEVTLENNHQKLYWDRTIITDKTIHYNRPDITVHDKTNKTVYLIDIAIPNSHNIQTIISEKLSKYQDLAIEIKTQWRAQTVHIVPIVLSSTGIIPKSLTQSLNTLQMPTHTLYMLQKATILNTCRITRKFLTSSTISSTFSI

SEQ ID NO: 30754 - protein, 1374 aa, Phlogophora meticulosa
MQGSAVVDFKSLANRGNKMNTRSKTKKQLQANQPQIDDETSQLSSSSPSSLFSSIPSSSQSFRITPTPSLSSFSIQSADVVQETNFVDDTVPIARTATSRRKWTIEMNKFILRTYLHLTNMDTDKNAYLPSLHTKFLEKYPAMQVSRQRIGDQRRAIVQKKLLPQDTIDQIYEEARAELQMVHTQIQQHATQSNTQFGQRMKWTNEYNEAIIRIYYTTTQLETNKTAYRKHLHEGFINTYPELAHITEQRLSDQVRAIINNRYINTNRLEEIKNQVTLELRNSNTDTQHTEHLNSDFLNTQSQNDLEPLDTNTLTTNVLPSNNPNTVTVPQTIVNTDEINFLNNIDSDISGPTEPNFPAALEINPEIEATFYQAQQNFINTHPTHRPYIPKQKTSRKFSTIVTYLNTVILPKHVNGDTEFIKLQTLIYCAAWTAATCNGAKIFEISSQNERGAYKQRKPKWQIRLDNKIKHLRANIGRLSHFINGNRSPHLIAAVEQIKIKYQLHAQHENSNTQIEHFLDTLKQKLSAAASRLKRYITCTNRKVQNTKFTNNEKTFYRNLTSHNITSNQNLETPSSETLRDFWANIWENPVCHNNHADWVNEASPEILEMEYEFIPVETFIDVIKRAHNWKSPGTDNIHNYWYKKFSSIHPFLHNHLNTFIQSPHLLPTYITHGVTYMIPKDINDTINPAKYRPITCLQTLYKILTACVSEVVYEHLSKNNILAEQQKGCRKNSQGCKEQLTIDAIIMNSAVKSRKDIHTMFIDYQKAFDSVPHSWLSHVLNLYKINPKIKQFLETTMQNWKTVLKINSSSSTVATEPISIKRGIFQGDALSPLWFCMALNPLSHLLDKTDAGFILSNNNTQYTLTHLMYMDDIKLYAADKKSLFKLADTTQQFSDDICMSFGVDKCKILSIEKGKILNNNYILASGETIEPMDEQSTYKYLGFKQSRQIQQKISKQELLKKFSHRLSLVLKSSLNSRNTIKAINTFAIPILTYSFGIIRWSKTDIKKLQRTVNTLLTKHRKHHPKSCIQRLTLPRQEGGRGLIDIYNLHNKQILTLRAYFHGKSENSSLHKQVTETDKKLTPLNLQNRNTLPNEHIVSTEQKIAAWSQKALHGRHQAYLSQPHVDKIKSNEWLKRGELFPETEGFMVAIQDQIIATRNYRKYIIKDRNQPTDTCRHCNSASETIQHITGACKSLAQTDYKHRHDQVAAIIHQHLAHKYKLIGEMIPYYKYTPETILENRNQKIYWDRTIITDKTIHYNRPDITVHDKSNKIVYLIDIAIPNSHNIQTTISEKLSKYQDLAIEIKTQWKAQTVHIVPIVLSSTGVVPKALTQSLNTLHMPSHTLHMLQKATILNTCRITRKFLTSSTLSSTFLI

SEQ ID NO: 30755 - protein, 951 aa, Noctua fimbriata
MQTTIYCAAWTAATCNGAKISDTQNESRTYIKRKPKWQIRIDKKIQSLRSNIGRLTHFINGSRSPKLIAAVEEIKKKYQVHAQYEDSNTQLVHFLDTLKQKLNAASSRLKRYLKCTNRKVQNTKFINNEKIFYRNLATNNRDTTNQSLETPRSETLREFWANIWENPVNHNHQADWINEITPEIPEMEFEFIPIGTFIDVIKRTHNWKSPGTDNIHNYWYKKFSCIHPFLHNHLNTFIHSPHLLPSYITHGVTYMIPKDINDTINPAKYRPITCLQTIYKILTACLSEVVYEHLTKNNILSEQQKGCRKNSQGCKEQLTIDAVTMNSAIKSKTDIHTMFIDYQKAFDSVPHSWLLNVLSLYKIHPTLKNFLEISMQNWQTVLKINSSSSTVATEPIHIKRGIFQGDALSPLWFCMALNPLSHLLDKTDAGYKLTNINTQYTLTHLMYMDDIKLYAADKNALVVLADTTQQFSDDICMSFGVDKCKMLSVVKGKIQNNSYTLGSGQLIEPMDEQSTYKYLGFKQSRQIHQKMTKQELVNKYSHRLNLILKTNLNSKNTIKAINTFAIPILTYSFGIIRWSNTDIKKLQRTLNTSLTKHRKHHPKSSIHRLTLPRQEGGRGLIDIHNLHNKQIHSLRAYFHNKAESSALHKHVTENDTKLTPLNLHNRNTQINELLISTPEKIAAWSAKALHGRHQAYLSQPHVDKAKSNEWLKRGELFPETEGFMLAIQDQIIATRNYRKYIIKDPHQPTDLCRHCNTVSETIQHITGACKSLAQTDYKHRHDQVAAIIHQHLAFKYKLISEMKPYYKYKPELILDNNNQKIYWDRTIITDKTIHFNRPDITLHDKVNKTVYLIDIAIPNSHNIQTTISEKLSKYQDLAIEIKTQWKAQTVHIVPIVLSSTGIVPKSLMQSLNTLHMPPHTLQLLQKATILNTCRITRKFLTSSTISSTFSI

SEQ ID NO: 30756 - protein, 859 aa, Spodoptera exigua
MTHYLDTMKQKLNAASSRLRRYLTCTNRKLENSRFTNNEKCFYRNLTSNSTLTQNIQTPSAQTLREFWAGIWENPVYHNNTAAWIHEANLDHEGMEFETIPIDTFINVIKHTHNWKSPGTDHIHNYWYKKFTSLHPYLHNHLNTFIQTPHLLPTYITQGITYMIPKDMNDTTNPAKYRPITCLQTFYKIITACISELINNHLTKYETLAEQQKGCRKYSQGCKEQLTIDAVIMNHAVKSKTDIHTMFIDYQKAFDSVPHSWLLQVLNLYKIHPTIKQFLQSTMQNWQTVLSINQTTAKIVTQPIYIKRGIFQGDALSPLWFCMALNPLSHLLNRTNAGYTLTNNGTQYILTHLMYMDDIKLYAADQMLLSHLADVTQQFSTDICMQFGVDKCKVMSVVKGKVENNSYTLQTGQTIEPMEEHDTYKYLGFRQSRQIQHKNTRQELIRKFTHRLNLILKTNLNARNTIKAINTFAIPILTYSFGIIQWSKTNTRKLQQTINATLTKHRKHHPKSCIQRLTLTRKEGGRGLIDIQNLHNKQISSLRTYFHSKSEHSLLHTHIVETDKNFTPLNLQSRDTQTNEIIVNDEDKIALWSEKALHGRHRSFLSQPHVDKIKSNEWLTRGELFPETEGFMLAIQDQVIATRNYRKYIMKDPNQQNDLCRHCNLASETIQHVTGACKSLAQTDYKHRHDQVSAIIHQHLAYRYSLVDQITAYYKYKPETILENRNCKIYWDRTIVTDKTIHFNRPDITVHDKVNKIVYLIDIAIPNSHNIQSTISEKLSKYQDLAIEIKTQWRVQTVHIVPIVLSTTGIIPKSLTQSLNTLQMPAYTLHTLQKATILNTCRITRKFLTSSTLTSTYSI

SEQ ID NO: 30757 - protein, 1387 aa, Spodoptera exigua
MPTLETRGPPVSFTLATVNAGLCCGRLFRSLATRGNHMITRSKLKKQSQPDDESSQSSPSSSRSLFPTVSSSSQSFCVSPTPSSSSTVQSVDVVQLTNSVDEAVPTTSTAKTRRKWTTDMNEFILRNYLLLTNLETDKNAYLPSLHIKFLEKYPSMEVSRQRIGDQRRAIVQKKLLPQSKIDQIYDQVRAELQITPITQQHLTTAQVTNILPGQRMRWTNEYNETIMKIYYKITFLETNKTAYRKSLHEQFINFHPELSHITEQRLSDQVRAITNNKYITVKRLAEIKKQVSEQLIHETNTNHHLNRHSNIPEYPDGSNQAHSFISDTLTHTNDISHDVNINTDNTITPNSLNVDDNFLNDIQLEQFDTIHANQNETEINQELENLFQQAYEYFIDTDPTKRPYIPKQRTSRKFSIIVNYINNIILPKYANTDTDFNNLQTIIYSAAWTAAKYNGAKISFTIQTERQTTTRKPKWQIRLEKKIRFLRANIGRLSQYIRGNRSQRLVAAVEVIKAKYQLHAQYENPNTQLTHFLDTMKQKLNAASSRLRRYITCTNRKLENSRFSNNEKFFYRNLTSKGTLTQNVQTPSAESLREFWADIWENPVYHNNTATWIHEVNLDHEAMEFEFIPIDKFINVIKHTHNWKSPGTDHIHNYWYKKFTNLHPYLYNHLNTFIQSPHLLPTYITQGVTYMIPKDMNDTTNPAKYRPITCLQTFYKIITTCISELIYNHLEKNESLAEQQKGCRKYSQGCKEQLTIDAVVMNHAAKNKTDIHTMFIDYQKAFDSVPHSWLLQVLNLYKIHPTIKLFLQSTMQNWQTVLNINQTKTKIVTQPIYIKRGIFQGDALSPLWFCMALNPLSHLLNRTDAGYTLTNNGTQYTLTHLMYIDDIKLYAADQMLLSHLADVTQQFSTDICMQFGVDKCKVMSVVKGKVENNSYTLQTGQTIEPMDEHDTYKYLGFRQSRQIQHKYIRQELIKKFTHRLNLILKTNLNAKNTIKAINTFAIPTLTYSFGIIQWSKTNTRKLQQIINTTLTKHRKHHPKSCIQRLTLTRKEGGRGLIDLQNLHNKQISSLRTYFHRKSDYSILHRQIAETDKNFTPLNLQSRDTQSNEIIYNNEDKIAIWSEKALHGRHRSFLSQPHVDKIKSNEWLTRGELFPETEGFMLAIQDQVIATRNYRKYIMKDPNQQNDLCRHCNLASETIQHVTGACKSLAQTDYKHRHDQVSAIIHQHLAYRYSLVDQMIAYYKYKPETILENKNCKIYWDRTIVTDKTIHFNRPDITVHDKVNKIVYLIDIAIPNSHNIQSTISEKLSKYQDLAIEIKTQWRVQTVHIVPIVLSTTGIIPKTLTQSLNTLHMPAYTLHTLQKATILNTCRITRKFLTSSTLSSTYSI

SEQ ID NO: 30758 - protein, 1440 aa, Helias cama
MWGVFGCFPHALPLEDSWSCIIIIIITPPGDHLGVVGGLKGTEYRFTKRALYFKILTTFFSQPTIPNRERMKNTTKPRPQVPGGLSNLPDSDGSRAGAESRGVYNLRVRKPRQTTNACPKDSDSQNVKERSLSGSSSPSSSSLSLSQYTVSSSTIFDYPTSSQSSTIAPVSADVVQAAIADNLAPTTELKSARKRWSEEMNRFIWRTYLHITQVETINLKTYLDSLHQQFTAQFPNMQATRQRVGDQRRAIIRNKYLSQKVFEDIKTEVIEELTKSKTVTQVSFQESSQSINTTQRRRMLWSEELNESLIRCFFEVTELGTNLTAHRRSLRTRFIGRHPNLSHLSEQRISDQQRAIINNKYISDERLQQIKREVESNVAYKVSTSIISQPLSSPLHNEAVEIQQEQDIERAENEILQVNSNTTQHLDIHLQEYIRQQFSTNLERFSESDPISRPYIPKQKTSRKFAMIVDYINKNILPEHLSSELNFTNLQTLVYIGAFTAATCNGTKIGTCKENCSQKTTPVWQKRLENKIQMLRSDIGRLTQYIHGNTSRNITKTVNQIKLKYHTHAQHENTNSQLTDFLDTLKQKLNVASCRLRRYLVCTNRKRQNNNFNNNEKLFYRNLSTARTSSKAMDAPSANDLHHFWANIWENPVEHNKNADWICRSSTITSDVEMEFENIPMEVFLNVIKRSQNWKSPGTDNIHNYWYKKFTCAHKLIYDNINIFLQFPDVIPAYITHGLTYMLPKDLNDTKNPAKYRPITCLQTIYKILTGCVSEVIYEHLTKYNILTEEQKGCRKNSQGCKEQLTIDAIATNTAVAQKRDIHTMFIDYQKAYDSIPHSWLIEILHIYKIHPTITFFLQKSMQNWQTTLKIKHNTHLITTEPIHIQRGIFQGDALSPLWFCLALNPLSNLLKETNLGFAFENNASETKLSHLMYMDDIKIFASTKADLFNLADITQTFSRDIHMEFGVDKCKILSVHKGKIENNSYTLESGVAIEPLDQHSTYKYLGFKQSRKIHHNTIKVELTKQFKHRLSLILNTHLNAKNTIKAINTFAIPTLTYSFGIIRWSTTNLENLQRLINTHLTKYRKHHPRACSQRLTLSRQEGGRGLIDIKNLHNTQIATLRKYFHTKSEHSSLHKCTIEADNQLTPLNLKNKQSQANEQTIDAKTKIDSWREKALHGRHRAHLCQQYVDKEKSNEWLKRGELFPETEGFMIAIQDETIVTRNYKKYIIKDPNQGSDVCRHCNVAPETIQHITGGCRSLAQTDYKHRHDQVAAIIHQQIAFRHQLIPKMIPYYKYKPDSVLENHTHKLYWDRTIMTDKTIHFNRPDITLHDKLEQTVYLIDIAIPNSHNIQNTVAEKLSKYQDLAIELKTQWKVQKVQIIPIVLSSTGVIPKSLEQSLSTLKMPPYTLHMLQKATVLNTCRITRKFLTSSTISSASLTII

SEQ ID NO: 30759 - protein, 1417 aa, Amphipyra berbera
MRTLDNGGPPVLYTLATVNAGLCRGRLIRSLATRGNKMITRSKIKKTIQANLPYIDDETTQVSLSSSTKSLFPSIPSSSPPFCISPSPSSSTSIQSADVAQETNSVNEPVPTTSTSTARRKWSIEMNKFILRTYLHLTNMETDTNAYLPPLHTKFLEKYPNMQVSRQRVGDQRRAIIQKKLLPQKTIDQIYDEVRSELQIIQTQIQQHPTQYTIPVNTQSGTRMKWTNECNESIIRIYYRITQLETNKTAYRKYLYEEFINQYPDLSHITEQRLADQRRAIINNKYIKNDRLAEIKKQVAEELRHTNTQTENTNNEPLNIQPESNIEYPDEYSYTPSTSHINTINSYTLTNTLTTDVPLNNSAYTDLITQTLTDPQNTSEENLLNNIHIEQTDPTQTNLDVAPESNPEIDDTFQQAQQYFTDTHPTNRPYIPKQKTSRKFSATVKYINTIILPKYVNVDTDFNTLQNAIYCAAWTAAKCNGAKLSHLAQSEHRTRPHRKPNWQIRLEMKIGNLRANIGRLTQFIRGNRNRKVVAAVEAIKIKYQLHAQHENSNTQIDHFLDTLKQKLNAASSRLKRYKTCTDRKVQNTKFINNEKIFYRNLTSMNKDASSNQNIETPSPESLREFWANIWEIPVHHNTHADWINETPSQIPEMEFELIPIDTFIDVIKRTHNWKSPGTDNIHNYWYKKFTSIHPYIHNHINTFIRSPHLLPTYITHGITYMIPKDINDTINPAKYRPITCLQTLYKILTACISEVVYKHLTEHNILAEQQKGCRKNSQGCKEQLTIDAIVMNTAVKNKKDIHTMFIDYQKAFDSVPHSWLLHVLHLYKIHPTLISFLHTSMQNWQTVLKINQASATLTTEPISIQRGIFQGDALSPLWFCLALNPLSDLLDKTDVGFTLKNNDTQYTLTHLMYMDDIKLYAADKTSIFKLADTTQQFSQDIHMQFGVDKCKILSITKGKIQNNSYTLGSGESIEPMDEQSTYKYLGFKQSRQIQQKITKQELLKKFSYRLNLILKTHLNSRNTIKAINTFAIPILTYSFGIIQWSKTDIKKLQRTINTHFTKHRKHHPKSCIQRLTLPRQEGGRGLIDIHNLHNKQILSLRAYFHDKSEHSPLHKHTTNLDKKLTPLNLQDRNTQTNEHITSTQQKITAWADKALHGRHRAYLSLSHVDKEKSNEWLRRGELFPETEGFMLAIQDQIIATRNYRKYIIKDPNQPTDLCRHCNTASETIQHITGACKSLAQTDYKHRHDQVAAIIHQNLAYKNKLISEMNPYYKYKPETILENKNHKIYWDRTIITDKTIHYNRPDITVHDKTNKTVYLIDIAIPNSHNIQTTISDKLSKYQDLAIEIKTQWKAQTVHIVPVVLSSTGIIPKSLTQSLNTLHMPTYTLHMLQKATILNTCRITRKFLTSSTLASTYSI

SEQ ID NO: 30760 - protein, 1417 aa, Amphipyra berbera
MRTLDNGGPPVLYTLATVNAGLCRGRLIRSLATRGNKMITRSKIKKTIQANLPHIDDETTQVSLSSSTKSLFPSIPSSSPPFCISPPPSSSTSIQSADVAQETNSVNEPVPTTSTATARRKWSIEMNKFILRTYLHLTNMETDTNAYLPPLHTKFLEKYPNMQVSRQRVGDQRRAINQKKLLPQKTIDQIYDEVRSELQIIQTQIQQHPTQYTTPVNTQSGTRMKWTNECNESIIRIYYRITQLETNKTAYRKYLYEEFINQYPDLSHITEQRLADQRRAIINNKYIKNDRLAEIKKQVAEELRHTNTQTENTNNEPLNIQPESNIEYPDEYSYTPSTSHINTINSYTLTNTLTTDVPLNNSAYTDLITQTLTDPQNTSEENLLNNIHIEQTDPTQTNLDVAPESNPEIDDTFQQAQQYFTDTHPTNRPYIPKQKTSRKFSATVKYINTIILPKYVNVDTDFNTLQNAIYCAAWTAAKCNGAKLSHLAQSEHRTRPHRKPNWQIRLEMKIGKLRANIGRLTQFIRGNRNRKVVAAVEAIKIKYQLHAQHENSNTQIDHFLDTLKQKLNAASSRLKRYKTCTDRKVQNTKFINNEKIFYRNLTSMNKDASSNQNIETPSPESLREFWANIWEIPVHHNTHADWINETSSQIPEMEFELIPIDTFIDVIKRTHNWKSPGTDNIHNYWYKKFTSIHPYIHNHINTFIRSPHLLPTYITHGITYMIPKDINDTINPAKYRPITCLQTLYKILTACISEVVYKHLTEHNILAEQQKGCRKNSQGCKEQLTIDAIVMNTAVKNKKDIHTMFIDYQKAFDSVPHSWLLHVLHLYKIHPTLISFLHTSMQNWQTVLKINQASATLTTEPISIQRGIFQGDALSPLWFCLALNPLSDLLDKTDVGFTLKNNDTQYTLTHLMYMDDIKLYAADKTSIFKLADTTQQFSQDIHMQFGVDKCKILSITKGKIQNNSYTLGSGESIEPMDEQSTYKYLGFKQSRQIQQKITKQELLKKFSYRLNLILKTHLNSRNTIKAINTFAIPILTYSFGIIQWTKTDIKKLQRTINTHFTKHRKHHPKSCIQRLTLPRQEGGRGLIDIHNLHNKQILSLRAYFHDKSEHSPLHKHTTNLDKKLTPLNLQDRNTQTNEHITSTQQKITAWADKALHGRHRAYLSLSHVDKEKSNEWLRRGELFPETEGFMLAIQDQIIATRNYRKYIIKDPNQPTDLCRHCNTASETIQHITGACKSLAQTDYKHRHDQVAAIIHQNLAYKNKLISEVNPYYKYKPETILENRNHKIYWDRTIITDKTIHYNRPDITVHDKTNKTVYLIDIAIPNSHNIQTTISDKLSKYQDLAIEIKTQWKAQTVHIVPVVLSSTGIIPKSLTQSLNTLHMPTYTLHMLQKATILNTCRITRKFLTSSTLASTYSI

SEQ ID NO: 30761 - protein, 765 aa, Noctua janthe
MECEFIPIETFIDVIKRTHNWKSPGTDNIHNYWYKKFSSIHPFLYKHLNTFIKSPHLLPQYITYGVTYMIPKDTNDTKNPAKYRPITCLQTLYKILTACISEIVYEHLTKNNILAEQQKGCRKNSQGCKEQLTIDAITMNSAVKSRKDIHTMFIDYQKAFDSVPHSWLLHVLNLYKIHPTLKQFLETSMQNWQTVLKINSSSLTVATEPICIRRGIFQGDALSPLWFCMALNPLSHLLDQTGAGFSLESNNTQYTLTHLMYMDDIKLYAADKESLYQLADATQQFSNDICMSFGVDKCKILSIVKGKIQNNSYTLLSGASIEPIDEQSTYKYLGFKQSRQIQQKMSKQELLKKFSHRLNLILKSNLNSRNTIKAINTFAIPILTYSFGIIRWSKTDIKKLQRTIHTLLTKHRKHHPKSCIQRLTPPRQEGGRGLIDIHNLHNKQILSLRAYFHNKSETSSLHKQITETDNKLTPLNLQNRNTQINEHIVSAQQKIAAWSEKALHGRHRACLSQPHVDKIKSNEWLKRGELFPETEGFMLAIQDQIIATRNYRKYIIKDPNQPTDLCRHCNNASETIQHITGACKSLAQTDYKHRHDQVAAIIHQQLAFKYKLVSEMIPYYKYKPEIALENNDQKIYWDRTIITDKTIHYNRPDITVHDKTNKTVYLIDIAIPNTHNIQTTISEKLSKYQDLAIEIKTQWKVQTVHIVPIVLSSTGIIPKSLTQSLNTLQMPNHTLYMLQKATILNTCRITRNFLTSSTLSSTFSI

SEQ ID NO: 30762 - protein, 1373 aa, Acronicta aceris
MITRSKTKKSLQANRLNTDDEQMHVSSSSSTKSLFPSITSSSPSFCISPTPSSSISIQSTDVAQETKFVNKPVPTTSTATTRRKWSIEMNKFILRTYLHLTNMETDNNAYLPPLHTKFLEKYPNMQVSRQRIGDQRRAIVHKKLLPQETIDQIYNEVRAELQLIQTQIQQHSTQCSIPINTQLSQRMKWTNEYNEAIMTIYYRITQIETNKTAYRKHLHEEFINLYPNLTHITEQRLADQRRAIINNKYIKDARLSEIKKQVTEELLYTNTQLENNHEHSNTYFIEHSEERENTLNTQNTNTYESCSTYTADLPLNSSINTDEITQTPTDTQNTELTHTEDNFLNNINIGQLDSTQTQLDAATEINPELEDTFQQALKHFTNIHLTNRSYIPKQKSSKKFAAIVKYINTIVFPKYANGDTDFITLQNLIYCGAWTAAKCNGAKISLIPQIEHRTRTHRKPNWQIRLEKKIGNLRANIGRLTQYIRGNRSRKVIKAVEAIKTKYQLHAQYENSNTQLEHFLDTLKQKLNAASSRLKRYITCTNRKVQNTKFSNSEKTFYRNLTSQNSNQNIETPSADTLRDFWANLWENPVLHNQHANWINETETQITQMEFEFIPIETFIDVIKRTHNWKSPGTDNIHNYWYKKFTYLYPYIYNHLNTFIKSPHLLPAYITQGVTYMIPKDINDTVNPAKYRPITCLQTLYKILTACISEVISKHLTEHDILAEQQKGCRKKSQGCKEQLTIDAITMNSAVKNKKDIHTMFIDYQKAFDSVPHSWLIHVLNLYKIHPTLISFLKTSMLNWQTVLKINQISTTLTTEPISIQRGIFQGDALSPLWFCLALNPLSHLLNKTDVGFTLKNNGSQYTLSHLMYMDDIKLYANSKNTLYKLADTTQKFSQDICMQFGVDKCKILSVSKGKIQNNGYALEIGEVIEPMDEHSTYKYLGFKQTRQIQHKMIKQELLKKFTHRLNLVLKTHLNSKNIIKAINTFAIPILTYSFGIIQWSKSDIKQLQRTINTHLTKHRKHHPKSCIQRLTLPRQEGGRGLIDVHNLHNKQILSLRTYFHDKAAHSPLHKHAIETDKKLTPLNLQDKHTQANEQLISTQQKLALWADKALHGRHRAYLSLPHVDKSKSNEWLRRGELFPETEGFMLAIQDQIIATRNYRKFIIKDPNQPTDLCRHCNNASETIQHITGACKSLAQTDYKHRHDQVASIIHQHLAHKYKLITDMNPYYKYKPEIILENQHHKMYWDRTIITDKTIHYNRPDITVHDKANKIVYLIDIAIPNSHNIQSTISEKLNKYQDLAIEIKTQWKAQTVHIVPIVLSSTGIIPKSLTQSLNTLNMPTYTLHILQKATILNTCRITRKFLTSSTLSSTFSI

SEQ ID NO: 30763 - protein, 1356 aa, Ochropleura plecta
MNTRSKTKKQLQAKLPQIDDETSQPSSSSPSSLFPSIPSSSQSFRVTPTPSCSSISIQSADVVQETNSVDDTVPTAKAATSRRKWTIEMNKFILRTYLHLTTMETDKNAYLPPLHTKFLEKYPAMQVSRQRIGDQRRAIVQKKLLPQDTIDQIYEEVRSELQIIHTQIQQHSTQLCTQSGQRMRWTNEYNETIITIYYTITQLETNKTAYRKKLHEEFINTYPELAHITEQRLSDQVRAIINNKYIHENRLKEIKNQVTSELRNRNTNTQNIEDVNHYHRNTQTQDDSEQILADTPINFLTSNIILNNSIDSDIASRTVVNIDDENFLDNIHAGQFVRTQTNFDPVPEIESTFHQAQQNFNDTHPTNRPYIPKQKTSRKFSAIVTYINTVILPKHVNVDTEFTKLQTIIYCAAWTAATCNGAKISDSAQNERRPNTQRKPKWQIRLEKKIENLRANIGRLTHFNNGCRSPKLIAAVEDIKIKYQLHAQYENSNTQIAHFMDTLKQKLSATSSRLKRYITCTNRKIQNTKFINNEKIFYRNLTTNYRGTSNQSLETPTSETLRQFWANIWENPVQHNNRADWVNAATPEIPEMEFECIPIDTFIDVIKRTHNWKSPGSDNIHNYWYKKFSSLHPFLHNHLNSFIQSPQLLPQYITHGVTYMIPKDTNDTANPAKYRPITCLQTFYKILTACVSEIVYEHLTKNNILAEQQKGCRKNSQGCKEQLTIDGITMNSAVKSRKDIHTMFIDYQKAFDSVPHSWLLHVLSLYKIHPTLKQFLETSMQNWQTVLKINSSSTTVATEPIRIKRGIFQGDALSPLWFCMALNPLSLLLDKTGAGFTMENNNTQYTLTHLMYMDDIKLYAADIVALYQLADATQLFSDDICMSFGVDKCKILSIVKGKIQNNSYTLLSGESIEPMDEQSTYKYLGFKQSRQIQQKMSKQELLKKFSHRLNLILKSNLNSRNTVKAINTFAIPILTYSFGIIRWSKTDIKTLQRTIHTLLTKHRKHHPKSCIQRLTLPRQEGGRGLIDINNLHNKQILSLRAYFHNKSENSPLHKQVTEADKKLTPLNLQNRNTQINEHIVSTQQKITAWSEKALHGRHRAFLSQPHVDKIKSNEWLKRGELFPETEGFMLAIQDQIICTRNYRKYIMKDTNQPTDLCRHCNTASETIQHITGACTSLAQTDYKHRHDQVAAIIHQQLAFKYKLVNEMIPYYKYKPEVTLENNHQKLYWDRTIITDKTIHYNRPDITVHDKTNKTVYLIDIAIPNSHNIQTTISEKLSKYQDLAIEIKTQWRAQTVHIVPIVLSSTGIIPKSLTQSLNTLQMPTHTLYMLQKATILNTCRITRKFLTSSTISSTFSI

SEQ ID NO: 30764 - protein, 1401 aa, Craniophora ligustri
MQGSAVVDRKSLATRGINMITRSKTKKVIQANVPLIDDNHTQVSSSSSTISLIQSISSSSQFICVSPTPSTSTSIKSADVAQETIFVDKPVPTTSTVTTRRKWSSEMNEFILRTYLHLTNMETDINAYLSPLHVKFLEKYPNMQVSRQRIGDQRRAIVQKKLLPQTKINQIYDDVREELQLIHTHIQQHSTQLQISTNTQPTQRMKWTNAYNETIMRIYYKITQLETNKTAYRKALHEEFISLYPSFAHITEQRLSDQRRAIINNNYINNARLAEIKKQVAEELQYRNTQTEIIHNIQPNTYIQNSLEHADNYGLTLNTQNTNINIRSDTPINTQTTNFLSTNSIDSDIVAQTPLDTHNMENIQIEDNFLNNIDTGQTDSTPIHSNNIETNPDIENTFQQAQLYFADTHPTNRPYIPKQKTSRKFIAIVTYINNIIFPKYTNVNSDFITLQTIIYCGAWTAAKCNGAKISHIPQNENLTRSKRKPNWQIRLEKKIGSLRANIGRLTQYIRGNRSSKVVAAVEAIKTKYENHAQYENSNTEMVHFLDTLKQKLNAASSRLKRYITCTNRKAQNAKFVNNEKNFYRNLTSTNTDNSNQNLQTPPADTLRNFWADIWENPVLHNHHADYINETATDITHMEFEFIPIETFIDVIKRTHNWKSPGSDNIHNYWYKKFTNLHPYIHNHLNTFIQSPQLLPTYITHGVTYMIPKDKNDTLNPAKYRPITCLQTIYKILTACISEEVYKHLINNDILAEQQKGCRKNSQGCKEQLTIDAIIMNNAVKNKKDICTMFIDYQKAFDSVPHSWLLHVLNLYKIHPTLISFLKTSMLNWQTVLKINQASTTLTTEPIFIQRGIFQGDALSPLWFCLALNPLSYLLNKTSTGFTLTNNDTHYTLSHLMYMDDIKLYASDTISLNKLADITQQFSQDIRMQFGVDKCKMFSVTKGKIEYNRYTLESGESIEPMDEQSTYKYLGFKQSRQIHQKTTKQEMLKKFSHRLNLVLKTQLNSKCIIKAINTFAIPILTYSFGIIQWSKTDIKQLQRTINTHLTKHRKHHPKSCLQRLTLPRQEGGRGLIDVHNLHNKQIISLRAYFHDKAAHSPLHKHIIETDKKLTPLNLQDKNTQINEHLISTQQKHTLWSDKALHGRHRAYLSLPHVDKDKSNEWLRRGELFPETEGFMLAIQDQIIVTRNYRKYIIKDPNQPTDLCRHCNSASETIQHITGACKSLAQTDYKHRHDQVASIIHQHLAYKHKLILDMNPYYKYKPETVLENRHLKIYWDRTIITDKTIHYNRPDITVHDKTNKTVYLIDIAIPNSHNIQSTISEKLNKYQDLAIEIKTQWRAETVHIVPIVLSSTGIVPKSLTESLNILDMPTYTLHMLQKATILNTCRITRKFISSSTLSSTFSI

SEQ ID NO: 30765 - protein, 1422 aa, Noctua fimbriata
MPRAAWLGERLVASVPTLDNRGPPVLFSLAAVNAGLCCGRLFKSLATRGISMNTRSKTKKQLQAKLPQIDDETSQSSSSSPSSLFPSIPSSSQSFLVTPTPSSSSISIQSVDVVQETNFVDDTVPAARTVTSRRKWSIDMNKFILRTYLHLTHMETDKNAYLPSLHTKFLEKYPDMQVGRQRIGDQRRAIVQKKLLSQETIDQIYEEVRAELQIVHTQIQQHSTQPKAPINTQPGQRMKWTNEYNEAIIRIYYTTTQLETNKTAYRKHLHEGFINIYPELAHLTEQRVSDQVRAIINNKYIHTNRLDEIKNQVAIELRNSNTYTQNIQHINNDSQQPDENIHSLSTQYTNIHISGTTTNTATTNSVILLNNSSETNIASQTFINTDEENFLNHIDIGHHEPTQINSDASFEKNQEIETTFHQAQQLFSDTQPTNRPYIPKQRTSKKFSAIVTYINSVILTNCVNVDTDFIKLQNVIYCAAWTAATCNGAKILGTQNVSRTYIKRKPKWQIRLEKKIQNLRASIGRLTHFNNGSRSPKLIAAVKEIKKKYQLHAQYEDPNTQTTHFLDTLKQKLNAASSRLKRYLTCTNRKMQNSKFSNNEKVFYRNLATNNSDTTTQSLDTPAPEILREFWAHIWENPVCHNHQANWVNEPAPEIPEMEYDFIPIGTFIDVIKRTHNWKSPGTDNIHNYWYKKFTSIHPFLHNHLNTFIQSPNLLPPYLTHGVTYMIPKDISDTLNPAKYRPITCLQTLYKILTACVSEVLYEHLTKNNILAEQQKGCRKNSQGCKEQLTIDAITMNNAIKSKTDIHTMFIDYRKAFDSVPHSWLLHVLNLYKIHPTLKHFLETSMQNWQTVLKINSSSSSVATEPIRIKRGIFQGDALSPLWFCMALNPLSHLLDKTVGGFTLATNDTHYTLTHLLYMDDIKLYSADKNTLFQLADTTQQFSNDICMSFGVDKCKILSVVKGKVQNNSYILGSGESIEPMDEQSTYKYLGFNQSRQIQHKMIKQELLKKFSHRLNLILKTNLNSKNTVKAINTFAIPILTYSFGIIRWSKTDIRKLQRTINTTLTKHRKHHPKSSIQRLTLPRQEGGRGLIDIHNLHNKQILSLRAYFHNKSENSSLHKHVTEQDTKLTPLNLHNRNTQTNEILISTQEKIAAWSVKALHGRHRAYMSQPHVDKAKSNEWLKRGELFPETEGFMLAIQDQIIATRNYRKYIIKDPHQPTDLCRHCNTASETIQHITGACKSLAQTDYKHRHDQVAAIIHQQLAFKYKLISEMKPYYKYKPEIILDNNNQKIYWDRTIITDKTIHFNRPDITFHDKVSKTVYLIDIAIPNSHNIQTTISEKLSKYQDLAIEIKTQWEAQTVHIIPIVLSSTGIVPKSLMQSLNTLHMPPHTLQLLQKATILNTCRITRKFLTSSTISSTFSI

SEQ ID NO: 30766 - protein, 1398 aa, Spodoptera frugiperda
MPTLETGGPPVSFTLATVNAGLCCGRLFRSLATRGNHMITRSKLKKQSEATPQLDDESSQFSSSSSTSLFPSISSTSQSFCVSPTPSSSSTIQSVDVVQLANSVDEAVPTTKTAKTRRKWTTDMNEFILRNYLLLTNMETDKNAYLPSLHTKFLEKFPSMEVSRQRIGDQRRAIVQKKLLPQTTIDQIYEQVRTELQITPIRQQHSTITHVTPINNTQPNIQSGQRMKWTNEYNETIMKIYYKITYLETNKTAYRKSLHEQFITAFPELSHITEQRLSDQVRAIINNKYINVNRLAEIKKQVSEQLLQETDTNQHLSTHSYIAEYSDENIHTQPIISNTHTDMDTNNASQDTNTNTYTINPTHSPNIDDNFLNDIQLEQFDTIHTNTEINQEIENLFQQAHQYFADTDPTNRPYIPKQKTSRKFSATVNYINNNILPKYATIDTDFNNLQTIIYSAAWTAAKYNGAKITYTVQTERQTIHTRKRKWQTRLERKIKGLRANIGRLSQYIKGNRSPRLVAAVEIIKAKYRLHAQYENPNTQMTHFLDTMKQKLNAASSRLRRYLTCTNCKLENSRFANNEKLFYRNLTSTGTLTQNVETPSAETLREFWADIWENSVCHNHTADWIHQVDLEHEGMQFECIPIDLFLNVIKNTQNWKSPGTDHIHNYWYKKFTTLHPFLHNHLNTFIQSPHLLPTYITQGITYMIPKDTNDSTNPAKYRPITCLQTFYKIVTACISNIIYDHLTKHNILAEQQKGCRKYSQGCKEQLTIDAVVMNHAVKSKADIHTMFIDYQKAFDSVPHSWLLHVLNLYKIHPTIKSFLQSSMQNWQTVLKINQPSTTIITQPIHIKRGIFQGDALSPLWFCMALNPLSHLLNKTNAGYTLTNNSTQYTLSHLMYMDDIKLYAADEMLLSHLADVTQQFSTDICMLFGVDKCKVMSVVKGKFKNNSYTLETGQTIEPMEEHDTYKYLGFRQSRQIQHKNTRQELIKKFTHRLNLIVKTNLNAKNTIKAINTFAIPILTYSFGIIQWSKTNTRKLQRIINTTLTKHRKHHPKSCIQRLILPRKEGGRGLIDVQNLHNKQISSLRSYFHSKSEHSPLHRHVAETDKNFTPLNLHNRDPQTNEIIVTDEDKIAVWSQKALHGRHRSFLSQPHVDKIKSNEWLKRGELFPETEGFMLAIQDQIIATRNYRKFIMRDPNQQNDLCRHCNLASETIQHITGACKSLAQTDYKHRHDQVSAIIHQHLAYKYSLIDQMVAYYKYKPETILENRNYKIYWDRTIVTDKTIHFNRPDITVHDKINKTVYLIDIAIPNSHNIQSTISEKLSKYQDLAIEIKTQWRAQTVHIVPIVLSTTGIIPKSLTQSLNTLHMPTYTLHTLQKATILNTCRITRKFLTSSTLSSTYSI

SEQ ID NO: 30767 - protein, 1417 aa, Amphipyra berbera
MRTLDNGGPPVLYTLATVNAGLCRGRLIRSLATRGNKMITRSKIKKTIQANLPHIDDETTQVSLSSSTKSLFPSIPSSSPPFCISPSQSSSTSIQSADVAQETNSVIEPVPTTSTATARRKWSIEMNKFILRTYLHLTNMETDTNAYLPPLHTKFLEKYPNMQVSRQRVGDQRRAIIQKKLLPQKTIDQIYDEVRSELQIIQTQIQQHPTQYTTPVNTQSGTRMKWTNECNESIIRIYYRITQLETNKTAYRKYLYEEFINQYPDLSHITEQRLADQRRAIINNKYIKNDRLAEIKKQVAEELRHTNTQTENTNNEPLNIQPESNIEYPDEYSHTPSTLHINTINSYTLTNTLTTDVPLNNSAYTDLITQTLTDPQNTSEENLLNNIHIEQTEPTQTNLDVAPESNPEIDDTFQQAQQYFTDTHPTNRPYIPKQKTSRKFSATVKYINTIILPKYVNVVTDFNTLHNAIYCAAWTAAKCNGAKLSHLAQSEHQTRPHRKPNWQIRLEKKIGNLRANIGRLTQFIRGNRNRKVVAAVEAIKIKYQLHAQHENSNTQIDHFLDTLKQKLNATSSRLKRYKTCTDRKVQNTKFINNEKIFYRNLTSMNKDASSNQNIETPSPESLREFWANIWEIPVHHNTHADWINETSSQIPEMEFEFIPIDTFIDVIKRTHNWKSPGTDNIHNYWYKKFTSIHPYIHNHINTFIRSPHLLPPYITHGITYMIPKDINDTINPAKYRPITCLQTLYKILTACISEVVYKHLTEHNILAEQQKGCRKNSQGCKEQLTIDAIVMNTAVKNKKDIHTMFIDYQKAFDSVPHSWLLHVLHLYKIHPTLISFLHTSMQNWQTVLKINQASATLTTEPISIQRGIFQGDALSPLWFCLALNPLSDLLDKTDVGFTLKNNDTQYTLTHLMYMDDIKLYAADKTSIFKLANTTQQFSQDIHMQFGVDKCKILSITKGKIQNNSYTLGFGESIEPMDEQSTYKYLGFKQSRQIQQKITKQELLKKFSYRLNLILKTHLNSRNTIKAINTFAIPILTYSFGIIQWSKTDIKKLQRTINTHFTKHRKHHPKSCIQRLTLPRQEGGRGLIDIHNLHNKQILSLRAYFHDKSEHSPLHKHTTNLDKKLTPLNLQDRNTQTNEHITSTQQKITAWADKALHGRHRAYLSLSHVDKEKSNEWLRRGELFPETEGFMLAIQDQIIATRNYRKYIIKDPNQPTDLCRHCNTASETIQHITGACKSLAQTDYKHRHDQVAAIIHQNLAYKNKLISEMNPYYKYKPETILENRNHKIYWDRTIITDKTIHYNRPDITVHDKTNKTVYLIDIAIPNSHNIQTTISDKLSKYQDLAIEIKTQWKAQTVHIVPVVLSSTGIIPKSLTQSLNTLHMPTYTLHMLQKATILNTCRITRKFLTSSTLASTYSI

SEQ ID NO: 30768 - protein, 910 aa, Amphipyra berbera
MKIGKLRANIGRLTQFIRGNRNRKVVAAVEAIKIKYQLHAQHENSNTQIDHFLDTLKQKLNAASSRLKRYKTCTDRKVQNTKFINNEKIFYRNLTSMNKDASSNQNIETPSPESLREFWANIWEIPVHHNTHADWINETSSQIPEMEFELIPIDTFIDVIKRTHNWKSPGTDNIHNYWYKKFTSIHPYIHNHINTFIRSPHLLPTYITHGITYMIPKDINDTINPAKYRPITCLQTLYKILTACISEVVYKHLTEHNILAEQQKGCRKNSQGCKEQLTIDAIVMNTAVKNKKDIHTMFIDYQKAFDSVPHSWLLHVLHLYKIHPTLISFLHTSMQNWQTVLKINQASATLTTEPISIQRGIFQGDALSPLWFCLALNPLSDLLDKTDVGFTLKNNDTQYTLTHLMYMDDIKLYAADKTSIFKLADTTQQFSQDIHMQFGVDKCKILSITKGKIQNNSYTLGSGESIEPMDEQSTYKYLGFKQSRQIQQKITKQELLKKFSYRLNLILKTHLNSRNTIKAINTFAIPILTYSFGIIQWTKTDIKKLQRTINTHFTKHRKHHPKSCIQRLTLPRQEGGRGLIDLHNLHNKQILSLRAYFHDKSEHSPLHKHTTNLDKKLTPLNLQDRNTQTNEHITSTQQKITAWADKALHGRHRAYLSLSHVDKEKSNEWLRRGELFPETEGFMLAIQDQIIATRNYRKYIIKDPNQPTDLCRHCNTASETIQHITGACKSLAQTDYKHRHDQVAAIIHQNLAYKNKLISEVNPYYKYKPETILENRNHKIYWDRTIITDKTIHYNRPDITVHDKTNKTVYLIDIAIPNSHNIQTTISDKLSKYQDLAIEIKTQWKAQTVHIVPVVLSSTGIIPKSLTQSLNTLHMPTYTLHMLQKATILNTCRITRKFLTSSTLASTYSI

SEQ ID NO: 30769 - protein, 1416 aa, Noctua janthe
MPRAAWLGERLVASVPTLDNRGPPVLFTLATVNAGLCCGRPFKSLATRGINMNTRSKTKKQLQAKMPQIDDEISQPSSSSPSSLFPSIPSLSQSFRVTPTPSSSSISIQSADVVQETNFVDDTVPSAKAATSRRKWSIEMNKFILRTYLQLTSIETDKNAYLPPLHTKFLEKYPAMQVSRQRIGDQRRAIVQKKLLPQDTIDQIYEEVRAELQMIHTQIQQHSTQPSTQSGQRMRWTKEYNETLIRIYFTATQLETNKTAYRKKLHEEFINKYPELAHITEQRLSDQVRAIINNKYIHDNRLKEIKNQVASECRNSNTNTQSIEDINRDHWDTQTQDDSEQPATNTNFSDTPINILTTNIILNNSTDTNIVSQTVVNIDDENFLQNIDVGQFGPTQTNFDTATETNPEIESTFHQAQINFNCTHPTNRPYIPKQKTSRKFSAIVSYINTVILPKYVNANTEFTKLQTIIYCAAWTAATCNGAKISDLTQNERRPYTQTKPKWQIRLEKKIDNLRANIGRLTHFINGCRSKKLIAAVEEIKIKYQLHAQHENPNTEIAHFLDTLKQKLSAASSRLKRYITCTNRKVQNTRFINNEKVFYRNLTSNNKDITNQSLETPTPEILREFWANIWENPVHHNNHADWVKETTPEIPEMEFEFIPIETFIDVIKRTHNWKSPGTDNIHNYWYKKFSSIHPFLYNHLNTFIKSPHLLPQYITHGVTYMIPKDTNDTKNPAKYRPITCLQTLYKILTACISEIVYEHLTKNNILAEQQKGCRKNSQGCKEQLTIDAITMNSAVKSRKDIHTMFIDYQKAFDSVPHSWLLHVLNLYKIHPTLKQFLETSMQNWQTVLKINSSSSTVATEPICIRRGIFQGDALSPLWFCMALNPLSHLLDQTGAGFSLKSNNTQYTLTHLMYMDDIKLYAADKEALYQLADATQQFSNDICMSFGVDKCKILAIVKGKIQNNSYTLLSGASIEPIDEQSTYKYLGFKQSRQIQQKMSKQELLKKFSHRLNLILKSNLNSRNTIKAINTFAIPILTYSFGIIRWSKTDIKKLQRTIHTLLTKHRKHHPKSCIQRLTLPRQEGGRGLIDIHNLHNKQILSLRAYFHNKSETSSLHKQITETDNKLTPLNLQNRNTQINEHIVSAQQKIAAWSEKALHGRHRACLSQPHVDKIKSNEWLKRGELFPETEGFMLAIQDQIIATRNYRKYIIKDPNQPTDLCRHCNNASETIQHITGACKSLAQTDYKHRHDQVAAIIHQQLAFKYKLVSEMIPYYKYKPEVALENNDQKIYWDRTIITDKTIHYNRPDITVHDKTNKTVYLIDIAIPNTHNIQTTISEKLSKYQDLAIEIKTQWKVQTVHIVPIVLSSTGIIPKSLTQSLNTLQMPNHTLYMLQKATILNTCRITRKFLTSSTLSSTFSI

SEQ ID NO: 30770 - protein, 1364 aa, Noctua janthe
MNTRSKTKKQLQAKLPQIDDETSQPSSSSPSSLFPSIPSSSQSFRVTPTPSSSSISIQSVDVVQETNFVDDTVPTARTATSRRKWSTDMNKFILRTYLHLTHMETDKNAYLPSLHTKFLEKYPDMQVGRQRIGDQRRAIVQKKLLPQETIDQIYEEVRAELQIVHTQIQQHSTQSKTPINTQAGQRMKWTNEYNEAIIRIYYTSTELETNKTAYRKHLHEEFIKIYPELAHLTEQRLSDQVRAIINNKYIHTNRLEEIKNQVATELRNINTNTQNIEHINNDLQPPDENIHSLSTQYANIYTPTTSNSILLNNSSDTNIVSQTLINTVDESFLNHIDIGLFEPTQNNLNAAHEKNLEIEATFQQAQQLFSDTHPTSRPYIPKQKTSKKFSAIVTYINSVILPNNVNVDTDFIKMQTTIYCAAWTAATCNGAKISDTQNESRTYIKRKPKWQIRIEKKIQSLRSNIGRLTHFINGSRSPKLIAAVEEIKKKYQVHAQYEDSNTQLVHFLDTLKQKLNAASSRLKRYLKCTNRKVQNTKFINNEKIFYRNLATNNRDTSNQSLETPTSETLREFWANIWENPVNHNHQADWINEVTPEIPEMEFEFIPIGTFIDVIKRTHNWKSPGTDNIHNYWYKKFSSIHPFLHNHLNTFIHSPHLLPSYITHGVTYMIPKDINDTINPAKYRPITCLQTIYKILTACLSEVVYEHLTKNNILSEQQKGCRKNSQGCKEQLTIDAVTMNSAVKSKTDIHTMFIDYQKAFDSVPHSWLLNVLSLYKIHPTLKNFLQMSMQNWQTVLKINSSSSTVATEPIHIKRGIFQGDALSPLWFCMALNPLSHLLDKTATGFTLTNSNTQYTLTHLMYMDDIKLYAADKNALVVLADTTQQFSDDICMSFGVDKCKMLSVVKGKIQNNSYTLGSGQLIEPMDEQSTYKYLGFKQSRQIHQKMTKQELVNKYSHRLNLILKTNLNSKNTIKAINTFAIPILTYSFGIIRWSNTDIKKLQRTLNTSLTKYRKHHPKSSIHRLTLPRQEGGRGLIDIHNLHNKQIHSLRAYFHNKSESSALHKHVTENDTKLTPLNLHNRNTQINELVISTAEKIAAWSAKALHGRHRAYLSQPHVDKAKSNEWLKRGELFPETEGFMLAIQDQIIATRNYRKYIIKDPHQPTDLCRHCNTASETIQHITGACKSLAQTDYKHRHDQVASIIHQHLAFKYQLISEMKPYYKYKPELILDNNNQKIYWDRTIITDKTIHFNRPDITLHDKANKTVYLIDIAIPNSHNIQTTISEKLSKYQDLAIEIKTQWKAQTVHIVPIVLSSTGIVPKSLMQSLNTLHMPSHTLQLLQKATILNTCRITRKFLTSSTISSTFSI

SEQ ID NO: 30771 - protein, 1413 aa, Ochropleura plecta
MLRAAWLGERLVANVPTLDNRGPPVLFTLATVNAGLCCGRLCKSLASRGNNMNTRSKTKKILLANLPQMDDETSHFSTSSSSSLFPSIPSSSQSFRVTPTPSSPSISIQSVDVVQETNIVEDTVPTARTARSRRKWSIDMNKFILRTYLHLTHIETDKNAYLPSLHTKFLEKYPDMQVGRQRIGDQRRAIVQKKLLPQETIDQIYEEVRAELQIVHTQIQQHSTQSMTQNNTQPGQRMKWTNEYNEAIIRIYYTTTQLETNKTAYRKHLHEGFINIYPELAHLTEQRLSDQVRAIINNKYIHNDRLEEIKNQVALELRNNNINIEHVNNDLQQSDENVLSLNTQYTNIHISDTTNNIIVLNNNSDTNTVSQTPIHTVDENFLNHIDIGLFEPTQNNLDGAPEKNLEIEATFQQAQQLFSDTHPTSRPFIPKQKTSKKFSAIVTYINSIILPNIVNFDTDFIQLQTIIYCAAWTAATCNGAKISDTQNESRTYIKRKPKWQIRMDKKIQSLRANIGRLTHFINGSRSPKLIAAVEEIKKKYQIHAQYEDPNTQLVHFLDTLKQKLNASSSRLKRYLTCTNRKVQNSKFINNERTFYRNLTTNNTDTNNQNLETPTPESLREFWANIWENPVNHNHQADWINEVTPDTPEMEFEFIPIETFIDVIKRTHNWKSPGTDNIHNYWYKKFSSIHPFLHNHLNTFIQSPHLLPSYITHGVTYMIPKDSNDTINPAKYRPITCLQTLYKILTACLSEVVYEHLTKNNILSEQQKGCRKNSQGCKEQLTIDAVTMSSAVKSKTDIHTMFIDYQKAFDSVPHSWLLNVLSLYKIHPTLKHFLETTMQSWQTVLKINSLSSTVATEPIHIKRGIFQGDALSPLWFCMALNPLSHLLDKTEAGYALTNINTHYTLTHLMYMDDIKLYAADKNALFELADTTQQFSDDICMSFGVDKCKILSVVKGKIQNNSYTLGSGQIIEPIDELSSYKYLGFKQSRQIHQKMIKQELVNKFSHRLNLVLKTSLNSKNTIKAINTFAIPILTYSFGIIRWSNTDIKKLQRTVNTTLTKHRKHHPKSSIHRITLPRQEGGRGLIDIHNLHNKQVLSLRSYFHNKSENSKLHKHVTENDIKLTPLNLHNRNTQINEQLINTQEKIAAWSAKALHGRHRAFLSQPHVDKAKSNEWLKRGELFPETEGFMLAIQDQIIATRNYRKYIIKDPHQPTDLCRHCNTASETIQHITGACKSLAQTDYKHRHDQVAAIIHQQLAFQHKLVSEMKPYYKYKPEIILENNNHKIYWDRTIVTDKTIHFNRPDITLHDKVNKIVYLIDIAIPNSHNIQTTMSEKLNKYQDLAIEIKTQWKAQTVHIVPIVLSSTGIVPKSLTQSLNTLHIPSHTLHLLQKATILNTCRITRKFLTSSTISSTFSI

SEQ ID NO: 30772 - protein, 1360 aa, Mythimna impura
MNTRSKTKKLLASMPQIDDETIQPFSLSPSSLFPSITSSSQSFRVISTPSSSSIQSADVVQETNSVEDTVPTARTATSRRKWSIEMNEFILRTYLYLTNMDTDKNAYLPSLHTKFLEKYPDMQVSRQRIGDQRRAIIQKKLLPQNTIDQIYEEVRAELQMFYTQIQQHSTQSNTQFSQRMRWTNEHNEAIIRIYYTVTQLETNKTVYRKHLREEFINIYPELTHVTEQRLSDQVRAIINNVYIDTKRLEEIRNQVAIELENINNSTQNTEQTSGDHLNTQLQTESDLSDINENSPNTLITNTLTTNVALNNSSGGDVVLESLVNIEEDNNFLNNINISQSEPINFNSILDSSTEIEATFQQAQLNFIDTHPTNRPYIPKQKTSRKFSAIVNYINTVILPKHVNGDTEFIKLQTIIYCAAWTAAKCNGAKISDLTQSERRTYKYRKPKWQIRLEKKIENLRVNIGRHFINGSRSQKLVAAVEQIKLKYQLHAQHENSNTQIEHFLDTLKQKLSAASSRLKRYITCTNRKVQNAKFKNNEKIFYRNLTSNNRDITNESLDTPSPESLREFWANIWENPVYHNEHVDWVSHAATEIPDMEFEFIPIETFIEVIKRTHNWKSPGTDNIHNYWYKKFSSIHPFLYNHLNTFIQSPHLLPIYITHGVTYMIPKDINDTTNPAKYRPITCLQTLYKILTACVSEVVYEHLIKNNILAEQQKGCRKHSQGCKEQLTIDAIAMNSAVKCRKDIHTMFIDYQKAFDSVPHSWLLHVLNLYKIHPTLKQFLETSMQNWQTVLKIHSSSTTVATEPISIKRGIFQGDALSPLWFCMALNPLSHLLDKTDVGFPLVNHNTQYKLTHLMYMDDIKLYAADKGALFQLADTTQLFSDDICMSFGVDKCKILSVVKGKIQNNSYTLGSGESIDPMDEQSTYKYLGFKQSRQIQQKLSKQELLKKFSHRLNLILKSNLNSRNTIKAINTFAIPILTYSFGIIKWSKTDIKKLQRTVHILLTKHRKHHPKSCIQRLTLPRQEGGRGLIDIQNLHNKQIHSLRVYFHYKSENSLLHKQISDIDKKLTPLNLQNRNTQINEHITSTQQKIAAWSEKALHGRHRASLSQPHVDKLMSNEWLKRGELFPETEGFMLAIQDQIVTTRNYRKYIMKDQNQPTDFCRHCNSASETIQHITGACKSLVQTDYKHRHDQVAAIIHQHLAYKYKLVTEMMPYYKYTPEIILESKDIKIYWDRTIITDKTIHYNRPDITVHDKTNKTVYLIDIAIPNSHNVQTTISEKLSKYQDLAIEIKTQWKAQTVHIVPIVISSTGIIPKSLAQSLNTLQMPAQTLYMLQKATILNTCRITRKFLTSSTLTSTFSI

SEQ ID NO: 30773 - protein, 1401 aa, Craniophora ligustri
MQGSAVVDRKSLATRGINMITRSKTKKVIQANVPLIDDNHTQVSSSSSTISLIQSISSSSQFICVSPTPSTSTSIKSADVAQETIFVDKPVPTTSTVTTRRKWSSEMNEFILRTYLHLTNMETDINAYLSPLHVKFLEKYPNMQVSRQRIGDQRRAIVQKKLLPQTKINQIYDDVREELQLIHTHIQQHSTQLQISTNTQPTQRMKWTNAYNETIMRIYYKITQLETNKTAYRKALHEEFISLYPSFAHITEQRLSDQRRAIINNNYINNARLAEIKKQVAEELQYRNTQTEIIHNIQPNTYIQNSLEHADNYGLTLNTQNTNINIRSDTPINTQTTNFLSTNSIDSDIVAQTPLDTHNMENIQIEDNFLNNIDTGQTDSTPIHSNNIETNPDIENTFQQAQLYFADTHPTNRPYIPKQKTSRKFIAIVTYINNIIFPKYTNVNSDFITLQTIIYCGAWTAAKCNGAKISHIPQNENLTRSKRKPNWQIRLEKKIGSLRANIGRLTQYIRGNRSSKVVAAVEAIKTKYENHAQYENSNTEMVHFLDTLKQKLNAASSRLKRYITCTNRKAQNAKFVNNEKNFYRNLTSTNTDNSNQNLQTPPADTLRNFWADIWENPVLHNHHADYINETATDITHMEFEFIPIETFIDVIKRTHNWKSPGSDNIHNYWYKKFTNLHPYIHNHLNTFIQSPQLLPTYITHGVTYMIPKDKNDTLNPAKYRPITCLQTIYKILTACISEEVYKHLINNDILAEQQKGCRKNSQGCKEQLTIDAIIMNNAVKNKKDICTMFIDYQKAFDSVPHSWLLHVLNLYKIHPTLISFLKTSMLNWQTVLKINQASTTLTTEPIFIQRGIFQGDALSPLWFCLALNPLSYLLNKTSTGFTLTNNDTHYTLSHLMYMDDIKLYASDTISLNKLADITQQFSQDIRMQFGVDKCKMFSVTKGKIEYNRYTLESGESIEPMDEQSTYKYLGFKQSRQIHQKTTKQEMLKKFSHRLNLVLKTQLNSKCIIKAINTFAIPILTYSFGIIQWSKTDIKQLQRTINTHLTKHRKHHPKSCLQRLTLPRQEGGRGLIDVHNLHNKQIISLRAYFHDKAAHSPLHKHIIETDKKLTPLNLQDKNTQINEHLISTQQKHTLWSDKALHGRHRAYLSLPHVDKDKSNEWLRRGELFPETEGFMLAIQDQIIVTRNYRKYIIKDPNQPTDLCRHCNSASETIQHITGACKSLAQTDYKHRHDQVASIIHQHLAYKHKVILDMNPYYKYKPETVLENRHLKIYWDRTIITDKTIHYNRPDITVHDKTNKTVYLIDIAIPNSHNIQSTISEKLNKYQDLAIEIKTQWRAETVHIVPIVLSSTGIVPKSLTESLNILDMPTYTLHMLQKATILNTCRITRKFLSSSTLSSTFSI

SEQ ID NO: 30774 - protein, 1417 aa, Amphipyra berbera
MRTLDNGGPPVLYTLATVNAGLCRGRLIRSLATRGNKMITRSKIKKTIQANLPHIDDETTQVSLSSSTKSLFPSIPSSSPPFCISPSPSSSTSIQSADVAQETNSVNEPVPTTSTATARRKWSIEMNKFILRTYLHLTNMETDINAYLPPLHTKFLEKYPNMQVSRQRVGDQRRAIIQKKLLPQKTIDQIYDEVRSELQIIQTQIQQHPTQYTTPVNTQSGTRMKWTNECNESIIRIYYRITQLETNKTAYRKYLYEEFINQYPDLSHITEQRLADQRRAIINNKYIKNDRLAEIKKQVAEELRHTNTQTENTNNEPLNIQPESNIEYPDEYSYTPSTSHINTINSYTLTNTLTTDVPLNNSAYTDLITQTLTDPQNTSEENLLNNIHIEQTDPTQTNLDVAPESNPEIDDTFQQAQQYFTDTHPTNRPYIPKQKTSRKFSATVKYINTIILPKYVNVDTDFNTLQNAIYCAAWTAAKCNGAKLSHLAQSEHRTRPHRKPNWQIRLEMKIGNLRANIGRLTQFIRGNRNRKVVAAVEAIKIKYQLHAQHENSNTQIDHFLDTLKQKLNAASSRLKRYKTCTDRKVQNTKFINNEKIFYRNLTSMNKDASSNQNIETPSPESLREFWANIWEIPVHHNTHADWINETSSQIPEMEFELIPIDTFIDVIKRTHNWKSPGTDNIHNYWYKKFTSIHPYIHNHINTFIRSPHLLPTYITHGITYMIPKDINDTINPAKYRPITCLQTLYKILTACISEVVYKHLTEHNILAEQQKGCRKNSQGCKEQLTIDAIVMNTAVKNKKDIHTMFIDYQKAFDSVPHSWLLHVLHLYKIHPTLISFLHTSMQNWQTVLKINQASATLTTEPISIQRGIFQGDALSPLWFCLALNPLSDLLDKTDVGFTLKNNDTQYTLTHLMYMDDIKLYAADKTSIFKLADTTQQFSQDIHMQFGVDKCKILSITKGKIQNNSYTLGSGESIEPMDEQSTYKYLGFKQSRQIQQKITKQELLKKFSYRLNLILKTHLNSRNTIKAINTFAIPILTYSFGIIQWSKTDIKKLQRTINTHFTKHRKHHPKSCIQRLTLPRQEGGRGLIDIHNLHNKQILSLRAYFHDKSEHSPLHKHTTNLDKKLTPLNLQDRNTQTNEHITSTQQKITAWADKALHGRHRAYLSLSHVDKEKSNEWLRRGELFPETEGFMLAIQDQIIATRNYRKYIIKDPNQPTDLCRHCNTASETIQHITGACKSLAQTDYKHRHDQVAAIIHQNLAYKNKLISEMNPYYKYKPETILENRNHKIYWDRTIITDKTIHYNRPDITVHDKTNKTVYLIDIAIPNSHNIQTTISDKLSKYQDLAIEIKTQWKAQTVHIVPVVLSSTGIIPKSLTQSLNTLHMPTYTLHMLQKATILNTCRITRKFLTSSTLASTYSI

SEQ ID NO: 30775 - protein, 1362 aa, Ochropleura plecta
MNTRSKTKKQLQANLPQIDDKTSQPSSSSPSSLFPSIPSSSQSFRVTPTPSCSSISIQSADVVQETNSVDDTVPTAKAATRRRKWTIEMNKFILRTYLHLTTMETDKNAYLPPLHTKFLEKYPAMQVSRQRIGDQRRAIIQKKLLPQDTIDQIYEEVRSELQIIHTQIQQHSTQPCTQPGQRMRWTNECNETIITIYYTITQLETNKTAYRKKLHEEFIIKYPELAHITEQRLSDQVRAIINNKYIHENRLIEIKNQVTSELSNRNTNTQNIEDLNNYHRNSQTQDDSEQILATNTSFSDTPINSHMSNIILNNSIDSDIASRTVVNIDDENFLDNIHAGQFVPTQTNFDPVPEIESTFHQAQQNFNDTHPINRPYIPKQKTSRKFSAIVTYINTVILPKHLNVDTEFTKLQTIIYCAAWTAATCNGAKISDPAQNERRPNTQRKPKWQIRLEKKIENLRANIGRLTHFNNGCRSPKLIAAVEDIKIKYQLHAQYENSNTQIAHFMDTLKQKLSATSSRLKRYITCTNRKVQNTKFINNEKIFYRNLTSNNRDTTNQSLETPTSETLRQFWANIWENPVQHNNSADWVNEATPEIPEMEFEFIPIDTFIDVIKRTHNWKSPGSDNIHNYWYKKFSSLHPFLHNHLNTFIQSPHLLPQYITHGVTYMIPKDTNDTTNPAKYRPITCLQTIYKILTACVSEIVYEHLTKNNILAEQQKGCRKNSQGCKEQLTIDSITMNSAVKSRKDIHTMFIDYQKAFDSVPHSWLLHVLSLYKIHPTLKQFLETSMQNWQTVLKINSPSTTVTTEPIRIKRGIFQGDALSPLWFCMALNPLSLLLDKTGGGFTMENNNTQYTLTHLMYMDDIKLYADDEVALYQLADATQQFSDDICMSFGVDKCKILSIVKGKIQNNSYTLLSGESIEPMDEQSTYKYLGFKQSRQIQQKMSKQELLKKFSHRLNLILKSNLNSRNTVKAINTFAIPILTYSFGIIRWSKTDIKTLQRTIHTHLTKHRKHHPKSCIQRLTLPRQEGGRGLIDINNLHNKQILSLRAYFHNKSENSPIHKQVTEADKKLTPLNLQNRNTQINEHIVSTQQKITAWSEKALHGRHRACLSQPHVDKIKSNEWLKRGELFPETEGFMLAIQDQIISTRNYRKYIIKDTNQPTDLCRHCNTASETIQHITGACKSLAQTDYKHRHDQVAAIIHQQLAFKYKLVNEMIPYYKYKPEVTLENNHQKLYWDRTIITDKTIHYNRPDITVHDKTNKTVYLIDIAIPNSHNIQTTISEKLSKYQDLAIEIKTQWKAQTVHIVPIVLSSTGIIPKSLTQSLDTLQMPTHTLYMLQKATILNTCRITRKFLTSSTISSTFSI

SEQ ID NO: 30776 - protein, 765 aa, Xestia xanthographa
MEFEFIPIETFIDVIKRTHNWKSPGTDNIHNYWYKKFSSIHPFLYNHLNTFIQSPHLLPHYITHGVTYMIPKDTNDTKNPAKYRPITCLQTLYKILTACVSEIVYEHLTKNNILAEQQKGCRKNSQGCKEQLTIDAITMSSAVKSKKDIHTMFIDYQKAFDSVPHSWLLHVLNLYKIHPTLKQFLGTSMQNWQTVLKINSSSSTVATEPICIRRGIFQGDALSPLWFCMALNPLSHLLDQTGTGFTLDSNNTQYTLTHLMYMDDIKLYAADKEALYQLADATQQFSEDICMSFGVDKCKILSIVKGKFQNNSYTLLSGASIEPMDEQSTYKYLGFKQSRQIQQKMSKQELLKKFTHRLNLILKSNLNSRNTIKAINTFAIPILTYSFGIIRWSKTDIKKLQRTIHTLLTKHRKHHPKSCIQRLTLPRQEGGRGLIDIHNLHNKQILSLRAYFHNKSETSLLHKQVTETDNKLTPLNLQNRNTQINEHIVSTQQKITEWSEKALHGRHRACLSQPHVDKIKSNEWLKRGELFPETEGFMLAIQDQIIATRNYRKYIIKDPNQPSDLCRHCNNASETIQHITGACKSLAQTDYKHRHDQVAAIIHQQLAFKYKLVSEMIPYYKYKPEVALENNDQKIYWDRTIITDKTIHYNRPDITVHDKTNKTVYLIDIAIPNSHNIQATISEKLSKYQDLAIEIKTQWKVQTVHIVPIVLSSTGIIPKSLTQSLNTLQMPNHTLYMLQKATILNTCRITRKFLTSSTLSSTFSI

SEQ ID NO: 30777 - protein, 1322 aa, Xestia xanthographa
MPSSSPISIQSVDVVQETNFVDDTVPAARTATSRRKWSIDMNKFILRTYLYLTHMETDKNAYLPSLHTKFLEKYPDMQVSRQRIGDQRRAIVHKKLLPQETIDLIYEEVRVELQTVHTQIQQHSTQSKTPINTQPSQRMKWTNEYNEAVIRIYYTTTQLETNKTAYRKHLHEEFINIYPELAHLTEQRLSDQVRAIINNKYIHTNRLEEIKNQVASELRNNNTNTQHTELINNDLQQPDENMYSLSTQHTNINISDTTTNTPTTSNITLLNNSSDTNIVSQTHTVVDDNFLNHIDIGIFEPTQNNFDAAPEKNLEIEAAFQQAQQLFSNTHPTSRPYIPKQKTSKKFSLIVTYINSVILPNNVNVDTDFVKLQTAIYCAAWTAATCNGGKISDTQNESRTYIKRKPKWQIRIEKKILSLRANIGRLTHFINGSRSPKLIAAVEQIKKKYQVHAQYEDSNTQLVHFLDTLKQKLNAASSRLKRYLKCTNRKVQNTKFINNEKIFYRNLTTTNRDTTNQSLETPTSETLREFWANIWENPVNHNHQADWINEVTPDIPEMEFEFIPIGTFIDVIKRTHNWKSPGTDNIHNYWYKKFSSIHPFLHNHLNTFIHSPHLLPSYVTHGVTYMIPKDINDTINPANYRPITCLQTIYKILTACLSEVVYEHLTKHNILSEQQKGCRKNSQGCKEQLTIDAVTMNSAVKSKTDIHTMFIDYQKAFDSVPHSWLLDILSLYKIHPTLKHFLEISMQNWQTVLKINSSSSTVATEPIHIKRGIFQGDALSPLWFCMALNPLSHLLDKTDAGYTLTNITTHYTLTHLMYMDDIKLYAPDKNALFVLADTTQQFSDDICMSFGVDKCKILSVVKGKVQNNSYTLGSGQSIEPMDEQSAYKYLGFKQSRQIHQKMTKQELVNKFSYRINLILKTNLNSKNTIKAINTFAIPILTYSFGIIRWSNTDIKKLQRTINTSLTKHRKHHPKSSIQRLTLPRQEGGRGLIDIHNLHNKQIHSLRAYFHNKSENSPLHKHVTENDMKLTPLNLHNRNTQINELLITTQEKIAAWSAKALHGRHRAYLSQPHVDKAKSNEWLKRGELFPETEGFMLAIQDQIIATRNYRKYIIKDPHQPTDLCRHCNTASETIQHITGACKSLAQTDYKHRHDQVASIIHQHLAFKYKLISEMKPYYKYKPEITLENRNQKIYWDRTIITDKTIHFNRPDITLHDKTNKTVYLIDIAIPNSHNIQTTISEKLSKYQDLATEIKTQWEAQTVHIVPIVLSSTGVVPKSLTQSLNTLDISPHTLHLLQKATILNTCRITRKFLTSSTISSTFSI

SEQ ID NO: 30778 - protein, 1042 aa, Craniophora ligustri
MEIIQIEDNFLNNIDTGQTDSTLIHSNNIETNPDIENTFQQAQLYFADTHPTNRPYIPKQKTSRKFIAIVTYINNIIFPKYTNVNSDFITLQTIIYCGAWTAAKCNGAKISHIPQNENLTRSKRKPNWQIRLEKKIGSLRANIGRLTQYIRGNRSSKVVAAVEAIKTKYENHAQYENSNTEMVHFLDTLKQKLNAASSRLKRYITCTNRKAQNAKFVNNEKNFYRNLTSTNTDNSNQNLQTPPADTLRNFWADIWENPVLHNHHADYINETATDITHMEFEFIPIETFIDVIKRTHNWKSPGSDNIHNYWYKKFTNLHPYIHNHLNTFIQSPQLLPTYITHGVTYMIPKDKNDTLNPAKYRPITCLQTIYKILTACISEEVYKHLINNDILAEQQKGCRKNSQGCKEQLTIDAIIMNNAVKNKKDICTMFIDYQKAFDSVPHSWLLHVLNLYKIHPTLISFLKTSMLNWQTVLKINQASTTLTTEPISIQRGIFQGDALSPLWFCLALNPLSYLLNKTSTGFTLTNNDTHYTLSHLMYMDDIKLYASDTISLNKLADITQQFSQDIRMQFGVDKCKMFSVTKGKIEYNRYTLESGESIEPMDEQSTYKYLGFKQSRQIHQKTTKQEMLKKFSHRLNLVLKTQLNSKCIIKAINTFAIPILMYSFGIIQWSKTDIKQLQRTINTHLTKHRKHHPKSCLQRLTLPRQEGGRGLIDVHNLHNKQIISLRAYFHDKAAHSPLHKHIIETDKKLTPLNLQDKNTQINEHLISTQQKHTLWSDKALHGRHRAYLSLPHVDKDKSNEWLRRGELFPETEGFMLAIQDQIIVTRNYRKYIIKDPNQPTDLCRHCNSASETIQHITGACKSLAQTDYKHRHDQVASIIHQHLAYKHKLILDMNPYYKYKPETVLENRHLKIYWDRTIITDKTIHYNRPDITVHDKTNKTVYLIDIAIPNSHNIQSTISEKLNKYQDLAIEIKTQWRAETVHIVPIVLSSTGIVPKSLTESLNILDMPTYTLHMLQKATILNTCRITRKFLSSSTLSSTFSI

SEQ ID NO: 30779 - protein, 1364 aa, Noctua fimbriata
MNTRSKTKKQLQAKLPQIDDETSQPSSSSPSSLFPSIPSSSQSFRVTPTPSSSSISIQSVDVVQETNFVDDTVPAARTATSRRKWSTDMNKFILRTYLHLTHMETDKNAYLPSLHTKFLEKYPDMQVGRQRIGDQRRAIIQKKLLPQETIDQIYEEVRTELQVVHTQIQQNSTQSKTPINTQHGQRMKWTNEYNEAIIRIYYTSTELETNKTAYRKHLHEGFINIYPELAHLTEQRLSDQVRAIINNKYIHTNRLEEIKKQVATELRNINTNTQNIEHINNDLQQPDENIHSLSTQYTNIYTPTTSNRILLNNSSDTNIVSQTLTNTVDESFLNHIDIGLFEPTQNNLDAAPEKNLEIEATFQQAQQLFSDTHPTSRPYIPKQKTSKKFSAIVTYINSVILPNNVNVDTEFIKMQTTIYCAAWTAATCNGAKISDTQNESRTYIKRKPKWQIRIDKKIQSLRSNIGRLTHFINGSRSPKLIAAVEEIKKKYQVHAQYEDSNTQLVHFLDTLKQKLNAASSRLKRYLKCTNRKVQNTKFINNEKIFYRNLATNNRDTTNQSLETPRSETLREFWANIWENPVNHNHQADWINEITPEIPEMEFEFIPIGTFIDVIKRTHNWKSPGTDNIHNYWYKKFSCIHPFLHNHLNTFIHSPHLLPSYITHGVTYMIPKDINDTINPAKYRPITCLQTIYKILTACLSEVVYEHLTKNNILSEQQKGCRKNSQGCKEQLTIDAVTMNSAIKSKTDIHTMFIDYQKAFDSVPHSWLLNVLSLYKIHPTLKNFLEISMQNWQTVLKINSSSSTVATEPIHIKRGIFQGDALSPLWFCMALNPLSHLLDKTDAGYKLTNINTQYTLTHLMYMDDIKLYAADKNALVVLADTTQQFSDDICMSFGVDKCKMLSVVKGKIQNNSYTLGSGQLIEPMDEQSTYKYLGFKQSRQIHQKMTKQELVNKYSHRLNLILKTNLNSKNTIKAINTFAIPILTYSFGIIRWSNTDIKKLQRTLNTSLTKHRKHHPKSSIHRLTLPRQEGGRGLIDIHNLHNKQIHSLRAYFHNKAESSALHKHVTENDTKLTPLNLHNRNTQINERLISTPEKIAAWSAKALHGRHQAYLSQPHVDKAKSNEWLKRGELFPETEGFMLAIQDQIIATRNYRKYIIKDPHQPTDLCRHCNTVSETIQHITGACKSLAQTDYKHRHDQVAAIIHQHLAFKYKLISEMKPYYKYKPELILDNNNQKIYWDRTIITDKTIHFNRPDITLHDKVNKTVYLIDIAIPNSHNIQTTISEKLSKYQDLAIEIKTQWKAQTVHIVPIVLSSTGIVPKSLMQSLNTLHMPPHTLQLLQKATILNTCRITRKFLTSSTISSTFSI

SEQ ID NO: 30780 - protein, 829 aa, Omphaloscelis lunosa
MKFNNNEKIFYRNLTTNNRDTTNQTIETPSSETLREFWANIWENPVYHNNRTDWENETTREIPEMEFEFIPIDTFIDIIKRTHNWKSPGTDHIHNYWYKKFSSIHPFLHNHLNTFIQSPNLLPTYLTHGITYMIPKDMNDTINSAKYRPITCLQTLYKILTACVSEVIYEHLTKNNILAEQQKGCRKNSQGCKEQLTIDAITMNSAIKNRKDIHTMFIDYQKAFDSVPHSWLLKVLHLYKIHPTLKNFLETSMQNWQTVLKINSYSSTVATEPICIKRGIFQGDALSPLWFCMALNPLSHLLDKTDVGFTLKNNYAQYTLTHLMYMDDIKLYAADKKALFQLADTTQQFSDDICMSFGVDKCKILSVLKGKIQNNSYTLASGESIEPMDEQSTYKYLGFKQSRQIQQKISKQELHKKFSHRLNLILKSNLNSRNTIKAINTFAIPILTYSFGIIRWSKTDIKKLQYTVNTLLTKHRKHHPKSCIQRLTLSRQEGGRGLIDIHNLHNKQILSLRAYFHNKSEHSSLHKQVTDTDKKLTPLNLQNRNTQINEHIVSTQQKIAEWSAKALHGRHRAYLSQPHVDKVKSNEWLKRGELFPETEGFMLAIQDQIVATRNYRKYIIKDQHQPTDLCRHCNTASETIQHITGACKSLAQTDYKHRHDQVAAIIHQQLAYKYKLVNEMIPYYKYKPEIILESKDQKIYWDRTIITDKTIHYNRPDITVHDKTNKTVYLIDIAIPNSHNIQTTISEKLSKYQDLAIEIKTQWKAQTVHIVPVVLSSTGVIPKSLTQSLNTLQMPTHTLYMLQKATILNTCRITRKFLTSSTLSSTFSI

SEQ ID NO: 30781 - protein, 1398 aa, Spodoptera frugiperda
MPTLETRGPPVSFTLATVNAGLCCGRLFRSLATRGNHMITRSKLKKQSEAMPQLDDESSQFSSSSSTSLFPSISSRSQSFCVSPTPSSSSTIQSVDVVQLANSVDEAVPTTKTAKTRRKWTTDMNEFILRNYLLLTNMETDKNAYLPSLHTKFLEKFPSMEVSRQRIGDQRRAIVQKKLLPQTKIDQIYEQVRTELQITPIRQQHSTITHVTPINNTQPNVQPGQRMKWTKEYNETIMKIYYKITYLETNKTAYRKSLHEQFITFFPELSHITEQRLSDQVRAIINNKYINVNRLAEIKKQVSEQLLHETDTNQHLSTHSYISEYSDENIHTQPIISNTHTDMHTSNVSQDTNTNTDTITPTHSPNIDGNFLNDIHLEQFDTIHTNTEINQEIDDLFQQAHQYFTDTDPTNRPYIPKQKTSRKFSATVNYINNNILPKYATIDTDFNNLQTIIYSAAWTAAKYNGAKITYTVQTERQTINTRKRKWQIRLERKIKGLRANIGRLSQYIKGNRSPRLVAAVEIIKAKYRLHAQYENPNTQMTHFLDTMKQKLNAASSRLRRYLTCTNRKLENSRFANNEKFFYRNLTSSGTLTQNVQTPSAETLREFWADIWENPVCHNHTAAWIHDVDLEHEGMEYECIPIDIFLNVIKNTQNWKSPGTDHIHNYWYKKFTTLHPFLHNHLNTFIQSPHLLPTYITQGITYMIPKDTNDSTNPAKYRPITCLQTFYKILTACISNIIYDHLTKHDILAEQQKGCRKYSQGCKEQLTIDAVVMNHAVKSKTDIHTMFIDYQKAFDSVPHSWLLHVLNLYKIHPTIKSFLQSSMQNWQTILKINQSTTTIITQPINIKRGIFQGDALSPLWFCMALNPLSHLLNKTNAGYTLTNNSTQYTISHLMYMDDIKLYAADQMLLSHLADVTQQFSIDICMQFGVDKCKVMSVVKGKFENNSYTLETGQTIAPMEEYDTYKYLGFRQSRQIQHKNTRQELIKKFTHRLNLILKTNLNARNTIKAINTFAIPILTYSFGIIQWSKTNTRKLQRIINTTLTKHRKHHPKSCIQRLTLPRKEGGRGLIDIQNLHNKQISSLRTYFHSKSEHSPLHRQVAETDKNFTPLNLHNRDTQTNEIIVTDEDKIAVWSQKALHGRHRSFLSQPHVDKIKSNEWLKRGELFPETEGFMLAIQDQIIATRNYRKFIMRDPNQLNDLCRHCNLASETIQHITGACKSLAQTDYKHRHDQVSAIIHQHLAYKYSLIDQMVPYYKYKPETILENRNYKIYWDRTIVTDKTIHFNRPDITVHDKINKIVYLIDIAIPNSHNIQSTISEKLSKYQDLAIEIKTQWRAQTVHIVPIVLSTTGIIPKSLMQSLNTLHMPTYTLHTLQKATILNTCRITRKFLTSSTLSSTYSI

SEQ ID NO: 30782 - protein, 1359 aa, Toxidia parvulus
MESKTRPRPQVPGGSGYISDPDGSRDCTSSRGVYNLRARKTRQTTNACLKDTDLQREKEQSTSPSTTRSLFPSPTSSPHNWEYSTCNSRSSSITSLAVDVVQEAVADNIVPTTSHKRARKRWSEEMNRFIWRSYLRITHIETTNMKSYLESLHRQFSIRFPDMQATRQRVGDQRRAILRNKLLSQEILTQIRTEVISELNSSNAVSYTDSQNSHSQTHYSQDRYPVQTSERRKMTWSNVLNETLIRCFYEVTDLGKNLTAYRRNLRNKFLDAYPHLSHLSEQHISDQQRAIIKNKYISEEQLQQIRMEVESSLYSQSSVVAHNQAYIDRCLQDKSEIPQNEHPIEEEEFEPLHTQPDSHIQNITTKENRDCLDIQMRTKLELEFVKNLETFKNSDPTSRPYIPKQKTSKKLAMIVEHINNNILPETLTPDQDFNTLQTIIYTAAFTAATCNGTKIGTHKEYTRQNYKPSWQKRLEGKIQILRCHIGRLTQYIQGNRNKHVVKTVENIKIKYQIHARHENTNTKLKEFLDTLKQKLNTASSRLKRYLTCTYRKRQNRHFLNNEKIFYRNLNSSHSDSSKKTDTPTPDTLREFWANIWEKPVEHNRSAEWINRNMDVTRAQMEFKHIPKDIFIKVIKHTQNWKAPGTDNIHNFWYKKLTTTHLYIYNHLNNFLQSPNTMPTYITSGLTFMLPKDPNDTNNPANYRPITCLQTIYKILTACISELIYEYLSLHNILAEQQKGCRKNSQGCKEQLTIDAIAMNTAATQKRNIHTMFIDYQKAYDSIPHSWLIEILHIYRIHPTIISFLQTSMQSWQTSLKIRNNTQFITTRPIHIQRGIFQGDALSPLWFCLSLNPLSCLLNETKAGFKICTNVTDGTLTHLMYMDDIKLFAATKDELFQLADITQKFSKDVQMNFGVDKCKILSVHKGKIENNSYTLDTGVMIEPMNQYSTYKYLGFKQSRRIHHTKIKLELMKKFEHRLNLILKTHLNSRNIIKAINTYAIPILTYSFGIIRWSKTDLKKLQRTISKQLTKHKKHHPKACTQRLTLCRQEGGRGLIDIENLHNTQISILRRYFHSKSEQTSLHKYVTEADNKLTPLNLKNKQTQTNEHTNHAQDKIATWAGKVLHGRHRAQLCQQHVDKEKSNEWLRKGELFPETEGFMIAIQDETIVTRNYRKYIIKEPALTTDSCRHCNAASETIQHIIGGCRSLAQSDYKHRHDQVASIVHQQLAYRYKLIPKMIPYYKYKPEPVLEDRNHKIYWDRTIITDKTIHFNRPDITVHDKTHHTVFLIDIAIPNSHNIQSTTSEKLNKYQDLAIELRTQWKVKTVHIIPIVLSSTGIIPKSLTQSLNILNMPLPSQILVNY

SEQ ID NO: 30783 - protein, 1417 aa, Amphipyra berbera
MRTLDNGGPPVLYTLATVNAGLCRGRLIRSLATRGNKMITRSKIKKTIQANLPHIDDETTQVSLSSSTKSLFPSIPSSSPPFCISPSPSSSTSIQSADVAQETNSVNEPVPTTSTATARRKWSIEMNKFILRTYLHLTNMETDTNAYLPPLHTKFLEKYPNMQVSRQRVGDQRRAIIQKKLLPQKTIDQIYDEVRSELQIIQTQIQQHPTQYTTPVNTQSGTRMKWTNECNESIIRIYYRITQLETNKTAYRKYLYEEFINQYPDLSHITEQRLADQRRAIINNKYIKNDRLAEIKKQVAEELRHTNTQTENTNNEPLNIQPESNIEYPDEYSYTPSTSHINTINSYTLTNTLTTDVPLNNSAYTDLITQTLTDPQNTSEENLLNNIHIEQTDPTQTNLDVAPESNPEIDDTFQQAQQYFTDTHPTNRPYIPKQKTSRKFSATVKYINTIILPKYVNVDTDFNTLQNAIYCAAWTAAKCNGAKLSHLAQSEHRTRPHRKPNWQIRLEMKIGNLRANIGRLTQFIRGNRNRKVVAAVEAIKIKYQLHAQHENSNTQIDHFLDTLKQKLNAASSRLKRYKTCTDRKVQNTKFINNEKIFYRNLTSMNKDASSNQNIETPSPESLREFWANIWEIPVHHNTHADWINETSSQIPEMEFELIPIDTFIDVIKRTHNWKSPGTDNIHNYWYKKFTSIHPYIHNHINTFIRSPHLLPTYITHGITYMIPKDINDTINPAKYRPITCLQTLYKILTACISEVVYKHLTEHNILAEQQKGCRKNSQGCKEQLTIDAIVMNTAVKNKKDIHTMFIDYQKAFDSVPHSWLLHVLHLYKIHPTLISFLHTSMQNWQTVLKINQASATLTTEPISIQRGIFQGDALSPLWFCLALNPLSDLLDKTDVGFTLKNNDTQYTLTHLMYMDDIKLYAADKTSIFKLADTTQQFSQDIHMQFGVDKCKILSITKGKIQNNSYTLGSGESIEPMDEQSTYKYLGFKQSRQIQQKITKQELLKKFSYRLNLILKTHLNSRNTIKAINTFAIPILTYSFGIIQWSKTDIKKLQRTINTHFTKHRKHHPKSCIQRLTLPRQEGGRGLIDIHNLHNKQILSLRAYFHDKSEHSPLHKHTTNLDKKLTPLNLQDRNTQTNEHITSTQQKITAWADKALHGRHRAYLSLSHVDKEKSNEWLRRGELFPETEGFMLAIQDQIIATRNYRKYIIKDPNQPTDLCRHCNTASETIQHITGACKSLAQTDYKHRHDQVAAIIHQNLAYKNKLISEMNPYYKYKPETILENRNHKIYWDRTIITDKTIHYNRPDITVHDKTNKTVYLIDIAIPNSHNIQTTISDKLSKYQDLAIEIKTQWKAQTVHIVPVVLSSTGIIPKSLTQSLNTLHMPTYTLHMLQKATILNTCRITRKFLTSSTLASTYSI

SEQ ID NO: 30784 - protein, 1334 aa, Noctua janthe
MNKFILRTYLHLTHMETDKNAYLPSLHTSVDVVQETNFVDDTVPTARTATSRRKWSTDMNKFILRTYLHLTHMETDKNAYLPSLHTKFLEKYPDMQVGRQRIGDQRRAIVQKKLLPQETIDQIYEEVRAELQIVHTQIQQHSTQSKTPINTQAGQRMKWTNEYNEAIIRIYYTSTELETNKTAYRKHLHEEFINIYPELAHLTEQRLSDQVRAIINNKYIHTNRLEEIKNQVATELRNINTNAQNIEHINNDLQPPDENIHSLSTQYANIYTPTTSNSILLNNSSNTNIVSQTLINTVDESFLNHIDIGLFEPTQNNLNAAHEKNLEIEATFQQAQQLFSDTHPTSRPYIPKQKTSKKFSAIVTYINSVILPNNVNVDTDFIKMQTTIYCAAWTAATCNGAKISDTQNESRTYIKRKPKWQIRIEKKIQSLRSNIGRLTHFINGSRSPKLIAAVEEIKKKYQVHAQYEDSNTQLVHFLDTLKQKLNAASSRLKRYLKCTNRKVQNTTFINNEKIFYRNLATNNRDTSNQSLETPTSETLREFWANIWENPVNHNHQADWINEVTPEIPEMEFEFIPIGTFIDVIKRTHNWKSPGTDNIHNYWYKKFSSIHPFLHNHLNTFIHSPHLLPSYITHGVTYMIPKDINDTINPAKYRPITCLQTIYKILTACLSEVVYEHLTKNNILSEQQKGCRKNSQGCKEQLTIDAVTMNNAVKSKTDIHTMFIDYQKAFDSVPHSWLLNVLSLYKIHPTLKNFLQMSMQNWQTVLKINSSSSTVATEPIHIKRGIFQGDALSPLWFCMALNPLSHLLDKTATGFTLTNSNTQYTLTHLMYMDDIKLYAADKNALVVLADTTQQFSDDICMSFGVDKCKMLSVVKGKIQNNSYTLGSGQLIEPLDEQSTYKYLGFKQSRQIHQKMTKQELVNKYSHRLNLILKTNLNSKNTIKAINTFAIPILTYSFGIIRWSNTDIKKLQRTLNTSLTKYRTHHPKSSIHRLTLPRQEGGRGLIDIHNLHNKQIHSLRAYFHNKSESSALHKHVTENDTKLTPLNLHNRNTQINELVISTAEKIAAWSAKALHGRHRAYLSQPHVDKAKSNEWLKRGELFPETEGFMLAIQDQIIATRNYRKYIIKDPHQPTDLCRHCNTASETIQHITGACKSLAQTDYKHRHDQVASIIHQHLAFKYQLISEMKPYYKYKPELILDNNNQKIYWDRTIITDKTIHFNRPDITLHDKANKTVYLIDIAIPNSHNIQTTISEKLSKYQDLAIEIKTQWKAQTVHIVPIVLSSTGIVPKSLMQSLNTLHIPSHTLQLLQKATILNTCRITRKFLTSSTISSTFSI

SEQ ID NO: 30785 - protein, 1194 aa, Eupsilia transversa
MKWTNEYNEAIIRIYYTTTQLETNKTAYRKKLQEGFINIYPELAHISEQRLSDQVRAIINNKYIQPYRLEEIKNQVATELKNNNTNAQSIEQFNNDYLNTQTQNDLEQPNENVHSLNTQHTHFDISDTTINTPTTDNIFLNNSSDTAIFSRTVINTDEENFLNEIDIGQLEPTQTNFDAAPETNPEIEATFKQAQQCFSDTHPTNRPYIPKQKTSKNFSAIVSYINTIILPKYANVDTDFMTLQTLIYCAAWTAATCNGAKISHSTQNDRRTYKHRKPKWQIRIEKKIENLRANIGRLTHFINGCRSQKLIAAIEEIKKKYQIHAQHEDSNTQIEHFLDTLKQKLNAASSRLKRYVTCTNRKVQNTKFINNEKVFYRNLASNNRDTTNQSLETPSSETLREFWANIWENPVYHNHQADWATEAPTAIPEMEFELIPIGIFIDVIKRTHNWKSPGTDNIHNYWYKKFSSIHPFLYNHLNTFIQSPHLLPPYITHGVSYMIPKDMNDTINPAKYRPITCLQTLYKILTACLSEVVYEHLTKNNILAEQQKGCRKNSQGCKEQLTIDAIIMNTAVKSKTDIHTMFIDYQKAFDSVPHSWLLQVLNTYKIHPTLTQFLKTSMQNWQTVLKINASSSTVTTEPIRIKRGIFQGDALSPLWFCMALNPLSYLLDKTDAGFTLANNTTQYKLTHLMYMDDIKLYAADKTSLHQLADTTQQFSEDICMSFGVDKCKILSVVKGKVQNNSYILETGESIEPMDEKSTYKYLGFKQTRQIQHKMIKQELVKKFSHRINLILKTHLNSKNTIKAINTFAIPILTYSFGIIRWSKTDIKRLQRIINTSLTKHRKHHPKSSIQRLTLPRQEGGRGLIDLHNLHNKQIFSLRAYFHNKSESSSLHKHVTEKDKKLTPLNLQNKNTQTNEQIIDTQQKIAEWSAKALHGRHRAYLSQPHVDKAKSNEWLKRGELFPETEGFMLAIQDQIIATRNYRKYIIKDPRQPTDLCRHCNNASETIQHITGACKSLAQTDYKHRHDQVAAIIHQHLAYKYKFISEMIPYYKYKPEIILENRNQKIYWDRTIITDKTIHFNRPDITVHDKTNKEVYLIDIAIPNSHNIQTTISEKLSKYQDLAIEIKTQWKAQTVHIVPIVLSSTGIVPKSLTQSLNTLHMPTHTLHLIQKATILNTCRITRKFLTSSTISSSFSI

SEQ ID NO: 30786 - protein, 1362 aa, Ochropleura plecta
MNTRSKTKKQLQANLPQIDDETSQPSSSSPSSLFPSIPSSSQSFRVTPTPSCSSISIQSADVVQETNSVDDTVPTAKAATRRRKWTIEMNKFILRTYLHLTTMETDKNAYLPPLHTKFLEKYPAMQVSRQRIGDQRRAIIQKKLLPQDTIDQIYEEVRSELQIIHTQIQQHSTQPCTQAGQRMRWTNECNETIITIYYTITQLETNKTAYRKKLHEEFIIKYPDLAHITEQRLSDQVRAIINNKYIHENRLIEIKNQITSELSNRNTNTQNIEDLNNYHRNSQTQDDSEQILATNTSFFDTPINSHMSNRILNNSIDSDIASRTVVNIDDENFLNNIHAGQFVPTQTNFDPVPEIESTFHQAQQNFNDTHPINRPYIPKQKTSRKFSAIVTYINTVILPKHLNVDTEFTKLQTIIYCAAWTAATCNGAKISDPAQNERRPNTQRKPKWQIRLEKKIENLRANIGRLTHFNNGCRSPKLIAAVEDIKIKYQLHAQYENSNTQIAHFMDTLKQKLSATSSRLKRYITCTNRKVQNTKFINNEKIFYRNLTSNNRDTTNQSLATPTSETLRQFWANIWENPVQHNNRADWVNEATPEIPEMEFEFIPIDTFIDVIKRTHNWKSPGSDNIHNYWYKKFSSLHPFLHNHLNTFIQSPHLLPQYITHGVTYMIPKDMNDTTNPAKYRPITCLQTIYKILTACVSEIVYEHLTKNNILAEQQKGCRKNSQGCKEQLTIDSITMNSAVKSRKDIHTMFIDYQKAFDSVPHSWLLHVLSLYKIHPTLKQFLEASMQNWQTVLKINSSSTTVATEPIRIKRGIFQGDALSPLWFCMALNPLSLLLDKTGAGFTMENNNTQYTLTHLMYMDDIKLYAADIVALYQLADATQQFSDDICMSFGVDKCKILSIVKGKIQNNSYTLQSGESIEPMDEQSTYKYLGFKQSRQIQQKMSKQELLKKFSHRLNLILKSNLNSRNTVKAINTFAIPILTYSFGIIRWSKTDIKTLQRTVHTLLTKHRKHHPKSCIQRLTLPRQEGGRGLIDINNLHNKQILSLRAYFHNKSENSPLHKQVTEADKKLTPLNLQNRNTQINEHIVSTQQKITAWSEKALHGRHRAFLSQPHVDKIKSNEWLKRGELFPETEGFMLAIQDQIISTRNYRKYIMKDTNQPTDLCRHCNTVSETIQHITGACKSLAQTDYKHRHDQVAAIIHQQLAFKYKLVNEMIPYYKYKPEVTLENNHQKLYWDRTIITDKTIHYNRPDITVHDKTNKTVYLIDIAIPNSHNIQSTISEKLSKYQDLAIEIKTQWRAQTVHIVPIVLSSTGIIPKSLTQSLNTLQMPTHTLYMLQKATILNTCRITRKFLTSSTISSTFSI

SEQ ID NO: 30787 - protein, 1381 aa, Ochropleura plecta
MNTRSKSKKQLQANLPQVDDENSQFSSSSPSSLFSSIPSSSQSFRVTPTQSSSSISVQSVDVVQETNFVDDTVPATKTATTRRKWSIEMNKFILRTYLHLTHMESDKNAYLPSLHTQFLEKYPDMQVGRQRIGDQRRAIVQKKLLPQETIDQIYEEVRTELEMVHTQIQLHSTQARTTTINTQSGQRMKWTKEYNESVMRVYYTVTQLEANKTGYRKQLHEEFINTYPELSHLTEQRLSDQVRAIINNKYIHITRLEEIKKQIAEELSINNTSTQNNDDINNVNLNTQSQNVLVQSDEYIHTENTQFTNTHIFDAPANTVTRDIFSNDSIDDPSVMPSTPQNTDGDNFLNSIEIGLAGSTQINNGALLETNPEIETTFEQAQQLFSETHPTDRPYIPKQRTSRKFSAIVTYINNIILPKIVNKDTEFIQLQTIIYCAAWTAAKCNGAKILDYSQSERRTYKLRKPNWQKRLEKKIANLRANIGRLTHFMNGSRSQKLITAVEAIKTKYKLHAQHENSNTRLEHFLDTLKQKLSAAASRLKRYITCTNRKMENTKFCNNERIFYRNLASNNRDTSTQTVETPPPGALRDFWANIWENPVHHNYHADWIKEVTPEIPAMEFDSIPINTFIDVIKRTHNWKSPGTDNIHNYWYKKFTSIYPFLYHHLNTFIQSPHLLPTYITHGVTYMIPKDMTNTTDPAKYRPITCLQTLYKILTACISEKIYEHLAKHNILAEQQKGCRKNSQGCKEQLTIDAVAMNSAVKSKKDIYTMFIDYQKAYDSVPHSWLIHILNIYNIHPTLRIFLESTMQNWKTALKINQASTTLATEPIQIKRGIFQGDALSPLWFCMALNPLSHLLDKTNVGFTLTNDNAQFTLTHLMYMDDIKLYAADKNSLFYLADTTQEFSNDISMQFGVDKCKILSVSAGKIQSNSYSLGSGESIEAMDEHSTYKYLGFKQSRQIEQKMTKVELMKKFTHRLNLILKSNLNSRNTIKAINTFAIPVLTYSFGIIRWSKTDIRKLQRTINTLLTKHRKHHPKSCIQRLTLPRQEGGRGLVDIHNLHNKQILSLRSYFHNKSVHSSLHKHVTEADKKLTPLNLQSRNTQINESITSTQQKIAVWSGKSLHGRHRACLSQPHVDKAKSNEWLKRGELFPETEGFMLAIQDQIIATRNYRKYIMKDSNQPTDMCRHCNSASETIQHITGACKSLAQTDYKHRHDQVAAIIHQHLAHKYNLVGEMTPYYKYKPEVILENRNQKIYWDRTIITDKTIHYNRPDITVHDKINKTVYLIDIAIPNSHNIQTTISEKLSKYQDLAIEIKTQWNAQTVHIVPIVLSSTGVIPKSLTQSLSTLNMPSQTLYMLQKATILNTCRITRKFLTSSTLSSTFSI

SEQ ID NO: 30788 - protein, 765 aa, Xestia xanthographa
MEFEFIPIETFIDVIKRTHNWKSPGTDNIHNYWYKKFSSIHPFLYNHLNTFIQSPHLLPQYITHGVTYMIPKDTNDTKNPAKYRPITCLQTLYKILTACVSEIVYEHLTKNNILAEQQKGCRKNSQGCKEQLTIDAITMSSAVKSKKDIHTMFIDYQKAFDSVPHSWLLHVLNLYKIHPTLKQFLGTSMQNWQTVLKINSSSSTVATEPICIRRGIFQGDALSPLWFCMALNPLSHLLDQTGTGFTLDSNNTQYTLTHLMYMDDIKLYATDKEELYQLADATQQFSEDICMSFGVDKCKILSIVKGKFQNNSYTLLSGASIEPMDEQSTYKYLGFKQSRQIQLKMSKQELLKKFTHRLNLILKSNLNSRNTIKAINTFAIPILTYSFGIIRWSKTDIKKLQRTIHTLLTKHRKHHPKSCIQRLTLPRQEGGRGLIDIHNLHNKQILSLRAYFHNKSETSSLHKQVTETDNKLTPLNLQNRNIQINEHIVSTQQKIAEWSEKALHGRHRACLSQPHVDKIKSNEWLKRGELFPETEGFMLAIQDQIIATRNYRKYIIKDPNQPTDLCRHCNNASETIQHITGACKSLAQTDYKHRHDQVAAIIHQQLAFKYKLVPEMIPYYKYKPEVALENNDQKIYWDRTIITDKTIHYNRPDITVHDKTNKTVYLIDIAIPNSHNIQATISEKLSKYQDLAIEIKTQWKVQTVHIVPIVLSSTGIIPKSLTQSLNTLQMPNHTLYMLQKATILNTCRITRKFLTSSTLSSTFSI

SEQ ID NO: 30789 - protein, 1365 aa, Xestia xanthographa
MNTRSKTKKQLQAKLPHIDDETSQPSSSSPSSLFPSIPSSSQSFRVTPTPSSSSISIQSADVVQETDFVDDTVPSAKAATSRRKWSIEMNKFILRTYLHLTSMETDKNAYLPPLHTKFIEKYPAMQVSRQRIGDQRRAIVQKKLLPQDTIDQIYEEVRAELQIIHTQIQQHSTQPSTQSGQRMRWTNEYNETIIRIYFTATQLETNKTAYRKKLHEEFINKYPELAHITEQRLSDQVRAIIKNKYIHDNRLEEIKNQVASELSNSNSYTQNIEDINHDHWNTQTQNDSEQPATNTNFFDTPNNTLTTNIILNNSTDTNIVSQTVVNIDDEIFLNNIDVGQYGPAQTNFDTTPETNPEIESRFHQAQINFNCTHPTNRPYIPKQKTSRKFSAIVSYINTVILPKHVNADTEFAKLQTIIYCAAWTAATCNGAKISDPIQNERRPYTQRKPKWHIRLEKKIENLRANIGRLTHFINGCRSQKLIAAVEEIKIKYQLHAQYENPNTELAHFLDTLKQKLSAASSRLKRYITCTNRKVENTKFINNEKFFYRNLTSNNKDNTNQSLETPTSETLREFWANIWENPVHHNNHADWVKEATPEIPEMEFEFIPIETFIDVIKRTHNWKSPGTDNIHNYWYKKFSSIHPFLYNHLNTFIQSPHLLPQYITHGVTYMIPKDTNDTKNPAKYRPITCLQTLYKILTACVSDIVYEHLTKNNILAEQQKGCRKNSQGCKEQLTIDAITMSSAVKSKKDIHTMFIDYQKAFDSVPHSWLLHVLNLYKIHPTLKQFLGTSMQNWQTVLKINSSSSTVATEPICIRRGIFQGDALSPLWFCMALNPLSHLLDQTGTGFTLDSNNTQYTLTHLMYMDDIKLYATDKEELYQLADATQQFSEDICMSFGVDKCKILSIVKGKFQNNSYTLLSGASIEPMDEQSTYKYLGFKQSRQIQQKMSKQELLKKFTHRLNLILKSNLNSRNTIKAINTFAIPILTYSFGIIRWSKTDIKKLQRTIHTLLTKHRKHHPKSCIQRLTLPRQEGGRGLIDIHNLHNKQILSLRAYFHNKSETSSLHKQVTETDNKLTPLNLQNRNIQINEHIVSTQQKIAEWSEKALHGRHRACLSQPHVDKIKSNEWLKRGELFPETEGFMLAIQDQIIATRNYSKYIIKDPNQPTDLCRHCNNASETIQHITGACKSLAQTDYKHRHDQVAAIIHQQLAFKYKLVPEMIPYYKYKPEVALENNDQKIYWDRTIITDKTIHYNRPDITVHDKTNKTVYLIDIAIPNSHNIQATISEKLSKYQDLAIEIKTQWKVQTVHIVPIVLSSTGIIPKSLTQSLNTLQMPNHTLYMLQKATILNTCRITRKFLTSSTLSSTFSI

SEQ ID NO: 30790 - protein, 1398 aa, Spodoptera frugiperda
MPTLEIRGPPVSFTLATVNAGLCCGRLFRSLATRGNHMITRSKLKKQSEATLQLDDESSQFSSSSSTSLFPSISSTSQSFCVSPTPSSSSTIQSVDVVQLANSVDEAVPTTKTAKTRRKWTTDMNEFILRNYLLLTNMDTDKNAYLPSLHTKFLEKFPSMEVSRQRIGDQRRAIVQKKLLPQTTIDQIYEQVRTELQITPIRQKHSTITHVTPINNTQPNIQPGQRMKWTNEYNETIMKIYYKITYLETNKTAYRKSLHEQFITAFPELSHITEQRLSDQVRAIINNKYINVNRLTEIKKQVSEQLLQETDTNQHLSTHSYISEYSDENIHTQPIISNTHTDIHTSNVSQDTNTNTDTITPTHSPNIDSNFLNDIHLEQFDTIHTNTEINQEIDDLFQQAHQYFADTDPTNRPYIPKQKTSRKFSATVNYINNNILPKYATIDTDFNNLQTIIYSAAWTAAKYNGAKITYTVQTERQTINTRKRKWQTRLERKIKGLRANIGRLSQYIKGNRSPRLVAAVEIIKAKFRLHAQYENPNTQMTHFLDTMKQKLNAASSRLRRYLTCTNRKLENSRFANNEKFFYRNLTSTGTLTQNVQTPSAETLREFWADIWENPVCHNHTADWIHQVDLEHEEMQFEFIPIDLFLNVIKNTQNWKSPGTDHIHNYWYKKFTTLHPFLHSHLNTFIQSPHLLPTYITQGLTYMIPKDTNDSTNPAKYRPITCLQTFYKILTACISNIIYDHLTKHNILAEQQKGCRKYSQGCKEQLTIDAVVMNHAVKSKSDIHTMFIDYQKAFDSVPHSWLLHVLNLYKIHPTIKSFLQSSMQNWQTVLKVNQPTTTIITQPIHIKRGIFQGDALSPLWFCMALNPLSHLLNKTNAGYTLTNNSTQYTLSHLMYMDDIKLYAADEMLLSHLADVTQQFSTDICMQFGVDKCKVMSVVKGKFKNNSYTLETGQTIEPMEEHDTYKYLGFRQSRQIQHKNTRQELIKKFTHRLNLILKTNLNARNTIKAINTFAIPILTYSFGIIQWSKTNTRKLQRIINTTLTKHRKHHPKSCIQRLILPRKEGGRGLIDVQNLHNKQISSLRSYFHSKSEHSPLHRHVAETDKNFTPLNLHNRDTQANEIIVTDEDKIAVWSQKALHGRHRSFMSQPHVDKIKSNEWLKRGELFPETEGFMLAIQDQIIATRNYRKFIMRDPNQQNDLCRHCNLASETIQHITGACKSLSQTDYKHRHDQVSAIIHQHLAYKYSLIDQMVPYYKYKPETILENRNYKIYWDRTIVTDKTIHFNRPDITVHDKINKTVYLIDIAIPNSHNIQSTISEKLSKYQDLAIEIKTQWRAQTVHIVPIVLSTTGIIPKSLTQSLNTLHMPTYTLHTLQKATILNTCRITRKFLTSSTLSSTYSI

SEQ ID NO: 30791 - protein, 1356 aa, Phlogophora meticulosa
MNTRSKTKKQLQANQPQIDDETSQLSSSSPSSLFSSIPSSSQSFRITPTPSLSSFSIQSADVVQETNFVDDTVPIARNATSRRKWTIEMNKFILRTYLHLTNMDTDKNAYLPSLHTKFLEKYPAMQVSRQRIGDQRRAIVQKKLLSQDTIDQIYEEARAELQMVHTQIQQHSTQSNTQFGQRMKWTNEYNEAIIRIYYTTTQLETNKTAYRKYLHEGFITIYPELAHITEQRLSDQVRAIINNRYININRLAEIKNQVALELRNSNTDTQNTEHTNSDYLNTQSQIDLEHLDPNTLTTNILPSNNPNTVTTTHTPNTEEVHFLNDIDNDLFGATETNFPAAPEINPEIEATFHQAQQHFINTHPTHRPYIPKQKTSRKFSTIVSYLNTVILPKHVNVDTEFIKLQTIIYCAAWTAATCNGAKISEISAQNERGTFRQRKPKWQIRLENKIKNLRANIGRLTHFINGSRSQHLIAAVEQIKIKYQLHAQHENSNTQIEHFLDTLKQKLSAAASRLKRYVTCTNRKVQNTKFTNNEKTFYRNLTSNNMETTNQSLETPSSETLRDFWANIWENPVCHNNHADWVNEASPEILEMKFDFIPVETFIDVIKRAHNWKSPGTDNIHNYWYKKFSSIHPFLHNHLNTFIQSPHLLPTYITHGVTYMIPKDMNDTINPAKYRPITCLQTLYKILTACVSEVIYEHLTKNNILSEQQKGCRKNSQGCKEQLTIDAIIMNSAVKSRKDIHTMFIDYQKAFDSVPHSWLSHVLNLYKINPKIKQFLETTMQNWKTVLKINSSSSTVATEPISIKRGIFQGDALSPLWFCMALNPLSHLLDKTDAGFILSNNNTQYTLTHLMYMDDIKLYAADKKSLFQLADTTQQFSDDICMSFGVDKCKILSIEKGKILNNNYTLASGESIEPMDEQSTYKYLGFKQSRQIQQKISKQELLKKFSHRLSLVLKSSLNSRNTIKAINTFAIPVLTYSFGIIRWSKTDIKKLQRTVNTLLTKHRKHHPKSCIQRLTLPRQEGGRGLIDINNLHNKQILTLRAYFHGKSENSSLHKQVTETDIKLTPLNLQNRNTLTNEHIVSTEQKIAAWAQKALHGRHRAYLSQPHVDKIKSNEWLKRGELFPETEGFMLAIQDQIIATRNYRKYIIKDRNQPTDTCRHCNSASETIQHITGACKSLAQTDYKHRHDQVAAIIHQHLAHKYKLIGEMVPYYKYKPETILENRNQKIYWDRTIITDKTIHYNRPDITVHDKSNKIVYLIDIAIPNSHNIQTTISEKLSKYQDLAIEIKTQWQAQNVHIVPIVLSSTGVVPKALTQSLNTLHMPSHTLHMLQKATILNTCRITRKFLTSSTLSSTFLI

SEQ ID NO: 30792 - protein, 1239 aa, Spodoptera frugiperda
MEVSRQRIGDQRRAIVQKKLLPQTKIDQIYEQVRTELQITPITQQHSTITHVTPINHIQPNIQPGQRMKWTKEYNETIMKIYYKITYLETNKTAYRKSLHEQFITAFPELSHITEQRLSDQVRAIINNKYINVNRLAEIKKQVSEQLIHETDTNQHLSTHSYIAEYPEENIHTQQFISNTHTDMHTNNVSQDTNTNTDTIIPTHSPNTDDNFLNDIQLEQLDTIHTNIEINQEIEDLFQQAHQYFADTDPTNRPYIPKQKTSRKFSATVNYINNNILPKYATIDTDFNNLQTIIYSAAWTAAKYNGAKITYTVQTERQTTNTRKRKWQTRLERKIKGLRANIGRLSQYIKGNRSPRLVAAVEIIRAKYRLHAQYENPNTQMTHFLDTMKQKLNAASSRLRRYLTCTNRKLENSRFANNEKFFYRNLTSTGTLTQNVQTPSAEILREFWAGIWENPVCHNHTASWIHEVNLDHEGMQSEFIPIDIFLNVIKNTQNWKSPGTDHIHNYWYKKFTTLHPFLHNHLNTFIQSPHLLPTYITHGITYMIPKDTNDSTNPAKYRPITCLQTFYKILTACISNIIYDHLAKHNILAEQQKGCRKYSQGCKEQLTIDAVVMNHAVKSKSDIHTMFIDYQKAFDSVPHSWLLHVLNLYKIHPTIKSFLQSAMQNWQTILKINQSTTTIITQPINIKRGIFQGDALSPLWFCMALNPLSHLLNKTNAGYILTNNSTQYTLSHLMYMDDIKLYATDQMLLSHLADVTQQFSTDICMQFGVDKCKVMSVVKGKFENNSYTLETGQTIEPMEEHDTYKYLGFRQSRQIQHKNTRQELIKKFTHRLNLILKTNLNARNTIKAINTFAIPILTYSFGIIQWSKTNTRKLQRIINTTLTKHRKHHPKSCIQRLILPRKEGGRGLIDIQNLHNKQISSLRSYFHSKSDHSPLHRHVVETDKNFTPLNLQNRDPQTNEIIVTDEDKIAVWSQKALHGRHRSFLSQPHVDKIKSNEWLKRGELFPETEGFMLAIQDQIIATRNYRKFIMRDPNQQNDLCRHCNLASETIQHITGACKSLAQTDYKHRHDQVSAIIHQHLAYKYSLIDQMVPYYKYKPETILENRNYKIYWDRTIVTDKTIHFNRPDITVYDKINKTVYLIDIAIPNSHNIQSTISEKLSKYQDLAIEIKTQWRAQTVHIVPIVLSTTGIIPKSLTQSLNTLHMPTYTLHTLQKATILNTCRITRKFLTSSTLSSTYSI

SEQ ID NO: 30793 - protein, 1385 aa, Salatis canalis
MEDKTRPRPQVPGGTSHCPDSDGSRAGTASRGVYNLRVRKPRQTTKACLKDSDLLHNKEQPTSPSSTGSLFPSVNSSPNPFEYHTYSRSSTITPEAVDVVQTTEVEVLAPTTDHKRARKRWSEEMNKFIWRTYLRITQIETTNLKSYLHTLHQQFTAHFPAMQATRQRVGDQRRAIIRNKLLSQETLSQIKTEVEEELGKTETVSCTTIEASVTQVTHYKVQTSQKQRMSWSDELNETLIRCFYEVTDIGKNLTGYRRKLRNRFIEVCPHLLHLSEQRISDQQRAILNNNYISSERLQEIRREIEKCLHNNTSQNSYTQKHTDIDELYLANNISEIQTEMHTEREEAGPSQTQLIDNIHLNSTHTHTQFLDTQMQEKVNTEFTNNLEKFKYTDPTCRPYIPKQKTSKRLAMIVAHINENILPNYLKEDQDFTILQTIIYTGAFTAATCNGTKIGTTRECRKYIKPMWQKRLESKIENLRSDIGRLTQYINGNSNKRIAKTVEKIKIKYQIHARYENTNEKLTEFLDTLKQKLNAASTRLKRYLTCTDRKQQNKCFINNEKTFYRNLNSTHSNTNTINEVPTPQALRQYWANIWENPIEHNKTADWIHQSNMNTPYTDMEFKHISMTTFLKVIKRTHNWKAPGTDNIQNFWYKKFTSTYPYIYNSFNTFLQTPDKMPTYLTQGITFMLPKDPTDTSNPAKYRPITCLQTMYKIFTACISEVIQEHLLKYNILAEQQKGCRKNSQGCKEQLTIDAVVMNTVVTKKRNIFTMFIDYQKAYDSIPHSWLIQILHIYKIHPTIISFLEITMQNWQTKLKIKQDKDFVVTEPIQIQRGIFQGDALSPLWFCLALNPLSEILNKTNLGFKFDNNVGDATLTHLMYMDDIKLFADTKDELFQLADLTQQFSRDVHMKFGVDKCKILSINTGKIENNSYILENGIPIEPLDQYNTYKYLGFEQSRQIHHKTIKLRITKQFKHRLNMILKTSLNSKNTIKAINTFAVPILTYSFGIIGWSKTDLKKLQRTINIHLTKYHKHHPKACTQRLTLPRQEGGRGLIDIKNLHNTQISTLRRYFHSKSEHTWLHKYVTEADNRLTPLNLKNRQTQTNEHITSVPEKIATWAGKVLHGRHRAHMCQQHVDKEKSNEWLKRGELFPETEGFMVAIQDETIVTRNFKKFIIKDSKQISDLCRHCNAASETIQHITGGCRSLAQTDYKHRHDQVSAIIHQQLAFRYQLIPKMIPYYKYKPDSVLEDIKHKIYWDRTIITDKTIHFNRPDITIHDKINKTVYLIDIAIPNSHNIQNTTSEKLSKYQDLAIELKKQWKLHTVKIIPIIISSTGIIPKTLIQNLNTLNMPFYTLHMIQKATILNTCRITRKFLTTSTISSATLEIES

SEQ ID NO: 30794 - protein, 1417 aa, Amphipyra berbera
MRTLDNGGPPVLYTLATVNAGLCRGRLIRSLATRGNKMITRSKIKKTIQANLPYIDDETTQVSLSSSTKSLFPSIPSSSPPFCISPSPSSSTSIQSADVAQETNSVNEPVPTTSTATARRKWSIEMNKFILRTYLHLTNMETDTNAYLPPLHTKFLEKYPNMQVSRQRVGDQRRAIIQKKLLPQKTIDQIYDEVRSELQIIQTQIQQHPTQYTTPVNTQSGTRMKWTNECNESIIRIYYRITQLETNKTAYRKYLYEEFINQYPDLSHITEQRLADQRRAIINNKYIKNDRLAEIKKQVAEELRHTNTQTENTNNEPLNIQPESNIEYPDEYSYTPSTSHINTINSYTLTNTLTTDVPLNNSAYTDLITQTLTDPQNTSEENLLNNIHIEQTDPTQTNLDVAPESNPEIDDTFQQAQQYFTDTHPTNRPYIPKQKTSRKFSATVKYINTIILPKYVNVDTDFNTLQNAIYCAAWTAAKCNGAKLSHLAQSEHRTRPHRKPNWQIRLEMKIGNLRANIGRLTQFIRGNRNRKVVAAVEAIKIKYQLHAQHENSNTQIDHFLDTLKQKLNAASSRLKRYKTCTDRKVQNTKFINNEKIFYRNLTSMNKDASSNQNIETPSPESLREFWANIWEIPVHHNTHADWINETPSQIPEMEFELIPIDTFIDVIKRTHNWKSPGTDNIHNYWYKKFTSIHPYIHNHINTFIRSPHLLPTYITHGITYMIPKDINDTINPAKYRPITCLQTLYKILTACISEVVYKHLTEHNILAEQQKGCRKNSQGCKEQLTIDAIVMNTAVKNKKDIHTMFIDYQKAFDSVPHSWLLHVLHLYKIHPTLISFLHTSMQNWQTVLKINQASATLTTEPISIQRGIFQGDALSPLWFCLALNPLSDLLDKTDVGFTLKNNDTQYTLTHLMYMDDIKLYAADKTSIFKLADTTQQFSQDIHMQFGVDKCKILSITKGKIQNNSYTLGSGESIEPMDEQSTYKYLGFKQSRQIQQKITKQELLKKFSYRLNLILKTHLNSRNTIKAINTFAIPILTYSFGIIQWSKTDIKKLQRTINTHFTKHRKHHPKSCIQRLTLPRQEGGRGLIDIHNLHNKQILSLRAYFHDKSEHSPLHKHTTNLDKKLTPLNLQDRNTQTNEHITSTQQKITAWADKALHGRHRAYLSLSHVDKEKSNEWLRRGELFPETEGFMLAIQDQIIATRNYRKYIIKDPNQPTDLCRHCNTASETIQHITGACKSLAQTDYKHRHDQVAAIIHQNLAYKNKLISEMNPYYKYKPETILENKNHKIYWDRTIITDKTIHYNRPDITVHDKTNKTVYLIDIAIPNSHNIQTTISDKLSKYQDLAIEIKTQWKAQTVHIVPVVLSSTGIIPKSLTQSLNTLHMPTYTLHVLQKATILNTCRITRKFLTSSTLASTYSI

SEQ ID NO: 30795 - protein, 765 aa, Noctua janthe
MECEFIPIETFIDVIKRTHNWKSPGTDNIHNYWYKKFSSIHPFLYKHLNTFIKSPHLLPQYITYGVTYMIPKDTNDTKNPAKYRPITCLQTLYKILTACISEIVYEHLTKNNILAEQQKGCRKNSQGCKEQLTIDAITMNSAVKSRKDIHTMFIDYQKAFDSVPHSWLLHVLNLYKIHPTLKQFLETSMQNWQTVLKINSSSLTVATEPICIRRGIFQGDALSPLWFCMALNPLSHLLDQTGAGFSLESNNTQYTLTHLMYMDDIKLYAADKESLYQLADATQQFSNDICMSFGVDKCKILSIVKGKIQNNSYTLLSGASIEPIDEQSTYKYLGFKQSRQIQQKMSKQELLKKFSHRLNLILKSNLNSRNTIKAINTFAIPILTYSFGIIRWSKTDIKKLQRTIHTLLTKHRKHHPKSCIQRLTLPRQEGGRGLIDIHNLHNKQILSLRAYFHNKSETSSLHKQITETDNKLTPLNLQNRNTQINEHIVSAQQKIAAWSEKALHGRHRACLSQPHVDKIKSNEWLKRGELFPETEGFMLAIQDQIIATRNYRKYIIKDPNQPTDLCRHCNNASETIQHITGACKSLAQTDYKHRHDQVAAIIHQQLAFKYKLVSEMIPYYKYKPEIALENNDQKIYWDRTIITDKTIHYNRPDITVHDKTNKTVYLIDIAIPNTHNIQTTISEKLSKYQDLAIEIKTQWKVQTVHIVPIVLSSTGIIPKSLTQSLNTLQMPNHTLYMLQKATILNTCRITRKFLTSSTLSSTFSI

SEQ ID NO: 30796 - protein, 1349 aa, Colias croceus
MITRSKSKRTAQRIESEDAGCKHVTSPSSSSSKSQLSLYSSSSSSYFRSPTISSSSSSSNLGLTDVAQETESVQVPVPNVSAAEVRKRWSKEMNEFILRTYLLLTNMESDTNAYLPPLHTKFLEKYPYMEVSRQRIGDQRRAIIQKNLLPKTTIDRIYEEVRIELQTNNNYHSAQLLSNTGTQIGQRMKWTKEYNESILKIYLRITQLESNKTAYRKLLHEEFIATHPELGHLSEQRIADQRRAIINNKYITDNRIAEIKQEISNELKIQNRENNYSQSLGTQPQQQLEAANINNTYTSHEDENIHTEEQALSGDNTLQELTAPIYNTTETTVDLNQKIESTFHEAEQLFANTDPTSRPFIRRQKLTKKFSSIVQYINTTILPTKLHPDIEFNTLHNILYCAAWTAAKCNGTKIGQQLQEIQHTQTKKIPSWQKRLEKQIADLRASIGRVTQFINGNRNRRIISTVETIKLKYATHAQHENSNTDPKHFLDTLKQKLSAKSARLKRYLKCTARKKQNAIFISNEKGFYRTLNSSENNTINRNNNIPSQEALREFWANIWENPEQHSDNTEWIKELQQETSGICDMEFEFIPADIFIDVIQRTHNWKAPGTDHIHNYWYKKFTCLYPYIHNHINAFIQSPHTLPTFITHGITYMLPKDPDDTCNPAKYRPITCLQTFYKILTACISRVINQHLTKYNILAEQQKGCRKDSQGCKEQLTIDAIAMKTATNQKKDIYSMFIDYQKAFDSVPHSWLLEVLNLYKIHPVLTNFLKTSMKNWQTALKIKSSCETLTTEPIQIQRGIFQGDALSPLWFCLALNPLSQLLDKLNEGFLLENSNTHYKLSHLMYMDDIKLFAADKRTLFKLADITQTFSQDIRMQFGVDKCKILSISKGKIMEDNYTLENGEVIEPMTEHNSYKYLGFKQLKQIAHKETILDLKTKFTHRLRLILKTHLNSKNTIKAINTFAIPIFTYSFGIINWSRTDLQSLQRTVNTNLTKYRKHHPKSCVQRLTLPRSEGGRGLIDIQNLHNQQIRSLRSYFHTKSEHSLLHKHATQLDKKLTPLNLHDTNPQQNEHSVSIQQKLLEWSSKALHGRHRSHLCQAHVDKEKSNEWIRRGDLFPETEGFMLAIQDEVIATRNYIKHIIKDSHQTSDQCRHCNAGIENIQHITGACKSLAQTDYKHRHDQVAAIIHQFLAHKYNFIKKIEPYYKYKPEIILNNSNYKIYWDRTIITDKTIHYNRPDITVHDKFQQNVYLIDIAIPNTHNIQSTISEKLRKYQDLAIEIKTQWNVKTVHIVPIVLSATGIIPKTLIHNLNTLELPSHTLNMLQKATILNTCRITRKFLTSSTISSTYTI

SEQ ID NO: 30797 - protein, 765 aa, Cosmia trapezina
MEFEFIPIDTFTDVIKRTHNWKSPGTDNIHNYWYKKFSYTHPFLHNHLNTFIQSPNLLPTYITHGVTYMIPKDMNDTKNPAKYRPITCLQTLYKILTACVSEVVYEHLTKNNILAEQQKGCRKNSQGCKEQLTIDAITMNSAVKNRKEIHTMFIDYQKAFDSVPHSWLLHVLNLYKIHPTVKQFLETSMQNWQTVLKINSSSSTVATEPINIKRGIFQGDALSPLWFCMALNPLSHLLDKTDAGFTLANNDTQYTLTHLMYMDDIKLYAADNKALFQLADITQQFSDDICMSFGVDKCKILSILKGKIQSNSYTLASGESIEPMDEQSTYKYLGFKQSRQIHQKMSKQELIKKFSHRLNLILKSNLNSRNTIKAINTFAIPILTYSFGIIRWSKTDIKKLQCTINTLLTKHRKHHPKSCIQRLTLPRQEGGRGLIDIHNLHNKQILSLRAYFHNKSEHSSLHKQVTETDKKLSPLNLQNRDTQINEHIVSTQQKIATWSAKALHGRHRAFLSQPHVDKVKSNEWLKRGELFPETEGFMLAIQDQIIATRNYRKYIIKDPNQPTDTCRHCNSASETIQHITGACKSLAQTDYKHRHDQVAAIIHQHLAHKYKLIGEMIPYYKYKPEIILENRNQKIYWDRTIITDKTIHYNRPDITVHDKINRTVYLIDIAIPNSHNIQTTISEKLSKYQDLAIEIKTQWKAQTVHIVPIVLSSTGVVPKALTQSLNTLHMPSHTLYMLQKATILNTCRITRKFLTSSTLSSTFSI

SEQ ID NO: 30798 - protein, 974 aa, Ebrietas anacreon
MIVDYINKNILPRHLNSELDFTNLQTLIYTGAFTAATCNGTKIGIVKENCSQNITPTWQKRLENKIQMLRSDIGHLTQYIQGNRSKKIIKSVDKIKLKYQMHAQHENMNSNVKEFLDTVKQKLNVTSSRLRRYLTCTKRQRENRDFVNNEKLFYRKLSSVHTSNQATDMPSKTDLHNFWSNIWEKPVEHNKNVEWIRRHNKIVPNSKMIFENIPLETFLKIIKRTQNWKAPGTDNIHNFWYKKFTSIHPLLYNNINTFLKLPDTIPAYITHGVTYMLPKDVQDLKNAAKYRPITCLQTIYKILTACVSEVICEYLTKHGILTEEQKGYRKSSQGCKEQLTIDAVAITAAVTQKRDIYTMFIDYRKAYDSIPHSWLIEILHLYKIHPTIISFLQKAMQNWQTTLKIRQNEQLITTEPIRIQRGIFQGDALSPLWFCIALNPLSHLLKETKLGFKFDKNTPESIINHLMYMDDIKLFASTKDDLYHLADITQMFSKDIHMEFGVDKCKIMSVRNGKIENNSYTLESGAAIDPLDQYSTYKYLGFKQSRKIHHSAIKVELTKKFRHRLRLILDTHLNSKNTIKAINTFAIPILTYSFGVIRWSKANLENLQRIISTHLTKFRKHHPRSCTQRLTLQRQEGGRGLIDIKNLHNTQIATLRKYFHTKSEYSLLHKCTTEADDHLTPLNLKDKQTQANEQTTDTQTKIATWREKALHGRHRAHLCQQYVDKEKSNEWLKRGELFPETEGFMLAIQDETIVTRNYKKYIIKDPNQLSDICRHCNGASETIQHVIGGCRSLAQTDYKHRHDQVAAIIHQQIAFRHQLITKMVPYYKYKPDSVVENNTYKLYWDRTIMTDKTIHFNRPDITLHNKIEKTVFLIDIAIPNSHNIQNTVSEKLSKYQDLAIELRTQWKVQKIQIIPIVLSSTGVIPKSLVQSLSTLNMPPYTLHMLQKATVLNTCRITRKFLTSSTISSSSLTIV

SEQ ID NO: 30799 - protein, 1416 aa, Noctua janthe
MPRAAWLGERLVASVPTLDNRGPPVLFTLATVNAGLCCGRPFKSLATRGINMNTRSKTKKQLQAKMPQIDDEISQPSSSSPSSLFPSIPSLSQSFRVTPTPSSSSISIQSADVVQETNFVDDTVPSAKAATSRRKWSIEMNKFILRTYLQLTSIETDKNAYLPPLHTKFLEKYPAMQVSRQRIGDQRRAIVQKKLLPQDTIDQIYEEVRAELQMIHTQIQQHSTQPSTQSGQRMRWTKEYNETLIRIYFTATQLETNKTAYRKKLHEEFINKYPELAHITEQRLSDQVRAIINNKYIHDNRLKEIKNQVASEFRNSNTNTQSIEDINRDHWDTQTQDDSEQPATNTNFSDTPINTLTTNIILNNSTDTNIVSQTVVNINDENFLQNIDVGQFGPTQTNFDTATETNPEIESTFHQAQINFNCTHPTNRPYIPKQKTSRKFSAIVSYINTVILPKYVNANTEFIKLQTIIYCAAWTAATCNGAKISDLTQNERRPYTQTKPKWQIRLEKKIDNLRANIGRLTHFINGCRSKKLIAAVEEIKIKYQLHAQHENPNTEIAHFLDTLKQKLSAASSRLKRYITCTNRKVQNTRFINNEKVFYRNLTSNNKDITNQSLETPTPEFLREFWANIWENPVHHNNHAEWVKETTPEIPEMEFEFIPIETFIDVIKRTHNWKSPGTDNIHNYWYKKFSSIHPFLYNHLNTFIKSPHLLPQYITHGVTYMIPKDTNDTKNPAKYRPITCLQTLYKILTACISEIVYEHLTKNNILAEQQKGCRKNSQGCKEQLTIDAITMNSAVKSRKDIHTMFIDYQKAFDSVPHSWLLHVLNLYKIHPTLKQFLETSMQNWQTVLKINSSSSTVATEPICIRRGIFQGDALSPLWFCMALNPLSHLLDQTGAGFSLESNNTQYTLTHLMYMDDIKLYAADKEALYQLADATQQFSNDICMSFGVDKCKILAIVKGKIQNNSYTLLSGASIEPIDEQSTYKYLGFKQSRQIQQKMSKQELLKKFSHRLNLILKSNLNSRNTIKAINTFAIPILTYSFGIIRWSKTDIKKLQRTIHTLLTKHRKHHPKSCIQRLTLPRQEGGRGLIDIHNLHNKQILSLRAYFHNKSETSSLHKQITETDNKLTPLNLQNRNTQINEHIVSAQQKIAAWSEKALHGRHRACLSQPHVDKIKSNEWLKRGELFPETEGFMLAIQDQIIATRNYRKYIIKDPNQPTDLCRHCNNASETIQHITGACKSLAQTDYKHRHDQVAAIIHQQLAFKYKLVSEMIPYYKYKPEVALENNDQKIYWDRTIITDKTIHYNRPDITVHDKTNKTVYLIDIAIPNTHNIQTTISEKLSKYQDLAIEIKTQWKVQTVHIVPIVLSSTGIIPKSLTQSLNTLQMPNHTLYMLQKATILNTCRITRKFLTSSTLSSTFSI

SEQ ID NO: 30800 - protein, 1331 aa, Ochropleura plecta
MNTRSKTKKQLQANLPQIDDETSQPSSSSPSSLFPSIPSSSQSFRVTPTPSCSSISIQSADVVQETNSVDDTVPTAKAATRRRKWTIEMNKFILRTYLHLTTMETDKNAYLPPLHTKFLEKYPAMQVSRQRIGDQRRAIIQKKLLPQDTIDQIYEEVRSELQIIHTQIQQHSTQPCTQAGQRMRWTNECNETIITIYYTITQLETNKTAYRKKLHEEFIIKYPDLAHITEQRLSDQVRAIINNKYIHENRLIEIKNQITSELSNRNTNTQNIEDLNNYHRNSQTQDDSEQILATNTSFFDTPINSHMSNRILNNSIDSDIASRTVVNIDDENFLNNIHAGQFVPTQTNFDPVPEIESTFHQAQQNFNDTHPINRPYIPKQKTSRKFSAIVTYINTVILPKHLNVDTEFTKLQTIIYCAAWTAATCNGAKISDPAQNERRPNTQRKPKWQIRLEKKIENLRANIGRLTHFNNGCRSPKLIAAVEDIKIKYQLHAQYENSNTQIAHFMDTLKQKLSATSSRLKRYITCTNRKVQNTKFINNEKIFYRNLTSNNRDTTNQSLATPTSETLRQFWANIWENPVQHNNRADWVNEATPEIPEMEFEFIPIDTFIDVIKRTHNWKSPGSDNIHNYWYKKFSSLHPFLHNHLNTFIQSPHLLPQYITHGVTYMIPKDMNDTTNPAKYRPITCLQTIYKILTACVSEIVYEHLTKNNILAEQQKGCRKNSQGCKEQLTIDSITMNSAVKSRKDIHTMFIDYQKAFDSVPHSWLLHVLSLYKIHPTLKQFLEASMQNWQTVLKINSSSTTVATEPIRIKRGIFQGDALSPLWFCMALNPLSLLLDKTGAGFTMENNNTQYTLTHLMYMDDIKLYAADIVALYQLADATQQFSDDICMSFGVDKCKILSIVKGKIQNNSYTLQSGESIEPMDEQSTYKYLGFKQSRQIQQKMSKQELLKKFSHRLNLILKSNLNSRNTVKAINTFAIPILTYSFGIIRWSKTDIKTLQRTVHTLLTKHRKHHPKSCIQRLTLPRQEGGRGLIDINNLHNKQILSLRAYFHNKSENSPLHKQVTEADKKLTPLNLQNRNTQINEHIVSTQQKITAWSEKALHGRHRAFLSQPHVDKIKSNEWLKRGELFPETEGFMLAIQDQIISTRNYRKYIMKDTNQPTDLCRHCNTVSETIQHITGACKSLAQTDYKHRHDQVAAIIHQQLAFKYKLVNEMIPYYKYKPEVTLENNHQKLYWDRTIITDKTIHYNRPDITVHDKTNKTVYLIDIAIPNSHNIQSTISEKLSKYQDLAIEIKTQWRAQTVHIVPIVLSSRRGSLSVFSTTRRNRFFKNEN

SEQ ID NO: 30801 - protein, 1422 aa, Noctua fimbriata
MPRAAWLGERLVASVPTLDNRGPPVLFSLAAVNAGLCCGRLFKSLATRGISMNTRSKTKKQLQAKLPQIDDETSQSSSSSPSSLLPSIPSSSQSFLVTPTPSSSSISIQSVDVVQETNFVDDTVPAARTVTSRRKWSIDMNKFILRTYLHLTHMETDKNAYLPSLHTKFLEKYPDMQVGRQRIGDQRRAIVQKKLLSQETIDQIYEEVRAELQIVHTQIQQHSTQSKAPINTQPGQRMKWTNEYNEAIIRIYYTTTQLETNKTAYRKHLHEGFINIYPELAHLTEQRLSDQVRAIINNKYIHTNRLDEIKNQVAIELRNSNTYTQNIQHINNDSQQPDENIHSLSTQYTNIHISGTTTNTATTNSVILLNNSTETNIASQTFINTDEENFLNHIDIGHHEPTQINSDASFEKNQEIETTFQQAQQLFSDTQPTNRPYIPKQRTSKKFSAIVTYINSVILTNCVNVDTDFIKLQNVIYCAAWTAATCNGAKILGTQNVSRTYIKRKPKWQIRLEKKIQNLRASIGRLTHFNNGSRSPKLIAAVKEIKKKYQLHAQYEDPNTQTTHFLDTLKQKLNAASSRLKRYLTCTNRKMQNSKFSNNEKVFYRNLATNNSDTTTQSLDTPAPEILREFWAHIWENPVCHNHQANWVNEPAPEIPEMEYDFIPIGTFIDVIKRTHNWKSPGTDNIHNYWYKKFTSIHPFLHNHLNTFIQSPNLLPPYLTHGVTYMIPKDISDTLNPAKYRPITCLQTLYKILTACVSEVLYEHLTKNNILAEQQKGCRKNSQGCKEQLTIDAITMNSAIKSKTDIHTMFIDYRKAFDSVPHSWLLHVLNLYKIHPTLKHFLETSMKNWQTVLKINSSSSSVATEPIRIKRGIFQGDALSPLWFCMALNPLSHLLDKTVGGFTLATNDTHYTLTHLLYMDDIKLYSADKNTLFQLADTTQQFSNDICMSFGVDKCKILSVVKGKVQNNSYILGSGESIEPMDEQSTYKYLGFNQSRQIQHKMIKQELLKKFSHRLNLILKTNLNSKNTVKAINTFAIPILTYSFGIIRWSKTDIRKLQRTINTTLTKHRKHHPKSSIQRLTLPRQEGGRGLIDIHNLHNKQILSLRAYFHNKSENSSLHKHVTEQDTKLTPLNLHNRNTQTNEILISTQDKIAAWSVKALHGRHRAYMSQPHVDKAKSNEWLKRGELFPETEGFMLAIQDQIIATRNYRKYIIKDPHQPTDLCRHCNTASETIQHITGACKSLAQTDYKHRHDQVAAIIHQQLAFKYKLISEMKPYYKYKPEIILDNNNQKIYWDRTIITDKTIHFNRPDITFHDKVSKTVYLIDIAIPNSHNIQTTISEKLSKYQDLAIEIKTQWEAQTVHIIPIVLSSTGIVPKSLMQSLNTLHMPPHTLQLLQKATILNTCRITRKFLTSSTISSTFSI

SEQ ID NO: 30802 - protein, 1422 aa, Noctua fimbriata
MPRAAWLGERLVASVPTLDNRGPPVLFSLAAVNAGLCCGRLFKSLATRGISMNTRSKTKKQLQAKLPQIDDETSQSSSSSPSSLFPSIPSSSQSFLVTPTPSSSSISIQSVDVVQETNFIDDTVPAARTVTSRRKWSIDMNKFILRTYLHLTHMETDKNAYLPSLHTKFLEKYPDMQVGRQRIGDQRRAIVQKKLLSQETIDQIYEEVRAELQIVHTQIQQHSTQSKAPINTQPGQRMKWTNEYNEAIIRIYYTTTQLETNKTAYRKHLHEGFINIYPELAHLTEQRLSDQVRAIINNKYIHTNRLDEIKNQVAIELRNSNTYTQNIQHINNDSQQPDENIHSLITQYTNIHISGTTTNTATTNSVILLNNSTETNIASQTFINTDEENFLNHIDIGHHEPTQINSDASFEKNQEIETTFQQAQQLFSDTQPTNRPYIPKQRTSKKFSAIVTYINSVILTNCVNVDTDFIKLQNVIYCAAWTAATCNGAKILGTQNVSRTYIKRKPKWQIRLEKKIQNLRASIGRLTHFNNGSRSPKLIAAVKEIKKKYQLHAQYEDPNTQTTHFLDTLKQKLNAASSRLKRYLTCTNRKMQNSKFSNNEKVFYRNLATNNSDTTTQSLDTPAPEILREFWAHIWENPVCHNHQANWVNEPAPEIPEMEYDFIPIGTFIDVIKRTHNWKSPGTDNIHNYWYKKFTSIHPFLHNHLNTFIQSPNLLPPYLTHGVTYMIPKDISDTLNPAKYRPITCLQTLYKILTACVSEVLYEHLTKNNILAEQQKGCRKNSQGCKEQLTIDAITMNSAIKSKTDIHTMFIDYRKAFDSVPHSWLLHVLNLYKIHPTLKHFLETSMKNWQTVLKINSSSSSVATEPIRIKRGIFQGDALSPLWFCMALNPLSHLLDKTVGGFTLATNDTHYTLTHLLYMDDIKLYSADKNTLFQLADTTQQFSNDICMSFGVDKCKILSVVKGKVQNNSYILGSGESIEPMDEQSTYKYLGFNQSRQIQHKMIKQELLKKFSHRLNLILKTNLNSKNTVKAINTFAIPILTYSFGIIRWSKTDIRKLQRTINTTLTKHRKHHPKSSIQRLTLPRQEGGRGLIDIHNLHNKQILSLRAYFHNKSENSSLHKHVTEQDTKLTPLNLHNRNTQTNEILISTQDKIAAWSVKALHGRHRAYMSQPHVDKAKSNEWLKRGELFPETEGFMLAIQDQIIATRNYRKYIIKDPHQPTDLCRHCNTASETIQHITGACKSLAQTDYKHRHDQVAAIIHQQLAFKYKLISEMKPYYKYKPEIILDNNNQKIYWDRTIITDKTIHFNRPDITFHDKVSKTVYLIDIAIPNSHNIQTTISEKLSKYQDLAIEIKTQWEAQTVHIIPIVLSSTGIVPKSLMQSLNTLHMPPHTLQLLQKATILNTCRITRKFLTSSTISSTFSI

SEQ ID NO: 30803 - protein, 1417 aa, Amphipyra berbera
MRTLDNGGPPVLYTLATVNAGLCRGRLIRSLATRGNKMITRSKIKKTIQANLPYIDDETTQVSLSSSTKSLLPSIPSSSPPFCISPSPSSSTSIQSADVAQETNSVNEPVPTTSTATARRKWSIEMNKFILRTYLHLTNMETDTNAYLPPLHTKFLEKYPNMQVSRQRVGDQRRAIIQKKLLPQKTIDQIYDEVRSELQIIQTQIQQHPTQYTTPVNTQSGTRMKWTNECNESIIRIYYRITQLETNKTAYRKYLYEEFINQYPDLSHITEQRLADQRRAIINNKYIKNDRLAEIKKQVAEELRHTNTQTENTNNEPLNIQPESNIEYPDEYSYTPSTSHINTINSYTLTNTLTTDVPLNNSAYTDLITQTLTDPQITSEENLLNNIHIEQTDPTQTNLDVAPESNPEIDDTFQQAQQYFTDTHPTNRPYIPKQKTSRKFSATVKYINTIILPKYVNVDTDFNTLQNAIYCAAWTAAKCNGAKLSHLAQSEHRTRPHRKPNWQIRLEMKIGNLRANIGRLTQFIRGNRNRKVVAAVEAIKIKYRLHAQHENSNTQIDHFLDTLKQKLNAASSRLKRYKTCTDRKVQNTKFINNEKIFYRNLTSMNKDASSNQNIETPSPESLREFWANIWEIPVHHNTHADWINETPSQIPEMEFELIPIDTFIDVIKRTHNWKSPGTDNIHNYWYKKFTSIHPYIHNHINTFIRSPHLLPTYITHGITYMIPKDINDTINSAKYRPITCLQTLYKILTACISEVVYKHLTEHNILAEQQKGCRKNSQGCKEQLTIDAIVMNTAVKNKKDIHTMFIDYQKAFDSVPHSWLLHVLHLYKIHPTLISFLHTSMQNWQTVLKINQASATLTTEPISIQRGIFQGDALSPLWFCLALNPLSDLLDKTDVGFTLKNNDTQYTLTHLMYMDDIKLYAADTTSIFKLADTTQQFSQDIHMQFGVDKCKILSITKGKIQNNSYTLGSGESIEPMDEQSTYKYLGFKQSRQIQQKITKQELLKKFSYRLNLILKTHLNSRNTIKAINTFAIPILTYSFGIIQWSKTDIKKLQRTINTHFTKHRKHHPKSCIQRLTLPRQEGGRGLIDIHNLHNKQILSLRAYFHDKSEHSPLHKHTTNLDKKLTPLNLQDRNTQTNEHITSTQQKITAWADKALHGRHRAYLSLSHVDKEKSNEWLRRGELFPETEGFMLAIQDQIIATRNYRKYIIKDPNQPTDLCRHCNTASETIQHITGACKSLAQTDYKHRHDQVAAIIHQNLAYKNKLISEMNPYYKYKPETILENRNHKIYWDRTIITDKTIHYNRPDITVHDKTNKTVYLIDIAIPNSHNIQTTISDKLSKYQDLAIEIKTQWKAQTVHIVPVVLSSTGIIPKSLTQSLNTLHMPTYTLHMLQKATILNTCRITRKFLTSSTLASTYSI

SEQ ID NO: 30804 - protein, 1416 aa, Noctua janthe
MPRAAWLGERLVASVPTLDNRGPPVLFTLATVNAGLCCGRPFKSLATRGINMNTRSKTKKQLQAKMPQIDDEISQPSLSSPSSLFPSIPSLSQSFRVTPTPSSSSISIQSADVVQETNFVDDTVPSAKAATSRRKWSIEMNKFILRTYLRLTSIETDKNAYLPPLHTKFLEKYPAMQVSRQRIGDQRRAIVQKKLLPQDTIDQIYEEVRAELQMIHTQIQQHSTQPSTQSGQRMRWTKEYNETLIRIYFTATQLETNKTAYRKKLHEEFINKYPELAHITEQRLSDQVRAIINNKYIHDNRLKEIKNQVASEFRNSNTNTQSIEDINRDHWDTQTKDDSEQPATNTNFSDTPINTLTTNIILNNSTDTNIVSQTVVNIDDENFLQNIDVGQFGPTQTNFDTATETNPEIESTFHQAQINFNCTHPTNRPYIPKQKTSRKFSAIVSYINTVILPKYVNANTEFIKLQTIIYCAAWTAATCNGAKISDLTQNERRPYTQTKPKWQIRLEKKIDNLRANIGRLTHFINGCRSKKLIAAVEEIKIKYQLHAQHENPNTEIAHFLDTLKQKLSAASSRLKRYITCTNRKVQNTRFINNEKVFYRNLTSNNKDITNQSLETPTPEILREFWANIWENPVHHNNHADWVKETTPEIPEMEFEFIPIETFIDVIKRTHNWKSPGTDNIHNYWYKKFSSIHPLLYNHLNTFIKSPHLLPQYITHGVTYMIPKDTNDTKNPAKYRPITCLQTLYKILTACISEIVYEHLTKNNILAEQQKGCRKNSQGCKEQLTIDAITMNSAVKSRKDIHTMFIDYQKAFDSVPHSWLLHVLNLYKIHPTLKQFLETSMQNWQTVLKINSSSSTVATEPICIRRGIFQGDALSPLWFCMALNPLSHLLDQTGAGFSLESNNTQYTLTHLMYMDDIKLYAADKEALYQLADATQQFSNDICMSFGVDKCKILAIVKGKIQNNSYTLLSGASIEPIDEQSTYKYLGFKQSRQIQQKMSKQELLKKFSHRLNLILKSNLNSRNTIKAINTFAIPILTYSFGIIRWSKTDIKKLQRTIHTLLTKHRKHHPKSCIQRLTLPRQEGGRGLIDIHNLHNKQILSLRAYFHNKSETSSLHKQITETDNKLTPLNLQNRNTQINEHIVSAQQKIAAWSEKALHGRHRACLSQPHVDKIKSNEWLKRGELFPETEGFMLAIQDQIIATRNYRKYIIKDPNQPTDLCRHCNNASETIQHITGACKSLAQTDYKHRHDQVAAIIHQQLAFKYKLVSEMIPYYKYKPEVALENNDQKIYWDRTIITDKTIHYNRPDITVHDKTNKTVYLIDIAIPNTHNIQTTISEKLSKYQDLAIEIKTQWKVQTVHIVPIVLSSTGIIPKSLTQSLNTLQMPNHTLYMLQKATILNTCRITRKFLTSSTLSSTFSI

SEQ ID NO: 30805 - protein, 1371 aa, Noctua pronuba
MNTRSKTKKQLQAKLPQLDDETSQPSSSSPSSLFPSIPSSSQSFRVTPAPSSSSISIQSVDVVQETNFVDDTVPAARTATSRRKWSIDMNKFILRTYLHLTHMETDKNAYLPSLHTKFLEEYPEMQVGRQRIGDQRRAIVQKKLLPQETIEQIYEEVRAELQIVHTQIQQHCIQSKTPINTQPGQRMKWTNEYNEAIIRIYYTTTQLETNKTAYRKHLHEEFINIYPELAHLTEQRLSDQVRAIINNKYIHTNRLEEIKNQVATELRNNNTNTQNIQHINNDLQQPDQNIHSLSTQYTNVHISCTTTNTPTINNVILLNNSPETNIASQTFINTDEENFLNHVDIGQHEPAQSNFDASSEKNQEIEATFQQAQQLFSDTHPTNRPYIPKQRTSKKFSAIVTYINSVILTNCVNVDTDFIKLQNVIYCAAWTAAICNGAKISGTQNESRTYIKRKPKWQIRLEKKIQYLRASIGRLTHFNNGSRSPKLIAAVIEIKKKYQLHAQYEDPNTQTTHFLDTLKQKLNAASSRLKRYLTCTNRKMQNSKFSNNEKVFYRNLATNNSDTTTQSLHTPTPEVLREFWANIWENPVCHNHRAVWVNEPAPEIPEMEYEFIPIGTFIDVIKCTHNWKSPGTDNIHNYWYKKFTSIHPFLHNHLNTFIQSPNLLPPYLTHGVTYMIPKDISDTLNPAKYRPITCLQTLYKILTACVSEVLYEHLTKNNILAEQQKGCRKNSQGCKEQLTIDAITMNTAIKSKTDIHTMFIDYQKAFDSVPHSWLLHVLNLYKIHPILKHFLEISMQNWQTVLKINSSSSNVATEPIRIKRGIFQGDALSPLWFCMALNPLSHLLDKTDGGLKLATNDTDYTLTHLMYMDDIKLYSADKNALFQLADTTQQFSDDICMSFGVDKCKILSVVKGKVQNNSYVLGSGESIEPMDEQSTYKYLGFNQCRQIQHKMIKQELLKKFSHRLNLILKTNLNSKNTVKAINTFAIPILTYSFGIIRWSKTDIRKLQRTINTTLTKHRKHHPKSSIQRLTLPRQEGGRGLIDIHNLHNKQILSLRAYFHNKSENSSLHKHVTEQDKKLTPLNLQNRNTQTNEQLINTQDKIAAWSVKALHGRHRAFMSQPHVDKAKSNEWLKRGELFPETEGFMLAIQDQIIATRNYRKYIIKDPHQPTDLCRHCNTASETIQHITGACKSLAQTDYKHRHDQVAAIIHQQLAFKYKLISEMKPYYKYKPEIILDNNNQKIYWDRTIITDKTIHFNRPDITLHDKVTKTVYLIDIAIPNSHNIQTTISEKLSKYQDLAIEIKTQWEAQTVHIVPIVLSSTGIIPKSLMQSLNTLHMPPHTLQLLQKATILNTCRITRKFLTSSTISSSFSI

SEQ ID NO: 30806 - protein, 893 aa, Ochropleura plecta
MNGSRSQKLITAVEAIKTKYKLHAQHENSNTRLEHFLDTLKQKLSAAASRLKRYITCTNRKMENTKFCNNERIFYRNLASNNRDTSTQTVETPPPGALRDFWANIWENPVHHNYHADWIKEVTPEIPAMEFDSIPINTFIDVIKRTHNWKSPGTDNIHNYWYKKFTSIYPFLYHHLNTFIQSPHLLPTYITHGVTYMIPKDMTNTTDPAKYRPITCLQTLYKILTACISEKIYEHLAKHNILAEQQKGCRKNSQGCKEQLTIDAVAMNSAVKSKKDIYTMFIDYQKAYDSVPHSWLIHILNIYNIHPTLRIFLESTMQNWKTVLKINQASTTLATEPIQIKRGIFQGDALSPLWFCMALNPLSHLLDKTNVGFTLTNDNAQFTLTHLMYMDDIKLYAADKNSLFYLADTTQEFSNDISMQFGVDKCKILSVSAGKIQSNSYSLGSGESIEPMDEHSTYKYLGFKQSRQIEQKMTKVELMKKFTHRLNLILKSNLNSRNTIKAINTFAIPVLTYSFGIIRWSKTDIRKLQRTINTLLTKHRKHHPKSCIQRLTLPRQEGGRGLVDIHNLHNKQILSLRSYFHNKSVHSSLHKHVTEADKKLTPLNLQSRNTQINESITSTQQKIAVWSGKSLHGRHRACLSQPHVDKAKSNEWLKRGELFPETEGFMLAIQDQIIATRNYRKYIMKDSNQPTDMCRHCNSASETIQHITGACKSLAQTDYKHRHDQVAAIIHQHLAHKYNLVGEMIPYYKYKPEVILENRNQKIYWDRTIITDKTIHYNRPDITVHDKINKTVYLIDIAIPNSHNIQTTISEKLSKYQDLAIEIKTQWNAQTVHIVPIVLSSTGVIPKSLTQSLSTLNMPSQTLYMLQKATILNTCRITRKFLTSSTLSSTFSI

SEQ ID NO: 30807 - protein, 1362 aa, Ochropleura plecta
MNTRSKTKKQLQANLPQIDDETSQPSSSSPSSLFPSIPSSSQSFRVTPTPSCSSISIQSADVVQETNSVDDTVPTAKAATRRRKWTIEMNKFILRTYLHLTTMETDKNAYLPSLHTKFLEKYPAMQVSRQRIGDQRRAIIQKKLLPQDTIDQIYEEVRSELQIIHTQIQQHSTQPCTQPGQRMRWTNECNETIITIYYTITQLETNKTAYRKKLHEEFIIKYPELAHITEQRLSDQVRAIINNKYIHENRLIEIKNQVTSELSNRNTNTQNIEDLNNYHRNSQTQDDSEQILATNTSFSDTPINSHMSNIILNNSIDSDIASRTVVNIDDENFLDNIHAGQFVPTQTNFDPVPEIESTFHQAQQNFNDTHPINRPYIPKQKTSRKFSAIVTYINTVILPKHLNVDTEFTKLQTIIYCAAWTAATCNGAKISDPAQNERRPNTQRKPKWQIRLEKKIENLRANIGRLTHFNNGCRSPKLIAAVEDIKIKYQLHAQYENSNTQIAHFMDTLKQKLSATSSRLKRYITCTNRKVQNTKFINNEKIFYRNLTSNNRDTTNQSLETPTSETLRQFWANIWENPVQHNNSADWVNEATPEIPEMEFEFIPIETFIDVIKRTHNWKSPGSDNIHNYWYKKFSSLHPFLHNHLNTFIQSPHLLPQYITHGVTYMIPKDTNDTTNPAKYRPITCLQTIYKILTACVSEIVYEHLTKNNILAEQQKGCRKNSQGCKEQLTIDSITLNSAVKSRKDIHTMFIDYQKAFDSVPHSWLLHVLSLYKIHPTLKQFLETSMQNWQTVLKINSPSTTVTTEPIRIKRGIFQGDALSPLWFCMALNPLSLLLDKTGGGFTMENNNTQYTLTHLMYMDDIKLYADDEVALYQLADATQQFSDDICMSFGVDKCKILSIVKGKIQNNSYTLLSGESIEPMDEQSTYKYLGFKQSRQIQQKMSKQELLKKFSHRLNLILKSNLNSRNTVKAINTFAIPILTYSFGIIRWSKTDIKTLQRTIHTHLTKHRKHHPKSCIQRLTLPRQEGGRGLIDINNLHNKQILSLRAYFHNKSENSPLHKQVTEADKKLTPLNLQNRNTQINEHIVSTQQKITAWSEKALHGRHRACLSQPHVDKIKSNEWLKRGELFPETEGFMLAIQDQIISTRNYRKYIIKDTNQPTDLCRHCNTASETIQHITGACKSLAQTDYKHRHDQVAAIIHQQLAFKYKLVNEMIPYYKYKPEVTLENNHQKLYWDRTIITDKTIHYNRPDITVHDKTNKTVYLIDIAIPNSHNIQTTISEKLSKYQDLAIEIKTQWKAQTVHIVPIVLSSTGIIPKSLTQSLNTLQMPTHTLYMLQKATILNTCRITRKFLTSSTISSTFCI

SEQ ID NO: 30808 - protein, 1412 aa, Ochropleura plecta
MLRAAWLGERLVANVPTLDNRGPPVLFTLATVNAGLCCGRLCKSLASRGNNMNTRSKTKKILLANLPQMDDETSHFSSSSSSSLFPSIPSSSQSFRVTPTPSSPSISIQSVDVVQETNIVEDTVPTARTARSRRKWSIDMNKFILRTYLHLTHIETDKNAYLPSLHTKFLEKYPDMQVGRQRIGDQRRAIVQKKLLPQETIDQIYEEVRAELQIVHTQIQHSTQSMTQNNTQPGQRMKWTNEYNEAIIRIYYTTTQLETNKTAYRKHLHEGFINSYPELAHVTEQRLSDQVRAIINNKYIPNDRLEEIKNQVALELRNNNINIEHTNNDLQQSDENVLSLNTQYTNIHITDTTNNIIVLNNNSDTNTVSQTPIHTVDENFLNQIDIGLFEPTQNNLNGAPEKNLEIEATFQQAQQLFSDTHPTSRPFIPKQKTSKKFSAIVTYINSIILPNIVNIDTDFTQLQTIIYCAAWTAATCNGAKISDTQNESRTYIKRKPKWQIRMDKKIQSLRANIGRLTHFINGSRSPKLIAAVEEIKKKYQVHAQYEDPNTQLVHFLDTLKQKLNASSSRLKRYLTCTNRKVQNSKFINNEKTFYRNLTTNNRDTNNQNLETPTPESLREFWANIWENPVNHNHQADWINEVTTDTPEMEFEFIPIETFIDVIKRTHNWKSPGTDNIHNYWYKKFSSIHPFLHNHLNTFIQSPHLLPSYITHGVTYMIPKDSNDTINPAKYRPITCLQTIYKILTACLSEVVYEHLTKNNILSEQQKGCRKNSQGCKEQLTIDAVTMSSAVKSKTDIHTMFIDYQKAFDSVPHSWLLNVLSLYKIHPTLKHFLETTMQSWQTVLKINSLSSTVATEPIHIKRGIFQGDALSPLWFCMALNPLSHLLDKTGAGYALTNINTHYTLTHLMYMDDIKLYAADKNALFELADTTQQFSDDICMSFGVDKCKILSVVKGKVQNNSYTLGSGQIIEPIDELSSYKYLGFKQSRQIHQKMIKQELVNKFSHRLNLVLKTSLNSKNTIKAINTFAIPILTYSFGIIRWSNTDIKKLQRTVNTTLTKHRKHHPKSSIHRITLPRQEGGRGLIDIHNLHNKQILSLRSYFHNKSENSTLHKHVTENDIKLTPLNLHNRNTQINEQIINTQEKIAAWSAKALHGRHRAFLSQPHVDKAKSNEWLKRGELFPETEGFMLAIQDQIIATRNYRKYIIKDPHQPTDLCRHCNTASETIQHITGACKSLAQTDYKHRHDQVAAIIHQQLAFQHKLVSEMQPYYKYKPEIILENNNHKIYWDRTIVTDKTIHFNRPDITLHDKANKIVYLIDIAIPNSHNIQTTMSEKLNKYQDLAIEIKTQWKAQTVHIVPIVLSSTGIVPKSLMQSLNTLHMPSHTLHLLQKATILNTCRITRKFLTSSTISSTFSI

SEQ ID NO: 30809 - protein, 1362 aa, Mythimna impura
MNTRSKTKKLLASMPQIDDETIQPFSLSPSSLFPSITSSSQSFRVISTPSSSSIQSADVVQETNSVEDTVPTARTATSRRKWSIEMNKFILRTYLYLTNMDTDKNAYLPSLHTKFLEKYPDMQVSRQRIGDQRRAIIQKKLLPQNTIDQIYEEVRAELQMFYTQIQQHSTQSNTQFNQRMRWTNEHNEAIIRIYYTITQLETNKTVYRKHLREEFINIYPELTHVTEQRLSDQVRAIINNVYIDTKRLEEIRNQVAIELENINNSTQNTEQTSGDHLNTQLQTESDLSDINENSPNTLITNTHTTNVALNNSSGGDIVLESLVNIEEDNNFLNNINISQSEPINFNSILDSSTEIEATFQQAQLNFIDTHPTNRPYIPKQKTSRKFSAIVNYINTVILPKHVNGDTEFIKLQTIIYCAAWTAAKCNGAKISDLTQSERRTYKYRKPKWQIRLEKKIENLRVNIGRLTHFINGSRSQKLVAAVEQIKLKYQLHAQHENSNTQIEHFLDTLKQKLSAASSRLKRYITCTNRKVQNTKFKNNEKIFYRNLTSNNRDITNESLDRPSPESLREFWANIWENPVYHNEHVDWVSHAATEIPDMEFEFIPIETFIEVIKRTHNWKSPGTDNIHNYWYKKFSSIHPFLYNHLNTFIQSPHLLPIYITHGVTYMIPKDINDTTNPAKYRPITCLQTLYKILTACVSEVVYEHLIKNNILAEQQKGCRKHSQGCKEQLTIDAIAMNSAVKCRKDIHTMFIDYQKAFDSVPHSWLLHVLNLYKIHPTLKQFLETSMQNWQTVLKIHSSSTTVATEPISIKRGIFQGDALSPLWFCMALNPLSHLLDKTDVGFTLVNHNTQYKLTHLMYMDDIKLYAADKGALFQLADTTQLFSDDICMSFGVDKCKILSVVKGKIQNNSYTLGSGESIDPMDEQSTYKYLGFKQSRQIQQKLSKQELLKKFSHRLNLILKSNLNSKNTIKAINTFAIPILTYSFGIIKWSKTDIKKLQRTVHILLTKHRKHHPKSCIQRLTLPRQEGGRGLIDIQNLHNKQIHSLRVYFHYKSENSLLHKQISDIDKKLTPLNLQNRNTQINEHITSTQQKIAAWSEKALHGRHRASLSQPHVDKLMSNEWLKRGELFPETEGFMLAIQDQIVATRNYRKYIMKDQNQPTDFCRHCNSASETIQHITGACKSLVQTDYKHRHDQVAAIIHQHLAYKYKLVTEMMPYYKYTPEIILESKDIKIYWDRTIITDKTIHYNRPDITVHDKTNKTVYLIDIAIPNSHNVQTTISEKLSKYQDLAIEIKTQWKAQTVHIVPIVLSSTGIIPKSLAQSLNTLQMPAQTLYMLQKATILNTCRITRKFLTSSTLTSTFSI

SEQ ID NO: 30810 - protein, 1362 aa, Mythimna impura
MNTRSKTKKLLASMPQIDDETIQPFSLSPSSLFPSITSSSQSFRVISTPSSSSIQSADVVQETNSVEDTVPTARTATSRRKWSIEMNKFILRTYLYLTNMDTDKNAYLPSLHTKFLEKYPDMQVSRQRIGDQRRAIIQKKLLPQNTIDQIYEEVRAELQMFYTQIQQHSTQSNTQFNQRMRWTNEHNEAIIRIYYTVTQLDTNKTVYRKHLREEFINIYPELTHVTEQRLSDQVRAIINNVYIDTKRLEEIRNQVAIELENINNSTQNTEQTSGDHLNTQLQTESDLSDINENSPNTLITNTHTTNVALNNSSGGDIVLESLVNIEEDNNFLNNINISQSEPINFNSILDSSTEIEATFQQAQLNFIDTHPTNRPYIPKQKTSRKFSAIVNYINTVILPKHVNGDTEFIKLQTIIYCAAWTAAKCNGAKISDLTQSERRTYKYRKPKWQIRLEKKIENLRVNIGRLTHFINGSRSQKLVAAVEQIKLKYQLHAQHENSNTQIEHFLDTLKQKLSAASSRLKRYITCTNRKVQNTKFKNNEKIFYRNLTSNNRDITNESLDRPSPESLREFWANIWENPVYHNEHVDWVSHAATEIPDMEFEFIPIETFIEVIKRTHNWKSPGTDNIHNYWYKKFSSIHRFLYNHLNTFIQSPHLLPIYITHGVTYMIPKDINDTTNPAKYRPITCLQTLYKILTACVSEVVYEHLIKNNILAEQQKGCRKHSQGCKEQLTIDAIAMNSAVKCRKDIHTMFIDYQKAFDSVPHSWLLHVLNLYKIHPTLKQFLETSMQNWQTVLKIHSSSTTVATEPISIKRGIFQGDALSPLWFCMALNPLSHLLDKTDVGFTLVNHNTQYKLTHLMYMDDIKLYAADKGALFQLADTTQLFSDDICMSFGVDKCKILSVVKGKIQNNSYTLGSGESIDPMDEQSTYKYLGFKQSRQIQQKLSKQELLKKFSHRLNLILKSNLNSRNTIKAINTFAIPILTYSFGIIKWSNTDIKKLQRTVHILLTKHRKHHPKSCIQRLTLPRQEGGRGLINIQNLHNKQIHSLRVYFHYKSENSLLHKQISDIDKKLTPLNLQNRNTQINEHITSTQQKIAAWSEKALHGRHRASLSQPHVDKLMSNEWLKRGELFPETEGFMLAIQDQIVATRNYRKYIMKDQNQPTDFCRHCNSASETIQHITGACKSLVQTDYKHRHDQVAAIIHQHLAYKYKLVTEMMPYYKYTPEIILESKDIKIYWDRTIITDKTIHYNRPDITVHDKTNKTVYLIDIAIPNSHNVQTTISEKLSKYQDLAIEIKTQWKAQTVHIVPIVLSSTGIIPKSLAQSLNTLQMPAQTLYMLQKATILNTCRITRKFLTSSTLTSTFSI

SEQ ID NO: 30811 - protein, 1366 aa, Cosmia trapezina
MNTRSKTKKQLQANLPQLNDETSQFSSSSPSSLFPSIPSSSKSFRVTPTPSSSSISTQSADVVQETNFVDDTVPTARTATTRRKWSIEMNKFILRTYLHLTSIETDKNAYLPSLHTKFLEKYPAMQVSRQRIGDQRRAIVQKKLLPQATIDQIYEEVRADLQMVHTQIQQHSTQPHTQTGQRMKWTNEYNETIIKIYYTATKLETDKTAYRKYLHEEFINIYPQLTHLTEQRLSDQVRAILNNNYINPNRLEEIKNQVATTLRESNTNTQNIDYINNDHLNTQTQTDLEQPDINTYFTDTPTNTLTTHMLLNNSTDTDILYQTLVNTDEDNFLNNIDIGQLGPTQTNYDAAPEINTEIEDTFQQAQQNFTDTFPTNRPYIPKQKTSRKFSAIVTYINTIILPKHVDVDTEFLKLQTIIYCAAWTAATCNGAKILSDSTQNEPRTFIQHKPKWQIRLEKKIKNLRANIGRLTHFIKGSRSQKLIASVEEIKKKYQLHAQHENSNTQIEHFLDTLKQKLSAASSRLKRYLTCTNRKVQNRKFTNNEKIFYRNLASNNRDTTNQTLETPSSETLREFWGNIWENPVYHNNRADWVNETTREIPEMEFEFIPIDTFTDVIKRTHNWKSPGTDHIHNYWYKKFSYTHPFLHNHLNTFIQSPNLLPTYITHGVTYMIPKDMNDTKNPAKYRPITCLQTLYKILTACVSEVVYEHLTKNNILAEQQKGCRKNSQGCKEQLTIDAITMNSAVKNRKEIHTMFIDYQKAFDSVPHSWLLHVLNLYKIHPTVKQFLETSMQNWQTVLKINSSSSTVATEPINIKRGIFQGDALSPLWFCMALNPLSHLLDKTDAGFTLANNDTQYTLTHLMYMDDIKLYAADNKALFQLADITQQFSDDICMSFGVDKCKILSILKGKIQSNSYTLASGESIEPMDEQSTYKYLGFKQSRQIHQKMSKQELIKKFSHRLNLILKSNLNSRNTIKAINTFAIPILTYSFGIIRWSKTDIKKLQCTINTLLTKHRKHHPKSCIQRLTLPRQEGGRGLIDIHNLHNKQILSLRAYFHNKSEHSSLHKQVTETDKKLSPLNLQNRDTQINEHIVSTQQKIATWSAKALHGRHRAFLSQPHVDKVKSNEWLKRGELFPETEGFMLAIQDQIIATRNYRKYIIKDPNQPTDTCRHCNSASETIQHITGACKSLAQTDYKHRHDQVAAIIHQHLAHKYKLIGEMIPYYKYKPEIILENRNQKIYWDRTIITDKTIHYNRPDITVHDKINKTVYLIDIAIPNSHNIQTTISEKLSKYQDLAIEIKTQWKAQTVHIVPIVLSSTGVVPKALTQSLNTLHMPSHTLYMLQKATILNTCRITRKFLTSSTLSSTFSI

SEQ ID NO: 30812 - protein, 1367 aa, Omphaloscelis lunosa
MNTRSKTKKQLQANLRHMNDETSQFSSSSSSSLFQSIPSSSQSFRVTPTPSTSSISKQSADVVQETNFVDDTVPTARTATTRRKWSIEMNKFILRTYLHLTSMDTDKNAYLPSLHTKFLEKYPAMQVSRQRIGDQRRAIVQKKLLPQNTIDQIYDEVRAELKIVHTQIQQHSTQFHTQTGQRMKWTKEYNETIMKIYYTATKLETDKTAYRKYLLEEFINIYPELIHITEQRLSDQVRAILNNNYINPNRLEEIKNQIAAELRENNTNTKNIECISIDHLNTQTQKDLEQRDTNIYITDTPTNTFTTHISLNNSTDPTNILSQTFVNTDDGNFLNDINVDQFGPMITNFDAAPEISTEIEAIFQQAQHNFIDTFPTNRPYIPKQKTSRKFSAIVTYINTVILPKHVNVDTEFIKLQTIIYCAAWTAATCNGAKILSDSTQNERRTYTQRKPKWQIRLEKKIENLRANIGRLTHFINGSRSEKLIAAVEGIKKKFQLHAQHENSNTQIEHFLDTLKQKLSAASSRLKRYITCTNRKVQNMKFNNNEKIFYRNLTTNNRDTTNQTIETPSSETLREFWANIWEKPVYHNNRTDWENKTTREIPEMEFEFIPIDTFIDIIKRTHNWKSPGTDHIHNYWYKKFSSIHPFLHNHLNTFIQSPNLLPTYLTHGITYMIPKDMNDTINSAKYRPITCLQTMYKILTACVSEVIYEHLTKNNILAEQQKGCRKNSQGCKEQLTIDAITMNSAIKNRKDIHTMFIDYQKAFDSVPHSWLLKVLHLYKIHPTLKNFLETSMQNWQTVLKINSYSSTVATEPICIKRGIFQGDALSPLWFCMALNPLSHLLDKTDVGFTLKNNDTQYTLTHLMYMDDIKLYAADKKALFQLADTTQQFSDDICMSFGVDKCKILSVLKGKIQNNSYTLASGESIEPMDEQSTYKYLGFKQSRQIQQKISKQELHKKFSHRLNLILKSNLNSRNTIKAINTFAIPILTYSFGIIRWSKTDIKKLQYTVNTLLTKHRKHHPKSCIQRLTLSRQEGGRGLIDIHNLHNKQILSLRAYFHKKSEHSSLHKQVTDTDKKLTPLNLQNRNTQINEHIASTQQKIAEWSAKALHGRHRAYLSQPHVDKVKSNEWLKRGELFPETEGFMLAIQDQIVATRNYRKYIIKDQHQPTDLCRHCNTASETIQHITGACKSLAQTDYKHRHDQVAAIIHQQLAYKYKLVNEMIPYYKYKPEIILESKDQKIYWDRTIITDKTIHYNRPDITVHDKTNKTVYLIDIAIPNSHNIQTTISEKLSKYQDLAIEIKTQWKAQTVHIVPVVLSSTGVIPKSLTQSLNTLQMPTHTLYMLQKATILNTCRITRKFLTSSTLSSTFSI

SEQ ID NO: 30813 - protein, 1361 aa, Spodoptera frugiperda
MITRSKLKKQSEATPQLDDESSQFSSSSSTSLFPSISSTSQSFCVSPTPSSSSTIQSVDVVQLANSVDEAVPTTKTAKTRRKWTTDMNEFILRNYLLLTNMETDKNAYLPSLHTKFLEKFPSIEVSRQRIGDQRRAIVQKKLLPQTTIDQIYEQVRTELQITPIRQQHSTITHVTPINNTQNIIQPGQRMKWINEYNETIMKIYYKITYLETNKTAYRKPLHEQFITAFPELSHITEQRLSDQVRAIINNKYINANRLAEIKKQVSEQLIHETDTNQHLSTRSYIAEYPEENIHTQPFISNTHTDMHTNNVSQDTNTNTDTIIPTHSPNTDDNFLNDIQLERLDTIHTNTEINQEIEDLFQQAHQYFADTDPTNRPYIPKQKTSRKFSATVNYINNNILPKYATIDTDFNNLQTIIYSAAWTAAKYNGAKITYTVQTERQTTNTRKRKWQTRLERKIKDLRANIGRLSQYIKGNRSPRLVAAVEIIKAKYRLHAQYENPNTQMTHFLDTMKQKLNAASSRLRRYLTCTNRKLENSRFANNEKFFYRNLTSTGTLTQNVQTPSAETLREFWAGIWENPVCHNHTASWIHEVNLEHEEMQFEFIPIDIFLNVIKNTQNWKSPGTDHIHNYWYKKFTTLHPFLHNHLNTFIQSPHLLPTYITQGITYMIPKDANDSTNPAKYRPITCLQTFYKILTACISNVIYDHLAKHNILAEQQKGCRKYSQGCKEQLTIDAVVMNHAVKSKTDIHTMFIDYQKAFDSVPHSWLLHVLKLYKIHPTIKSFLQSSMQNWQTILKINQSTTTIITQPINIKRGIFQGDALSPLWFCMALNPLSHLLNKTNAGYILTNNSTQYTLSHLIYMDDIKLYAADQMLLSHLADVTQQFSIDICMQFGVDKCKVMSVVKGKFINNSYTLETGQTIEPMEEHDTYKYLGFRQSRQIQHKNTRQELIKKFTHRLNLILKTNLNARNTIKAINTFAIPILTYSFGIIQWSKTNTRKLQRIINTTLTKHRKHHPKSCIQRLILPRKEGGRGLIDIQNLHNKQISSLRSYFHSKSDHSPLHRHVVETDKNFTPLNLQNRDPQTNEIIVTDEDKIAVWSQKALHGRHRSFLSQPHVDKIKSNEWLKRGELFPETEGFMLAIQDQIIATRNYRKFIMRDPNQQNDLCRHCNLASETIQHITGACKSLAQTDYKHRHDQVSAIIHQHLAYKYSLVDQMVAYYKYKPETILENRNYKMYWDRTIVTDKTIHFNRPDITVHDKINKTVYLIDIAIPNSHNIQSTISEKLSKYQDLAIEIKTQWRAQTVHIVPIVLSTTGIIPKSLTQSLNTLHMPTYTVHTLQKATILNTCRITRKFLTSSTLSSTYSI

SEQ ID NO: 30814 - protein, 1364 aa, Noctua janthe
MNTRSKTKKQLQAKLPQIDDETSQPSSSSPSSLFPSIPSSSQSFRVTPTPSSSSISIQSVDVVQETNFVDDTVPTARTATSRRKWSTDMNKFILRTYLHLTHMETDKNAYLPSLHTKFLEKYPDMQVGRQRIGDQRRAIVQKKLLPQETIDQIYEEVRAELQIVHTQIQQHSTQSKTPINTQAGQRMKWTNEYNEAIIRIYYTSTELETNKTAYRKHLHEEFIKIYPELAHLTEQRLSDQVRAIINNKYIHTNRLEEIKNQVSTELRNINTNTQNIEHINNDLQPPDENIHSLSTQYANIYTSTTSNSILLNNSSDTNIVSQTLINTVDESFLNHIDIGLFEPTQNNLNAAHEKNLEIEATFQQAQQLFSDTHPTSRPYIPKQKTSKKFSAIVTYINSVILPNNVNVDTDFIKMQTTIYCAAWTAATCNGAKISDTQNESRTYIKRKPKWQIRIEKKIQSLRSNIGRLTHFINGSRSPKLIAAVEEIKKKYQVHAQYEDSNTQLVHFLDTLKQKLNAASSRLKRYLKCTNRKVQNTKFINNEKIFYRNLATNNRDTSNQSLETPTSETLREFWANIWENPVNHNHQADWINEVTPEIPEMEFEFIPIGTFIDVIKRTHNWKSPGTDNIHNYWYKKFSSIHPFLHNHLNTFIHSPHLLPSYITHGVTYMIPKDINDTINPAKYRPITCLQTIYKILTACLSEVVYEHLTKNNILSEQQKGCRKNSQGCKEQLTIDAVTMNSAVKSKTDIHTMFIDYQKAFDSVPHSWLLNVLSLYKIHPTLKNFLQMSMQNWQTVLKINSSSSTVATEPIHIKRGIFQGDALSPLWFCMALNPLSHLLDKTATGFTLTNSNTQYTLTHLMYMDDIKLYAADKNALVVLADTTQQFSDDICMSFGVDKCKMLSVVKGKIQNNSYTLGSGQLIEPMDEQSTYKYLGFKQSRQIHQKMTKQELVNKYSHRLNLILKTNLNSKNTIKAINTFAIPILTYSFGIIRWSNTDIKKLQRTLNTSLTKYRKHHPKSSIHRLTLPRQEGGRGLIDIHNLHNKQIHSLRAYFHNKSESSALHKHVTENDTKLTPLNLHNRNTQINELVISTAEKIAAWSAKALHGRHRAYLSQPHVDKAKSNEWLKRGELFPETEGFMLAIQDQIIATRNYRKYIIKDPHQPTDLCRHCNTASETIQHITGACKSLAQTDYKHRHDQVASIIHQHLAFKYQLISEMKPYYKYKPELILDNNNQKIYWDRTIITDKTIHFNRPDITLHDKANKTVYLIDIAIPNSHNIQTTISEKLSKYQDLAIEIKTQWKAQTVHIVPIVLSSTGIVPKSLMQSLNTLHMPSHTLQLLQKATILNTCRITRKFLTSSTISSTFSI

SEQ ID NO: 30815 - protein, 962 aa, Nymphalis polychloros
MILKKNVNTDTDFNNLQTIIYCAAWTAAKCNGARMSFTTQNNHQNKSFRKLSWQRRLENKIEKLRANIGRLTQFIRGNRNRKVVAAVELVKTQYQSHAQHENTNTQIEHFLDTLKQKLNAAASRLKRYLTCTARKVQNKKFSNNEKIFYRKLLSTSKNSEQNLEIPPPEIFREFWANRWENPVHHNEHADWVTETTTQIPEMELKFIPIERFIEVIKRTHNWKSPGSDNIHNYWYKKFTSIHSYIHKYLNIFIQSPYLLPKYITHGITYLVPKDKHDTTNPDKYRPITCLQTIYKILSACISEEIYKHLTKHNILAEQQKGCRKNSQGCKEQLTFDAIILNSAAKSKTDIHTMFIDYQKAFDSVPHSWLLYVLKLYNNPTLISFLQNSMQNWQTVLKIKQSSAKSLTTEPIRIQRGIFQGDALSPLWFCLALNPLSQLLNKTNAGFTLYGNNTQYNLSHLMYLDDIRLYSTDKKTLLELASITEQFSNDIHMKFGVDKCKIMSISKGKILNNSYTLETGELIEPMDEQSTYKYLGFKQSRQILQTTTKQELLTRFSHRLNLILKTHLNSKNTIKAINTFAIPLLTYSFGIIQWSKSDIKKLQRIINTHFTKYRKHHPKSCIQRFTLPRKEGGRGLIDIHNLHNKQIPSLRAYFHDKSEHSTLHKHATKIDKKLTPLNLHDKNPQVNEHIISTQQQMIAWANKTLHGRHRADLNQPHVDKEKSNEWLKRGELFPETEGFMLAIQDQIIATRNYRKFIIKDHNQPTDLCRHCNTASETIQHITGACISLAQADYKHRHDQVAAIIHQHLAYKYKLITEMNPYYKYKPESVLDNRNHKIYWDRTIITDKTIHYNRPDITVHDKTNKIVYLIDIAVPNSHNIQTTISEKLSKYQDLAIEIKTQWKAQTVHIVPIVLSSTGIVPKSLTQSLNTLQIPTYVLHILQKAIILNTCRITRKFMFFFFFIS

SEQ ID NO: 30816 - protein, 1374 aa, Phlogophora meticulosa
MQGSAVVDFKSLANRGNKMNTRSKTKKQLQANQPQIDDETSQLSSSSPSSLFSSIPSSSQSFRITPTPSLSSFSIQSADVVQETNFVDDTVPIARTATSRRKWTIEMNKFILRTYLHLTNMDTDKNAYLPSLHTKFLEKYPAMQVSRQRIGDQRRAIVQKKLLPQDTIDQIYEESRAELQMVHTQIQQHATQSNTQFGQRMKWTNEYNEAIIRIYYTTTQLETNKTAYRKHLHEGFINTYPELAHITEQRLSDQVRAIINNRYINTNRLEEIKNQVTLELRNSNTDTQHTEHLNSDFLNTQSQNDLEHLDTNTLTTNVLPSNNPNTVTVPQTLVNTDEIHFLNNIDNDISGPTEPNFPAALEINPEIEATFHQAQQNFINTHPTHRPYIPKQKPSRKFSTIVTYLNTVILPKHVNVDTEFIKLQTLIYCAAWTAATCNGAKIFEISSQNERGAYKQRKPKWQIRLENKIKHLRANIGRLSHFINGNRSPHLIAAVEQIKIKYQLHAQHENSNTQIEHFLDTLKQKLSAAASRLKRYITCTNRKVQNTKFTNNEKTFYRNLTSHNITSNQNLETPSSETLRDFWANIWENPVCHNNHADWVNEASPEILEMEFEFIPVETFIDVIKRAHNWKSPGTDNIHNYWYKKFSSIHPFLHNHLNTFIQSPHLLPTYITHGVTYMIPKDINDTINPAKYRPITCLQTLYKILTACVSEVVYEHLSKNNILAEQQKGCRKNSQGCKEQLTIDAIIMNSAVKSRKDIHTMFIDYQKAFDSVPHSWLSHVLNLYKINPKIKQFLETTMQNWKTVLKINSSSTTVATEPISIKRGIFQGDALSPLWFCMALNPLSHLLDKTDAGFILSNNNTQYTLTHLMYMDDIKLYAADKKSLFKLADTTQQFSDDICMSFGVDKCKILSIEKGKILNNNYILASGETIEPMDEQSTYKYLGFKQSRQIQQKISKQELLKKFSHRLSLVLKSSLNSRNTIKAINTFAIPILTYSFGIIQWSKTDIKKLQRTVNTLLTKHRKHHPKSCIQRLTLPRQEGGRGLIDIYNLHNKQILTLRAYFHGKSENSSLHKQVTETDKKLTPLNLQNRNTLTNEHIVSTEQKIAAWSQKALHGRHQAYLSQPHVDKIKSNEWLKRGELFPETEGFMLAIQDQIIATRNYRKYIIKDRNQPTDTCRQCNSASETIQHITGACKSLAQTDYKHRHDQVAAIIHQHLAHKYKLIGEMIPYYKYTPETILENRNQKIYWDRTIITDKTIHYNRPDITVHDKSNKIVYLIDIAIPNSHNIQTTISEKLSKYQDLAIEIKTQWKAQTVHIVPIVLSSTGVVPKALTQSLNTLHMPSHTLHMLQKATILNTCRITRKFLTSSTLSSTFLI

SEQ ID NO: 30817 - protein, 1292 aa, Noctua fimbriata
MCSFPMPPIDIFNNNNNNKFILRTYLHLTHMETDKNAYLPSLHTKFLEKYPDMQVGRQRIGDQRRAIIQKKLLPQETIDQIYEEVRTELQVVHTQIQQNSTQSKTPINTQPGQRMKWTNEYNEAIIRIYYTSTELETNKTAYRKHLHEGFINIYPELAHLTEQRLSDQVRAIINNKYIHTNRLEEIKKQVATELRNINTNTQNIEHINNDLQQPDENIHSLSTQYTNIYTPTTSNRILLNNSSDTNIVSQTLTNTVDESFLNHIDIGLFEPTQNNLDAAPEKNLEIEATFQQAQQLFSDTHPTSRPYIPKQKTSKKFSAIVTYINSVILPNNVNVDTEFIKMQTTIYCAAWTAATCNGAKISDTQNESRTYIKRKPKWQIRIDKKIQSLRSNIGRLTHFINGSRSPKLIAAVEEIKKKYQVHAQYEDSNTQLVHFLDTLKQKLNAASSRLKRYLKCTNRKVQNTKFINNEKIFYRNLATNNRDTTNQSLETPRSETLREFWANIWENPVNHNHQADWINEITPEIPEMEFEFIPIGTFIDVIKRTHNWKSPGTDNIHNYWYKKFSCIHPFLHNHLNTFIHSPHLLPSYITHGVTYMIPKDINDTINPAKYRPITCLQTIYKILTACLSEVVYEHLTKNNILSEQQKGCRKNSQGCKEQLTIDAVTMNSAIKSKTDIHTMFIDYQKAFDSVPHSWLLNVLSLYKIHPTLKNFLEISMQNWQTVLKINSSSSTVATEPIHIKRGIFQGDALSPLWFCMALNPLSHLLDKTDAGYKLTNINTQYTLTHLMYMDDIKLYAADKNALVVLADTTQQFSDDICMSFGVDKCKMLSVVKGKIQNNSYTLGSGQLIEPMDEQSTYKYLGFKQSRQIHQKMTKQELVNKYSHRLNLILKTNLNSKNTIKAINTFAIPILTYSFGIIRWSNTDIKKLQRTLNTSLTKHRKHHPKSSIHRLTLPRQEGGRGLIDIHNLHNKQIHSLRAYFHNKAESSALHKHVTENDTKLTPLNLHNRNTQINERLISTPEKIAAWSAKALHGRHQAYLSQPHVDKAKSNEWLKRGELFPETEGFMLAIQDQIIATRNYRKYIIKDPHQPTDLCRHCNTVSETIQHITGACKSLAQTDYKHRHDQVAAIIHQHLAFKYKLISEMKPYYKYKPELILDNNNQKIYWDRTIITDKTIHFNRPDITLHDKVNKTVYLIDIAIPNSHNIQTTISEKLSKYQDLAIEIKTQWKAQTVHIVPIVLSSTGIVPKSLMQSLNTLHMPPHTLQLLQKATILNTCRITRKFLTSSTISSTFSI

SEQ ID NO: 30818 - protein, 1365 aa, Xestia c-nigrum
MNTRSKTKKQLQAKLPQIDDETSSTPSSLFPSISSSSQSFRVTPTPSFSSISIQSADVVQETNFVDDTVPAARTATSRRKWSIDMNKFILRTYLHLTHMETDKNAYLPSLHTKFLEKYPDMQVGRQRIGDQRRAIVQKKLLPQETIDQIYEEVRVELQTVYTQIQQHSTQSKTPTNTQPGQRMKWTNEYNEAVIRIYFTITQLETNKTAYRKHLHEEFINIYPELTHLTEQRLSDQVRAIINNKYIHTNRLTEIKKQVASELKNNNTNTQNTEHINNVLQQPDENMFSPSTQCININVSNTTTNTPATSNITLLNNSSDTNIVSQTLTADEHFLNHIDIGLFEPTPNNFDATPEKNLEIETTFQQAQQLFSDTHPTSRPYIPKQKTSKKFSAIVTYINSVILPNNVNADTDFAKLQTTIYCAAWTAATCNGAKISDTQNESRTYIKRKPKWQIRMDKKIQSLRANIGRLTHFINGSRSPKLIAAVEKIKKNYQVHAQYQDSNTQLVHFLDTLKQKLNAASSRLKRYLKCTNRKVQNSKFINNEKIFYRNLATNNSETTNQSLETPTSETLREFWANIWENPVNHNHQADWINEVTPEIPEMEFEFIPIPTFIDVIKRTHNWKSPGTDNIHNYWYKRFSSIHPFLHNHLNAFIHSPHLLPSYITHGVTYMIPKDVNDTKNPAKYRPITCLQTIYKILTACLSEVVYEHLTNNNILSEQQKGCRKNSQGCKEQLTVDAITMNSAVKSKKDIHTMFIDYQKAFDSIPHSWLLKILSLYKIHPTLKHFLEISMQNWQTVLKINSSSSIVATEPIHIRRGIFQGDALSPLWFCMALNPLSHLLDKTDAGYTLTNITTHYTLTHLMYMDDIKLYAPDKNALFILADTTQQFSDDICMSFGVDKCKILSIVNGKVQNNSYTLGSGQLIEPMDEQSTYKYLGFKQSRQIHQKMTKQDLLSKFSHRLNLILKTNLNSKNTIKAINTFAIPILTYSFGIIRWSNTDIKKLQRTVNTSLTKHRKHHPKSSIHRLTLPRQEGGRGLIDIHNLHNKQIHSLRSYFYNKSENSSLHKHVTENDRKLTPLNLHDRNTQINEVPITTQEKITAWSAKALHGRHRAYLSQPHVDKTKSNEWLKRGELFPETEGFMLAIQDQIIATRNYRKYIIKDPHQPTDLCRHCNTVSETIQHITGACKSLAQTDYKHRHDQVAAIIHQHLAFKYKFISEMKPYYKYKPEITLENRNQKIYWDRTIITDKTIHFNRPDITLHDKTNKTVYLIDIAIPNSHNIQTTISEKLSKYQDLAIEIKTQWEAQTVHIVPIVLSSTGIVPKSLMQSLNTLHMPPHTLHLLQKATILNTCRITRKFLTSSTISSTFSI

SEQ ID NO: 30819 - protein, 765 aa, Noctua janthe
MEFEFIPIGTFIDVIKRTHNWKSPGTDNIHNYWYKKFSSIHPFLHNHLNTFIHSPHLLPSYITHGVTYMIPKDINDTINPAKYRPITCLQTIYKILTACLSEVVYEHLTKNNILSEQQKGCRKNSQGCKEQLTIDAVTMNSAVKSKTDIHTMFIDYQKAFDSVPHSWLLNVLSLYKIHPTLKNFLQMSMQNWQTVLKINSSSSTVATEPIHIKRGIFQGDALSPLWFCMALNPLSHLLDKTATGFTLTNSNTQYTHTHLMYMDDIKLYAADKNALVVLSDTTQQFSDDICMSFGVDKCKMLSVVKGKIQNNSYTLGSGQLIEPMAEQSTYKYLGFKQSRQIHQKMTKQELVNKYSHRLNLILKTNLNSKNTIKAINTFAIPILTYSFGIIRWSNTDIKKLQRTLNTSLTKYRKHHPKSSIHRLTLPRQEGGRGLIDIHNLHNKQIHSLRAYFHNKSESSALHKHVTENDTKLTPLNLHNRNTQINELVISTAEKIAAWSAKALHGRHRAYLSQPHVDKAKSNEWLKRGELFPETEGFMLAIQDQIIATRNYRKYIIKDPHQPTDLCRHCNTASETIQHITGACKSLAQTDYKHRHDQVASIIHQHLAFKYQLISEMKPYYKYKLELILDNNNQKIYWDRTIITDKTIHFNRPDITLHDKANKTVYLIDIAIPNSHNIQTTISEKLSKYQDLAIEIKTQWKAQTVHIVPIVLSSTGIVPKSLMQSLNTLHMPSHTLQLLQKATILNTCRITRKFLTSSTISSTFSI

SEQ ID NO: 30820 - protein, 1362 aa, Mythimna ferrago
MNTRSKTKKQLQASMPQTDDETMQPFSLSPSSLFPSISSSSQSFRVTPTPSSSSIQSADVVQETNFVEDTVPTARTVTSRRKWSIDMNKFILRTYLYLTNMDTDKNAYLPSLHAKFLEKYPDMQVSRQRIGDQRRAIVLRKLLPQDTIDQIYEEVRAELQICHTQIQQHSTQSNTQFSQRMRWTNEHNEAIIRIYYNVTQLETNKTVYRKHLREEFINIYPELGHVSEQRLSDQVRAIINNVYIDTKRLKEIRNQVAVELENTNTNAQNTEQTSGDNLNTQLQIESDLSVTIANFPDTPTNTLTTNMALNDSTGADIVLDSLASIEDDNNFLKNINISQSEPIYLNSISESSTEIEATFQQAQLSFNDTHPTNRPYIPKQKTSRKLTAIVNYINTVILPKHVNGNTEFITLQTIIYCAAWTAAVCNGAKISDSTQHERHTYKYRKPKWQIRLEKKIEYLRVNIGRLTHFINGSRSPRLVAAVEQIKSKYQLHAQHENSNTQIEHFLDTLKQKLSAASSRLKRYITCTNRKVENTKFKNNEKIFYRNLMSNNRDTTNQSLDTPSPETLREFWANIWENPVNHNDHADWVSDATTEIPDMEFEFISLDTFIGVIKRIHNWKSPGTDNIHNYWYKKFSSIHPFLYNHLNTFIQSPHLLPKYITHGVTYMIPKDKNDTINPAKYRPITCLQTFYKILTACVSEIVYDHLIKNNILAEQQKGCRKHSQGCKEQLTIDAIAMNSAVKSRKDIHTMFIDYQKAFDSVPHSWLLHVLKLYKIHPTLKQFLETSMQNWQTVLKINSSATTVATEPISIKRGIFQGDALSPLWFCMALNPLSHLLDKTDVGFTLANHDTQYKLTHLMYMDDIKLYAADKEALFQLADTTQLFSDDICMSFGVDKCKILSVVKGKIQNNSYTLGSGESIEPMDEHSTYKYLGFKQSRQIQQKLSKEELLKKFSHRLNLILKSNLNSKNTIKAINTFAIPILTYSFGIIQWSKTDIKKLQRTVHTLLTKHRKHHPKSCIQRLTLPRQEGGRGLIDIQNLHNKQIHSLRLYFHYKSENSLLHKQVSDIDKKLTPLNLQNKNTQINEQITSTQQKIAAWSEKALHGRHRAALSQPHVDKLMSNEWLKRGELFPETEGFMLAIQDQIIATRNYRKYIMKDQNQPTDFCRHCNSASETIQHITGACKSLVQTDYKHRHDQVASIIHQHLAYKYKLVTEMMPYYKYNPEIILENKDIKIYWDRTIITDKTIHYNRPDITVHDKTNKIVYLIDIAIPNSHNVQTTISEKLSKYQDLAIEIKTQWKAQTVHIVPIVLSSTGIIPKSLAQSLETLHMPAQTLYMLQKATILNTCRITRKFLTSSTLTTTFSI

SEQ ID NO: 30821 - protein, 1362 aa, Ochropleura plecta
MNTRSKTKKQLQANLPQIDDETSQPSSSSPSSLFPSIPSSSQSFRVTPTPSCSSISIQSADVVQETNSVDDTVPTAKAATRRRKWTIEMNKFILRTYLHLTTMETDKNAYLPPLHTKFLEKYPAMQVSRQRIGDQRRAIIQKKLLPQDTIDQIYEEVRSELQIIHTQIQQHSTQPCTQPGQRMRWTNECNETIITIYYTITQLETNKTAYRKKLHEEFIIKYPELAHITEQRLSDQVRAIINNKYIHENRLIEIKNQVTSELSNRNTNTQNIEDLNNYHRNSQTQDDSEQILATNTSFSDTPINSHMSNIILNNSIDSDIASRTVVNIDDENFLDNIHAGQFVPTQTNFDPVPEIESTFHQAQQNFNDTHPINRPYIPKQKTSRKFSAIVTYINTVILPKHLNVDTEFTKLQTIIYCAAWTAATCNGAKISDPAQNERRPNTQRKPKWQIRLEKKIENLRANIGRLTHFNNGCRSPKLIAAVEDIKIKYQLHAQYENSNTQIAHFMDTLKQKLSATSSRLKRYITCTNRKVQNTKFINNEKIFYRNLTSNNRDTTNQSLETPTSETLRQFWANIWENPVQHNNSADWVNEATPEIPEMEFEFIPIDTFIDVIKRTHNWKSPGSDNIHNYWYKKFSSLHPFLHNHLNTFIQSPHLLPQYITHGVTYMIPKDTNDTANPAKYRPITCLQTIYKILTACVSEIVYEHLTKNNILAEQQKGCRKNSQGCKEQLTIDSITMNSAVKSRKDIHTMFIDYQKAFDSVPHSWLLHVLSLYKIHPTLKQFLETSMQNWQTVLKINSPSTTVTTEPIRIKRGIFQGDALSPLWFCMALNPLSLLLDKTGGGFTMENNNTQYTLTHLMYMDDIKLYADDEVALYQLADATQQFSDDICMSFGVDKCKILSIVKGKIQNNSYTLLSGESIEPMDEQSTYKYLGFKQSRQIQQKMSKQELLKKFSHRLNLILKSNLNSRNTVKAINTFAIPILTYSFGIIRWSKTDIKTLQRTIHTHLTKHRKHHPKSCIQRLTLPRQEGGRGLIDINNLHNKQILSLRAYFHNKSENSPLHKQVTEADKKLTPLNLQNRNTQINEHIVSTQQKITAWSEKALHGRHRACLSQPHVDKIKSNEWLKRGELFPETEGFMLAIQDQIISTRNYRKYIIKDTNQPTDLCRHCNTASETIQHITGACKSLAQTDYKHRHDQVAAIIHQQLAFKYKLVNEMIPYYKYKPEVTLENNHQKLYWDRTIITDKTIHYNRPDITVHDKTNKTVYLIDIAIPNSHNIQTTISEKLSKYQDLAIEIKTQWKAQTVHIVPIVLSSTGIIPKSLTQSLNTLQMPTHTLYMLQKATILNTCRITRKFLTSSTISSTFSI

SEQ ID NO: 30822 - protein, 1381 aa, Ochropleura plecta
MNTRSKSKKQLQANLPQIDDENPQFSSSSPSSLFSSTPSSSQSFRVTPTQSPSSISVQSVDVVQETNVVDETVPATKTATTRRKWSIEMNKFILRTYLHLTHMESDKNAYLPSLHTQFLEKYPDMQVGRQRIGDQRRAIVQKKLLPQETIDQIYEEVRTELEMVHTQIQLHSTQVRTTTINTQSGQRMKWTKEYNESVMRVYYTVTQLEANKTAYRKQLHEEFTNIYPELSHLTEQRLSDQVRAIINNKYIHVNRLEEIKKQIAEELGINNTSTQNSDEIENVNLNTQSQNVLGQSDEYIHTENTPFTNTHIFDAPANTVTRDISSNERIDDPGVMPSTPQNTDEDNFLNSIEIGLAGSTQTNTGALLETNPEIETTFQQAQQLFSETHPTDRPYIPKQKTSRKFSAIVAYINNIILPKIVNKDTEFIQLQTIIYCSAWTAAKCNGAKILDYSQSERRTYKQRKPKWQKRLEKKIANLRANIGRLTHFMNGSRSQKLITAVEAIKIKYKLHAQHENSNTRLEHFLDTLKQKLNAAASRLKRYITCTNRKKENTKFWNNEKIFYRNLASNNRDNSTQTLETPPPGALRNFWANIWENPVNHNYHADWIKHVTPEIPAMEFHFIPINTFIDVIKRTHNWKSPGTDNIHNFWYKKFTAIYPFIHHHLNTFIKSPHLLPTYITQGVTYMIPKDMTNTTDPAKYRPITCLQTLYKILTACISETIYEHLIKHNILAEQQKGCRKNSQGCKEQLTIDAVAMNSAVKSKKDIYTMFIDYQKAYDSVPHSWLLHILNVYNIHPTLRIFLESAMQNWQTVLKINQASTTLTTEPIHIKRGIFQGDALSPLWFCMALDPLSHLLDKTNVGFTLTSDNTQFTLTHLMYMDDIKLYAADKDSLFHLADTTQEFSNDISMQFGVDKCKILSVCAGKIQSNSYPLGSGESIEPMDEHSTYKYLGFNQSRQIEQKMIKVELRKKFTHRLNLILKSNLNSRNTIKAINTFAIPILTYSFGIIRWSKTDIRKLQRTINTLLTKHRKHHPKSCIQRLTLPRQEGGRGLVDIHNLHNKQIASLRSYFHNKSEHSSLHKHVTEADKKLTPLNLQSRNTQINESITSTQQKIAVWSGKSLHGRHRACLSQPHVDKAKSNEWLKRGELFPETEGFMLAIQDQIIATRNYRKYIIKDPNQQIDMCRHCNSASETIQHITGACKSLAQTDYKHRHDQVAAIIHQHLAHKYNLIGEMIPYYKYKPEVILENNNQKIYWDRTIITDKTIHYNRPDITVHDKINKTVYLIDIAIPNSHNIQTTISDKLSKYQDLAIELKTQWSAQTVHIVPIVLSSTGVIPKSLTQSLSTLHMPSHTLYMLQKATILNTCRITRKFLTSSTLSSTFSI

SEQ ID NO: 30823 - protein, 1365 aa, Xestia xanthographa
MNTRSKTKKQLQAKLPRIDDETSQPSSSSPSSLFPSIPSSSQSFRVTTTPSSLSISIQSVDVVQETGFVDDTVPSAKAATSRRKWSIEMNKFILRTYLHLTSMETDKNAYLPPLHTKFIEKYPAMQVSRQRIGDQRRAIVQKKLLPQDTIDQIYEEVGAELQMIHTQIQQHSTQPSTQSGQRMRWTNEYNETIIRIYFTATQLETNKTAYRKKLHEEFINKYPELAHITEQRLSDQVRAIIKNKYIHDNRLEEIKNQVASELSNNNNYTQNIEDINHDHWNTQTQNYSEQPATNTNFFDTPNNTLTTNIILNNSTDTNIVSQTVVNIDDELFLNNIDVGQYGPAQTNFDTTPETNPEIESRFHQAQINFNCTHPTNRPYIPKQKTSRKFSAIVSYINTVILPKHVNADTEFAKLQTIIYCAAWTAATCNGAKISDPIQNERRPYTQKKPKWHIRLEKKIENLRANIGRLTHFMNGCRSQKLIAAVEEIKIKYQLHAQYENPNTELAHFLDTLKQKLSAASSRLKRYITCTNRKVENTKFINNEKIFYRNLTSNNKDNTNQSLETPTSETLREFWANIWENPVHHNNHADWVKEATPEIPEMEFEFIPIETFIDVIKRTHNWKSPGTDNIHNYWYKKFSSINPFLYNHLNTFIQSPHLLPQYITHGVTYMIPKDTNDTKNPAKYRPITCLQTLYKILTACVSEIVYEHLTKNNILAEQQKGCRKNSQGCKEQLTIDAITMSSAVKSKKDIHTMFIDYQKAFDSVPHSWLLHVLNLYKIHPTLKQFLGTSMQNWQTVLKINSSSSTVATEPICIRRGIFQGDALSPLWFCMALNPLSHLLDQTGTGFTLDSNNTQYTLTHLMYMDDIKLYAADKEALYQLADATQQFSEDICMSFGVDKCKILSIVKGKFQNNSYTLLSGASIEPMDEQSTYKYLGFKQSRQIQQKMSKQELLKKFTHRLNLILKSNLNSRNTIKAINTFAIPILTYSFGIIRWSKTDIKKLQRTIHTLLTKHRKHHPKSCIQRLTLPRQEGGRGLIDIHNLHNKQILSLRAYFHNKSETSLLYKQVTETDNKLTPLNLQNRNTQINEHIVSTQQKIAEWSEKALHGRHRACLSQPHVDKIKSNEWLKRGELFPETEGFMLAIQDQIIATRNYRKYIIKDPNQPTDLCRHCNNASETIQHITGACKSLAQTDYKHRHDQVAAIIHQQLAFKYKLVSEMIPYYKYKPEVALENNDQKIYWDRTIITDKTIHYNRPDITVHDKTNKTVYLIDIAIPNSHNIQATISEKLSKYQDLAIEIKTQWKVQTVHIVPIVLSSTGIIPKSLTQSLNTLQMPNHTLYMLQKATILNTCRITRKFLTSSTLSSTFSI

SEQ ID NO: 30824 - protein, 1421 aa, Xestia xanthographa
MPRAAWLGERLVASVPTLDNRGPPVLFTLATVNAGLCCGRLFKSLASRGNNMNTRSKTKKILQASLPQIDDETSRFSSSSPSSLFPSIPSSSQSFRVTPMPSSSPISIQSVDVVQETNFVDDTVPAARTATSRRKWSIDMNKFILRTYLYLTHMETDKNAYLPSLHTKFLEKYPDMQVSRQRIGDQRRAIVHKKLLPQETIDLIYEEVRVELQTVHTQIQQHSTQSKTPINTQPSQRMKWTNEYNEAVIRIYYTTTQLETNKTAYRKHLHEEFINIYPELAHLSEQRLSDQVRAIINNKYIHTNRLEEIKNQVASELRNNNTNTQHTELINNDLQQPDENMYSLSTQHTNINISDTTTNTPTTSNITLLNNSSDTNIVSQTHTVVDDNFLNHIDIGIFEPTQNNFDAAPEKNLEIEAAFQQAQQLFSNTHPTSRPYIPKQKTSKKFSLIVTYINSVILPNNVNVDTDFVKLQTAIYCAAWTAATCNGAKISDTQNESRTYIKRKPKWQIRIEKKILSLRANIGRLTHFINGSRSPKLIAAVEQIKKKYQVHAQYEDSNTQLVHFLDTLKQKLNAASSRLKRYLKCTNRKVQNTKFINNEKIFYRNLTTTNRDTTNQSLETPTSETLREFWANIWENPVNHNHQADWINEVTPDIPEMEFEFIPIGTFIDVIKRTHNWKSPGTDNIHNYWYKKFSSIHPFLHNHLNTFIHSPHSLPSYVTHGVTYMIPKDINDTINPAKYRPITCLQTIYKILTACLSEVVYEHLTKHNILSEQQKGCRKNSQGCKEQLTIDAVTMNSAVKSKTDIHTMFIDYQKAFDSVPHSWLLDILSLYKIHPTLKHFLEISMQNWQTVLKINSSSSTVATEPIHIKRGIFQGDALSPLWFCMALNPLSHLLDKTDAGYTLTNITTHYTLTHLMYMDDIKLYAPDKNALFVLADTTQQFSDDICMSFGVDKCKILSVVKGKVQNNSYTLGSGQSIEPMDEQSAYKYLGFKQSRQIHQKMTKQELVNKFSYRINLILKTNLNSKNTIKAINTFAIPILTYSFGIIRWSNTDIKKLQRTINTSLTKHRKHHPKSSIQRLTLPRQEGGRGLIDIHNLHNKQIHSLRAYFHNKSENSSLHKHVTENDMKLTPLNLHNRNTQINELLITTQEKIAAWSAKALHGRHRAYLSQPHVDKAKSNEWLKRGELFPETEGFMLAIQDQIIATRNYRKYIIKDPHQPTDLCRHCNTASETIQHITGACKSLAQTDYKHRHDQVASIIHQHLAFKYKLISEMKPYYKYKPEITLENRNQKIYWDRTIITDKTIHFNRPDITLHDKTNKTVYLIDIAIPNSHNIQTTISEKLSKYQDLAIEIKTQWEAQTVHIVPIVLSSTGVVPKSLTQSLNTLDISPHTLHLLQKATILNTCRITRKFLTSSTISSTFSI

SEQ ID NO: 30825 - protein, 1365 aa, Xestia xanthographa
MNTRSKTKKQLQAKLPHIDDETSQPSSSSPSSLFPSIPSSSQSFRVTPTPSSSSISIQSADVVQETGFVDDTVPSAKAATSRRKWSIEMNKFILRTYLHLTSMETDKNAYLPPLHTKFIEKYPAMQVSRQRIGDQRRAIVQKKLLPQDTIDQIYEEVRAELQMIHTQIQQHSTQPSTQSGQRMRWTNEYNETIIRIYFTATQLETNKTAYRKKLHEEFINKYPELAHITEQRLSDQVRAIIKNKYIHDNRLEEIKNQVASELSNSNSYTQNIEDINHDHWNTQTQNDSEQPATNTNFFDTPNNTLTTNIILNNSTDTNIVSQTVVNIDDELFLNNIDVGQYGPAQTNFDTTPETNPEIESRFHQAQINFNCTHPTNRPYIPKQKTSRKFSAIVSYINTVILPKHVNADTEFAKLQTIIYCAAWTAATCNGAKISDPIQNERRPYTQKKPKWHIRLEKKIENLRANIGRLTHFINGCRSQKLIAAVEEIKIKYQLHAQYENPNTELAHFLDTLKQKLSAASSRLKRYITCTNRKVENTKFINNEKFFYRNLTSNNKDNTNQSLETPTSETLREFWANIWENPVHHNNHADWVKEATPEIPEMEFEFIPIETFIDVIKRTHNWKSPGTDNIHNYWYKKFSSIHPFLYNHLNTFIQSPHLLPQYITHGVTYMIPKDTNDTKNPAKYRPITCLQTLYKILTACVSEIVYEHLTKNNILAEQQKGCRKNSQGCKEQLTIDAITMSSAVKSKKDIHTMFIDYQKAFDSVPHSWLLHVLNLYKIHPTLKQFLGTSMQNWQTVLKINSSSSTVATEPICIRRGIFQGDALSPLWFCMALNPLSHLLDQTGTGFTLDSNNTQYTLTHLMYMDDIKLYAADKEALYQLADATQQFSEDICMSFGVDKCKILSIVKGKFQNNSYTLLSGASIEPMDEQSTYKYLGFKQSRQIQQKMSKQELLKKFTHRLNLILKSNLNSRNTIKAINTFAIPILTYSFGIIRWSKTDIKKLQRTIHKLLTKHRKHHPKSCIQRLTLPRQEGGRGLIDIHNLHNKQILSLRAYFHNKSETSLLHKQVTETDNKLTPLNLQNRNTQINEHIVSTQQKITEWSEKALHGRHRACLSQPHVDKIKSNEWLKRGELFPETEGFMLAIQDQIIATRNYRKYIIKDPNQPSDLCRHCNNASETIQHITGACKSLAQTDYKHRHDQVAAIIHQQLAFKYKLVSEMIPYYKYKPEVALENNDQKIYWDRTIITDKTIHYNRPDITVHDKTNKTVYLIDIAIPNSHNIQATISEKLSKYQDLAIEIKTQWKVQTVHIVPIVLSSTGIIPKSLTQSLNTLQMPNHTLYMLQKATILNTCRITRKFLTSSTLSSTFSI

SEQ ID NO: 30826 - protein, 1370 aa, Agrotis ipsilon
MNTRSKTKKLLQANVPQIDDEISQLSSSSLSSLSPSIPSSSQSSCVTPTPSSSSVIIQSVDVVQETNFVDDTVPATTTTTTRRKWSIEMNKFILRTYLHLTHLDTDTKAYLPSLHTKFLEKYPFMQVGRQRLGDQRRAIVRKKLLPQETIDQIYEEVRNELQTVHSQIQQHTTQSRTPINTLSGQRMKWTNECNETIMKIYFRVTELEANRTAYRKKLHEEFINTYPELIHISEQRLSDQVRAIINNSYIHEDRLKEIKDQIAEELRNSNTYTQNNDYISNINLTTQSQNEVEHSDEYIHILNTSHTNSSDIPVNSFTENILLNENSLPSSLQNTAEDNFLNHIEIGLTGFTQANTDAPSETNPDIEAMFQQAQELFSETHPTNRPYIPKQKMSRKFSSIVSYINNVILPRFVTKDTEFIQLQTIIYCAAWTAAKCNGARILDPSQSERRIFKHRKPKWQIRLEKKIENLRANIGRLTHFMNGSRSQKLIAVVEQIKIKYQIHSQHENSNTQLEHFLDTLKQKLNAASSRLKRYITCTNRKSQNTKFVNNEKFFYRNLTTNNNNKSLETPPSEVLRDFWANIWENPVNHNEDAGWINEALPEIPGMVFEFLPVNTFIDVINRTHNWKCPGTDNIHNYWCKKFTSIHPFIHSHLNTFIQSPHLLPTYITHGVTYMIPKDINDTTNPAKYRPITCLQTIYKILTACISDMIYEHLTKHDILAEQQKGCRKHSQGCKEQLTIDAVAMNSAVKNKKDIHTMFIDYQKAFDSVPHSWLLHVLKIYNIHPTIRSFIESAMQNWQTVLKINQASTTVATDPIHIRRGIFQGDALSPLWFCMALNPLSHLLDKTNSGFTLINDNTQFTLTHLMYMDDIKLYSGDKDSLFNLADTIQEFSTDIRMQFGVDKCKILSIVKGKIQHNSYTLGSGESIEPMDEHSTYKYLGFKQSRQIEQKMTKTELLKKFTHRLNLILKTSLNSRNTIKAINTFAIPILTNSFGIIRWSKTDIKRLQRSINTLFTKYRKHHPKSCVQRLTLPRKEGGRGLIDISNLHNKQIHSLRSYFHNKSAHSSLHKYVTEADKKLTPLNLQNRTIQINENLISTHQKIAAWAGKALHGRHRACLSQPYVDKTKSNEWLKRGELFPETEGFMLAIQDQVIATRNYRKYIIKDPNQPTDSCRHCNSASETIQHITGACKSLAQTDYKHRHDQVAAIIHQHLAHKYNFVREMVPYYKYKPEITFENTNHKIYWDRTIITDKTIHYNRPDITVHDKTNNTVYLIDIAIPNTHNIQTTISEKLSKYQDLAIELKTQWKAQTVHIVPIVISSTGVIPKSLTQSLNTLHMPSHTLYMLQKATILNTCRITRKFLTSSTVSSTFSI

SEQ ID NO: 30827 - protein, 1387 aa, Spodoptera exigua
MPTLETRGPPVSFTLATVNAGLCCGRLFRSLATRGNHMITRSKLKKLSQPDDESSQSSSSSSRSLFPSVSSSSQSFCVSPTPSSSSTVQSVDVVQLTNSVDEAVPTTSTAKTRRKWTTDMNEFILRNYLLLTNLETDKNAYLPSLHIKFLEKYPSMEVSRQRIGDQRRAIVQRKLLPQSKIDQIYNQIRAQLQITPIRQQHLTTTQVTNIQPGQRMKWTNEYNETIMKIYYKITFLETNKTAYRKSLHEQFINIHPELSHITEQRLSDQVRAITNNKYITVKRLAEIKKQVSEQLIHETNTNHHLNRHSNIQEYPDGSNQAHSFISDTLTHTNDISHDVNINTDNTITPNSLNVDDNFLNDIQLEQFDTIHANQNETEINQELEDLFQQAYEYFIDTDPTKRPYIPKQRTSRKFSIIVNYINNIIFPKYANTDTDFNNLQTIIYSAAWTAAKYNGAKISYTVQTERQTTTRKPKWQIRLEQKIRSLRANIGKLSQYIRGIRSQRLVAAVEVIKAKYQLHAQYENPNTHMTHYLDTMKQKLNAASSRLRRYLTCTNRKLENSRFTNNEKFFYRNLTSNSTLTQNIQTPSAETLREFWAGIWENPVYHNNTAAWIHEANLDHEGMEFETIPIDTFINVIKHTHNWKSPGTDHIHNYWYKKFTSLHPYLHNHLNTFIQTPHLLPTYITQGITYMIPKDMNDTTNPAKYRPITCLQTFYKIITACISELINNHLTKYETLAEQQKGCRKYSQGCKEQLTIDAVIMNHAVKSKTDIHTMFIDYQKAFDSVPHSWLLQVLNLYKIHPTIKLFLQSTMQNWQTVLSINQTTAKIVTQPIYIKRGIFQGDALSPLWFCMALNPLSHLLNRTNAGYTLTNNGTQYILTHLMYMDDIKLYAADQMLLSHLADVTQQFSTDICMQFGVDKCKVMSVVKGKVENNSYTLQTGQTIEPMEEHDTYKYLGFRQSRQIQHKNTRQELIRKFTHRLNLILKTNLNARNTIKAINTFAIPILTYSFGIIQWSKTNTRKLQQTINATLTKHRKHHPKSCIQRLTLTRKEGGRGLIDIQNLHNKQISSLRTYFHSKSEHSLLHTHIVETDKNFTPLNLQSRDTQTNEIIVNDEDKIAVWSEKALHGRHRSFLSQPHVDKIKSNEWLKRGELFPETEGFMLAIQDQVIATRNYRKYIMKDPNQQNDLCRHCNLASETIQHVTGACKSLAQTDYKHRHDQVSAIIHQHLAYRYSLVDQITAYYKYKPETILENRNCKIYWDRTIVTDKTIHFNRPDITVHDKVNKIVYLIDIAIPNSHNIQSTISEKLSKYQDLAIEIKTQWRVQTVHIVPIVLSTTGIIPKSLTQSLNTLQMPAYTLHTLQKATILNTCRITRKFLTSSTLTSTYSI

SEQ ID NO: 30828 - protein, 1089 aa, Amphipyra berbera
MNTVSYTPSTSHINTINSYTLTNTLTTDVPLNNSAYTDLITQTLTDPQNTSEENLLNNIHIEQTDPTQTNLDIAPESNPEIDDTFQQAQQYFTDTHPTNRPYIPKQKTSRKFSATVKYINTIILPKYVNVDTDFNTLQDAIYCAAWTAAKCNGAKLSHLAQSEHRTRPHRKPNWQIRLEMKIGNLRANIGRLTQFIRGNRNRKVVAAVEAIKIKYQLHAQHENSNTQIDHFLDTLKQKLNAASSRLKRYKTCTDRKVQNTKFINNEKIFYRNLTSMNKDASSNQNIETPSPESLREFWANIWEIPVHHNTHADWINETSSQIPEMEFELIPIDTFIDVIKRTHNWKSPGTDNIHNYWYKKFTSIHSYIHNHINTFIRSPHLLPTYITHGITYMIPKDINDTINPAKYRPITCLQTLYKILTACISEVVYKHLTEHNILAEQQKGCRKNSQGCKEQLTIDAIVMNTAVKNKKDIHTMFIDYQKAFDSVPHSWLLHVLHLYKIHPTLISFLHTSMQNWQTVLKINQASATLTTEPISIQRGIFQGDALSPLWFCLALNPLSDLLDKTDVGFTLKNNDTQYTLTHLMYMDDIKLYAADKTSIFKLADTTQQFSQDIHMQFGVDKCKILSITKGKIQNNSYTLGSGESIEPMDEQSTYKYLGFKQSRQIQQKITKQELLKKFSYRLNLILKTHLNSRNTIKAINTFAIPILTYSFGIIQWSKTDIKKLQRTINTHFTKHRKHHPKSCIQRLTLPRQEGGRGLIDIHNLHNKQILSLRAYFHDKSEHSPLHKHTTNLDKKLTPLNLQDRNTQTNEHITSTQQKITAWADKALHGRHRAYLSLSHVDKEKSNEWLRRGELFPETEGFMLAIQDQIIATRNYRKYIIKDPNQPTDLCRHCNTASETIQHITGACKSLAQTDYKHRHDQVAAIIHQNLAYKNKLISEMNPYYKYKPETILENRNHKIYWDRTIITDKTIHYNRPDITVHDKTNKTVYLIDIAIPNSHNIQTTISDKLSKYQDLAIEIKTQWKAQTVHIVPVVLSSTGIIPKSLTQSLNTLHMPTYTLHMLQKATILNTCRITRKFLTSSTLASTYSI

SEQ ID NO: 30829 - protein, 1416 aa, Noctua janthe
MPRAAWLGERLVASVPTLDNRGPPVLFTLATVNAGLCCGRPFKSLATRGINMNTRSKTKKQLQAKMPQIDDEISQPSSSSPSSLFPSIPSLSQSFRVTPTPSSSSISIQSADVVQETNFVDDTVPSAKAATSRRKWNIEMNKFILRTYLQLTSIETDKNAYLPPLHTKFLEKYPAMQVSRQRIGDQRRAIVQKKLLPQDTIDQIYEEVRAELQMIHTQIQQHSTQPSTQSGQRMRWTKEYNETLIRIYFTTTQLETNKTAYRKKLHEEFINKYPELAHITEQRLSDQVRAIINNKYIHDNRLKEIKNQVASEFRNSNTNTQSIEDINRDHWDTQTQDDSEQPATNTNFSDTPINTLTTNIILNKSTDTNIVSQTVVNIDDENFLQNIDVGQFGPTQTNFDTATETNPEIESTFHQAQINFDCTHHTNRPYIPKQKTSRKFSAIVSYINTVILPKYVNANTEFIKLQTIIYCAAWTAATCNGAKISDLTQNERHPYTQRKPKWQIRLEKKIDNLRANIGRLTHYINGCRSKKLIAAVEEIKIKYQLHAQHENPNTEIAHFLDTLKQKLSAASSRLKRYITCTNRKVQNTRFINNEKVFYRNLTSNNKDTTNQSLETPTPEILREFWANIWENPVHHNNHADWVKETTPEIPEMEFEFIPIETFIDVIKRTHNWKSPGTDNIHNYWYKKFSSIHPFLYNHLNTFIKSPHLLPQYITYGVTYMIPKDTNDTKNPAKYRPITCLQTLYKILTACISEIVYEHLTKNNILAEQQKGCRKNSQGCKEQLTIDAITMNSAVKSRKDIHTMFIDYQKAFDSVPHSWLLHVLNLYKIHPTLKQFLETSMQNWQTVLKINSSSSTVATEPICIRRGIFQGDALSPLWFCMALNPLSHLLDQTGAGFSLESNNTQYTLTHLMYMDDIKLYAADKEALYQLADATQQFSNDICMSFGVDKCKILSIVKGKIQNNSYTLLSGASIEPIDEQSTYKYLGFKQSRQIQQKMSKQELLKKFSHRLNLILKSNLNSRNTIKAINTFAIPILTYSFGIIRWSKTDIKKLQRTIHTLLTKHRKHHPKSCIQRLTLPRQEGGRGLIDIHNIHNKQILSLRAYFHNKSETSSLHKQITETDNKLTPLNLQNRNTQINEHIVSAQQKIAAWSEKALHGRHRACLSQPHVDKIKSNEWLKRGELFPETEGFMLAIQDQIIATRNYRKYIIKDPNQPTDLCRHCNNASETIQHITGACKSLAQTDYKHRHDQVAAIIHQQLAFKYKLVSEMIRYYKYKPEVALENNDQKIYWDRTIITDKTIHYNRPDITVHDKTNKTGYLIDIAIPNTHNIQTTISEKLSKYQDLAIEIKTQWKVQTVHIVPIVLSSTGIIPKSLTQSLNTLQMPNHTLYMLQKATILNTCRITRKFLTSSTLSSTFSI

SEQ ID NO: 30830 - protein, 1364 aa, Noctua janthe
MNTRSKTKKQLQAKLPQIDDETSQPSSSSPSSLFPSIPSSSQSFRVTPTPSSSSISIQSVDVVQETNFVDDTVPTARTATSRRKWSTDMNKFILRTYLHLTHMETDKNAYLPSLHTKFLEKYPDMQVGRQRIGDQRRAIVQKKLLPQETIDQIYEEVRAELQIVHTQIQQHSTQSKTPINTQAGQRMKWTNEYNEAIIRIYYTSTELETNKTAYRKHLHEEFINIYPELAHLTEQRLSDQVRAIINNKYIHTNRLEEIKNQVATELRNINTNTQNIEHINNDLQPPNENIHSLSTQYANIYTPTTSNSILLNNSSDTNIVSQTLINTVDESFLNHIDIGLFEPTQNNLNAAHEKNLEIEATFQQAQQLFSNTHPTSRPYIPKQKTSKKFSAIVTYINSVILPNNVNVDTDFIKMQTTIYCAAWTAATCNGAKISDTQNESRTYIKRKPKWQIRIEKKIQSLRSNIGRLTHFINGSRSPKLIAAVEEIKKKYQVHAQYEDSNTQLVHFLDTLKQKLNAASSRLKRYLKCTNRKVQNTKFINNEKIFYRNLATNNRDTSNQSLETPTSETLREFWANIWENPVNHNHQADWINEVTPEIPEMEFEFIPIGTFIDVIKRTHNWKSPGTDNIHNYWYKKFSSIHPFLHNHLNTFIHSPHLLPSYITHGVTYMIPKDINDTINPAKYRPITCLQTIYKILTACLSEVVYEHLTKNNILSEQQKGCRKNSQGCKEQLTIDSVTMNSAVKSKTDIHTMFIDYQKAFDSVPHSWLLNVLSLYKIHPTLKNFLQMSMRNWQTVLKINSSSSTVATEPIHIKRGIFQGDALSPLWFCMALNPLSHLLDKTATGFTLTNSNTQYTLTHLMYMDDIKLYAADKNALVVLADTTQQFSDDICMSFGVDKCKMLSVVKGKIQNNSYTLGSGQLIEPMDEQSTYKYLGFKQSRQIHQKMTKQELVNKYSHRLNLILKTNLNSKNTIKAINTFAIPILTYSFGIIRWSNTDIKKLQRTLNTSLTKYRKHHPKSSIHRLTLPRQEGGRGLIDIHNLHNKQIHSLRAYFHNKSESSALHKHVTENDTKLTPLNLHNRNTQINELVISTAEKIAAWSAKALHGRHRAYLSQPHVDKAKSNEWLKRGELFPETEGFMLAIQDQIIATRNYRKYIIKDPHQPTDLCRHCNTASETIQHITGACKSLAQTDYKHRHDQVASIIHQHLAFKYQLISEMKPYYKYKPELILDNNNQKIYWDRTIITDKTIHFNRPDITLHDKANKTVYLIDIAIPNSHNIQTTISEKLSKYQDLAIEIKTQWKAQTVHIVPIVLSSTGIVPKSLMQSLNTLHMPSHTLQLLQKATILNTCRITRKFLTSSTISSTFSI

SEQ ID NO: 30831 - protein, 1373 aa, Acronicta aceris
MITRSKTKKSLQANRLHTDDEQMHVSSSSSTKSLFPSITSSSPSFCISPTPSSSISIQSADVAQETKFVNKPVPTTSTATTRRKWSIEMNKFILRTYLHLTNMETDNNAYLPPLHTKFLEKYPNMQVSRQRIGDQRRAIVQKKLLPQETIDQIYDEVRAELQLIQTQIQQHSTQCSIPINTQLSQRMKWTNEYNEAIMRIYYRITQIETNKTAYRKHLHEEFINLYPNLTHITEQRLADQRRAIINNKYIKDARLSEIKKQVTEELLYTNTQLENNHEHSNTYFIEHSEERENTLNTQNTNTYESCSTYTADLPLNSSINTDEITQTPTGTQNTELTHTEDNFLNNINIGQLDSTQTQLDAATEINPELEDTFQQALKHFTNIHLTNRSYIPKQKSSKKFAAIVKYINTIIFPKYANGDTDFITLQNLIYCGAWTAAKCNGANISLIPQIEHQTRTHRKPNWQIRLEKKIGNLRANIGRLTQYIRGNRNRKVIKAVETIKTKYQLHAQYENSNTQLEHFLDTLKQKLNAASSRLKRYITCTNRKVQNTKFSNSEKTFYRNLTSQNSNQNIETPSADTLRDFWANLWENPVLHNQHANWINETETQITQMEFEFIPIETFIDVIKRTHNWKSPGTDNIHNYWYKKFTYLYPYIYNHLNTFIKSPHLLPTYITQGVTYMIPKDINDTVNPAKYRPITCLQTLYKILTACISEVISKHLTEHDILAEQQKGCRKKSQGCKEQLTIDAITMNSAVKNKKDIHTMFIDYQKAFDSVPHSWLIHVLNLYKIHPTLISFLKTSMLNWQTVLKINQISTTLTTEPISIQRGIFQGDALSPLWFCLALNPLSHLLNKTDVGFTLKNNGSQYTLSHLMYMDDIKLYANSKNTLYKLADTTQKFSQDICMQFGVDKCKILSVSKGKIQNNGYALEIGEVIEPMDEHSTYKYLGFKQTRQIQHKMIKQELLKKFTHRLNLVLKTHLNSKNIIKAINTFAIPILTYSFGIIQWSKSDIKQLQRTINTHLTKHRKHHPKSCIQRLTLPRQEGGRGLIDVHNLHNKQILSLRTYFHDKAAHSPLHKHAIETDKKLTPLNLQDKHTQANEQLISTQQKLALWADKALHGRHRAYLSLPHVDKSKSNEWLRRGELFPETEGFMLAIQDQIIATRNYRKFIIKDPNQPTDLCRHCNNASETIQHITGACKSLAQTDYKHRHDQVASIIHQHLAHKYKLITDMNPYYKYKPEIILENQHHKMYWDRTIITDKTIHYNRPDITVHDKANKIVYLIDIAIPNSHNIQSTISEKLNKYQDLAIEIKTQWKAQTVHIVPIVLSSTGIIPKSLTQSLNTLNMPTYTLHILQKATILNTCRITRKFLTSSTLSSTFSI

SEQ ID NO: 30832 - protein, 1362 aa, Ochropleura plecta
MNTRSKTKKQLQANLPQIDDETSQPSSSSPSSLFPSIPSSSQSFRVTPTPSCSSISIQSADVVQETNSVDDTVPTAKAATRRRKWTIEMNKFILRTYLHLTTMETDKNAYLPPLHTKFLEKYPAMQVSRQRIGDQRRAIIQKKLLPQDTIDQIYEEVRSELQIIHTQIQQHSTQPCTQPGQRMRWTNECNETIITIYYTITQLETNKTAYRKKLHEEFIIKYPELAHITEQRLSDQVRAIINNKYIHENRLIEIKNQVTSELSKRNTNTQNIEDLNNYHRNSQTQDDSEQILATNTSFSDTPINSHMSNIILNNSIDSDIASRTVVNIDDENFLDNIHAGQFVPTQTNFDPVPEIESTFHQAQQNFNDTHPINRPYIPKQKTSRKFSAIVTYINTVILPKHLNVDTEFTKLQTIIYCAAWTAATCNGAKISDPAQNERRPNTQRKPKWQIRLEKKIENLRANIGRLTHFNNGCRSPKLIAAVEDIKIKYQLHAQYENSNTQIAHFMDTLKQKLSATSSRLKRYITCKNRKVQNTKFINNEKIFYRNLTSNNRDTTNQSLETPTSETLRQFWANIWENPVQHNNSADWVNEATPEIPEMEFEFIPIDTFIDVIKRTHNWKSPGSDNIHNYWYKKFSSLHPFLHNHLNTFIQSPHLLPQYITHGVTYMIPKDTNDTTNPAKYRPITCLQTIYKILTACVSEIVYEHLTKINILAEQQKGCRKNSQGCKEQLTIDSITMNSAVKSRKDIHTMFIDYQKAFDSVPHSWLLHVLSLYKIHPTLKQFLETSMQNWQTVLKINSPSTTVTTEPIRIKRGIFQGDALSPLWFCMALNPLSLLLDKTGGGFTMKNNNTQYTLTHLMYMDDIKLYADDEVALYQLADATQQFSDDICMSFGVDKCKILSIVKGKIQNNSYTLLSGESIEPMDEQSTYKYLGFKQSRQIQQKMSKQELLKKFSHRLNLILKSNLNSRNTVKAINTFAIPILTYSFGIIRWSKTDIKTLQRTIHTHLTKHRKHHPKSCIQRLTLPRQEGGRGLIDINNLHNKQILSLRAYFHNKSENSPLHKQVTEADKKLTPLNLQNRNTQINEHIVSTQQKITAWSEKALHGRHRACLSQPHVDKIKSNEWLKRGELFPETEGFMLAIQDQIISTRNYRKYIIKDTNQPTDLCRHCNTASETIQHITGACKSLAQTDYKHRHDQVAAIIHQQLAFKYKLVNEMIPYYKYKPEVTLENNHQKLYWDRTIITDKTINYNRPDITVHDKTNKTVYLIDIAIPNSHNIQTTISEKLSKYQDLAIEIKTQWKAQTVHIVPIVLSSTGIIPKSLTQSLNTQQMPTHTLYMLQKATILNTCRITRKFLTSSTISSTFSI

SEQ ID NO: 30833 - protein, 1421 aa, Xestia xanthographa
MPRAAWLGERLVASVPTLDNRGPPVLFTLATVNAGLCCGRLFKSLASRGNNMNTRSKTKKILQASLPQIDDETSQFSSSSPSSLFPSIPSSSQSFRVTPMPSSSSISIQSVDVVQETNFVDDTVPAARTATSRRKWSIDMNKFILRTYLYLTHMETDKNAYLPSLHTKFLEKYPDMQVSRQRIGDQRRAIVHKKLLPQETIDLIYEEVGVELQTVHTQIQQHSTQSKTPINTQPSQRMKWTNEYNEAVIRIYYTTTQLETNKTAYRKHLHEEFINIYPELAHLTEQRLSDQVRAIINNKYIHTNRLEEIKKQVASELRNNNTNTQHTELINNDLQQPDENMYSLSTQHTNINISDTTTNTPTTSNITLLNNSSDTNIVSQTHTVVDDNFLNHIDIGIFEPTQNNFDAAPEKNLEIEAAFQQAQQLFSNTHPTSRPYIRKEKTSKKFSLIVTYINSVILPNNVNVDTDFVKLQTAIYCAAWTAATCNGAKISDTQNESRTYIKRKPKWPIRIEKKILSLRANIGRLTHFINGSRSPKLIAAVEQIKKKYQVHAQYEDSNTQLVHFLDTLKQKLNAASSRLKRYLKCTNRKVQNTKFINNEKIFYRNLTTTNRDTTNQSLETPTSETLREFWANIWENPVKHNHQADWINEVTPDIPEMEFEFIPIGTFIDVIKRTHNWKSPGTDNIHNYWYKKFSSIHPFLHNHLNTFIHSPHLLPSYVTHGVTYMIPKDINDTINPAKYRPITCLQTIYKILTACLSEVVYEHLTKHNILSEQQKGCRKNSQGCKEQLTIDAVTMNSAVKSKTDIHTMFIDYQKAFDSVPHSWLLDILSLYKIHPTLKHFLEISMQNWQTVLKINSSSSTVATEPIHIKRGIFQGDALSPLWFCMALNPLSHLLDKTDAGYTLTNITTHYTLTHLMYMDDIKLYAPDKNALFVLADTTQQFSDDICMSFGVDKCKILSVVKGKVQNNSYTLGSGQSIEPMDEQSAYKYLGFKQSRQIHQKMTKQELVNKFSYRINLILKTNLNSKNTIKAINTFAIPILTYSFGIIRWSNTDIKKLKRTINTSLTKHRKHHPKSSIQRLTLPRQEGGRGLIDIHNLHNKQIHSLRAYFHNKSENSPLHKHVTENDMKLTPLNLHNRNTQINELLITTQEKIAAWSAKALHGRHRAYLSQPHVDKAKSNEWLKRGELFPETEGFMLAIQDQIIATRNYRKYIIKDPHQPTDLCRHCNTASETIQHITGACKSLAQTDYKHRHDQVASIIHQHLAFKYKLISEMKPYYKYKPEITLENRNQKIYWDRTIITDKTIHFNRPDITLHDKTNKTVYLIDIAIPNSHNIQTTISEKLSKYQDLTIEIKTQWEAQTVHIVPIVLSSTGVVPKSLTQSLNTLEISPHTLHLLQKATILNTCRITRKFLTSSTISSTFSI

SEQ ID NO: 30834 - protein, 1197 aa, Craniophora ligustri
MKWTNAYNETIMRIYYKITQLETNKTAYRKALHEEFISLYPSFAHITEQRLSDQRRAIINNNYINNARLAEIKKQVAEELQYRNTQTEIIHNIQPNTYIQNSLEHADNYGLTLNTQNTNINIRSDTPINTQTTNFLSTNSIDSDIVAQTPLDTHNMENIQIEDNFLKNIDTGQTDSTPIHSNNIETNPDIENTFQQAQLYFADTHPTNRPYIPKQKTSRKFIAIVTYINNIIFPKYTNVNSDFITLQTIIYCGAWTAAKCNGAKISHIPQNENLTRSKRKPNWQIRLEKKIGSLRANIGRLTQYIRGNRSSKVVAAVEAIKTKYENHAQYENSNTEMVHFLDTLKQKLNAASSRLKRYITCTNRKAQNAKFVNNEKNFYRNLTSTNTDNSNQNLQTPPADTLRNFWADIWENPVLHNHHADYINETATDITHMEFEFIPIETFIDVIKRTHNWKSPGSDNIHNYWYKKFTNLHPYIHNHLNTFIQSPQLLPTYITHGVTYMIPKDKNDTLNPAKYRPITCLQTIYKILTACISEEVYKHLINNDILAEQQKGCRKNSQGCKEQLTIDAIIMNNAVKNKKDICTMFIDYQKAFDSVPHSWLLHVLNLYKIHPTLISFLKTSMLNWQTVLKINQASTTLTTEPIFIQRGIFQGDALSPLWFCLALNPLSYLLNKTSTGFTLTNNDTHYTLSHLMYMDDIKLYASDTISLNKLADITQQFSQDIRMQFGVDKCKMFSVTKGKIEYNRYTLESGESIEPMDEQSTYKYLGFKQSRQIHQKTTKQEMLKKFSHRLNLVLKTQLNSKCIIKAINTFAIPILTYSFGIIQWSKTDIKQLQRTINTHLTKHRKHHPKSCLQRLTLPRQEGGRGLIDVHNLHNKQIISLRAYFHDKAAHSPLHKHIIETDKKLTPLNLQDKNTQINEHLISTQQKHTLWSDKALHGRHRAYLSLPHVDKDKSNEWLRRGELFPETEGFMLAIQDQIIVTRNYRKYIIKDPNQPTDLCRHCNSASETIQHITGACKSLAQTDYKHRHDQVASIIHQHLAYKHKLILDMNPYYKYKPETVLENRHLKIYWDRTIITDKTIHYNRPDITVHDKTNKTVYLIDIAIPNSHNIQSTISEKLNKYQDLAIEIKTQWRAETVHIVPIVLSSTGIVPKSLTESLNILDMPTYTLHMLQKATILNTCRITRKFLSSSTLSSTFSI

SEQ ID NO: 30835 - protein, 1422 aa, Noctua fimbriata
MPRAAWLGERLVASVPTLDNRGPPVLFSLAAVNAGLCCGRLFKSLATRGISMNTRSKTKKQLQAKLPQIDDETSQSSSSSPSSLFPSIPSSSQSFLVTPTPSSSSISIQSVDVVQETNFVDDTVPAARTVTSRRKWSIDMNKFILRTYLHLTHMETDKNAYLPSLHTKFLEKYPDMQVGRQRIGDQRRAIVQKKLLSQETIDQIYEEVRAELQIVHTQIQQHSTQSKAPINTQPGQRMKWTNEYNEAIIRIYYTTTQLETNKTAYRKHLHEGFINIYPELAHLTEQRLSDQVRAIINNKYIHTNRLDEIKNQVTIELRNSNTYTQNIQHINNDSQQPDENIHSLSTQYTNIHISGTTTNTATTNSVILLNNSSETNIASQTFINTDEENFLNHIDIGHHEPTQINSDASFEKNQEIETTFQQAQQLFSDTQPTNRPYIPKQRTSKKFSAIVTYINSAILTNCVNVDTDFIKLQNVIYCAAWTAATCNGAKILGTQNVSRTYIKRKPEWQIRLEKKIQNLRASIGRLTHFNNGSRSPKLIAAVKEIKKKYQLHAQYEDPNTQITHFLDTLKQKLNAASSRLKRYLTCTNRKMQNSKFSNNEKVFYRNLATNNSDTTTQSLDTPAPEILREFWAHIWENPVCHNHQANWVNEPAPEIPEMEYDFIPIGTFIDVIKRTHNWKSPGTDNIHNYWYKKFTSIHPFLHNHLNTFIQSPNLLPPYLTHGVTYMIPKDISDTLNPAKYRPITCLQTLYKILTACVSEVLYEHLTKNNILAEQQKGCRKNSQGCKEQLTIDAITMNSAIKSKTDIHTMFIDYRKAFDSVPHSWLLHVLNLYKIHPTLKHFLETSMQNWQTVLKINSSSSSVATEPIRIKRGIFQGDALSPLWFCMALNPLSHLLDKTVGGFTLATNDTHYTLTHLLYMDDIKLYSADKNTLFQLADTTQQFSNDICMSFGVDKCKILSVVKGKVQNNSYILGSGESIEPMDEQSTYKYLGFNQSRQIQHKMIKQELLKKFSHRLNLILKTNLNSKNTVKAINTFAIPILTYSFGIIRWSKTDIRTLQRTINTTLTKHRKHHPKSSIQRLTLPRQEGGRGLIDIHNLHNKQILSLRAYFHNKSENSSLHKHVTEQDTKLTPLNLHNRNTQTNEILISTQDKIAAWSVKALHGRHRAYMSQPHVDKAKSNEWLKRGELFPETEGFMLAIQDQIIATRNYRKYIIKDPHQPTDLCRHCNTASETIQHITGACKSLAQTDYKHRHDQVAAIIHQQLAFKYKLISEMKPYYKYKPEIILDNNNQKIYWDRTIITDKTIHFNRPDITFHDKVSKTVYLIDIAIPNSHNIQTTISEKLSKYQDLAIEIKTQWEAQTVHIIPIVLSSTGIVPKSLMQSLNTLHMPPHTLQLLQKATILNTCRITRKFLTSSTISSTFSI

SEQ ID NO: 30836 - protein, 907 aa, Camptopleura auxo
MLRSDIGRLTQHMQGNRSKHVTKTVNKIKLKYQMHAQYENMNSHVKEYLDTLKQKLNVASSRLRRYLICTNRKRENRDFINNEKLFYRKLSSTHTNNQAIDIPSTTDLHNFWANIWENPVEHNKNAEWISRSSKMVLNPEMKFKNIPIETFLKIIKRTQNWKAPGTDNIHNFWYKKFTSIHPFLYNYINKFLEFPDTMPTYITHGVTYMLPKDTDDTKNAAKYRPITCLQTIYKILTACISEVIYEYLTEHCILTEEQKGCRKKSQGCMEQLTIDAVATNIAVTQKRDIYTMFIDYQKAYDSIPHSWLIQILHLYKIHPTIISFLKKAMQNWQTILKIRHNVQPITTEPIYIQRGIFQGDALSPLWFCLALNPLSHLLKETKLGFKFDKNAPESLLTHLMYIDDIKLFASTKDDLFYLADITQMFSKDIHMDFGIDKCKILSVHNGKIENNSYTLESGAAIEPLDQYSTYKYLGFKQSRKIHHGTIKVELTKKFKHRLSLILNTHLNSKNTVKAINTFAIPILTYSFGIIRWSSANLENLQRLISTHLTKFRKHHPRSCTQRLTLPRQEGGRGLIDIKNLHNTQIATLRKYFHEKSEYSSLHKCTTEADNHLTPLNLKNKQTQANEKTIDTQNKTAAWSEKTLHGRHRAHLCQQYVDREKSNEWLKKGELFPETEGFMIAIQDETIVTRNYRKYIIKDPNLLSDTCRHCNAASETIQHITGGCRSLAQTDYKHRHDQVAAIIHQQIAFRHQLITKIVPYYKYKPDSVLEDRTYKLYWDRTIMTDKTIHFNRPDITLHNKIEKTVYLIDIAIPNSHNLQSTVAEKLSKYQDLAIELRTQWKVQKIQIIPIVLSSTGVIPKSLEQSLGTLNMPPYTLHMLQKATVLNTCRITRKFLTSSTISSASLTIL

SEQ ID NO: 30837 - protein, 1417 aa, Amphipyra berbera
MRTLDNGGPPVLYTLATVNAGLCRGRLIRSLATRGNKMITRSKIKKTIQANLPYIDDETTQVSLSSSTKSLFPSIPSSSPPFCISPSPSSSTSIQSADVAQETNSVNEPVPTTSTATARRKWSIEMNKFILRTYLHLTNMETDTNAYLPPLHTKFLEKYPNMQVSRQRVGDQRRAIIQKKLLPQKTIDQIYDEVRSELQIIQTQIQQHPTQYTTPVNTQSGTRMKWTNECNESIIRIYYRITQLETNKTAYRKYLYEEFINQYPDLSHITEQRLADQRRAIINNKYIKNDRLAEIKKQVAEELRHTNTQTENTNNEPLNIQPESNIEYPDEYSYTPSTSHINTINSYTLTNTLTTDVPLNNSAYTDLITQTLTDPQNTSEENLLNNIHIEQTDPTQTNLDVAPESNPEIDDTFQQAQQYFTDTHPTNRPYIPKQKTSRKFSATVKYINTIILPKYVNVDTDFNTLQNAIYCAAWTAAKCNGAKLSHLAQSEHRTRPHRKPNWQIRLEMKIGNLRANIGRLTQFIRGNRNRKVVAAVEAIKIKYQLHAQHENSNTQIDHFLDTLKQKLNAASSRLKRYKTCTDRKVQNTKFINNEKIFYRNLTSMNKDASSNQNIEAPSPESLREFWANIWEIPVHHNTHADWINETPSQIPEMEFELIPIDTFIDVIKRTHNWKSPGTDNIHNYWYKKFTSIHPYIHNHINTFIRSPHLLPTYITHGITYMIPKDINDTINPAKYRPITCLQTLYKILTACISEVVYKHLTEHNILAEQQKGCRKNSQGCKEQLTIDAIVMNTAVKNKKDIHTMFIDYQKAFDSVPHSWLLHVLHLYKIHPTLISFLHTSMQNWQTVLKINQASATLTTEPISIQRGIFQGDALSPLWFCLALNPLSDLLDKTDVGFTLKNNDTQYTLTHLMYMDDIKLYAADKTSIFKLADTTQQFSQDIHMQFGVDKCKILSITKGKIQNNSYTLGSGESIEPMDEQSTYKYLGFKQSRQIQQKITKQELLKKFSYRLNLILKTHLNSRNTIKAINTFAIPILTYSFGIIQWSKTDIKKLQRTINTHFTKHRKHHPKSCIQRLTLPRQEGGRGLIDIHNLHNKQILSLRAYFHDKSEHSPLHKHTTNLDKKLTPLNLQDRNTQTNEHITSTQQKITAWADKALHGRHRAYLSLSHVDKEKSNEWLRRGELFPETEGFMLAIQDQIIATRNYRKYIIKDPNQPTDLCRHCNTASETIQHITGACKSLAQTDYKHRHDQVAAIIHQNLAYKNKLISEMNPYYKYKPETILENKNHKIYWDRTIITDKTIHYNRPDITVHDKTNKTVYLIDIAIPNSHNIQTTISDKLSKYQDLAIEIKTQWKAQTVHIVPVVLSSTGIIPKSLTQSLNTLHMPTYTLHMLQKATILNTCRITRKFLTSSTLASTYSI

SEQ ID NO: 30838 - protein, 1381 aa, Ochropleura plecta
MNTRSKSKKQLQANLPQVDDENSQFSSSSPSSLFSSIPSSSQSFRVTPTQSSSSISVQSVDVVQETNFVDDTVPATKTATTRRKWSIEMNKFILRTYLHLTHMESDKNAYLPSLHTQFLEKYPDMQVGRQRIGDQRRAIVQKKLLPQETIDQIYEEVRTELEMVHTQIQLHSTQARTTTINTQSGQRMKWTKEYNESVMRVYYTVTQLEANKTGYRKQLHEEFINTYPELSHLTEQRLSDQVRAIINNKYIHITRLEEIKKQIAEELSINNTSTQNNDDINNVNLNTQSQNVLVQSDEYIHTENTQFTNTHIFDAPANTVTRDIFSNDSIDDPSVMPSTPQNTDGDNFLNSIEIGLAGSTQINTGALLETNPEIETTFEQAQQLFSETHPTDRPYIPKQRTSRKFSAIVTYINNIILPKIVNKDTEFIQLQTIIYCAAWTAAKCNGAKILDYSQSERRTYKLRKPNWQKRLEKKIANLRANLGRLTHFMNGSRSQKLITAVEAIKTKYKLHAQHENSNTRLEHFLDTLKQKLSAAASRLKRYITCTNRKMENTKFCNNERIFYRNLASSNRDTSTQTVETPPPGALRDFWANIWENPVHHNYHADWIKEVTPEIPAMEFDSIPINTFIDVIKRTHNWKSPGTDNIHNYWYKKFTSIYPFLYHHLNTFIQSPHLLPTYITHGVTYMIPKDMTNTTDPAKYRPITCLQTLYKILTACISEKIYEHLAKHNILAEQQKGCRKNSQGCKEQLTIDAVAMNSAVKSKKDIYTMFIDYQKAYDSVPHSWLIHILNIYNIHPTLRIFLESTMQNWKTVLKINQASTTLATEPIQIKRGIFQGDALSPLWFCMALNPLSHLLDKTNVGFTLTNDNAQFTLTHLMYMDDIKLYAADKNSLFYLADTTQEFSNDISMQFGVDKCKILSVSAGKIQSNSYSLGSGESIEPMDEHSTYKYLGFKQSRQIEQKMTKVELMKKFTHRLNLILKSNLNSRNTIKAINTFAIPVLTYSFGIIRWSKTDIRKLQRTINTLLTKHRKHHPKSCIQRLTLPRQEGGRGLVDIHNLHNKQILSLRSYFHNKSVHSSLHKHVTEADKKLTPLNLQSRNTQINESITSTQQKIAVWSGKSLHGRHRACLSQPHVDKAKSNEWLKRGELFPETEGFMLAIQDQIIATRNYRKYIMKDSNQPTDMCRHCNSASETIQHITGACKSLAQTDYKHRHDQVAAIIHQHLAHKYNLVGEMIPYYKYKPEVILENRNQKIYWDRTIITDKTIHYNRPDITVHDKINKTVYLIDIAIPNSHNIQTTISEKLSKYQDLAIEIKTQWNAQTVHIVPIVLSSTGVIPKSLTQSLSTLNMPSQTLYMLQKATILNTCRITRKFLTSSTLSSTFSI

SEQ ID NO: 30839 - protein, 1381 aa, Ochropleura plecta
MNTRSKSKKQLQANLPQVDDENSQFSSSSPSSLFSSIPSSSQSFRVTPTQSSSSISVQSVDVVQETNFVDDTVPATKTATTRRKWSVEMNKFILRTYLHLTHMESDKNAYLPSLHTQFLEKYPDMQVGRQRIGDQRRAIVQKKLLPQETIDQIYEEVRTELEMVHTQIQLHSTQARTTTINTQSGQRMKWTKEYNESVMRVYYTVTQLEANKTGYRKQLHEEFINTYPELSHLTEQRLSDQVRAIINNKYIHITRLEEIKKQIAEELSINNTSTQNNDDINNVNLNTQSQNVLVQSDEYIHTENTQFTNTHIFDAPANTVTRDIFSNDSIDDPSVMPSTPQNTDGDNFLNSIEIGLAGSTQINTGALLETNPEIETMFEQAQQLFSETHPTDRPYIPKQRTSRKFSAIVTYINNIILPKIVNKDTEFIQLQTIIYCAAWTAAKCNGAKILDYSQSERRTYKLRKPNWQKRLEKKIANLRANIGRLTHFMNGSRSQKLITAVEAIKTKYKLHAQHENSNTRLEHFLDTLKQKLSAAASRLKRYITCTNRKMENTKFCNNERIFYRNLTSNNRDTSTQTVETPPPGALRDFWANIWENPVHHNNHADWIKEVTPEIPAMEFDSIPINTFIDVIKRTHNWKSPGTDNIHNYWYKKFTSIYPFLYHHLNTFIQSPHLLPTYITHGVTYMIPKDMTNTTDPAKYRPITCLQTLYKILTACISEKIYEHLAKHNILAEQQKGCRKNSQGCKEQLTIDAVAMNSAVKSKKDIYTMFIDYQKAYDSVPHSWLIHILNIYNIHPTLRIFLESTMQNWKTVLKINQASTTLATEPIQIKRGIFQGDALSPLWFCMALNPLSHLLDKTNVGFTLTNDNAQFTLTHLMYMDDIKLYAADKNSLFYLADTTQEFSNDISMQFGVDKCKILSVSAGKIQSNSYSLGSGESIEPMDEHSTYKYLGFKQSRQIEQKMTKVELMKKFTHRLNLILKSNLNSRNTIKAINTFAIPVLTYSFGIIRWSKTDIRKLQRTINTLLTKHRKHHPKSCIQRLTLPRQEGGRGLVDIHNLHNKQILSLRSYFHNKSVHSSLHKHVTEADKKLTPLNLQSRNTQINESITSTQQKIAVWSGKSLHGRHRACLSQPHVDKAKSNEWLKRGELFPETEGFMLAIQDQIIATRNYRKYIMKDSNQPTDMCRHCNSASETIQHITGACKSLAQTDYKHRHDQVAAIIHQHLAHKYNLVGEMIPYYKYKPEVILENRNQKIYWDRTIITDKTIHYNRPDITVHDKINKTVYLIDIAIPNSHNIQTTISEKLSKYQDLAIEIKTQWNAQTVHIVPIVLSSTGVIPKSLTQSLSTLNMPSQTLYMLQKATILNTCRITRKFLTSSTLSSTFSI

SEQ ID NO: 30840 - protein, 1362 aa, Ochropleura plecta
MNTRSKTKKQLQANLPQIDDETSQPSSSSPSSLFPSIPSSSQSFRVTPTPSCSSISIQSADVVQETNSVDDTVPTAKAATRRRKWTIEMNKFILRTYLHLTTMETDKNAYLPPLHTKFLEKYPAMQVSRQRIGDQRRAIIQKKLLPQDTIDQIYEEVRSELQIIHTQIQQHSTQPCTQPGQRMRWTNECNETIITIYYTITQLETNKTAYRKKLHEEFIIKYPELAHITEQRLSDQVRAIINNKYIHENRLIEIKNQVTSELSNRNTNTQNIEDLNNYHRNSQTQDDSEQILATNTSFSDTPINSHMSNIILNNSIDSDIASRTVVNIDDENFLDNIHAGQFVPTQTNFDPVPEIESTFHQAQQNFNDTHPINRPYIPKQKTSRKFSAIVTYINTVILPKHLNVDTEFIKLQTIIYCAAWTAATCNGAKISDPAQNERRPNTQRKPKWQIRLEKKIENLRANIGRLTHFNNGCRSPKLIAAVEDIKIKYQLHAQYENSNTQISHFMDTLKQKLSATSSRLKRYITCTNRKVQNTKFINNEKIFYRNLTSNNRDTTNQSLETPTSETLRQFWANIWENPVQHNNSADWVNEATPEIPEMEFEFIPIDTFIDVIKRTHNWKSPGSDNIHNYWYKKFSSLHPFLHNHLNTFIQSPHLLPQYITHGVTYMIPKDTNDTANPAKYRPITCLQTIYKILTACVSEIVYEHLTKNNILAEQQKGCRKNSQGCKEQLTIDSITMNSAVKSRKDIHTMFIDYQKAFDSVPHSWLLHVLSLYKIHPTLKQFLETSMQNWQTVLKINSPSTTVTTEPIRIKRGIFQGDALSPLWFCMALNPLSLLLDKTGGGFTMENNNTQYTLTHLMYMDDIKLYADDEVALYQLADATQQFSDDICMSFGVDKCKILSIVKGKIQNNSYTLLSGESIEPMDEQSTYKYLGFKQSRQIQQKMSKQELLKKFSHRLNLILKSNLNSRNTVKAINTFAIPILTYSFGIIRWSKTDIKTLQRTIHTHLTKHRKHHPKSCIQRLTLPRQEGGRGLIDINNLHNKQILSLRAYFHNKSENSPLHKQVTQADKKLTPLNLQNRNTQINEHIVSTQQKITAWSEKALHGRHRACLSQPHVDKIKSNEWLKRGELFPETEGFMLAIQDQIISTRNYRKYIIKDTNQPTDLCRHCNTASETIQHITGACKSLAQTDYKHRHDQVAAIIHQQLAFKYKLVNEMIPYYKYKPEVTLENNHQKLYWDRTIITDKTIHYNRPDITVHDKTNKTVYLIDIAIPNSHNIQTTISEKLSKYQDLAIEIKTQWKAQTVHIVPIVLSSTGIIPKSLTQSLNTLQMPTHTLYMLQKATILNTCRITRKFLTSSTISSTFSI

SEQ ID NO: 30841 - protein, 1283 aa, Phlogophora meticulosa
MQGSAAVDFKSLANRGNKMNTRSKTKKQLQANQPQIDDETSQLSSSSPSSLFSSIPSSSQSFRITPTPSLSSFSIQSADVVQETNFVDDTVPIARTATSRRKWTIEMNKFILRTYLHLTNMDTDKNAYLPSLHTKFLEKYPAMQVSRQRIGDQRRAIVQKKLLPQDTIDQIYEEARAELQMVHTQIQQHATQSNTQFGQRMKWTNEYNEAIIRIYYTTTQLETNKTAYRKHLHEGFINTYPELAHITEQRLSDQVRAIINNRYINTNRLEEIKNQVTLELRNSNTDTQHTEHLNSDFLNTQSQNDVEHLDTNTLTTNVLPSNNSNTVTVPQTLLNTDEIHFLNNIDNDISGPTEPNFPAALEINPEIEATFHQAQQNFINTHPTHRPYIPKQKTSRKFSTIVTYLNTVILPKHVNVDTEFIKLQTLIYCAAWTAATCNGAKIFEISSQNERGAYKQRKPKWQIRLENKIKHLRANIGRLSNFINGNRSPHLIAAVEQIKIKYQLHAQHENSNTQIEHFLDTLKQKLSAAASRLKRYITCTNRKVQNTKFTNNEKTFYRNLTSHNITSNQNLETPSSETLRDFWANIWENPVCHNNHADCVNEASPEILEMEFEFIPVETFIDVIKRAHNWKSPGTDNIHNYWYKKFSSIHPFLHNHLNTFIQSPHLLPTYITHGITYMIPKDINDTINPAKYRPITCLQTLYKILTACVSEVIYEHLSKNNILAEQQKGCRKNSQGCKEQLTIDAIIMNSAVKSRKDIHTMFIDYQKAFDSVPHSWLSHVLNLYKINPKIKQFLETTMQNWKTVLKINSSSSTAATEPISIKRGIFQGDALSPLWFCMALNPLSHLLDKTDAGFILSNNNTQYTLTHLMYMDDIKLYAADKKALFKLADTTQQFSDDICMSFGVDKCKILSIEKGKILNNNYILASGETIEPMDEQSTYKYLGFKQSRQIQQKISKQELLKKFSHRLSLVLKSSLNSRNTIKAINTFAIPILTYSFGIIRWSKTDIKKLQRTVNTLLTKHRKHHPKSCIQRLTLPRQEGGRGLIDIYNLHNKQILTLRAYFHGKSENSSLHKQVTETDKKLTPLNLQNRNTLTNEHIVSTEQKIAAWSQKALHGRHQAYLSQPHVDKIKSNEWLKRGELFPETEGFMVAIQDQIIATRNYRKYIIKDRNQPTDTCRHCNSASETIQHITGACKSLAQTDYKHRHDQVAAIIHQHLAHKYKLIGEMIPYYKYTPETILENRNQKIYWDRTIITDKTIHYNRPDITVHDKPNKIVYFFTYRYSYT

SEQ ID NO: 30842 - protein, 1368 aa, Cosmia trapezina
MNTRSKTKKQLQANLPQINDETSQSSSSSSSSLFTSIPSSSQSFRVTPTPSSSSISIQSADVVQETNFVDHTVPTTKTATTRRKWSIEINKFILRTYLHLTNMETEKNAYLPSLHTKFLEKYPAMQVSRQRIGDQRRAIMQKKLLPQDTIDQIYEEVRAELQVVHTQIQQHSTQSKTLINTQCGQRMKWTNEYNETIIRIYYTATQLETNKTAYRKQLHEEFINTFPELAHITEQRLSDQVRAIINNKYIHPNRLAEIKNEVAAELSINNTNAHIIEDINYDNLNTQPQNELEQPDEYIQTLNTQNINSLISDTLANTLTTNIFLNESIDTDNNFLNHIEIGQFEPTQVDSDAAPETNSEIEATFQQAQQYFSDTHPTNRPYIPKQKTSRKFSTIVTYINTVVLPKAVCKETEFTQLQTIIYCAAWTAAKCNGAKILDSTQNERHTYKQRKPKWEIRLETKIKNLRASIGRLTHFINGSRSQKLTAAVEEIKIKYQLHAQHENSNTQLVHFLDTLKQKLNAASSRLKRYTTCTNRKIQNTKFINNEKIFYRNLASNNKDTTKQTLETPPSEALREFWANIWENPVYHNNHAAWINEATPEIPEMEFEFIPINTFVEVIKRTHNWKSPGSDNIHNYWYKKFTSIHSFLYNHLNTFIQSPHLLPTYITHGVTYMIPKDMNDTTDPAKYRPITCLQTLYKILTACVSEVVYEHLTKHKILAEQQKGCRKNSQGCKEQLTIDAIAMNSAVKSKKDIHTMFIDYQKAYDSVPHSWLLHVLNIYNIHPTLRLFLESTMQNWQTVLKINQAATSLATEPIHIKRGIFQGDALSPLWFCMALNPLSHLLDKTNTGFTLTNDNTHFTLTHLMYMDDIKLYAADKKSLFHLADTTQEFSNDIFMQFGVDKCKILSIVKGKTQNNSYTLGPGKSIEPMDEHSTYKYLGFKQSRQIEQKMTKQELLKKFTHRLNLIFKTNLNSRNTIKAVNTFAIPILTYSFGIIRWSKTDIRKLQRTINILFTKHRKHHPKSCIQRLTLPRQEGGRGLIDVHNLHNKQILSLRSYFHNKSEHSPLHKYVTEADKKLTPLNLQNRNTQINENLISTQQKIAAWAGKALHGRHRAYLSQPHVDKIKSNEWLKRGELFPETEGFMLAIQDQIIATRNYKKYIIKDHNQPTDTCRHCNSASETIQHITGACKSLAQTDYKHRHDQVAAIIHQHLAHKYKLISEMIPYYKYKPEIILENRNQKIYWDRTIITDKTIHYNRPDITVHDKINKTVYLIDIAIPNSHNVQTTISEKLSKYQDLAIEIKTQWKAQTVHIVPIVLSSTGVVPKALTQSLNTLHMPSHTLYMLQKATILNTCRITRKFLTSSTLSSTFSI

SEQ ID NO: 30843 - protein, 1363 aa, Noctua fimbriata
MNTRSKTKKQLQAKLPQIDDETSQPSSSSSSSLFPSIPSSSQSFRVTPTPSSSSISIQSVDVVQETNFVDDTVPAARTATSRRKWSTDMNKFILRTYLHLTHMETDKNAYLPSLHTKFLEKYPDMQVGRQRIGDQRRAIVQKKLLHQETIDQIYEEVRAELQIVHTQIQQHSTQSKTPINTQPGQRMKWTNEYNEAIIRIYYTSTELETNKTAYRKHLHEGFINIYPELAHLTEQRLSDQVRAIINNKYIHTNRLEEIKNQVATELRNINTNTQNIEHVNNDLQQPDENIHSLSTQYTNIYTPTTSNILLNNSSDTNIVSQTLTNTVDESFLNQIDIGLFEPTQNNLDAAPEKNLEIEATFQQAQQLFSDTHPTGRPYIPKQKTSKKFSAIVTYLNSVILPNNVNVDTDFIEMQTTIYCAAWTAATCNGAKISDTQNESRTYIKRKPKWQIRIDKKIQSLRSNIGRLTHFINGSRSPKLIAAVEEIKKKYQVHAQYEDSNTQLVHFLDTLKQKLNAASSRLKRYLKCTNRKVQNTKFINNEKIFYRNLATNNRDTTNQSIETPRSETLREFWANIWENPVNHNHQANWINEITSEIPEMEFEFIPIGIFIDVIKRTHNWKSPGTDNIHNYWYKKFSCIHPFLHNHLNTFIHSPNLLPSYITHGVTYMIPKDINDTINPAKYRPITCLQTIYKILTACLSEVVYEHLTKNNILSEQQKGCRKNSQGCKEQLTIDAVTMNSAIKSKTDIHTMFIDYQKAFDSVPHSWLLNVLSLYKIHPTLKNFLEISMQNWQTVLKINSSSSTVATEPIHIKRGIFQGDALSPLWFCMALNPLSHLLDKTDAGYKLTNINTQYTLTHLMYMDDIKLYAADKNALVVLADTTHQFSDDICMSFGVDKCKMLSVVKGKIQNNSYTLGSGQLIEPMDEQSTYKYLGFKQSRQIHQKMTKQELVNKYSHRLNLILKTNLNSKNTIKAINTFAIPILTYSFGIIRWSNTDIKKLQRTLNTSLTKHRKHHPKSSIHRLTLPRQEGGRGLIDIHNLHNKQIHSLRAYFHNKSESSALHKHVTENDMKLTPLNLHNRNTQINELLISTPEKIAAWSAKALHGRHRAYLSQPHVDKAKSNEWLKRGELFPETEGFMLAIQDQIIATRNYRKYIIKDPHQPTDLCRHCNTASETIQHITGACKSLAQTDYKHRHDQVAAIIHQHLAFKYKLICEMKPYYKYKPELILDNNNQKIYWDRTIITDKTIHFNRPDITLHDKVNKTVYLIDIAIPNSHNIQTTISEKLSKYQDLAIEIKTQWKAQTVHIVPIVLSSTGIVPKSLMQSLNTLHMPPHTLQLLQKATILNTCRITRKFLTSSTISSTFSI

SEQ ID NO: 30844 - protein, 1349 aa, Agrotis ipsilon
MNTRSKTKKLLQANMPQINDETSQHSSSSSSLSSLFPSISSSSQSFRVTPTPSSSSISIQSVDVVQETNFVEDAVPINRTATRRRKWSTDMNKFILRTYLHLTHMETDKSAYLPPLHTKFLEKYPDMQVSRQRIGDQRRAIVHKKLLTQETIDQIYADVRAELQTVHTQIEQHSTQSQTPISTQHGQRMKWTNELNEAIIRIYYTTTQLEKNKTAYRKHLHEGFINMYPELAHITEQRLSDQVRAIINNKYIHPNKLQEIKNQVATELENVNTNALNIEHINNDLQQPDENIYSLGIQDTSITISDTDIVFQTQADDENFLNHIELCQVAPTLNAAPEKNLEIESTFQQAELLFSNTHPTNRPYIPKQKTSKKFSNIVTYINSVILPNSVNVDTDFIKLQTTIYCAAWTAATCNGAKILGTQYEGQTFTKRKPKWQIRLDKKIQNLRANIGRLTHFINGSRSPKLIAAVEAIKRKYQQHAQYEQPNTQLEHFLDTLKQKLNAAASRLKRYLKCTERKMQNSKFVNNEKLFYRHLATNNSNSTDPNPATPTSENLREFWANIWENPVQHNLRADWINEAAPEIPEMEFEFIPIEIFIDVIKRTHNWKSPGTDNIHNYWYKKFTSLHPLLHNHLNTFIQSPQQLPTYITHGVTYMIPKDTSDTLNPAKYRPITCLQTLYKILTACVSQVIYKHLNNNNILAEQQKGCRKNSQGCKEQLTIDAIIMNSAIKNKTDIHTMFIDYQKAFDSVPHSWLLNVLNLYKIHPSLKHFLETSMQNWQTVLKINSSSASVTTEPIRIKRGIFQGDALSPLWFCMALNPLSYLLDKTGTGFTLAHNNSHYRLTHLLYMDDIKLYSADKDALFQLADITQQFSNDICMSFGVDKCKILSVVKGKVQNNSYTLETGDLIEPMDEQSTYKYLGFKQSRQIQQKMIKQELLKKFSHRINLILKTNLNSKNTVKAINTYAIPILTYSFGIIKWSKTDIRKLQRTINTSLTKHRKHHPKSSIQRLTLPRQEGGRGLIDIHNLHNKQILSLRAYFHKKSENSSLHKHVTENDKKLTPLNLHSRHTQTNEQITSTEQNIAAWSAKALHGRHRAYLSQPHVDKAKSNEWLKRGELFPETEGFMLAIQDQIIATRNYRKYIIKDPILPTDLCRHCNTTSETIQHITGACKALAQTDYKHRHDQVAAIIHQHLAFIYKFINEMKPYYKYKPELTLESRNQKIYWDRTIITDKTIHFNRPDITVHDKVNKTAYLIDVAIPNSHNIQATISEKLSKYQDLAIEIKTQWEVETVHIVPIVLSSTGLIPKSLIQSLNILNMPPHTLHLLQKATILNTCRITRKFLTSSTISSTFSI

SEQ ID NO: 30845 - protein, 1080 aa, Xestia c-nigrum
MFSPSTQCININVSNTTTNTPATRNITLLNNSSDTNIVSQTLTADEHFLNHIDIGLFEPTPNNFDAAPEKNLEIETTFQQAQQLFSDTHPTSRPYIPKQKTSKKFSAIVTYINSVILPNNVNADTDFAKLQTTIYCAAWTAATCNGAKISDTQNESRTYIKRKPKWQIRMDKKIQSLRANIGRLTHFINGSRSPKLIAAVEKIKKNYQVHAQYQDSNTQLVHFLDTLKQKLNAASSRLKRYLKCTNRKVQNSKFINNEKIFYRNLATNNSETTNQSLETPTSETLREFWANIWENPVNHNHQADWINEVTPEIPEMEFEFIPIPTFIDVIKRTHNWKSPGTDNIHNYWYKRFSSIHPFLHNHLNAFIHSPQLLPSYITHGVTYMIPKDVNDTKNPAKYRPITCLQTIYKILTACLSEVVYEHLTNNNILSEQQKGCRKNSQGCKEQLTVDAITMNSAVKSKKDIHTMFIDYQKAFDSIPHSWLLKILSLYKIHPTLKHFLEISMQNWQTVLKINSSSSIVATEPIHIRRGIFQGDALSPLWFCMALNPLSHLLDKTDAGYTLTNITTHYTLTHLMYMDDIKLYAPDKNALFILADTTQQFSDDICMSFGVDKCKILSIVNSKVQNNSYTLGSDQLIEPMDEQSTYKYLGFKQSRQIHQKMTKQDLLSKFSHRLNLILKTNLNSKNTIKAINTFAIPILTYSFGIIRWSNTDIKKLQRTINTSLTKHRKHHPKSSIHRLTLPRQEGGRGLIDIHNLHNKQIHSLRSYFYNKSENSSLHKHVTENDRKLTPLNLHDRNTQINEAPITTQEKITAWSAKALHGRHRAYLSQPHVDKTKSNEWLKRGELFPETEGFMLAIQDQIIATRNYRKYIIKDPHQPTDLCRHCNTVSETIQHITGACKSLAQTDYKHRHDQVAAIIHQHLAFKYKFISEMKPYYKYKPEITLENRNQKIYWDRTIITDKTIHFNRPDITLHDKTNKTVYLIDIAIPNSHNIQTTISEKLSKYQDLAIEIKTQWEAQTVHIVPIVLSSTGIVPKSLMQSLNTLHMPPHTLHLLQKATILNTCRITRKFLTSSTISSTFSI

SEQ ID NO: 30846 - protein, 1365 aa, Xestia c-nigrum
MNTRSKTKKQLQAKLPQIDDETSSTPSSLFPSISSSSQSFRVTPTPSFSSISIQSADVVQETNFVDDTVPAARTATSRRKWSIDMNKFILRTYLHLTHMETDKNAYLPSLHTKFLEKYPDMQVGRQRIGDQRRAIVQKKLLPQETIDQIYEEVRVELQTVYTQIQQHSTQSKTPTNTQPGQRMKWTNEYNEAVIRIYFTITQLETNKTAYRKHLHEEFINIYPELTHLTEQRLSDQVRAIINNKYIHTNRLTEIKKQVASELKNNNTNTQNTEHINNVLQQPDENMFSPSTQCININVSNTTTNTPSTSNITLLNNSSDTNIVSQTLTADEHFLNHIDIGLFEPTPNNFDAAPEKNLEIETTFQQAQQLFSDTHPTSRPYIPKQKTSKKFSAIVTYINSVILPNNVNADTDFAKLQTTIYCAAWTAATCNGAKISDTQNESRTYIKRKPKWQIRMDKKIQSLRANIGRLTHFINGSRSPKLIAAVEKIKKNYQVHAQYQDSNTQLVHFLDTLKQKLNAASSRLKRYLKCTNRKVQNSKFINNEKIFYRNLATNNSETTNQSLETPTSETLREFWANIWENPVNHNHQADWINEVTPEIPEMEFEFIPIPTFIDVIKRTHNWKSPGTDNIHNYWYKRFSSIHPFLHNHLNAFIHSPHLLPSYITHGVTYMIPKDVNDTKNPAKYRPITCLQTIYKILTACLSEVVYEHLTNNNILSEQQKGCRKNSQGCKEQLTVDAITMNSAVKSKKDIHTMFIDYQKAFDSIPHSWLLKILSLYKIHPTLKHFLEISMQNWQTVLKINSSSSIVATEPIHIRRGIFQGDALSPLWFCMALNPLSHLLDKTDAGYTLTNITTHYTLTHLMYMDDIKLYAPDKNALFILADTTQQFSDDICMSFGVDKCKILSIVNGKVQNNSYTLGSGQLIEPMDEQSTYKYLGFKQSRQIHQKMTKQDLLSKFSHRLNLILKTNLNSKNTIKAINTFAIPILTYSFGIIRWSNTDIKKLQRTVNTSLTKHRKHHPKSSIHRLTLPRQEGGRGLIDIHNLHNKQIHSLRSYFYNKSENSSLHKHVTENDRKLTPLNLHDRNTQINVVPITTQEKITAWSAKALHGRHRAYLSQPHVDKTKSNEWLKRGELFPETEGFMLAIQDQIIATRNYRKYIIKDPHQPTDLCRHCNTVSETIQHITGACKSLAQTDYKHRHDQVAAIIHQHLAFKYKFISEMKPYYKYKPEITLENRNQKIYWDRTIITDKTIHFNRPDITLHDKTNKTVYLIDIAIPNSHNIQTTISEKLSKYQDLAIEIKTQWEAQTVHIVPIVLSSTGIVPKSLMQSLNTLHMPPHTLHLLQKATILNTCRITRKFLTSSTISSTFSI

SEQ ID NO: 30847 - protein, 1360 aa, Mythimna ferrago
MNTRSKTKKLLASMPQIDDETMQPFSLSPSSLFPSITSSSQSFRVSSTPSSSSIQSADVVQETKFVDDTVPTARTATSRRKWSIEMNKFILRTYLHLTNMDTDKNAYLPSLHTKFLEKYPDMQVSRQRIGDQRRAIIQKKLLPQDTIDQIYEEVRAELQMFCTQIQQHSTQSNTQFSQRMRWTNEHNEAIIRIYYTVTQLETNKTVYRKHLREEFINMYPELTHITEQRLSDQVRAIINNEYLDTKRIEEIRNQVAIELANINNAQNTEQTSGDLLNTQSQSESDLPDINANSPDTLTNTLTTNVALNNSSGGDIVFESLANIEVDNNLFNNINISQSEPINRNCILDNSTEIEATFQQAHLNFKDTDPTNRPFIPKQKTSRKFSAIVNYINTVILPKHINGDTEFIKLQTIIYCAAWTAAKCNGAKISDLTQSEHRTYKYRKPKWQIRLEKKIENLRVNIGRLTHFINGSRSKKLVAAVEQIKLKYQLHAQHENSNTEIEHFLDTLKQKLSAASSRLKRYITCTNRKVQNIKFKNNEKIFYRNLTSNNRDITNESLDPPSPESLREFWANIWENPVYHNEHADWVSDATIDIPDMEFEFIPIETFIEVVKRTHNWKSPGTDNIHNYWYKKFSSIHPFLYNHLNTFIQSPHLLPTYITHGVTYMIPKDINDTTNPAKYRPITCLQTLYKILTACVSEVVYEHLLKNNILAEQQKGCRKHSQGCKEQLTIDAIAMNNAVKCRKDIHTMFIDYQKAFDSVPHSWLLHVLNLYKIHPTLKQFLETSMQNWQTTLKINSSSTTVATEPIFIKRGIFQGDALSPLWFCMALNPLSYLLDKTDVGFTLANHNTQYKLTHLMYMDDIKLYAADKEALFQLADTTQLFSDDICMSFGVDKCKILSVVKGKIQNNSYTLGSGESIDPMDEQSTYKYLGFKQSRQIQQKLSKQELLKKFSHRLNLILKSNLNSRNTIKAINTFAIPILTYSFGIIKWSKADIKKIQRTVHILLTKHRKHHPKSCIQRLTLPRQEGGRGLIDIQNLHNKQIHSLRAYFHFKSENSLLHKQISDIDKKLTPLNLQNRNTQINEHITSTQQKIAAWSEKALHGRHRASLSQPHVDKLMSNEWLKRGELFPETEGFMLAIQDQIVATRNYRKYIMKDQNQPTDFCRHCNSASETIQHITGACKSLVQTDYKHRHDQVAAIIHQHLAYKYKLVTETMPYYKYKPQIILESKDIKIYWDRTIITDKTIHYNRPDITVHDKTNKSVYLIDIAIPNSHNVQTTISEKLSKYQDLAIEIKTQWKAQTVHIVPIVLSSTGIIPKSLAQSLNTLQMPAQTLYMLQKATILNTCRITRKFLTSSTLTSTFSI

SEQ ID NO: 30848 - protein, 1436 aa, Noctua pronuba
MKRYYLDIFDELIFIIIRSHMPRAAWLGERLVASVPTLDNRGPPVLFTLAAVNAGLCCGRPFKSLATRGINMNTRSKTKKQLQAKLPQIDDETSQPSSSSPSSLFPSISSSSQSFRVTPTPSSSSISIQSADVVQETNFVDDTVPTARAATSRRKWSIEMNKFILRTYLHLTNMETDKNAYLPPLHTKFLEKFPAMQVSRQRIGDQRRAIVQKKLLPQDTIDQIYEEVRAELQMIHTQIQQHSTQPSTQSGQRMRWTKEYNETIIRIYLTATQLETNKTAYRKKLHEEFINNYPELAHITEQRLSDQVRAIVNNKYIHDNRLKEIKNQVASELRNSNTNTQNIENINHDHWDTQTQEDSEQPATNTNFSDTPINTLTTNIILNNSTDTNIVSQTVVNIDDENFLQNIDVGQFGPTQTNSDTAPETNPEIESTFHQAQINFNYTHPTNRPYIPKQKTSRKFSAIVSYINTVILPKYVNADTEFTKLQTIIYCAAWTAATCNGAKISDPTQNERRPYTQRKPKWQIRLEKKIENLRANIGRLTHFINGCRSQKIIAAVEEIKIKYQLHAQHENPNTEIAHFLDTLKQKLSAASSRLKRYITCTNRKVQNTRFINNEKIFYRNLTSNNKDTTNQSLETPTSGTLREFWANIWENPVHHNNHADWVKEATPEIPEMEFEFIPIDTFIDVIKRTHNWKSPGTDNIHNYWYKKFSSIHPFLYNHLNTFIQSPHLLPQYITHGVTYMIPKDTNDTKNPAKYRPITCLQTLYKILTACVSEIVYEHLTKNNILAEQQKGCRKNSQGCKEQLTIDAITMNSAVKSRKDIHTMFIDYQKAFDSVPHSWLLHVLNLYKIHPTLKQFLGTSMQNWQTVLKINSSSSTVATEPICIRRGIFQGDALSPLWFCMALNPLSHLLDQTGAGFTLESNNTQYMLTHLMYMDDIKLYAADKEALYQLADATQQFSNDICMSFGVDKCKIMSIVKGKIQNNSYTLLSGASIEPIDEQSTYKYLGFKQSRQIQQKMSKQELLKKFSHRLNLILKSNLNSKNTIKAINTFAIPILTYSFGIIRWSKTDIKKLQRTIHTLLTKHRKHHPKSCIQRLTLPRQEGGRGLIDIHNLHNKQILSLREYFHNKSETSSLHKQITETDNKLTPLNLQNRNTQINEHIVSTQQKIAAWSEKALHGRHRACLSQPHVDKIKSNEWLKRGELFPETEGFMLAIQDQIIATRNYRKYIIKDPNQPTDLCRHCNSASETIQHITGACKSLAQTDYKHRHDQVAAIIHQQLAFKYKLVSEMIPYYKYKPEVALENKDQKIYWDRTIITDKTIHYNRPDITVHDKTNKTVYLIDIAIPNSHNVQTTISEKLSKYQDLAIEIKTQWKVQTVHIVPIVLSSTGIIPKSLSQSLNTLQMPNHTLYMLQKATILNTCRITRKFLTSSTLSSTFSI

SEQ ID NO: 30849 - protein, 1349 aa, Colias croceus
MITRSKSKRTAQRIESEDAGYKHVTSPSSSSSKSQLSLYSSSSSSYFRSPTISSSSSSSNLGLTDVAQETESVQVPVPNVSAAEVRKRWSKEMNEFILRTYLLLTNMESDTNAYLPPLHTKFLEKYPYMEVSRQRIGDQRRAIIQKNLLPKTTIDRIYEEVRIELQTNNNYHSAQLLSNTGTQIGQRMKWTKEYNESILKIYLRITQLESNKTAYRKLLHEEFIATHPELGHLSEQRIADQRRAIINNKYITDNRIAEIKQEISNELKIQNRENNHSQSLGTQPQQQLEAANINNTYTSHEEENIHTEEQALSGDNTLQELTAPIYNTTETTVDLNQKIESTFHEAEQLFANTDPTSRPFIRRQKLTKKFSTIVQYINTTILPTKLHPDIEFNTLHNILYCAAWTAAKCNGTKIGQQLQEIQHTQTKKIPSWQKRLEKQIADLRASIGRVTQFINGNRNRRIISTVETIKLKYATHAQHENSNSDPKHFLDTLKQKLSAKSARLKRYLKCTARKKQNAIFISNEKGFYRTLNSSENNTINRNNNIPSQEALREFWANIWENPEQHSDNAEWIKELQQETSGICDMEFEFIPADIFIDVIQGTHNWKAPGTDHIHNYWYKKFTCLYPYIHNHINAFIQSPHTLPTFITHGITYMLPKDPDDTCNPAKYRPITCLQTFYKILTACISRVINQHLTKYNILAEQQKGCRKDSQGCKEQLTIDAIAMKTATNQKKDIYSMFIDYQKAFDSVPHSWLLEVLNLYKIHPVLTNFLKTSMKNWQTALKIKSSCETLTTEPIQIQRGIFQGDALSPLWFCLALNPLSQLLDKSNEGFLLENSNTHYKLSHLMYMDDIKLFAADKRTLFKLADITQTFSQDIRMQFGVDKCKILSISKGKIMEDNYKLENGEVIEPMTEHNSYKYLGFKQLKQIAHKETILDLKTKFTHRLRLILKTHLNSKNTIKAINTFAIPILTYSFGIINWSRTDLQSLQRTVNTNLTKYRKHHPKSCVQRLTLPRSEGGRGLIDIQNLHNQQIRSLRSYFHTKSEHSLLHKHATQLDKKLTPLNLHDTNPQQNEHSVSIQQKLLEWSSKALHGRHRSHLCQAHVDKEKSNEWIRRGDLFPETEGFMLAIQDEVIATRNYIKHIIKDSHQTSDQCRHCNAGIENIQHITGACKSLAQTDYKHRHDQVAAIIHQFLAHKYNFIKKIEPYYKYKPEIILDNSNYKIYWDRTIITDKTIHYNRPDITVHDKFQQNVYLIDIAIPNTHNIQSTISEKLRKYQDLAIEIKTQWNVKTVHIVPIVLSATGIIPKTLIHNLNTLELPSHTLNMLQKATILNTCRITRKFLTSSTISSTYTI

SEQ ID NO: 30850 - protein, 685 aa, Mythimna impura
MEFEFIPIETFIEVIKRTHNWKSPGTDNIHNYWYKKFSSIHPFLNNHLNTFIQSPHLLPIYITHGVTYMIPKDINDTTNPAKYRPITCLQTLYKILTACVSEVVYEHLIKNNILAEQQKGCRKHSQGCKEQLTIDAIAMNSAVKCRKDIHTMFIDYQKAFDSVPHSWLLHVLNLYKIHPTLKQFLETSMQNWQTVLKIHSSSTTVATEPISIKRGIFQGDALSPLWFCMALNPLSHLLDKTDVGFTLVNHNTQYKLTHLMYMDDIKLYAADKGALFQLADTTQLFSDDICMSFGVDKCKILSVVKGKIQNNSYTLGSGESIDPMDEQSTYKYLGFKQSRQIQQKLSKQELLKKFSHRLNLILKSNLNSRNTIKAINTFAIPILTYSFGIIKWSKTDIKKLQRTVHILLTKHRKHHPKSCIQRLTLPRQEGGRGLIDIQNLHNKQIHSLRVYFHYKSENSLLHKQISDIDKKLTPLNLQNRNTQINEHITSTQQKIAAWSEKALHGRHRASLSQPHVDKLMLNEWLKRGELFPETEGFMLAIQDQIVATRNYRKYIMKDQNQSTDFCRHCNSASETIQHITGACKSLVQTDYKHRHDQVAAIIHQHLAYKYKLVTEMMPYYKYTPEIILESKDIKIYWDRTIITDKTIHYNRPDITVHDKTNKTVYLIDIAIPNSHNVQTKKSVNE

SEQ ID NO: 30851 - protein, 1364 aa, Noctua fimbriata
MNTRSKTKKQLQAKLPQIDDETSQPSSSSPSSLFPSIPSSSQSFRVTPTPSSSSISIQSVDVVQETNFVDDTVPAARTATSRRKWSTDMNKFILRTYLHLTHMETDKNAYLPSLHTKFLEKYPDMQVGRQRIGDQRRAIIQKKLLPQETIDQIYEEVRTELQVVHTQIQQNSTQSKTPINTQPGQRMKWTNEYNEAIIRIYYTSTELETNKTAYRKHLHEGFINIYPELAHLTEQRLSDQVRAIINNKYIHTNRLEEIKKQVATELRNINTNTQNIEHINNDLQQPDENIHSLSTQYTNIYTPTTSNIILLNNSSDTNIVSQTLTNTVDESFLNHIDIGLFEPTQNNLDAAPEKNLEIEATFQQAQQLFSDTHPTSRPYIPKQKTSKKFSAIVTYINSVILPNNVNVDTEFIKMQTTIYCAAWTAATCNGAKISDTQNESRTYIKRKPKWQIRIDKKIQSLRSNIGRLTHFINGSRSPKLIAAVEEIKKKYQVHAQYEDSNTQLVHFLDTLKQKLNAASSRLKRYLKCTNRKVQNTKFINNEKIFYRNLATNNRDTTNQSLETPRSETLREFWANIWENPVNHNHQADWINEITPEIPEMEFEFIPIGTFIDVIKRTHNWKSPGTDNIHNYWYKKFSCIHPFLHNHLNTFIHSPHLLPSYITHGVTYMIPKDINDTINPAKYRPITCLQTIYKILTACLSEVVYEHLTKNNILSEQQKGCRKNSKGCKEQLTIDAVTMNSAIKSKTDIHTMFIDYQKAFDSVPHSWLLNVLSLYKIHPTLKNFLEISMQNWQTVLKINSSSSTVATEPIHIKRGIFQGDALSPLWFCMALNPLSHLLDKTDAGYKLTNINTQYTLTHLMYMDDIKLYAADKNALVVLADTTQQFSDDICMSFGVDKCKMLSVVKGKIQNNSYTLGSGQLIEPMDEQSTYKYLGFKQSRQIHQKMTKQELVNKYSHRLNLILKTNLNSKNTIKAINTFAIPILTYSFGIIRWSNTDIKKLQRTLNTSLTKHRKHHPKSSIHRLTLPRQEGGRGLIDIHNLHNKQIHSLRAYFHNKAESSALHKHVTENDTKLTPLNLHNRNTQINELLISTPEKIAAWFAKALHGRHQAYLSQPHVDKAKSNEWLKRGELFPETEGFMLAIQDQIIATRNYRKYIIKDPHQPTDLCRHCNTVSETIQHITGACKSLAQTDYKHRHDQVAAIIHQHLAFKYKLISEMKPYYKYKPELILDNNNQKIYWDRTIITDKTIHFNRPDITLHDKVNKTVYLIDIAIPNSHNIQTTISEKLSKYQDLAIEIKTQWKAQTVHIVPIVLSSTGIVPKSLMQSLNTLHMPPHTLQLLQKATILNTCRITRKFLTSSTISSTFSI

SEQ ID NO: 30852 - protein, 1361 aa, Spodoptera frugiperda
MITRSKLKKQSEATPQLDDESSQFSSSSSTSLFPSISSTSQSFCVSPTPSSSSTIQSVDVVQLTNSVDEVVPTTRTVKTRRKWTTDMNEFILRNYLLLTNIETDKNAYLPSLHTKFLEKFPSMEVSRQRIGDQRRAIVQKKLLPQTTIDQIYEQVRTELQITPIRQQHSTITHVTPINNTQNNIQPGQRMKWTNEYNETIMKIYYKITYLETNKTAYRKSLHEQFITAFPELSHITEQRLSDQVRAIINNKYINVNRLAEIKKQVSEQLIHETDTNQHLSTHSYIAEYPEENFHTQPSISNTHTDMHTNNVSQDTNTNTETIIPTHSPITDDNFLNDIQLEQLDTIHTNTEINQEIEDLFQQAHQYFADTDPTNRPYIPKQKTSRKFSATVNYINNNILPKYATIDTDFNNLQTIIYSAAWTAAKYNGAKITYTVQTERQTTNTRKRKWQTRLERKIKGLRANIGRLSQYIKGNRSPRLVAAVEIIKAKYRLHAQYENPNTQMTHFLDTMKQKLNAASSRLRRYLTCTNRKLENSRFANNEKFFYRNLTSTGTLTQSVQTPSAETLREFWAGIWENPVCHNHTASWIHEVNLEHEEMQFEFIPIDIFLNVIKNTQNWKSPGTDHIHNYWYKKFTTLHPFLHNHLNTFIQSPHLLPTYITQGITYMIPKDTNDSTNPAKYRPITCLQTFYKILTACISNIIYDHLTKHNILAEQQKGCRKFSQGCKEQLTIDAVVMNHAVKSKTDIHTMFIDYQKAFDSVPHSWLLHVLNLYKIHPTINSFLQSSMQNWQTVLKINQPSTTIITQPIHIKRGIFQGDALSPLWFCMALNPLSHLLNKTNAGYTLTNNSTQYTLSHLMYMDDIKLYAADQMLLSHLADVTQQFSTDICMQFGVDKCKVMSVVKGKFINNSYTLETGQTIEPMEEHDTYKYLGFRQSRQIQHKNTRQELIKKFTHRLNLILKTNLNARNTIKAINTFAIPILTYSFGIIQWSKTNTRKLQRIINTTLTKHRKHHPKSCIQRLILPRKEGGRGLIDIQNLHNKQISSLRSYFHSKSDHSPLHRHVVETDKNFTPLNLQNRDPQTNEIIVTDEDKIAVWSQKALHGRHRSFLSQPHVDKIKSNEWLKRGELFPETEGFMLAIQDQIIATRNYRKFIMRDPNQQNDLCRHCNLASETIQHITGACKSLAQTDYKHRHDQVSAIIHQHLAYKYSLVDQMVAYYKYKPETILENRNYKIYWDRTIVTDKTIHFNRPDITVHDKINKTVYLIDIAIPNSHNIQSTISEKLSKYQDLAIEIKTQWRAQTVHIVPIVLSTTGIIPKSLIQSLNTLHMPTYTLHTLQKATILNTCRITRKFLTSSTLSSTYSI

SEQ ID NO: 30853 - protein, 1412 aa, Heliothis virescens
MRLRNRVIPQAGTGANRDGESRPTASSLGCPSYSGGGNVSQPAAQSQTVAVTHDDSSSCSSSLFPSISSTSSQSFCISPSSSLSSVSVQLADVVQETNFVSDPVPTTSGVIRRKWSTEMNKFILRTYLQLTRIETDTKAYLHSLHTKFLEKYPDMQVSRQRIGDQRRAIVQKKLLPQDIIDQIYEEVRIELQIAHTQTQQHSTQTYRTAPVITQPGQRMKWSNECNEAIIRIYYTITELETNKTAYRKYLHEQFINLYPELSHITEQRVSDQMRAIINNKYISNSRLAEIKKQVAEHLNSSINQPQSENYSEQFNNILPQYDTQQPDEQFSTSNTHLTNTQTPLTLTNTHMTDIDIGTTIHTQNYEETLSILTTDEISSLNQIEIEEPSTRQTNPPDAPETNTELEETFKQAQQYFTDTHPTNRPYIPKQKSSRKFSAIVHYINTQILPKNVHVDIDFSSLQTIIYCAAWTAAKCNGAKVTNIIQNFHRTKTHRKPKWQIRLEKKIANLRANIGRLTQFIRGNRSRKILTAVESIKSKYQLHAQHEHSNTQIEHFLDTLKQKLNAASSRLKRYVTCTKRKVQNATFRNNEKIFYRNLSSNHTDTSTQTLETPSAESLREFWANIWENPVSHNNQADWLTDISLEVPEMEFDFIPIDTFIDIIKRTHNWKSPGTDNIHNYWYKNFTSIHPHIHTHLNKFIQSPHLLPTYITQGITYMIPKDINDSLNPAKYRPITCLQTLYKILTACISEVIYTHLAKHNILSEQQKGCRKNSQGCKEQLTIDAITMNSAVKNKTDIHTMFIDYRKAYDSVPHSWLLYVLNLYKIHPMLIVFIQNSMQNWQTTLKINQASTGIITDPICIKRGIFQGDALSPLWFCLALNPLSHLLDKSNAGYTLNNNTTQHTLSHLMYMDDIKLYASDTNSLFHLADITQQFSQDICMQFGVDKCKILSVSKGKIQNNSYTLESGETIEPMDELSTYKYLGFKQSRQIQLKITKQELLKKFTHRLNLILKTNLNSKNTIKAINTFSIPILTYSFGIIRWSKTDIKKLQRIINTSLTKHRKHHPKSCIQRLTLPRQEGGRGLIDIHNLHNKQISTLRTYFHHKSEHSPLHKQVTETDKNLTPLNLHDRNTQNTETLTTPQQKIAEWSAKALHGRHRAFLSQPHVDKVQSNEWLRRGELFPETEGFMLAIQDQIIATRNYRKHIIRDPNQQTDMCRHCNNAPETIQHITGACKSLVQTDYKHRHDQVAAIIHQQLAYKYKLIKDMIPYYKYKPETVLENRNQKIYWDRTIITDKTIHYNRPDITLHDKTNKTVYLIDIAIPNSHNLQTTISEKLSKYQDLAIEIKTQWKAQTVHIVPIVLSTTGIIPKSLKQSLDTLHMPSYTVYMLQKATMLNTCRITRKFLTSSTLSSTFSI

SEQ ID NO: 30854 - protein, 1365 aa, Xestia xanthographa
MNTRSKTKKQLQAKLPRIDDETSQPSSSSPSSLFPSIPSSSQSFRVTPTPSSSSISIQSADVVQETGFVDDTVPSAKAATSRRKWSIEMNKFILRTYLHLTSMETDKNAYLPPLHTKFIEKYPAMQVSRQRIGDQRRAIVQKKLLPQDTIDQIYEEVRAELQIIHTQIQQHSTQPSTQSGQRLRWTNEYNETIIRIYFTATQLETNKTAYRKKLHEEFINKYPELAHITEQRLSDQVRAIIKNKYIHDNRLEEIKNQVASELSNSNSYTQNIEDINHDHWNTQTQNDSEQPATNTNFFDTPNNTLTTNIILNNSTDTNIVSQTVVNIDDELFLNNIDVGQYGPAQTNFDTTPETNPEIESRFHQAQINFNCTHPTNRPYIPKQKTSRKFSAIVSYINTVILPKHVNADTEFAKLQTVIYCAAWTAATCNGAKISDPIQNERRPYTQKKPKWHIRLEKKIENLRANIGRLTHFINGCRSQKLIAAVEEIKIKYQLHAQYENPNTELAHFLDTLKQKLSAASSRLKRYITCTNRKVENTKFINNEKFFYRNLTSNNKDNTNQSLETPTSETLREFWANIWENPVHHNNHADWVKEATPEIPEMEFEFIPIETFIDVIKRTHNWKSPGTDNIHNYWYKKFSSIHPFLYNHLNTFIQSPHLLPQYITHGVTYMIPKDTNDTKNPAKYRPITCLQTLYKILTACVSEIVYEHLTKNNILAEQQKGCRKNSQGCKEQLTIDAITMSSAVKSKKDIHTMFIDYQKAFDSVPHSWLLHVLNLYKIHPTLKQFLGTSMQNWQTVLKINSSSSTVATEPICIRRGIFQGDALSPLWFCMALNPLSHLLDQTGTGFTLDSNNTQYTLTHLMYMDDIKLYAADKEALYQLADATQQFSEDICMSFGVDKCKILSIVKGKFQNNSYTLLSGASIEPMDEQSTYKYLGFKQSRQIQQKMSKQELLKKFTHRLNLILKSNLNSRNTIKAINTFAIPILTYSFGIIRWSKTDIKKLQRTIHTLLTKHRKHHPKSCIQRLTLPRQEGGRGLIDIHNLHNKQILSLRAYFHNKSETSLLHKQVTETDNKLTPLNLQNRNTQINEHIVSTQQKIAEWSEKALHGRHRACLSQPHVDKIKSNEWLKRGELFPETEGFMLAIQDQIIATRNYRKYIIKDPNQPTDLCRHCNNASETIQHITGACKSLAQTDYKHRHDQVAAIIHQQLAFKYKLVSEMIPYYKYKPEVALENNDQKIYWDRTIITDKTIHYNRPDITVHDKTNKTVYLIDIAIPNSHNIQATISEKLSKYQDLAIEIKTQWKVQTVHIVPIVLSSTGIIPKSLTQSLNTLQMPNHTLYMLQKATILNTCRITRNFLTSSTLSSTFSI

SEQ ID NO: 30855 - protein, 765 aa, Xestia xanthographa
MEFEFIPIETFIDVIKRTHNWKSPGTDNIHNYWYKKFSSIHPFLYNHLNTFIQSPHLLPQYITHGVTYMIPKDTNDTKNPARYRPITCLQTLYKILTACVSEIIYEHLTKNNILAEQQKGCRKNSQGCKEQLTIDAITMNSAVKSRKDIHTMFIDYQKAFDSVPHSWLLHVLNLYKIHPTLKQFLGTSIQNWQTVLKINSSSSTVATEPICIRRGIFQGDALSPLWFCMALNPLSHLLDQTGTGFTLDSNNTQYTLTHLMYMDDIKLYAADKEALYQLADVTQQFSDDICMSFGVDKCKILSIVKGKFQNNSYTLLSGASIEPMDEQSTYKYLGFKQSRQIQQKISKQELLKKFTHRLNLILKSNLNSRNTIKAINTFAIPILTYSFGIIRWSKTDIQKLQRTIHTLLTKHRKHHPKSCIQRLTLPRQEGGRGLIDIHNLHNKQILSLRAYFHNKSETSSLHKQVTETDNKLTPLNLQNRNTQINEHIVSTQQKIAAWSEKALHGRHRACLSQPHVDKIKSNEWLKRGELFPETEGFMLAIQDQIIATRNYRKYIIKDPNQPTDLCRHCNNASETIQHITGACKSLAQTDYKHRHDQVAAIIHQQLAFKYKLVSEMIPYYKYKPEVALENNDQKIYWDRTIITDKTIHYNRPDITVHDKINKTVYLIDIAIPNSHNIQATISEKLSKYQDLAIEIKTQWKVQTVHIVPIVLSSTGIIPKSLTQSLNTLQMPNHTLYMLQKATILNTCRITRKFLTSATLSSTFSI

SEQ ID NO: 30856 - protein, 1410 aa, Coeliades ramanatek
MESKTKPRPQVPGGTSSRSDPDGSRPDAGSRGVYNLRARRTRQTTQACKMDNKMPSDKEHLSSPSSSVSLFPSPNSSPNPFLIPVSSRSSSVSVDVVREACADNLAPTTGQKRARKRWSEEMNRFIWRTYLLITRIETTNLKSYLTTLHQQFTTKFPEMLATRQRIGDQRRAIIRNQLLSQDTLEDLKLEVQMELTTNNHLLLSDSLNESHIMKDLILNKTTQRTKMSWTTALNETLMRCFYEVTDLGTNLTAYRRNLRNKLIEIHPQLSHISEQNIADQRRAIINNKYITDERLEQLKKEVKKDRGRCTDTHTSPIEIADIRNDLDLLDAPISTYPNHTDNMISPFIHHHSPNAKATSTTHHTPSNTNTSIISHHSAPTITPIKDYYSTNTCFIETHLQEKLREEFQSNFTKFKNTEPTSRPYIPKQRTSKKFAMIVTYINNFILPDYLESYKDFTNLHTIIYSAAYTAAICNGTKIGITRLNTEKKIKAVWQRRLEGKIERYRFYIGRLTQHIQGNRNKRIVATVEEIRKKFQKHAQYEHPNTQLKDFLDTLKQKLNAAASRLKRYLTCTARKKENIKFNNNEKSFYRNLNQMNHNTTLNDTPTLETLRQYWAGIWESPVEHNNNTEWLNRTTQPSAQIPDMEFNEIPLETFMQVLKRTHNWKAPGTDNIHNFWYKKFTRIHPYIYNTLNSFLKSPDAVPKFITQGITFMLPKDTNDTTNPSKYRPITCLQTIYKLLTACISEVIHEHISTRDILAEQQKGCRKNSQGCKEQLTIDAIIMNTAFKMKRNIHTMFIDYRKAFDSVPHSWLIEVLQLYKIHPNIINFLRTSMKNWQTILRITQSSQSLTTEPIQIQRGIFQGDALSPLWFCLALNPLSDLLNQNNLGFKLDENDAEGRLSHLMYMDDIKLYADSKEDLYKLADLTQQFSIDMKMELGVDKCRILSVNKGKIEKTSYILKSGESIEPMDEHSTYKYLGFNQSRKIKHKETISQLMNKFKFRLNLILKSHLNSKNTFKAINTFAIPLLTYSFGIIHWSKTNLLKLQRTVNTHLTKYRKHHPKSCTQRLTLPRQEGGRGLIDVKNLHNKQVTTLRNYFHYKSQHTFIHKHVVNADNRLTPLNLKNKETQPNEDIAHTQDKITAWAEKSLHGRHRAYLSQPHVDKDKSNEWLTRGELFPETEGFMMAIQDETIATRNYRKYIMKDHTQTSDLCRHCNSASETIQHITGSCKSLAQTDYKHRHDQVAAIVHQQVAHRYELIQNILPYYKYKPESVLENKHCKIYWDRTIITDKTIYYNRPDITIHDKKNNKVFIIDIAIPNSHNIQSTTSEKLSKYRDLAIELKTQWKVQTIQIIPIILSSTGIIPKSLVDNLKTLDMPPYILHLLQKATILNTCRITRKFLTSSTISSATISMQ

SEQ ID NO: 30857 - protein, 1417 aa, Parnassius imperator
MLTLDNRGPPVLFTLAAVNAGLCCGRLCKSLASRGNNMITRSKTKKHTQVNLPQIDDETSHCTSSYSSSLFPSISSSSQSFRVISKTSSSSSISIQSADVVQETNFVDETVPTTSTATTRRKWSVEMNKFILRTYLHLTNMDTDKNNYLSPLHTKFLEKYPTMQVSRQRIGDQRRAIVQKKLLPQNTIDQIYEEVRAELQMVQTQVQQHFTQSKTPNKRKPSQRMKWTNEFNEALIKIYYTITQLETNKTAYRKHLHEEFINIYPELAHVTEQRLSDQIRAIINNKYINSNRLDEIKNQVTTELRNSNTNTQNAEYINNKHLNTQPHNNLEQPDEYIHTLNTQHTITYTSGTPTNTLPTKIPLNDGTRTNIVSRTPLNTDDENFLSNIDIDQSGPTETNLDAAPEINSEIEDIFLQAQRYFTDTHPTNRPYIPKQKSSRRFTAIVTYINTVILLKNVNVDTDFITLQTIIYCAAWTAAKCNGAKISHSTQNERRTYIQKKPKWQVRLEKKIENLRAHIGRLTHFINGSRSKKVVAAVEEIKRKYEIHAQHENSNTELEHFLDTLKQKLSAASSRLKRYITCTNRKVQNTKFTNNEKLFYRNLTSNNSDTSNQNLETPSSETLRDFWANIWENPVSHNNHADWVNETTQEIPGMEFECIPIDTFIDVIKRTHNWKSPGTDNIHNYWYKKFTSIHPFIHNHLNTFIQSPHLLPTYITHGVTYMIPKDMNDTINPAKYRPITCLQTLYKILTACVSEIVYEHLTKNNILAEQQKGCRKNSQGCKEQLTIDAIILNSAVKTKKDIHTMFIDYQKAFDSVPHSWLLYVLNLYKIHPTLKLFLETSMQNWQTVLKINQSSLSVTTEPICIKRGIFQGDALSPLWFCMALNPLSHLLNNTDMGFSLANNNTQYTLTHLMYMDDIKLYAADKEALFQLADTTQQFSQDICMSFGVDKCKILSIARGKIQSNSYTLVSGESIEPMNEHSTYKYLGFKQSRRIQQNITKQELIKKFSHRLNLILKTNLNSRNTIKAINTFAIPILTYSFGIIRWSKTDIKKLQRTLNTLLTKYRKHHPKSCIQRLTLPRQEGGRGLIDIHNLHNKQILSLREYFHSKSKHSSLHKHITETDKNLTPLNLQNRNTQINEHIMGTQQKIAAWSEKTLHGRHRAYLSQPHVDKIKSNEWLKRGELFPETEGFMLAIQDQIVPTRNYIKYIIKDPNQTTDMCRHCNNASETIQHITGACKSLTQTDYKHRHDQVAAIIHQHLAYKYKFVDKMQPYYKYKPETILESKNQKIYWDRTIITDKTIHYNRPDITVHDKTNKTVYLIDIAIPNSHNIQTTISEKLSKYQELAIEIKTQWKSQNVHIVPIVLSSTGIIPKSLTQSLNTLHMPTQTLYMLQKATILNTCRITRKFLTSSTLSSTFTI

SEQ ID NO: 30858 - protein, 1356 aa, Phlogophora meticulosa
MNTRSKTKKQLQANQPQIDDETSQLSSSSPSSLFSSIPSSSQSFRITPTPSLSSFSIQSADVVQETNFVDDTVPIARNATSRRKWTIEMNKFILRTYLHLTNMDTDKNAYLPSLHTKFLEKYPAMQVSRQRIGDQRRAIVQKKLLSQDTIDQIYEEARAELQMVHTQIQQHSTQSNTQFGQRMKWTNEYNEAIIRIYYTTTQSETNKTAYRKYLHEGFITIYPELAHITEQRLSDQVRAIINNRYININRLAEIKNQVALELRNSNTDTQNTEHTNSDYLNTQSQNDLEHLDPNTLTTNILPSNNPNTVTTTHTPNTEEVHFLNDIDNDLFGATETNFPAAPEINPEIEATFHQAQQHFINTHPTHRPYIPKQKTSRKFSTIVSYLNTVILPKHVNVDTEFIKLQTIIYCAAWTAATCNGAKISEISAQNERGTFRQRKPKWQIRLENKIKNLRANIGRLTHFINGSRSQHLIAAVEQIKIKYQLHAQHENSNTQIEHFLDTLKQKLSAAASRLKRYVTCTNRKVQNTKFTNNEKTFYRNLTSNNMETTNQSLETPSSETLRDFWANIWENPVCHNNHADWVNEASPEILEMKFDFIPVETFIDVIKRAHNWKSPGTDNIHNYWYKKFSSIHPFLHNHLNTFIQSPHLLPTYITHGVTYMIPKDMNDTINPAKYRPITCLQTLYKILTACVSEVIYEHLTKNNILSEQQKGCRKNSQGCKEQLTIDAIIMNSAVKSRKDIHTMFIDYQKAFDSVPHSWLSHVLNLYKINPKIKQFLETTMQNWKTVLKINSSSSTVATEPISIKRGIFQGDALSPLWFCMALNPLSHLLDKTDAGFILSNNNTQYTLTHLMYMDDIKLYAADKKSLFQLADTTQQFSDDICMSFGVDKCKILSIEKGKILNNNYTLASGESIEPMDEQSTYKYLGFKQSRQIQQKISKQELLKKFSHRLSLVLKSSLNSRNTIKAINTFAIPVLTYSFGIIRWSKTDIKKLQRTVNTLLTKHRKHHPKSCIQRLTLPRQEGGRGLIDINNLHNKQILTLRAYFHGKSENSSLHKQVTETDIKLTPLNLQNRNTLTNEHIVSTEQKIAAWAQKALHGRHRAYLSQPHVDKIKSNEWLKRGELFPETEGFMLAIQDQIIATRNYRKYIIKDRNQPTDTCRHCNSASETIQHITGACKSLAQTDYKHRHDQVAAIIHQHLAHKYKLIGEMVPYYKYKPETILENRNQKIYWDRTIITDKTIHYNRPDITVHDKSNKIVYLIDIAIPNSHNIQTTISEKLSKYQDLAIEIKTQWQAQNVHIVPIVLSSTGVVPKALTQSLNTLHMPSHTLHMLQKATILNTCRITRKFLTSSTLSSTFLI

SEQ ID NO: 30859 - protein, 1259 aa, Choaspes benjaminii
MNRFIWRTYLHTTKIETINLKSYLDTLHQLFNKQFPLMQASRQRIGDQRRAIIRNQLLSQNTLNQIKLEVKIELEGSNNSQNSNTHNIHENQSQRTNNNDPIDTTQRSKMRWSTCLNETLMRCFYEVTDLGTNLTAYRRNLRNKFMELYPQLSHLSEQNISDQKRAIINNKYISDERLRQIKKEVEAKGIRFLANTQPNIGINTATSEINAEEDNTEDITTESLYIQNNTQKTLGTSEITHYSPTTNLIETQMNEEFKNNLAKFKNTDPTSRPYIPKQRTSTKFAKIVTYINNKVLPKYLKPNQDFLTLQTIIYSAAYTAATCNGTKIGIRTHNTQRKKKVAWRERLERKIELLRSHIGRLIQYIQGNRNRKIINTVEEIKRRYQKHAQYEQPNEQLKDYLDTIKQKLNAAANRLKRYITCTARKQENKKFAHNEKTFYRNLNPHNNIIEDTRTPTPEELRDFWSGIWQTPVEHNNNTNWINQTIQTSTSIPDMEFNDIPFDTFLQVIRRTHNWKAPGTDNVHNFWYKKFTSTHSYIHEIFNTFIKAPHTIPKYITQGITFMLPKDMSDTTDPSKYRPITCLQTIYKILTACISDVVYKHLVGNSILAEQQKGCRKDSQGCKEQLTLDAIVMNTATKEKRNIHTMFIDYRKAYDSIPHSWLIKTLEIYKIHPNIIYVLQTCMQNWQTTLKITRNSKSLTTEPIRIKRGIFQGDALSPLWFCMALNPLSDLLNQDNLGFELIKNDPESILSHLMYIDDIKLYAASKEDLFQLADITQSFSKDMKMEFGVDKCRILSVSSGKIVRNPYVLDAGETIEPMDQYSTYKYLGFNQSRKIKHKQTISQLSKTFKLRLNLILKSHLNSKNTVKAINTFAIPLLTYSFGIIHWSKTNLSRLQQTINTHLTKYRKHHPKACTQRLTLPRQEGGRGLIDLKNLHNKQITTLRNYFYSKSEHTALHKHAVVADNRHTPLNLKNKEIQPNEQITNIQEKITAWAGKSLHGRHRAYLSQPHVDKDKSNEWLTRGELFPETEGFIMAIQDETIATRNYRKYILKDPKQTNDLCRHCNSAPETIQHITGSCKSLAQTDYKHRHDQVAAIVHQQLAHAHKLIPVMAPYYKYKPESVLENKNYKIYWDRTIITDKTIHYNRPDITVHDKKNKKVFIIDIAIPNSHNIQTTTSEKLSKYQDLAIELKTQWKVQTVQIIPIVMSSTGIIPKTLVENLKALDMPSYILHILQKATIINTCRITRKFLTSSTISSAIFSM

SEQ ID NO: 30860 - protein, 1417 aa, Amphipyra berbera
MRTLDNGGPPVLYTLATVNAGLCRGRLIRSLATRGNKMITRSKIKKTIQANLPHIDDETTQVSLSSSTKSLFPSIPSSSPPFCISPSQSSSTSIQSADVAQETNSVIEPVPTTSTATARRKWSIEMNKFILRTYLHLTNMETDTNAYLPPLHTKFLEKYPNMQVSRQRVGDQRRAIIQKKLLPQKTIDQIYDEVRSELQIIQTQIQQHPTQYTTPVNTQSGTRMKWTNECNESIIRIYYRITQLETNKTAYRKYLYEEFINQYPDLSHITEQRLADQRRAIINNKYIKNDRLAEIKKQVAEELRHTNTQTENTNNEPLNIQPESNIEYPDEYSHTPSTLHINTINSYTLTNTLTTDVPLNNSAYTDLITQTLTDPQNTSEEKLLNNIYIEQTDPTQTNLDVAPESNPEIDDTFQQAQQYFTDTHPTNRPYIPKQKTSRKFSATVKYINTIILPKYVNVDTDFNTLHNAIYCAAWTAAKCNGAKLSHLAQSEHRTRPHRKPNWQIRLEKKIGNLRANIGRLTQFIRGNRNRKVVAAVEAIKIKYQLHAQHENSNTQIDHFLDTLKQKLNAASSRLKRYKTCTDRKVQNTKFINNEKIFYRNLTSMNKDASSNQNIETPSPESLREFWANIWEIPVHHNTHADWINETSSQIPEMEFEFIPIDTFIDVIKRTHNWKSPGTDNIHNYWYKKFTSIHPYIHNHINTFIRSPHLLPPYITHGITYMIPKDINDTINPAKYRPITCLQTLYKILTACISEVVYKHLTEHNILAEQQKGCRKNSQGCKEQLTIDAIVMNTAVKNKKDIHTMFIDYQKAFDSVPHSWLLHVLHLYKIHPTLISFLHTSMQNWQTVLKINQASATLTTEPISIQRGIFQGDALSPLWFCLALNPLSDLLDKTDVGFTLKNNDTQYTLTHLMYMDDIKLYAADKTSIFKLADTAQQFSQDIHMQFGVDKCKILSITKGKIQNNSYTLGSGESIEPMDEQSTYKYLGFKQSRQIQQKITKQELLKKFSYRLNLILKTHLNSRNTIKAINTFAIPILTYSFGIIQWSKTDIKKLQRTINTHFTKHRKHHPKSCIQRLTLPRQEGGRGLIDIHNLHNKQILSLRAYFHDKSEHSPLHKHTTNLDKKLTPLNLQDRNTQTNEHITSTQQKITAWADKALHGRHRAYLSLSHVDKEKSNEWLRRGELFPETEGFMLAIQDQIIATRNYRKYIIKDPNQPTDLCRHCNTASETIQHITGACKSLAQTDYKHRHDQVAAIIHQNLAYKNKLISEMNPYYKYKPETILENRNHKIYWDRTIITDKTIHYNRPDITVHDKTNKTVYLIDIAIPNSHNIQTTISDKLSKYQDLAIEIKTQWKAQTVHIVPVVLSSTGIIPKSLTQSLNTLHMPTYTLHMLQKATILNTCRITRKFLTSSTLASTYSI

SEQ ID NO: 30861 - protein, 1364 aa, Noctua janthe
MNTRSKTKKQLQAKLPQIDDETSQPSSSSPSSLFPSIPSSSQSFRVTPTPSSSSISIQSVDVVQETNFVDDTVPTARTATSRRKWSTDMNKFILRTYLHLTHMETDKNAYLPSLHTKFLEKYPDMQVGRQRIGDQRRAIVQKKLLPQETIDQIYEEVRAELQIVHTQIQQHSTQSKTPINTQAGQRMKWTNEYNEAIIRIYYTSTELETNKTAYRKHLHEEFIKIYPELAHLTEQRLSDQVRAIINNKYIHTNRLEEIKNQVATELRNINTNTQNIEHINNDLQPPDENIHSLSTQYANIYTSTTSNSILLNNSSDTNIVSQTLINTVDESFLNHIDIGLFEPTQNNLNAAHEKNLEIEATFQQAQQLFSDTHPISRPYIPKQKTSKKFSAIVTYINSVILPNNVNVDTDFIKMQTTIYCAAWTAATCNGAKISDTQNESRTYIKRKPKWQIRIEKKIQSLRSNIGRLTHFINGSRSPKLIAAVEEIKKKYQVHAQYEDSNTQLVHFLDTLKQKLNAASSRLKRYLKCTNRKVQNTKFINNEKIFYRNLATNNRDTSNQSLETPTSETLREFWANIWENPVNHNHQADWINEVTPEIPEMEFEFIPIGTFIDVIKRTHNWKSPGTDNIHNYWYKKFSSIHPFLHNHLNTFIHSPHLLPSYITHGVTYMIPKDINDTINPAKYRPITCLQTIYKILTACLSEVVYEHLTKNNILSEQQKGCRKNSQGCKEQLTIDAVTMNSAVKSKTDIHTMFIDYQKAFDSVPHSWLLNVLSLYKIHPTLKNFLQMSMQNWQTVLKINSSSSTVATEPIHIKRGIFQGDALSPLWFCMALNPLSHLLDKTATGFTLTNSNTQYTLTHLMYMDDIKLYAADKNALVVLADTTQQFSDDICMSFGVDKCKMLSVVKGKTQNNSYTLGSGQLIEPMDEQSTYKYLGFKQSRQIHQKMTKQELVNKYSHRLNLILKTNLNSKNTIKAINTFAIPILTYSFGIIRWSNTDIKKLQRTLNTSLTKYRKHHPKSSIHRLTLPRQEGGRGLIDIHNLHNKQIHSLRAYFHNKSESSALHKHVTENDTKLTPLNLHNRNTQINELVISTAEKIAAWSAKALHGRHRAYLSQPHVDKAKSNEWLKRGELFPETEGFMLAIQDQIIATRNYRKYIIKDPHQPTDLCRHCNTASETIQHITGACKSLAQTDYKHRHDQVASIIHQHLAFKYQLISEMKPYYKYKPELILDNNNQKIYWDRTIITDKTIHFNRPDITLHDKANKTVYLIDIAIPNSHNIQTTISEKLSKYQDLAIEIKTQWKAQTVHIVPIVLSSTGIVPKSLMQSLNTLHMPFHTLQLLQKATILNTCRITRKFLTSSTISSTFSI

SEQ ID NO: 30862 - protein, 1416 aa, Noctua janthe
MPRAAWLGERLVASVPTLDNRGPPVLFTLATVNAGLCCGRPFKSLATRGINMNTRSKTKKQLQAKMPQIDDEISQPSSSSPSSLFPSIPSLSQSFRVTPTPSSSSISIQSADVVQETNFVDDTVPSAKAATSRRKWNIEMNKFILRTYLQLTSIETDKNAYLPPLHTKFLEKYPAMQVSRQRIGDQRRAIVQKKLLPQDTIDQIYEEVRAELQMIHTQIQQHSTQPSTQSGQRMRWTKEYNETLIRIYFTTTQLETNKTAYRKKLHEEFINKYPELAHITEQRLSDQVRAIINNKYIHDNRLKEIKNQVASEFRNSNTNTQSIEDINRDHWDTQTQDDSEQPATNTNFSDTPINTLTTNIILNNSTDTNIVSQTVVNIDDENFLQNIDVGQFEPTQTNFDTATEANPEIESTFHQAQINFDCTHPTNRPYIPKQKTSRKFSAIVSYINTVILPKYVNANTEFIKLQTIIYCAAWTAATCNGAKISDLTQNERRPYTQRKPKWQIRLEKKIDNLRANIGRLTHYINGCRSKKLIAAVEEIKIKYQLHAQHENPNTEIAHFLDTLKQKLSAASSRLKRYITCTNRKVQNTRFINNEKVFYRNLASNNKDTTNQSLETPTPEILREFWANIWENPVHHNNHADWVKETTPEIPEMEFEFIPIETFIDVIKRTHNWKSPGTDNIHNYWYKKFSSIHPFLYNHLNTFIKSPHLLPQYITYGVTYMIPKDTNDTKNPAKYRPITCLQTLYKILTACISEIVYEHLTKNNILAEQQKGCRKNSQGCKEQLTIDAITMNSTVKTRKDIHTMFIDYQKAFDSVPHSWLLHVLNLYKIHPTLKQFLETSMQNWQTVLKINSSSSTVATEPICIRRGIFQGDALSPLWFCMALNPLSHLLDQTGAGFSLESNNTQYTLTHLMYMDDIKLYAADKEALYQLADATQQFSNDICMSFGVDKCKILSIVKGKIQNNSYTLLSGASIEPIDEQSTYKYLGFKQSRQIQQKMSKQELVKKFSHRLNLILKSNLNSRNTIKAINTFAIPILTYSFGIIRWSKSDIKKLQRTIHTLLTKHRKHHPKSCIQRLTLPRQEGGRGLIDIHNLHNKQILSLRAYFHNKSETSSLHKQITETDNKLTPLNLQNRNTQINEHIVSAQQKIAAWSEKALHGRHRACLSQPHVDKIKSNEWLKRGELFPETEGFMLAIQDQIIATRNYRKYIIKDPNQPTDLCRHCNNASETIQHITGACKSLAQTDYKHRHDQVAAIIHQQLAFKYKLVSEMIPYYKYKPEVALENNDQKIYWDRTIITDKTIHYNRPDITVHDKTNKTVYLIDIAIPNTHNIQTTISEKLSKYQDLAIEIKTQWKVQTVHIVPIVLSSTGIIPKSLTQSLNTLQMPNHTLYMLQKATILNTCRITRKFLTSSTLSSTFSI

SEQ ID NO: 30863 - protein, 912 aa, Mythimna impura
MRDECIAATRVNIGRLTHFINGSRSQKLVAAVEQIKLKYQLHAQHENSNTQIEHFLDTLKQKLSAASSRLKRYITCTNRKVQNTKFKNNEKIFYRNLTSNDRDITNESLDRPSPESLREFWANIWENPVYHNDHVDWVSHAATEIPDMEFEFIPIETFIEVIKRTHNWKSPGTDNIHNYWYKKFSSIHRFLYNHLNTFIQSPHLLPIYITHGVTYMIPKDINDTTNPAKYRPITCLQTLYKILTACVSEVVYEHLIKNNILAEQQKGCRKHSQGCKEQLTIDAIAMNSAVKCRKDIHTMFIDYQKAFDSVPHSWLLHVLNLYKIHPTLKQFLETSMQNWQTVLKIHSSSTTVATEPISIKRGIFQGDALSPLWFCMALNPLSHLLDKTDVGFTLVNHNTQYKLTHIMYMDAIKLYAADKGALFQLADTTQLFSDDICMSFGVDKCKILSVVKGKIQNNSYTLGSGESIDPMDEQSTYKYLGFKQSRQIQQKLSKQELLKKFSHRLNLILKSNLNSRNTIKAINTFAIPILTYSFGIIKWSNTDIKKLQRTVHILLTKHRKHHPKSCIQRLTLPRQEGGRGLIDIQNLHNKQIHSLRVYFHFKSENSLLHKQISDIDKKLTPLNLQNRNTQINEHITSTQQKIAAWSEKALHGRHRASLSQPHVDKLMSNEWLKRGELFPETEGFMLAIQDQIVATRNYRKYIMKDQNQPTDFCRHCNSASETIQHITGACKSLVQTDYKHRHDQVAAIIHQHLAYKYKLVTEMMPYYKYTPEIILESKDIKIYWDRTIITDKTIHYNRPDITVHDKTNKTVYLIDIAIPNSHNVQTTISEKLSKYQDLAIEIKTQWKAQTVHIVPIVLSSTGIIPKSLAQSLNTLQMPAQTLYMLQKATILNTCRITRKFLTSSTLTSTFSI

SEQ ID NO: 30864 - protein, 1365 aa, Xestia xanthographa
MNTRSKTKKQLQAKLPHIDDETSQPFSSSPSSLFPSIPSSSQSFRVTPTPSSSSISIQSADVVQETNFVDDTVPSAKAATSRRKWSIEMNKFILRTYLHLTSMETDKNAYLPPLHTKFIEKYPAMQVRRQRIGDQRRAIVQKKLLPQDTIDQIYEEVRAELQMIHTQIQQHSTQPSTQSGKRMRWTNEYNETIIRIYFTATQLETNKTAYRKKLHEEFINKYPELAHITEQRLSDQVRAIIKNKYIHDNRLEEIKNQVASELSNSNSYTQNIEDINHDHWNTQTQNDSEQPATNTNFFDTPNNTLTTNKNLNNSTDTNIVSQTVVNIDDEIFLNNIDVGQYGPAQTNFDTTPETNPEIESKFHQAQINFNCTHPTNRPYIPKQKTSRKFSTIVSYINTVMLPKHVNADTEFAKLQTIIYCAAWTAATCNGAKISDPIQNERRPYTQRKPKWHIRLEKKIENLRANIGRLTHFINGCRSQKLIAAVEEIKIKYQLHAQYENPNTELAHFLDTLKQKLSAVSSRLKRYITCTNRKVENTKFINNEKIFYRNLTSNNKDTNNQSLETPTPETLREFWANIWENPVHHNNHADWVKEATPEIPDMEFDFIPIETFIDVIKRTHNWKSPGTDNIHNYWYKKFSSIHPFLYNHLNTFIQSPHLLPQYITHGVTYMIPKDTNDTKNPAKYRPITCLQTLYKILTACVSEIIYEHLTKNNILAEQQKGCRKNSQGCKEQLTIDAITMNSAVKSRKDIHTMFIDYQKAFDSVPHSWLLHVLNLYKIHPTLKQFLGTSMQNWQTVLKINSSSSTVATEPICIRRGIFQGDALSPLWFCMALNPLSHLLDQTGTGFTLDSNNTQYTLTHLMYMDDIKLYAADKEALYQLADATQQFSDDICMSFGVDKCKILSIVKGKFQNNSYTLLSGASIEPMDEQSTYKYLGFKQSRQIQQKISKQELLKKFTHRLNLVLKSNLNSRNTIKAINTFAIPILTYSFGIIRWSKTDIKKLQRTIHTLLTKHRKHHPKSCIQRLTLPRQEGGRGLIDIHNLHNKQILSLRAYFHNKSETSSLHKQVTETDNKLTPLNLQNRNTQINEHIVSTQQKIAAWSEKALHGRHRACLSQPHVDKIKSNEWLKRGELFPETEGFMLAIQDQIIATRNYRKYIIKDPNQPTDLCRHCNNASETIQHITGACKSLAQTDYKHRHDQVAAIIHQQLAFKYKLVSEMIPYYKYKPEVALENNDQTIYWDRTIITDKTIHYNRPDITVHDKINKTVYLIDIAIPNSHNIQATISEKLSKYQDLAIEIKTQWKVQTVHIVPIVLSSTGIIPKSLTQSLNTLQMPNHTLYMLQKATILNTCRITRKFLTSATLSSTFSI

SEQ ID NO: 30865 - protein, 1417 aa, Amphipyra berbera
MRTLDNGGPPVLYTLATVNAGLCRGRLIRSLATRGNKMITRSKIKKTIQANLPYIDDETTQVSLSSSTKSLFPSIPSSSPPFCISPSPSSSTSIQSADVAQETNSVNEPVPTTSTATARRKWSIEMNKFILRTYLHLTNMETDTNAYLPPLHTKFLEKYPNMQVSRQRVGDQRRAIIQKKLLPQKTIDQIYDEVRSELQIIQTQIQQHPTQYTTPVNTQSGTRMKWTNECNESIIRIYYRITQLETNKTAYRKYLYEEFINQYPDLSHITEQRLADQRRAIINNKYIKNDRLAEIKKQVAEELRHTNTQTENTNNEPLNIQPESNIEYPDEYSYTPSTSHINTINSYTLTNTLTTDVPLNNSAYTDLITQTLTDPQNTSEENLLNNIHIEQTDPTQTNLDVAPESNPEIDDTFQQAQQYFTDTHPTNRPYIPKQKTSRKFSATVKYINTIILPKYVNVDTDFNTLQNAIYCAAWTAAKCNGAKLSHLAQSEHRTRPHRKPNWQIRLEMKIGNLRANIGRLTQFIRGNRNRKVVAAVEAIKIKYQLHAQHENSNTQIDHFLDTLKQKLNAASSRLKRYKTCTDRKVQNTKFINNEKIFYRNLTSMNKDASSNQNIETPSPESLREFWANIWEIPVHHNTHADWINETPSQIPEMEFELIPIDTFIDVIKRTHNWKSPGTDNIHNYWYKKFTSIHPYIHNHINTFIRSPHLLPTYITHGITYMIPKDINDTINPAKYRPITCLQTLYKILTACISEVVYKHLTEHNILAEQQKGCRKNSQGCKEQLTIDAIVMNTAVKNKKDIHTMFIDYQKAFDSVPHSWLLHVLHLYKIHPTLISFLHTSMQNWQTVLKINQASATLTTEPISIQRGIFQGDALSPLWFCLALNPLSDLLDKTDVGFTLKNNDTQYTLTHLMYMDDIKLYAADKTSIFKLADTTQQFSQDIHMQFGVDKCKILSITKGKIQNNSYTLGSGESIEPMDEQSTYKYLGFKQSRQIQQKITKQELLKKFSYRLNLILKTHLNSRNTIKAINTFAIPILTYSFGIIQWSKTDIKKLQRTINTHFTKHRKHHPKSCIQRLTLPRQEGGRGLIDIHNLHNKQILSLRAYFHDKSEHSPLHKHTTNLDKKLTPLNLQDRNTQTNEHITSTQQKITAWADKALHGRHRAYLSLSHVDKEKSNEWLRRGELFPETEGFMLAIQDQIIATRNYRKYIIKDPNQPTDLCRHCNTASETIQHITGACKSLAQTDYKHRHDQVAAIIHQNLAYKNKLISEMNPYYKYKPETILENKNHKIYWDRTIITDKTIHYNRPDITVHDKTNKTVYLIDIAIPNSHNIQTTISDKLSKYQDLAIEIKTQWKAQTVHIVPVVLSSTGIIPKSLTQSLNTLHMPTYTLHMLQKATILNTCRITRKFLTSSTLASTYSI

SEQ ID NO: 30866 - protein, 1417 aa, Amphipyra berbera
MRTLDNGGPPVLYTLATVNAGLCRGRLIRSLATRGNKMITRSKIKKTIQANLPHIDDETTQVSLSSSTKSLFPSIPSSSPPFCISPSPSSSTSIQSADVAQETNSVNEPVPTTSTATARRKWSIEMNKFILRTYLHLTNMETDTNAYLPPLHTKFLEKYPNMQVSRQRVGDQRRAIIQKKLLPQKTIDQIYDEVRSELQIIQTQIQQHPTQYTTPVNTQSGTRMKWTNECNESIIRIYYRITQLETNKTAYRKYLYEEFINQYPDLSHITEQRLADQRRAIINNKYIKNDRLAEIKKQVAEELRHTNTQTENTNNEPLNIQPESNIEYPDEYSYTPSTSHINTINSYTLTNTLTTDVPLNNSAYTDLITQTLTDPQNTSEENLLNNIHIEQNDPTQTNLDVAPESNPEIDDTFQQAQQYFTDTHPTNRPYIPKQKTSRKFAATVKYINTIILPKYVNVDTDFNTLQNAIYCAAWTAAKCNGAKLSHLAQSEHRTRPHRKPNWQIRLEMKIGNLRANIGRLTQFIRGNRNRKVVAAVEAIKIKYQLHAQHENSNTQIDHFLDTLKQKLNAASSRLKRYKTCTDRKVQNTKFMNNEKIFYRNLTSMNKDASSNQNIETPSPESLREFWANIWEIPVHHNTHADWINETSSQIPEMEFELIPIDTFIDVIKRTHNWKSPGTDNIHNYWYKKFTSIHPYIHNHINTFIRSPHLLPTYITHGITYMIPKDINDTINPAKYRPITCLQTLYKILTACISEVVYKHLTEHNILAEQQKGCRKNSQGCKEQLTIDAIVMNTAVKNKKDIHTMFIDYQKAFDFVPHSWLLHVLHLYKIHPTLISFLHTSMQNWQTVLKINQALATLTTEPISIQRGIFQGDALSPLWFCLALNPLSDLLDKTDVGFTLKNNDTQYTLTHLMYMDDIKLYAADKTSIFKLADTTQQFSQDIHMQFGVDKCKILSITKGKNQNNSYTLGSGESIEPMDEQSTYKYLGFKQSRQIQQKITKQELLKKFSYRLNLILKTHLNSRNTIKAINTFAIPILTYSFGIIQWSKTDIKKLQRTINTHFTKHRKHHPKSCIQRLTLPRQEGGRGLIDIHNLHNKQILSLRAYFHDKSEHSPLHKHTTNLDKKLTPLNLQDRNAQTNEHITSTQQKITAWADKALHGRHRAYLSLSHVDKEKSNEWLRRGELFPETEGFMLAIQDQIIATRNYRKYIIKDPNQPTDLCRHCNTASETIQHITGACKSLAQTDYKHRHDQVAAIIHQNLAYKNKLISEMNPYYKYKPETILENRNHKIYWDRTIITDKTIHYNRPDITVHDKTNKTVYLIDIAIPNSHNIQTTISDKLSKYQDLAIEIKTQWKAQTVHIVPVVLSSTGIIPKSLTQSLNTLHMPTYILHMLQKATILNTCRITRKFLTSSTLASTYSI

SEQ ID NO: 30867 - protein, 1416 aa, Noctua janthe
MPRAAWLGERLVASVPTLDNRGPPVLFTLATVNAGLCCGRPFKSLATRGINMNTRSKTKKQLQAKMPQIDDEISQPSSSSPSSLFPSIPSLSQSFRVTPTPSSSSISIQSADVVQETNFVDDTVPSAKAATSRRKWSIEMNKFILRTYLQLTSIETDKNAYLPPLHTKFLEKYPAMQVSRQRIGDQRRAIVQKKLLPQDTIDQIYEEVRAELQMIHTQIQQHSTQPSTQSGQRMRWTKEYNETLIRIYFTATQLETNKTAYRKKLHEEFINKYPELAHITEQRLSDQVRAIINNKYIHDNRLKEIKNQVASEFRNSNTNTQSIEDINRDHWDTQTQDDSEQPATNTNFSDTPINTLTTNIILNNSTDTNIVSQTVVNIDDENFLQNIDVGQFGPTQTNFDTATETNPEIESTFHQAQINFNCTHPTNRPYIPKQKTSRKFSAIVSYINTVILPKYVNANTEFIKLQTIIYCAAWTAATCNGAKISDLTQNERRPYTQTKPKWQIRLEKKIDNLRANIGRLTHFINGCRSKKLIAAVEEIKIKYQLHAQHENPNTEIAHFLDTLKQKLSAASSRLKRYITCTNRKVQNTRFINNEKVFYRNLTSNNKDITNQSLETPTPEILREFWANIWENPVHHNNHADWVKETTPEIPEMEFEFIPIETFIDVIKRTHNWKSPGTDNIHNYWYKKFSSIHPFLYNHLNTFIKSPHLLPQYITHGVTYMIPKDTNDTKNPAKYRPITCLQTLYKILTACISEIVYEHLTKNNILAEQQKGCRKNSQGCKEQLTIDAITMNSAVKSRKDIHTMFIDYQKAFDSVPHSWLLHVLNLYKIHPTLKQFLETSMQNWQTVLKINSSSSTVATEPICIRRGIFQGDALSPLWFCMALNPLSHLLDQTGAGFSLESNNTQYTLTHLMYMDDIKLYAADKEALYQLADATQQFSNDICMSFGVDKCKILAIVKGKIQNNSYTLLSGASIEPIDEQSTYKYLGFKQSRQIQQKMSKQELLKKFSHRLNLILKSNLNSRNTIKAINTFAIPILTYSFGIIRWSKTDIKKLQRTIHTLLTKHRKHHPKSCIQRLTLPRQEGGRGLIDIHNLHNKQILSLRAYFHNKSETSSLHKQITETDNKLTPLNLQNRNTQINEHIVSAQQKIAAWSEKALHGRHRACLSQPHVDKIKSNEWLKRGELFPETEGFMLAIQDQIIATRNYRKYIIKDPNQPTDLCRHCNNASETIQHITGACKSLAQTDYKHRHDQVAAIIHQQLAFKYKLVSEMIPYYKYKPEVALENNDQKIYWDRTIITDKTIHYNRPDITVHDKTNKTVYLIDIAIPNTHNIQTTISEKLSKYQDLAIEIKTQWKVQTVHIVPIVLSSTGIIPKSLTQSLNTLQMPNHTLYMLQKATILNTCRITRKFLTSSTLSSTFSI

SEQ ID NO: 30868 - protein, 1364 aa, Noctua janthe
MNTRSKTKKQLQAKLPQIDDETSQPSSSSPSSLFPSIPSSSQSFRVTPTPSSSSISIQSVDVVQETNFVDDTVPTARTATSRRKWSTDMNKFILRTYLHLTHMETDKNAYLPSLHTKFLEKYPDMQVGRQRIGDQRRAIVQKKLLPQETIDQIYEEVRAELQIVHTQIQQHSTQSKTPINTQAGQRMKWTNEYNEAIIRIYYTSTELETNKTAYRKHLHEEFIKIYPELAHLTEQRLSDQVRAIINNKYIHTNRLEEIKNQVATELRNINTNTQNIEHINNDLQPPDENIHSLSTQYANIYTSTTSNSILLNNSSDTNIVSQTLINTVDESFLNHIDIGLFEPTQNNLNAAHEKNLEIEATFQQAQQLFSDTHPTSRPYIPKQKTSKKFSAIVTYINSVILPNNVNVDTDFIKMQTTIYCAAWTAATCNGAKISDTQNESRTYIKRKPKWQIRIEKKIQSLRSNIGRLTHFINGSRSPKLIAAVEEIKKKYQVHAQYEDSNTQLVHFLDTLKQKLNAASSRLKRYLKCTNRKVQNTKFINNEKIFYRNLATNNRDTSNQSLETPTSETLREFWANIWENPVNHNHQADWINEVTPEIPEMEFEFIPIGTFIDVIKRTHNWKSPGTDNIHNYWYKKFSSIHPFLHNHLNTFIHSPHLLPSYITHGVTYMIPKDINDTINPAKYRPITCLQTIYKILTACLSEVVYEHLTKNNILSEQQKGCRKNSQGCKEQLTIDAVTMNSAVKSKTDIHTMFIDYQKAFDSVPHSWLLNVLSLYKIHPTLKNFLQMSMQNWQTVLKINSSSSTVATEPIHIKRGIFQGDALSPLWFCMALNPLSHLLDKTATGFTLTNSNTQYTLTHLMYMDDIKLYAADKNALVVLADTTQQFSDDICMSFGVDKCKMLSVVKGKIQNNSYTLGSGQLIEPMDEQSTYKYLGFKQSRQIHQKMTKQELVNKYSHRLNLILKTNLNSKNTIKAINTFAIPILTYSFGIIRWSNTDIKKLQRTLNTSLTKYRKHHPKSSIHRLTLPRQEGGRGLIDIHNLHNKQIHSLRAYFHNKSESSALHKHVTENDTKLTPLNLHNRNTQINELVISTAEKIAAWSAKALHGRHRAYLSQPHVDKAKSNEWLKRGELFPETEGFMLAIQDQIIATRNYRKYIIKDPHQPTDLCRHCNTASETIQHITGACKSLAQTDYKHRHDQVASIIHQHLAFKYQLISEMKPYYKYKPELILDNNNQKIYWDRTIITDKTIHFNRPDITLHDKANKTVYLIDIAIPNSHNIQTTISEKLSKYQDLAIEIKTQWKAQTVHIVPIVLSSTGIVPKSLMQSLNTLHMPSHTLQLLQKATILNTCRITRKFLTSSTISSTFSI

SEQ ID NO: 30869 - protein, 765 aa, Phlogophora meticulosa
MEFEFIPVETFIDVIKRAHNWKSPGTDNIHNYWYKKFSSIHPFLHNHLNTFILSPHLLPTYITHGITYMIPKDINDTINPAKYRPITCLQTLYKILTACVSEVIYEHLSKNNILAEQQKGCRKNSQGCKEQLTIDAIIMNSAVKSRKDIHTMFIDYQKAFDSVPHSWLSHVLNLYKINPKIKQFLETTMRNWKTVLKINSSSSTVATEPISIKRGIFQGDTLSPLWFCMALNPLSHLLDKTDAGFILSNNNTQYTLTHLMYMDDIKLYAADKKALFKLADTTQQFSDDICMSFGVDKCKILSIEKGKILNNNYILASGETIEPMDEQSTYKYLGFKQSRQIQQKISKQELLKKFSHRLSLVLKSSLNSRNTIKAINTFAIPILTYSFGIIRWPKTDIKKQQRTVNTLLTKHRKHHPKSCIQRVTLPRQEGGRGLIDIYNLHNKQILTLRAYFHGKSENSSLHKQVTETDKKLTPLNLQNRNTLTNEHIVSTEQKIAAWSQKALHGRHQAYLSQPHVDKIKSNEWLKRGELFPETEGFMVAIQDQIIATRNYRKYIIKDRNQPTDTCRHCNSASETIQHITGACKSLAQTDYKHRHDQVAAIIHQHLAHKYKLIGEMIPYYKYTPETILENRNQKIYWDRTIITDKTIHYNRPDITVHDKSNKIVYLIDIAIPNSHNIQTTISEKLSKYQDLAIEIKTQWKAQTVHIVPIVLSSTGVVPKALTQSLNTLHMPSHTLHMLQKATILNTCRITRKFLTSSTLSSTFLI

SEQ ID NO: 30870 - protein, 1365 aa, Xestia xanthographa
MNTRSKTKKQLQAKLPHIDDETSQPSSSSPSSLFPSIPSSSQSFRVTPTPSSSSISIQSADVVQETGFVDDTVPSAKAATSRRKWSIEMNKFILRTYLHLTSMETDKNAYLPPLHTKFIEKYPAMQVSRQRIGDQRRAIVQKKLLPQDTIDQIYEEVRAELQMIHTQIQQHSTQPSTQSGQRMRWTNEYNETIIRIYFTATQLETNKTAYRKKLHEEFINKYSELAHITEQRLSDQVRAIIKNKYIHDNRLEEIKNQVASELSNSNSYTQNIEDINHDHWNTQTQNDSEQPATNTNFFDTPNNTLTTNIILNNSTDTNIVSQTVVNIDDELFLNNIDVGQYGPAQTNFDTTPETNPEIESRFHQAQINFNCTHPTNRPYIPKQKTSRKFSAIVSYINTVILPKHVNADTEFAKLQIIIYCAAWTAATCNGAKISDPIQNERRPYTQKKPKWHIRLEKKIENLRANIGRLTHFINGCRSQKLIAAVEEIKIKYQLHAQYENPNTELAHFLDTLKQKLSAASSRLKRYITCTNRKVENTKFINNEKIFYRNLTSNNKDNTNQSLETPTSETLREFWANIWENPVHHNNHADWVKEATPEIPEMEFEFIPIETFIDVIKRTHNWKSPGTDNIHNYWYKKFSSIHPFLYNHLNTFIQSPHLLPQYITHGVTYMIPKDTNDTKNPAKYRPITCLQTLYKILTACVSEIVYEHLTKNNILAEQQKGCRKNSQGCKEQLTIDAITMSSAVKSKKDIHTMFIDYQKAFDSVPHSWLLHVLNLYKIHPTLKQFLGTSMQNWQTVLKINSSSSTVATEPICIRRGIFQGDALSPLWFCMALNPLSHLLDQTGTGFTLDSNNTQYTLTHLMYMDDIKLYAADKEALYQLADATQQFSEDICMSFGVDKCKILSIVKGKFQNNSYTLLSGASIEPMDEQSTYKYLGFKQSRQIQQKMSKQELLKKFTHRLNLILKSNLNSRNTIKAINTFAIPILTYSFGIIRWSKTDIKKLQRTIHTLLTKHRKHHPKSCIQRLTLPRQEGGRGLIDIHNLHNKQILSLRAYFHNKSETSLLHKQVTETDNKLTPLNLQNRNTQINDHIVSTQQKITEWSEKALHGRHRACLSQPHVDKIKSNEWLKRGELFPETEGFMLAIQDQIIATRNYRKYIIKDPNQPSDLCRHCNNASETIQHITGACKSLAQTDYKHRHDQVAAIIHQQLAFKYKLVSEMIPYYKYKPEVALENNEQKIYWDRTIITDKTIHYNRPDITVHDKTNKTVYLIDIAIPNSHNIQATISEKLSKYQDLAIEIKTQWKVQTVHIVPIVLSSTGIIPKSLTQSLNTLQMPNHTLYMLQKATILNTCRITRKFLTSSTLSSTFSI

SEQ ID NO: 30871 - protein, 1364 aa, Xestia xanthographa
MNTRSKTKKQLQAKLPHIDDETSQPSSSSPSSLFPSISSSSQSFRVTPTPSSSSISIQSADVVQETNFVDDTVPSAKAATSRRKWSIEMNKFILRTYLHLTSMETDKNAYLPPLHTKFIEKYPAMQVSRQRIGDQRRAIVQKKLLPQDTIDQIYEEVRAELQMIHTQIQQHSTQPSTQSGQRMRWTNEYNETIIRIYYTATQLETNKTAYRKKLHEEFINKYPELAHITEQRLSDQVRAIIKNKYIHDNRLEEIKNQVASELSNSNSYTQNIEDINHDHWNTQTQNDSEQPATNTNFSDTPNNTLTTNIILNNSTDTNIVSQTVVNIDDDFLNNIDVGQYGPAQTNFDTTPETNPEIESRFHQAQINFNCTHPTNRPYIPKQKTSRKFSAIVSYINTVILPKHVNADTEFAKLQTIIYCAAWTAATCNGAKISDPIQNERRPYTQRKPKWHIRLEKKIENLRANIGRLTHFINGCRSQKLIAAVEEIKIKYQLHAQYENPNTELAHFLDTLKQKLSAASSRLKRYITCTNRKVENTKFINNEKIFYRNLTSNNKDTNNQSLETPTPETLREFWANIWENPVHHNNHADWVKEATPEIPDMEFEFIPIETFIDVIKRTHNWKSPGTDNIHNYWYKKFSSIHPFLYNHLNTFIQSPHLLPQYITHGVTYMIPKDTNDTKNPAKYRPITCLQTLYKILTACVSEIIYEHLTKNNILAEQQKGCRKNSQGCKEQLTIDAITMNSAVKSRKDIHTMFIDYQKAFDSVPHSWLLHVLNLYKIHPTLKQFLGTSMQNWQTVLKINSSSSTVATEPICIKRGIFQGDALSPLWFCMALNPLSHLLDQTGTGFTLNSNHTQYTLTHLMYMDDIKLYAADKEALYQLADATQQFSDDICMSFGVDKCKILSIVKGKFQNNSYTLLSGASIEPMDEQSTYKYLGFKQSRQIQQKISKQELLKKFTHRLNLILKSNLNSRNTIKAINTFAIPILTYSFGIIRWSNTDIKKLQRTIHTLLTKHRKHHPKSCIQRLTLPRQEGGRGLIDIHNLHNKQILSLRAYFHNKSETSSLHKQVTETDNKLTPLNLQNTNTQINEHIVSTQQKIAAWSEKALHGRHRACLSQPHVDKIKSNEWLKRGELFPETEGFMLAIQDQIIATRNYRKYIIKDTNQPTDLCRHCNNASETIQHITGACKSLAQTDYKHRHDQVAAIIHQQLAFKFKLVSEMKPYYKYKPEVALENNDQKIYWDRTIITDKTIHYNRPDITVHDKTNKTVYLIDIAIPNSHNIQATISEKLSKYQDLAIEIKTQWKVQTVHIVPIVLSSTGIIPKSLTQSLNTLQMPNHTFYMLQKATILNTCRITRKFLTSSTLSSTFSI

SEQ ID NO: 30872 - protein, 1366 aa, Cosmia trapezina
MNTRSKTKKQLQANLPQLTDETSQFSSSSPSSLFPSIPSSSKSFRVTPTPSSSSISIQSADVVQETNFVDDTVPTARTATSRRKWSIEMNKFILRTYLHLTSIDTDKNAYLPSLHTKFLEKYPAMQVSRQRIGDQRRAIVQKKLLPQATIDQIYEEVRAELQMVHTQIQQHSTQPHTQMGQRMKWTNEYNETIIKIYYTATKLETDKTAYRNYLHEEFINIYPQLTHLTEQRLSDQVRAILNNNYINPNRLEEIKNQVATTLRESNTNTHNIDYINNDHLNTQTQTDLEQPDINTYFTDTPTNTLTTHILLNNSTDTDILYQTLVNTDEDNFLNNIDIGQLGPTQTNYNAAPEINTEIEDTFQQAQQNFTDTFPTNRPYIPKQKTSRKFSEIVTYINTIILPKHVDVDTEFLKLQTIIYCAAWTAATCNGAKILSDSTQNEPRTFIQHKPKWQIRLEKKIKNLRANIGRLTHFINGSRSQKLIASVEEIKKKYQLHAQHENSNTQMEHFLDTLKQKLSAASSRLKRYITCTNRKVQNRKFTNNEKIFYRNLASNNRDTTNQTLETPSSETLREFWGNIWENPVYHNNRADWVNETTREISEMEFEFIPIDTFTDVIKRTHNWKSPGTDHIHNYWYKKFSYTHPFLHNHLNTFIQSPNLLPTYITHGVTYMIPKDMNDTKNPAKYRPITCLQTLYKILTACVSEVVYENLTKNNILAEQQKGCRKNSQGCKEQLTIDAITMNSAVKNRKEIHTMFIDYQKAFDSVPHSWLLHVLNLYKIHPTVKQFLETSMQNWQTVLKIKSSSSTVATEPINIKRGIFQGDALSPLWFCMALNPLSHLLDKTDAGFTLANNDTQYTLTHLMYMDDIKLYAADNKALFQLADITQQFSDDICMSFGVDKCKILSILKGKIQTNSYTLASGESIEPMDEQSTYKYLGFKQSRQIHQKMSKQELIKKFSHRLNLILKSNLNSRNTIKAINTFAIPILTYSFGIIRWSKTDIKKLQCTINTLLTKHRKHHPKSCIQRLTLPRQEGGRGLIDIHNLHNKQILSLRAYFHNKSEHSSLHKLVTETDKKLSPLNLQNRDTQINEHIVSTQQKIATWSAKALHGRHRAFLSQPHVDKVKSNEWLKRGELFPETEGFMLAIQDQIIATRNYRKYIIKDPNQPTDTCRHCNSASETIQHITGACKSLAQSDYKHRHDQVAAIIHQHLAHKYKHIGEMIPYYKYKPEIILENRNQKIYWDRTIITDKTIHYNRPDITVHDKINKTVYLIDIAIPNSHNIQTTISEKLSKYQDLAIEIKTQWKAQTVHIVPIVLSSTGVIPKALTQSLNTLHMPSHTLYMLQKATILNTCRITRKFLTSSTLSSTFSI

SEQ ID NO: 30873 - protein, 1371 aa, Noctua fimbriata
MNTRSKTKKQLQAKLPQIDDETSQSSSSSPSSLFPSIPSSSQSFLVTPTPSSSSISIQSVDVVQETNFVDDTVPAARTVTSRRKWSIDMNKFILRTYLHLTHMETDKNAYLPSLHTKFLEKYPDMQVGRQRIGDQRRAIVQKKLLSQETIDQIYEEVRAELQIVHTQIQQHSTQSKAPINTQPGQRMKWTNEYNEAIIRIYYTTTQLETNKTAYRKHLHEGFINIYPELAHLTEQRLSDQVRAIINNKYIHTNRLDEIKNQVTIELRNSNTYTQNIQHINNDSQQPDENIHSLSTQYTNIHISGTTTNTATTNSVILLNNSSETNIASQTFINTDEENFLNHIDIGHHEPTQINSDASFEKNQEIETTFQQAQQLFSDTQPTNRPYIPKQRTSKKFSAIVTYINSAILTNCVNVDTDFIKLQNVIYCAAWTAATCNGAKILGTQNVSRTYIKRKPEWQIRLEKKIQNLRASIGRLTHFNNGSRSPKLIAAVKEIKKKYQLHAQYEDPNTQITHFLDTLKQKLNAASSRLKRYLTCTNRKMQNSKFSNNEKVFYRNLATNNSDTTTQSLDTPAPEILREFWAHIWENPVCHNHQANWVNEPAPEIPEMEYDFIPIGTFIDVIKRTHNWKSPGTDNIHNYWYKKFTSIHPFLHNHLNTFIQSPNLLPPYLTHGVTYMIPKDISDTLNPAKYRPITCLQTLYKILTACVSEVLYEHLTKNNILAEQQKGCRKNSQGCKEQLTIDAITMNSAIKSKTDIHTMFIDYRKAFDSVPHSWLLHVLNLYKIHPTLKHFLETSMQNWQTVLKINSSSSSVATEPIRIKRGIFQGDALSPLWFCMALNPLSHLLDKTVGGFTLATNDTHYTLTHLLYMDDIKLYSADKNTLFQLADTTQQFSNDICMSFGVDKCKILSVVKGKVQNNSYILGSGESIEPMDEQSTYKYLGFNQSRQIQHKMIKQELLKKFSHRLNLILKTNLNSKNTVKAINTFAIPILTYSFGIIRWSKTDIRTLQRTINTTLTKHRKHHPKSSIQRLTLPRQEGGRGLIDIHNLHNKQILSLRAYFHNKSENSSLHKHVTEQDTKLTPLNLHNRNTQTNEILISTQDKIAAWSVKALHGRHRAYMSQPHVDKAKSNEWLKRGELFPETEGFMLAIQDQIIATRNYRKYIIKDPHQPTDLCRHCNTASETIQHITGACKSLAQTDYKHRHDQVAAIIHQQLAFKYKLISEMKPYYKYKPEIILDNNNQKIYWDRTIITDKTIHFNRPDITFHDKVSKTVYLIDIAIPNSHNIQTTISEKLSKYQDLAIEIKTQWEAQTVHIIPIVLSSTGIVPKSLMQSLNTLHMPPHTLQLLQKATILNTCRITRKFLTSSTISSTFSI

SEQ ID NO: 30874 - protein, 1352 aa, Xestia c-nigrum
MNTRSKTKKQLQAKLPQIDDETSSTPSSLFPSISSSSQSFRVTPTPSFSSISIQSADVVQETNFVDDTVPAARTATSRRKWSIDMNKFILRTYLHLTHMETDKNAYLPSLHTKFLEKYPDMQVGRQRIGDQRRAIVQKKLLPQETIDQIYEEVRVELQTVYTQIQQHSTQSKTPTNTQPGQRMKWTNEYNEAVIRIYFTITQLETNKTAYRKHLHEEFINKYPELTHLTEQRLSDQVRAIINNKYIHTNRLTEIKKQVASELKNNNTNTQNTEHINNVLQQPDENMFSPSTQCININVSNTTTNTPATRNITLLNNSSDTNIVSQTLTADEHFLNHIDIGLFEPTPNNFDAAPEKNLEIETTFQQAQQLFSDTHPTSRPYIPKQKTSKKFSAIVTYINSVILPNNVNADTDFAKLQTTIYCAAWTAATCNGAKISDTQNESRTYIKRKPKWQIRMDKKIQSLRANIGRLTHFINGSRSPKLIAAVEKIKKNYQVHAQYQDSNTQLVHFLDTLKQKLNAASSRLKRYLKCTNRKVQNSKFINNEKIFYRNLATNNSETTNQSLETPTSETLREFWANIWENPVNHNHQADWINEVTPEIPEMEFEFIPIPTFIDVIKRTHNWKSPGTDNIHNYWYKRFSSIHPFLHNHLNAFIHSPHLLPSYITHGVTYMIPKDVNDTKNPAKYRPITCLQTIYKILTACLSEVVYEHLTNNNILSEQQKGCRKNSQGCKEQLTVDAITMNSAVKSKKDIHTMFIDYQKAFDSIPHSWLLKILSLYKIHPTLKHFLEISMQNWQTVLKINSSSSIVATEPIHIRRGIFQGDALSPLWFCMALNPLSHLLDKTDAGYTLTNITTHYTLTHLMYMDDIKLYAPDKNALFILADTTQQFSDDICMSFGVDKCKILSIVNGKVQNNSYTLGSGQLIEPMDEQSTYKYLGFKQSRQIHQKMTKQDLLSKFSHRLNLILKTNLNSKNTIKAINTFAIPILTYSFGIIRWSNTDIKKLQRTINTSLTKHRKHHPKSSIHRLTLPRQEGGRGLIDIHNLHNKQIHSLRSYFYNKSENSSLHKHVTENDRKLTPLNLHDRNTQINEAPITTQEKITAWSAKALHGRHRAYLSQPHVDKTKSNEWLKRGELFPETEGFMLAIQDQIIATRNYRKYIIKDPHQPTDLCRHCNTVSETIQHITGACKSLAQTDYKHRHDQVAAIIHQHLAFKYKFISEMKPYYKYKPEITLENRNQKIYWDRTIITDKTIHFNRPDITLHDKTNKTVYLIDIAIPNSHNIQTTISEKLSKYQDLAIEIKTQWEAQTVHIVPIVLSSTGIVPKSLMQSLNTLHIPTHFISSKKPQFLTPVASPGNF

SEQ ID NO: 30875 - protein, 1236 aa, Noctua janthe
MNTRSKTKKQLQAKLPQIDDETSQPSSSSPSSLFPSIPSSSQSFRVTPTPSSSSISIQSVDVVQETNFVDDTVPTARTATSRRKWSTDMNKFILRTYLHLTHMETDKNAYLPSLHTKFLEKYPDMQVGRQRIGDQRRAIVQKKLLPQETIDQIYEEVRAELQIVHTQIQQHSTQSKTPINTQAGQRMKWTNEYNEAIIRIYYTSTELETNKTAYRKHLHEEFIKIYPELAHLTEQRLSDQVRAIINNKYIHTNRLEEIKNQVATELRNINTNTQNIEHINNDLQPPDENIHSLTWTAATCNGAKISDTQNESRTYIKRKPKWQIRIEKKIQSLRSNIGRLTHFINGSRSPKLIAAVEEIKKKYQVHAQYEDSNTQLVHFLDTLKQKLNAASSRLKRYLKCTNRKVQNTKFINNEKIFYRNLATNNRDTSNQSLETPTSETLREFWANIWENPVNHNHQADWINEVTPEIPEMEFEFIPIGTFIDVIKRTHNWKSPGTDNIHNYWYKKFSSIHPFLHNHLNTFIHSPHLLPSYITHGVTYMIPKDINDTINPAKYRPITCLQTIYKILTACLSEVVYEHLTKNNILSEQQKGCRKNSQGCKEQLTIDAVTMNSAVKSKTDIHTMFIDYQKAFDSVPHSWLLNVLSLYKIHPTLKNFLQMSMQNWQTVLKINSSSSTVATEPIHIKRGIFQGDALSPLWFCMALNPLSHLLDKTATGFTLTNSNTQYTLTHLMYMDDIKLYAADKNALVVLADTTQQFSDDICMSFGVDKCKMLSVVKGKIQNNSYTLGSGQLIEPMDEQSTYKYLGFKQSRQIHQKMTKQELVNKYSHRLNLILKTNLNSKNTIKAINTFAIPILTYSFGIIRWSNTDIKKLQRTLNTSLTKYRKHHPKSSIHRLTLPRQEGGRGLIDIHNLHNKQIHSLRAYFHNKSESSALHKHVTENDTKLTPLNLHNRNTQINELVISTAEKIAAWSAKALHGRHRAYLSQPHVDKAKSNEWLKRGELFPETEGFMLAIQDQIIATRNYRKYIIKDPHQPTDLCRHCNTASETIQHITGACKSLAQTDYKHRHDQVASIIHQHLAFKYQLISEMKPYYKYKPELILDNNNQKIYWDRTIITDKTIHFNRPDITLHDKANKTVYLIDIAIPNSHNIQTTISEKLSKYQDLAIEIKTQWKAQTVHIVPIVLSSTGIVPKSLMQSLNTLHMPSHTLQLLQKATILNTCRITRKFLTSSTISSTFSI

SEQ ID NO: 30876 - protein, 1262 aa, Noctua janthe
METDKNAYLPSLHTKFLEKYPDMQVGRQRIGDQRRAIVQKKLLPQETIDQIYEEVRAELQIVHTQIQQHSTQSKTPINTQAGQRMKWTNEYNEAIIRIYYTSTELETNTTAYRKHLHEEFINIYPELAHLTEQRLSDQVRAIINNKYIHTNRLEEIKNQVATELRNINTNTQNIEHINNDLQPPDENIHSISTQYANIYTPTTSNSILLNNSSDTNIVSQTLINTGDESFLNHIDIGLFEPIQNNLNAAHEKNLEIEATFQQAQQLFSDTHPTSRPYIPKQKTSKKFCAIVTYINSVILPNNVNVDTDFIKMQTTIYCAAWTAATCNGAKISDTQNESRTYIKRKPKWQIRIEKKIQSLRSNIGRLTHFINGSRSPKLIAAVEEIKKKYQVHAQYEDSNTQLVHFLDTLKQKLNAASSRLKRYLKCTNRKVQNTKFINNEKIFYRNLATNNRDTSNQSLETPTSETLREFWANIWENPVNHNHQADWINEVTPEIPEMEFEFIPIGTFIDVIKRTHNWKSPGTDNIHNYWYKKFSSIHPFLHNHLNTFIHSPHLLPSYITHGVTYMIPKDINDTINPAKYRPITCLQTIYKILTACLSEVVYEHLTKNNILSEQQKGCRKNSQGCKEQLTIDAVTMNSAVKSKTDIHTMFIDYQKAFDSVPHSWLLNVLSLYKIHPTLKKFLQMSMQNWQTVLKINSSSSTVATEPIHIKRGIFQGDALSPLWFCMALNPLSHLLDKTATGFTLTNSNTQYTLTHLMYMDDIKLYAADKNALVVLADTTQQFSDDICMSFGVDKCKMLSVVKGKIQNNSYALGSGQLIEPMDEQSTYKYLGFKQSRQIHQKMTKQELVNKYSHRLNLILKTNLNSKNTIKAINTFAIPILTYSFGIIRWSNTDIKKLQRTLNTSLTKYRKYHPKSSIHRLTLPRQEGGRGLIDIHNLHNKQIHSLRAYFHNKSESSALHKHVTENDTKLTPLNLHNRNTQINELVISTAEKIAAWSAKALHGRHRAYLSQPHVDKAKSNEWLKRGELFPETEGFMLAIQDQIIATRNYRKYIIKDPHQPIDLCRQCNTASETIQHITGACKSLAQTDYKHRHDQVASIIHQHLAFKYQLISEMKPYYKYKPELILDNNNQKIYWDRTIITDKTIHFNRPDITLHDKANKTVYLIDIAIPNSHNIQTTISEKLSKYQNLAIEIKTQWKAQTVHIVPIVLSSTGIVPKSLMQSLNTLRMPSHTLQLLQKATILNTCRITRKFLTSSTISSTFSI

SEQ ID NO: 30877 - protein, 1269 aa, Noctua pronuba
METDKNAYLPSLHTKFLEKYPEMQAGRQRIGDQRRAIVQKKLLPQETIEQIYEEVRAELQIVHTQIQQHCIQSKTPINTQPGQRMKWTNEYNEAIIRIYYTTTQLETNKTAYRKHLHEEFINIYPELAHLTEQRLSDQVRAIINNKYIHTNRLEEIKNQVATKLRNNNTNTQNIQHINNDLQQPDQNIHSLSTQYTNVHISCTTTNTPTINNVILLNNSPETNIASQTFINTDEENFLNHVDIGQHEPTQSNFDASSEKNQEIEATFQQAQQLFSDTHPTNRPYIPKQRTSKKFSAIVTYINSVILTNCVNVETDFIKLQNVIYCAAWTAAICNGAKISGTQNESRTYIKRKPKWQIRLEKKIQYLRASIGRLTHFNNGSRSPKLIAAVIEIKKKYQLHAQYEDPNTQTTHFLDTLKQKLNAASSRLKRYLTCTNRKMQNSKFSNNEKVFYRNLATNNSDTTTQSLHTPTPEILREFWANIWENPVCHNHRAVWVNEPAPEIPEMEYEFIPIGTFIDVIKRTHNWKSPGTDNIHNYWYKKFTSIHPFLHNHLNTFIQSLNLLPPYLTHGVTYMIPKDISDTLNPAKYRPITCLQTLYKILTACVSEVLYEHLTKNNILAEQQKGCRKNSQGCKEQLTIDAITMNTAIKSKTDIHTMFIDYQKAFDSVPHSWLLHVLNLYKIHPILKHFLEISMQNWQTVLKINSSSSNVATEPIRIKRGIFQGDALSPLWFCMALNPLSHLLDKTDGGFKLATNDTDYTLTHLMYMDDIKLYSADKNALFQLADTTQQFSDDICMSFGVDKCKILSVVKGKVQNNSYVLGSGESIEPMDEQSTYKYLGFNQCRQIQHKMIKQELLKKFSHRLNLILKTNLNSKNTVKAINTFAIPILTYSFGIIRWSKTDIRKLQRTINTTLTKHRKHHPKSSIQRLTLPRQEGGRGLIDIHNLHNKQILSLRAYFHNKSKNSSLHKHVTEQDKKLTPLNLHNRNTQTNEQLINTQDKIAAWSVKALHGRHRAFMSQPHVDKAKSNEWLKRGELFPETEGFMLAIQDQIIATRNYRKYIIKDHHQPTDLCRHCNTASETIQHITGACKSLAQTDYKHRHDQVAAIIHQQLAFKYKLISEMKPYYKYKPEIILDNNNQKIYWDRTIITDKTIHFNRPDITLHDKVNKTVYLIDIAIPNSHNIQTTISEKLSKYQDLAIEIKTQWEAQTVHIVPIVLSSTGIIPKSLTQSLNTLHMPPHTLQLLQKATILNTCRITRKFLTSSTISSSFSI

SEQ ID NO: 30878 - protein, 765 aa, Phlogophora meticulosa
MEFEFIPVETFIDVIKRAHNWKSPGTDNIHNYWYKKFSSIHPFLHNHLNTFIQSPHLLPTYITHGITYMIPKDINDTINPAKYRPITCLQTLYKILTACVSEVIYEHLSKNNILAEQQKGCRKNSQGCKEQLTIDAIIMNSAVKSRKDIHTMFIDYQKAFDSVPHSWLSHVLNLYKINPKIKQFLETTMQNWKTVLKINSFSSTVATEPISIKRGIFQGDALSPLWFCMALNPLSHLLDKTDAGFILSNNNTQYTLTHLMYMDDIKLYAADKKALFKLADTTQQFSDDICMSFGVDKCKILSIEKGKILNNNYILASGETIEPMDEQSTYKYLGFKQSRQIQQKISKQELLKKFSHRLSLVLKSSLNSRNTIKAINTFAIPILTYSFGIIRWPKTDIKKLQRTVNTLLTKHRKHHPKSCIQRLTLPRQEGGRGLIDIYNLHNKQILTLRAYFHGKSENSSLHKQVTETDKKLTPLNLQNRNTLTNEHIVSTEQKIAAWSQKALHGRHQAYLSQPHVDKIKSNEWLKRGELFPETEGFMVAIQDQIIATRNYRKYIIKDRNQPTDTCRHCNSASETIQHITGACKSLAQTDYKHRHDQVAAIIHQHLAHKYKLIGEMIPYYKYTPETILENRNQKIYWDRTIITDKTIHYNRPDITVHDKSNKIVYLIDIAIPNSHNIQTTISEKLSKYQDLAIEIKTQWKAQTVHIVPIVLSSTGVVPKALTQSLNTLHMPSHTLHMLQKATILNTCRITRKFLTSSTLSSTFLI

SEQ ID NO: 30879 - protein, 861 aa, Craniophora ligustri
MVHFLDTLKQKLNAASSRLKRYITCTNRKAQNAKFVNNEKNFYRNLTSTNTDNSNQNLQTPPADTLRNFWADIWENPVLHNHHADYINETATDITHMEFEFIPIETFIDVIKRTHNWKSPGSDNIHNYWYKKFTNLHPYIHNHLNTFIQSPQLLPTYITHGVTYMIPKDKNDTPNPAKYRPITCLQTIYKILTACINEEVYKHLINNDILAEQQKGCRKNSQGCKEQLTIDAIIMNNAVKNKKDICTMFIDYQKAFDSVPHSWLLHVLNLYKIHPTLISFLKTSMLNWQTVLKINQASTTLTTEPISIQRGIFQGDALSPLWFCLALNPLSYLLNKTSTGFTLTNNNTYYTLSHLMYMDDIKLYASDTISLNKLADITQQFSQDIRMQFGVDKCKMFSVTKGKIEYNRYTLESGESIEPMDEQSTYKYLGFKQSRQIHQKTTKQELLKKFSHRLNLALKTQLNSKCIIKAINTFAIPILTYSFGIIQWSKTDIKQLQRTINTHLTKHRKHHPKSCLQRLTLPRQEGGRGLIDVHNLHNKQIISLRAYFHDKAAHSPLHKHIIETDKKLTPLNLQDKNTQINEHLISTQQKHTLWSDKALHGRHRAYLSLPHVDKDKSNEWLRRGELFPETEGFMLAIQDQIIVTRNYRKYIIKDPNQPTDLCRHCNSASETIQHITGACKSLAQTDYKHRNDQVASIIHQHLAYKHKLILDMNPYYKYKPETVLENRHLKIYWDRTIITDKTIHYNRPDITVHDKTNKTVYLIDIAIPNSHNIQSTISEKLNKYQDLAIEIKTQWRAETVHIVPIVLSSTGIVPKSLTESLNILDMPTYTLHMLQKATILNTCRITRKFLSSSTLSSTFSI

SEQ ID NO: 30880 - protein, 1422 aa, Noctua fimbriata
MPRAAWLGERLVASVPTLDNRGPPVLFSLAAVNAGLCCGRLFKSLATRGISMNTRSKTKKQLQAKLPQIDDETSQSSSSSPSSLFPSIPSSSQSFLVTPTPSSSSISIQSVDVVQETNFVDDTVPAARTVTSRRKWSIDMNKFILRTYLHLTHMETDKNAYLPSLHTKFLEKYLDMQVGRQRIGDQRRAIVQKKLLSQETIDQIYEEVRAELQIVHTQIQQHSTQSKAPINTQPGQRMKWTNEYNEAIIRIYYTTTQLETNKTAYRKHLHEGFINIYPELAHLTEQRLSDQVRAIINNKYIHTNRLDEIKNQVAIELRNSNTYTQNIQHINNDSQQPDENIHSLSTQYTNIHISGTTTNTATTNSVILLNNSSETNIASQTFINTDEENFLNHIEIGHHEPTQINSDASFEKNQEIETTFQQAQQLFSDTQPTNRPYIPKQRTSKKFSAIVTYINSVILTNCVKVDTDFIKLQNVIYCAAWTAATCNGAKILGTQNVSRTYIKRKPKWQIRLEKKIQNLRASIGRLTHFNNGSRSPKLIAAVKEIKKKYQLHAQYEDPNTQTTHFLDTLKQKLNAASSRLKRYLTCTNRKKQNSKFSNNEKVFYRNLATNNSDTTTQSLDTPAPEILREFWAHIWENPVCHNHQANWVNEPAPEIPEMEYDFIPIGTFIDVIKRTHNWKSPGTDNIHNYWYKKFTSIHPFLHNHLNTFIQSPNLLPPYLTRGVTYMIPKDISDTLNPAKYRPITCLQTLYKILTACVSEVLYEHLTKNNILAEQQKGCRKNSQGCKEQLTIDAITMNSAIKSKTDIHTMLIDYRKAFDSVPHSWLLHVLNLYKIHPTLKHFLETSMQNWQTVLKINSSSSSVATEPIRIKRGIFQGDALSPLWFCMALNPLSHLLDKTVGGFTLATNDTHYTLTHLLYMDDIKLYSADKNTLFQLADTTQQFSNDICMSFGVDKCKILSVVKGKVQNNSYILGSGESIEPMDEQSTYKYLGFNQSRQIQHKMIKQELLKKFSHRLNLILKTNLNSKNTVKAINTFAIPILTYSFGIIRWSKTDIRKLQRTINTTLTKHRKHHPKSSIQRLTLPRQEGGRGLIDIHNLHNKQILSLRAYFHNKSENSSLHKHVTEQDTKLTPLNLHNRNTQTNEILISTQDKIAAWSVKALHGRHRAYMSQPHVDKAKSNEWLKRGELFPETEGFMLAIQDQIIATRNYRKYIIKDPHQPTDLCRHCNTASETIQHITGACKSLAQTDYKHRHDQVVAIIHQQLAFKYKLISEMKPYYKYKPEIILDNNNQKIYWDRTIITDKTIHFNRPDITFHDKVSKTVYLIDIAIPNSHNIQTTISEKLSKYQDLAIEIKTQWEAQTVHIIPIVLSSTGIVPKSLMQSLNTLHMPPHTLQLLQKATILNTCRITRKFLTSSTISSTFSI

SEQ ID NO: 30881 - protein, 1422 aa, Noctua fimbriata
MPRAAWLGERLVASVPTLDNRGPPVLFSLAAVNAGLCCGRLFKSLATRGISMNTRSKTKKQLQAKLPQIDDETSQSSSSSPSSLFPSIPSSSQSFLVTPTPSSSSISIQSVDVVQETNFVDDTVPAARTVTSRRKWSIDMNKFILRTYLHLTHMETDKNAYLPSLHTKFLEKYPDMQVGRQRIGDQRRAIVQKKLLSQETIDQIYEEVRAELQIVHTQIQQHSTQSKAPINTQPGQRMKWTNEYNEAIIRIYYTTTQLETNKTAYRKHLHEGFINIYPELAHLTEQRLSDQVRAIINNKYIHTNRLDEIKNQVAIELRNSNTYTQNIQHINNDSQQPDENIHSLSTQYTNIHISGTTTNTATTNSVILLNNSTETNIASQTFINTDEENFLNHIDIGHHEPTQINSDASFEKNQEIETTFQQAQQLFSDTQPTNRPYIPKQRTSKKFSAIVTYINSVILTNCVNVDTDFIKLQNVIYCAAWTAATCNGAKILGTQNVSRTYIKRKPKWQIRLEKKIQNLRASIGRLTHFNNGSRSPKLIAAVKEIKKKYQLHAQYEDPNTQTTHFLDTLKQKLNAASSRLKRYLTCTNRKMQNSKFSNNEKVFYRNLATNNSDTTTQSLDTPAPEILREFWAHIWENPVCHNHQANWVNEPAPEIPEMEYDFIPIGTFIDVIKRTHNWKSPGTDNIHNYWYKKFTSIHPFLHNHLNTFIQSPNLLPPYLTHGVTYMIPKDISDTLNPAKYRPITCLQTLYKILTACVSEVLYEHLTKNNILAEQQKGCRKNSQGCKEQLTIDAITMNSAIKSKTDFHTMFIDYRKAFDSVPHSWLLHVLNLYKIHPTLKHFLETSMKNWQTVLKINSSSSSVATEPIRIKRGIFQGDALSPLWFCMALNPLSHLLDKTVGGFTLATNDTHYTLTHLLYMDDIKLYSADKNTLFQLADTTQQFSNDICMSFGVDKCKILSVVKGKVQNNSYILGSGESIEPMDEQSTYKYLGFNQSRQIQHKMIKQELLKKFSHRLNLILKTNLNSKNTVKAINTFAIPILTYSFGIIRWSKTDIRKLQRTINTTLTKHRKHHPKSSIQRLTLPRQEGGRGLIDIHNLHNKQILSLRAYFHNKSENSSLHKHVTEQDTKLTPLNLHNRNTQTNEILISTQDKIAAWSVKALHGRHRAYMSQPHVDKAKSNEWLKRGELFPETEGFMLAIQDQIIATRNYRKYIIKDPHQPTDLCRHCNTASETIQHITGACKSLAQTDYKHRHDQVAAIIHQQLAFKYKLISEMKPYYKYKPEIILDNNNQKIYWDRTIITDKTIHFNRPDITFHDKVSKTVYLIDIAIPNSHNIQTTISEKLSKYQDLAIEIKTQWEAQTVHIIPIVLSSTGIVPKSLMQSLNTLHMPPHTLQLLQKATILNTCRITRKFLTSSTISSTFSI

SEQ ID NO: 30882 - protein, 1364 aa, Noctua fimbriata
MNTRSKTKKQLQAKLPQIDDESSQPSSSSPSSLFPSIPSSSQSFRVTPTPSSSSISIQSVDVVQETNFVDDTVPAARTATSRRKWSTDMNKFILRTYLHLTHMETDKNAYLPSLHTKFLEKYPDMQVGRQRIGDQRRAIIQKKLLPQETIDQIYEEVRTELQVVHTQIQQNSTQSKTPINTQPGQRMKWTNEYNEAIIRIYYTSTELETNKTAYRKHLHEGFINIYPELAHLTEQRLSDQVRAIINNKYIHTNRLEEIKKQVATELRNINTNTQNIEHINNDLQQPDENIHSLSTQYTNIYTPTTSNRILLNNSSDTNIVSQTLTNTVDESFLNHIDIGLFEPTQNNLDAAPEKNLEIEATFQQAQQLFSDTHPTSRPYIPKQKTSKKFSAIVTYINSVILPNNVNVDTEFIKMQTTIYCAAWTAATCNGAKISDTQNESRTYIKRKPKWQIRIDKKIQSLRSNIGRLTHFINGSRSPKLIAAVEEIKKKYQVHAQYEDSNTQLVHFLDTLKQKLNAASSRLKRYLKCTNRKVQNTKFINNEKIFYRNLTTNNRDTTNQSLETPRSETLREFWANIWENPVNHNHQADWINEITPEIPEMEFEFIPIGTFIDVIKRTHNWKSPGTDNIHNYWYKKFSCIHPFLHNHLNTFIHSPHLLPSYITHGVTYMIPKDINDTINPSKYRPITCLQTIYKILTACLSEVVYEHLTKNNILSEQQKGCRKNSQGCKEQLTIDAVTMNSAIKSKTDIHTMFIDYQKAFDSVPHSWLLNVLSLYKIHPTLKNFLEISMQNWQTVLKINSSSSTVATEPIHIKRGIFQGDALSPLWFCMALNPLSHLLDKTDAGYKLTNINTQYTLTHLMYMDDIKLYAADKNALVVLADTTQQFSDDICMSFGVDKCKMLSVVKGKIQNNSYTLGSGQLIEPMDEQSTYKYLGFKQSRQIHQKMTKQELVNKYSHRLNLILKTNLNSKNTIKAINTFAIPILTYSFGIIRWSNTDIKKLQRTLNTSLTKHRKHHPKSSIHRLTLPRQEGGRGLIDIHNLHNKQIHSLRAYFHNKAESSALHKHVTENDTKLTPLNLHNRNTQINELLISTPEKIAAWSAKALHGRHQAYLSQPHVDKAKSNEWLKRGELFPETEGFMLAIQDQIIATRNYRKYIIKDPHQPTDLCRHCNTVSETIQHITGACKSLAQTDYKHRHDQVAAIIHQHLAFKYKLISEMKPYYKYKPELILDNNNQKIYWDRTIITDKTIHFNRPDITLHDKVNKTVYLIDIAIPNSHNIQTTISEKLSKYQDLAIEIKTQWKAQTVHIVPIVLSSTGIVPKSLMQSLNTLHMPPHTLQLLQKATILNTCRITRKFLTSSTISSTFSI

SEQ ID NO: 30883 - protein, 1320 aa, Spodoptera exigua
MITRSKLKKLSQPDDESSQSSSSSSRSLFPSVSSSSQSFCVSPTPSSSSTVQSVDVVQLTNSVDEAVPTTSTAKTRRKWTTDMNEFILRNYLLLTNLETDKNAYLPSLHIKFLEKYPSMEVSRQRIGDQRRAIVQRKLLPQSKIDQIYNQVRAQLQITPIRQQHLTTTQVTNIQPGQRMKWTNEYNETIMKIYYKITFLETNKTAYRKSLHEQFINIHPELSHITEQRLSDQVRAITNNKYITVKRLAEIKKQVSEQLIHETNTNHHLNRHSNIPEYLDGSNQAHSLISDTLTHTNDISHDVNINTDNTITPNSLNVDDNFLNDIQLEQFDTIHANQNETEINQELEDLFQQAYEYFIDTDPTKRPYIPKQRTSRKFSIIVNYINNIIFPKYANTDTDFNNLQTIIYSAAWTAAKYNGAKISYTVQTERQTTTRKPKWQIRLEQKIRSLRANIGKLSQYIRGIRSQRLVAAVEVIKAKYQLHAQYENPNTHMTHYLDTMKQKLNAASSRLRRYLTCTNRKLENSRFTNNEKFFYRNLTSNSTLTQNIQTPSAETLREFWAGIWENPVYHNNTAAWIHEANLDHEGMEFETIPIDTFINVIKHTHNWKSPGTDHIHNYWYKKFTSLHPYLHNHLNTFIQTPHLLPTYITQGITYMIPKDMNDTTNPAKYRPITCLQTFYKIITACISELINNHLTKYETLAEQQKGCRKYSQGCKEQLTIDAVIMNHAVKSKTDIHTMFIDYQKAFDSVPHSWLLQVLNLYKIHPTIKLFLQSTMQNWQTVLSINQTTAKIVTQPIYIKRGIFQGDALSPLWFSMALNPLSHLLNRTNAGYTLTNNGTQYILTHLMYMDDIKLYAADQMLLSHLADVTQQFSTDICMQFGVDKCKVMSVVIGKVENNSYTLQTGQTIEPMEEHDTYKYLGFRQSRQIQHKNTRQELIRKFTHRLNLILKTNLNARNTIKAINTFAIPILTYSFGIIQWSKTNTRKLQQTINATLTKHRKHHPKSCIQRLTLTRKEGGRGLIDIQNLHNKQISSLRTYFHSKSEHSLLHTHIVETDKNFTPLNLQSRDTQTNEIIVNDEDKIALWSEKALHGRHRSFLSQPHVDKIKSNEWLKRGELFPETEGFMLAIQDQVIATRNYRKYIMKDPNQQNDLCRHCNLASETIQHVTGACKSLAQTDYKHRHDQVSAIIHQHLAYRYSLVDQITAYYKYKPETILENRNCKIYWDRTIVTDKTIHFNRPDITVHDKVNKIVYLIDIAIPNSHNIQSTISEKLSKYQDLAIEIKTQWRVQTVHIVPIVLSTTGIIPKSLTQSLNTVTENSLTS

SEQ ID NO: 30884 - protein, 1377 aa, Helicoverpa armigera
MRLRNRVLPQAGTRANRDGESRPMASSLGCPSYSGGGTVSQPTAQSQTAAVSHDDESSCSSLFSSIPSSSQSFCISPSPSLSSASIQSVDVVQETNFVNEPVPNTSTAPIRRKWTKEMNEFILRTYLHLTIMETDTKTYLQPLHTQFLSQFPHMQVSRQRVGDQRRAIVNKKLLPQVTIDRIYEEARVQLQVLPTQTESHSTQNTTPYTNTGQRMKWGNDLNESIMRIYYTITELETNKTSYRKHLHEEFINQYPQLSHITEQRLSDQQRAIINNKYIKGSRLEEIKRQVSEQLQHSNTRVDDERYHTLNTDYTNTQNTSPEDNLSTNRITDGPHHITFDIGQDDLINNIDTEAFIPSQNNIPASELNPEIEDMFTQAKLYFLNTHPTNRPYIPKQKTSKKFSAIVNYIDTVILPKNVNTDTNFNSLQSIIYCAAWTAAKCNGAKISDQILHQNRRNIQRKPKWQIRLQKKIDKLRANIGRLTQYSRGNRSRKVIAAVETIKSTYQVHAQHEDSNTQIEHFLDTLKQKLNAAASRFRRYITCTERKSQNTKFTNNEKVFYRNLTSNSNTIQQTLETPTPETLREFWANIWENPVEHNNSAEWLNQVSSEISEMTYEFIPVDTFIDVLKRTHSWKSPGTDNIHNYWYKKLTSIHPLIHNYLNTFIKSPDSLPTYITHGVTYMIPKDLNDTINPAKYRPITCLQTLYKILTACISEVIYTHLTTQNILAEQQKGCRKNSQGCKEQLTIDAITTNSAVKGKKEIHSMFIDYQKAYDSVPHSWLLHVLNIYKIHPILKQFLQTSMQNWQTTLKINQGSTTVSTEPIFIKRGIFQGDALSPLWFCMALNPLSYLLDKTQIGYTLTDGNTSYTLSHLMYMDDIKLFAADTNDLFKLADTTQQFSNDICMQFGVDKCKTLSIVKGKIQNNSYTLESGELIQPVDQHSTYKYLGFKQSRQIQQKMTKQELHKKFTYRVNLILKTNLNSKNTIKAINTFAIPILTYSFGIIQWSNTDIQKLQRTINTLFTKHRKHHPKSCTQRLTLPRQEGGRGLIDIHNLHNKQISTLRTYFHNKTEHSPLHKHITNTDKQLTPLNLHDRNTQTNETITNTQQKIAAWSTKALHGRHRAFLCQPHVDKLKSNEWLRRGDLFPETEGFMLAIQDQIIATRNYRKYIIKDQTQPTDLCRHCNTVSETIQHITGACKSLAQTDYKHRHDQVAAIIHQHLAYRHKLIDKIVPYYKYKPETILEGRNHKIYWDRTIITDKTIHFNRPDITVHDKTTKTVYLIDIAIPNSHNIQTTISEKLSKYQDLAIEIKTQWKAQTVHIVPIVLSSTGIIPKSLIQSLNTLHMPAHTLHMLQKATILNTCRITRKFLTSSTLSSTFSI

SEQ ID NO: 30885 - protein, 1415 aa, Noctua pronuba
MPRAAWLGERLVASVPTLDNRGPPVLFTLATVNAGLCCGRLFKSLATRGINMNTRSKTKKQIQAKLPQIDDETSQPSSSSPSSLFASIPSSSQSFRVTPTPSSSSISIQSVDVVQETNFVDDTVPAVRTATSRRKWSIDMNKFILRTFLHLTHMETDKNAYLPSLHTKFLEKYPDMLVGRQRIGDQRRAIVQKKLLPQETIDQIYEEVRAELQIVHTQIQQHSTQPKTPINTQPGQRMKWTNEYNEAIIRIYYTTTQLETNKTAYRKHLHEGFINIYPELAHLTEQRLSDQLRAIINNKYIHTNRLGEIKNQVATELRNNNTNTQNIEHINNDLQQPDENIHSLSTEYTNIYTPTTSNNILLNNSSETNIVSQTLINAVEENFLNHIDIGLFEPAQNNFDADPEKNLEIEATFQQAQQLFSNTHPTSRPYIPKQKTSKKFSAIVTYINSVILPNNVNVDTDFIKLQTTIYCAAWTAATCNGAKIYDTQNESRTYIKRKPKWQIRIDKKIQSLRANIGRLTHFINGSRSPKLIAAVEEIKKKYQVHAQYEDSNTQLVHFLDTLKQKLNAASSRLKRYLKCTNRKVQNTKFINNEKIFYRNLATNNRDTTNQSLETPTSETLREFWANIWENPVNHNHQADWINEVTPEIPEMEFEFIPIATFIEVIKRTHNWKSPGTDNIHNYWYKKFSSIHPFLHNHLNTFIHSPHLLPSYITHGVTYMIPKDINDTINPAKYRPITCLQTIYKILTACLSEVVYEHLTKNNILSEQQKGCRKNSQGCKEQLTIDAVTMNRAVKSKTDIHTMFIDYQKAFDSVPHSWLLNVLSLYKIHPTLKNFLEISMQNWQTVLKINSSSATVATEPIHIKRGIFQGDALSPLWFCMALNPLSQLLDKTDAGYTLTNINTQYTLTHLMYMDDIKLYAADKNALFVLADTTQQFSDDICMSFGVDKCKMLSVVKGKVQNNSYTLGSGQVIEPMDEHSTYKYLGFKQSRQIHQKMTKQELVNKYSHRLNLILKTNLNSKNTIKAINTFAIPILTYSFGIIRWSNTDIKKLQRTLNTSLTKHRKHHPKSSIQRLTLPRQEGGRGLIDIHNLHNKQIHSLRAYFHNKSENSSLHKHVTENDTKLTPLNLHNRNTQINELLISTPEKIAAWSAKALHGRHRAYLSQPHVDKAKSNEWLKRGELFPETEGFMMAIQDQIIATRNFRKYIIKDPHQPTDLCRHCNTASETIQHITGACKSLAQTDYKHRHDQVAAIIHQHLAFKYKLISEMKPYYKYKPELILDNYNHKIYWDRTIITDKTIHFNRPDITLHDKVNKTVYLIDIAIPNSHNIQTTISEKLSKYQDLAIEIKTQWEAQTVHIVPIVLSSTGIVPKSLTQSLNTLHMPPHTLQLLQKATILNTCRITRKFLTCSTISSSFSI

SEQ ID NO: 30886 - protein, 1344 aa, Ochropleura plecta
MDDETSHFSSSSSSSLFPSIPSSSQSFRVTPTPSSPSISIQSVDVVQETNIVEDTVPTARTARSRRKWSIDMNKFILRTYLHLTHIETDKNAYLPSLHTKFLEKYPDMQVGRQRIGDQRRAIVQKKLLPQETIDQIYEEVRAELQIVHTQIQHSTQSMTQNNTQPGQRMKWTNEYNEAIIRIYYTTTQLETNKTAYRKHLHEGFINIYPELAHVTEQRLSDQVRAIINNKYIHNDRLEEIKNQVALELRNNNINIEDINNDLQQSDENVLSLNTQYTNIHITDTTNNIIVLNNNSDTNTVSQTPIHTVDENFLNQIDIGLFEPTQNNLYGAPEKNLEIEATFQQAQQLFSDTHPTSRPFIPKQKTSKKFSAIVTYINSIILPNIVNIDTDFTQLQTIIYCAAWTAATCNGAKISDTQNESRTYIKRKPKWQIRMDKKIQSLRANIGRLTHFINGSRSPKLIAAVEEIKKKYQVHAQYEDPNTQLVHFLDTLKQKLNASSSRLKRYLTCTNRKVQNSKFINNEKTFYRNLTTNNRDTNNQNLETPTPESLREFWANIWENPVNHNQQADWINEVTTDTPEMEFEFIPIETFIDVIKRTHNWKSPGTDNIHNYWYKKFSSIHPFLHNHLNTFIQSPHLLPSYITHGVTYMIPKDSNDTINPAKYRPITCLQTIYKILTACLSEVVYEHLTKNNILSEQQKGCRKNSQGCKEQLTIDAVTMSSAVKSKTDIHTMFIDYQKAFDSVPHSWLLNVLSLYKIHPTLKHFLETTMQSWQTVLKINSLSSTVATEPIHIKRGIFQGDALSPLWFCMALNPLSHLLDKTGAGYALTNINTHYTLTHLMYMDDIKLYAADKNALFELADTTQQFSDDICMSFGVDKCKILSVVKGKVQNNSYTLGSGQIIEPIDELSSYKYLGFKQSRQIHQKMIKQELVNKFSHRLNLVLKTSLNSKNTIKAINTFAIPILTYSFGIIRWSNTDIKKLQRTVNTTLTKHRKHHPKSSIHRITLPRQEGGRGLIDIHNLHNKQILSLRSYFHNKSENSTLHKHVTENDIKLTPLNLHNRNTQINEQIINTHEKIAAWSAKALHGRHRAFLSQPYVDKAKSNEWLKRGELFPETEGFMLAIQDQIIATRNYRKYIIKDPHQPTDLCRHCNTASETIQHITGACKSLAQPDYKHRHDQVAAIIHQQLAFQHKLVSEMQPYYKYKPEIILENNNHKIYWDRTIVTDKTIHFNRPDITLHDKANKIVYLIDIAIPNSHNIQTTMSEKLNKYQDLAIEIKTQWKAQTVHIVPIVLSSTGIVPKSLMQSLNTLHMPSHTLHLLQKATILNTCRITRKFLTSSTISSTFSI

SEQ ID NO: 30887 - protein, 1362 aa, Ochropleura plecta
MNTRSKTKKQLQANLPQIDDETSQPSSSSPSSLFPSIPSSSQSFRVTPTPSCSSISIQSADVVQETNSVDDTVPTAKAATRRRKWTIEMNKFILRTYLHLTTMETDKNAYLPSLHTKFLEKYPAMQVSRQRIGDQRRAIIQKKLLPQDTIDQIYEEVRSELQIIHTQIQQHSTQPCTQPGQRMRWTNECNETIITIYYTITQLETNKTAYRKKLHEEFIIKYPELAHITEQRLSDQVRAIINNKYIHENRLIEIKNQVTSELSNRNTNTQNIEDLNNYHRNSQTQDDSEQILATNTSFSDTPINSHMSNIILNNSIDSDIASRTVVNIDDENFLDNIHAVQFVPTQTNFDPVPEIESTFHQAQQNFNDTHPINRPYIPKQKTSRKFSAIVTYINTVILPKHLNVDTEFTKLQTIIYCAAWTAATCNGAKISDPAQNERRPNTQRKPKWQIRLEKKIENLRANIGRLTHFNNGCRSPKLIAAVEDIKIKYQLHAQYENSNTQIAHFMDTLKQKLSATSSRLKRYITCTNRKVQNTKFINNEKIFYRNLTSNNRDTTNQSLETPTSETLRQFWANIWENPVQHNNSADWVNEATPEIPEMEFEFIPIETFIDVIKRTHNWKSPGSDNIHNYWYKKFSSLHPFLHNHLNTFIQSPHLLPQYITHGVTYMIPKDTNDTTNPAKYRPITCLQTIYKILTACVSEIVYEHLTKNNILAEQQKGCRKNSQGCKEQLTIDSITLNSAVKSRKDIHTMFIDYQKAFDSVPHSWLLHVLSLYKIHPTLKQFLETSMQNWQTVLKINSPSTTVTTEPIRIKRGIFQGDALSPLWFCMALNPLSLLLDKTGGGFTMENNNTQYTLTHLMYMDDIKLYADDEVALYQLADATQQFSDDICMSFGVDKCKILSIVKGKIQNNSYTLLSGESIEPMDEQSTYKYLGFKQSRQIQQKMSKQELLKKFSHRLNLILKSNLNSRNTVKAINTFAIPILTYSFGIIRWSKTDIKTLQRTIHTHLTKHRKHHPKSCIQRLTLPRQEGGRGLIDINNLHNKQILSLRAYFHNKSENSPLHKQVTEADKKLTPLNLQNRNTQINEHIVSTQQKITAWSEKALHGRHRACLSQPHVDKIKSNEWLKRGELFPETEGFMLAIQDQIISTRNYRKYIIKDTNQPTDLCRHCNTASETIQHITGACKSLAQTDYKHRHDQVAAIIHQQLAFKYKLVNEMIPYYKYKPEVTLENNHQKLYWDRTIITDKTIHYNRPDITVHDKTNKTVYLIDIAIPNSHNIQTTISEKLSKYQDLAIEIKTQWKAQTVHIVPIVLSSTGIIPKSLTQSLNTLQMPTHTLYMLQKATILNTCRITRKFLTSSTISSTFSI

SEQ ID NO: 30888 - protein, 1362 aa, Mythimna impura
MNTRSKTKKLLASMPQIDDETIQPFSLSPSSLFPSITSSSQSFRVISTPSSSSIQSADVVQETNSVEDTVPTARTATSRRKWSIEMNEFILRTYLYLTNMDTDKNAYLPSLHTKFLEKYPDMQVSRQRIGDQRRAIIQKKLLPQNTIDQIYEEVRAELQMFYTQIQQHSTQSNTQFSQRMRWTNEHNEAIIRIYYTVTQLETNKTVYRKHLREEFINIYPELTHVTEQRLSDQVRAIINNVYIDTKRLEEIRNQVAIELENINNSTQNTEQTSGDHLNTQLQTESDLSDINENSPNTLITNTLTTNVALNNSSGGDIVLESLVNIEEDNNFLNNINISQSEPINFNSILDSSTEIEATFQQAQLNFIDTHPTNRPYIPKQKTSRKFSAIVNYINTVILPKHVNGDTEFIKLQTIIYCAAWTAAKCNGAKISDLTQSERRTYKYRKPKWQIRLEKKIENLRVNIGRLTHFINGSRSQKLVAAVEQIKLKYQLHAQHENSNTQIEHFLDTLKQKLSAASSRLKRYITCTNRKVQNAKFKNNEKIFYRNLTSNNRDITNESLDTPSPESLREFWANIWENPVYHNEHVDWVSHAATEIPDMEFEFIPIETFIEVIKRTHNWKSPGTDNIHNYWYKKFSSIHPFLYNHLNTFIQSPHLLPIYITHGVTYMIPKDINDTTNPAKYRPITCLQTLYKILTACVSEVVYEHLIKNNILAEQQKGCRKNSQGCKEQLTIDAIAMNSAVKCRKDIHTMFIDYQKAFDSVPHSWLLHVLNLYKIHPTLKQFLETSMQNWQTVLKIHSSSTTVATEPISIKRGIFQGDALSPLWFCMALNPLSHLLDKTDVGFTLVNHNTQYKLTHLMYMDDIKLYAADKGALFQLADTTQLFSDDICMSFGVDKCKILSVVKGKIQNNSYTLGSGESIDPMDEQSTYKYLGFKQSRQIQQKLSKQELLKKFSHRLNLILKSNLNSRNTIKAINTFAIPILTYSFGIIKWSKTDIKKLQRTVHILLTKHRKHHPKSCIQRLTLPRQEGGRGLIDIQNLHNKQIHSLRVYFHYKSENSLLHKQISDIDKKLTPLNLQNRNMQINEHITSTQQKIAAWSEKALHGRHRASLSQPHVDKLMSNEWLKRGELFPETEGFMLAIQDQIVATRNYRKYIMKDQNQPTDFCRHCNSASETIQHITGACKSLVQTDYKHRHDQVAAIIHQHLAYKYKLVTEMMPYYKYTPEIILESKDIKIYWDRTIITDKTIHYNRPDITVHDKTNKTVYLIDIAIPNSHNVQTTISEKLSKYQDLAIEIKTQWKAQTVHIVPIVLSSTGIIPKSLAQSLNTLQMPAQTLYMLQKATILNTCRITRKFLTSSTLTSTFSI

SEQ ID NO: 30889 - protein, 1364 aa, Xestia xanthographa
MHTRSKTKKQLQAKLPHIDDETLQPSSSSPSSLFPSISSSSQSFRVTPTPSSSSISIQSADVVQETNFVDHTVPSAKAATSRRKWSIEMNKFILRTYLHLTSMETDKNAYLPPLHTKFIEKYPAMQVSRQRIGDQRRAIVQKKLLPQDTIDQIYEEVRAELQMIHTQIQQHSTQPSTQSGQRMRWTNEYNETIIRIYYTATQLETNKTAYRKKLHEEFINKYPELAHITEQRLSDQVRAIIKNKYIHDNRLEEIKNQVASELSNSNSYTQNIEDINHDHWNTQTQNVSEQPATNTNFSDTPNNTLTTNIILNNSTDTNIVSQTVVNIDDDFLNNIDVGQYGPAQTNFDTTPETNPEIESRFHQAQINFNCTHPTNRPYIPKQKTSRKFSAIVSYINTVILPKHVNADTEFAKLQTIIYCAAWTATTCNGAKISDPIQNERRPYTQRKPKWHIRLEKKIENLRANIGRLTHFINGCRSQKLIAAVEEIKIKYQLHAQYENPNTELAHFLDTLKQKLSAASSRLKRYITCTNRKVENTKFINNEKILYRNLTSNNKDTNNQSLETPTPETLREFWANIWENPVHHNNHADWVKEATPEIPDMEFEFIPIETFIDVIKRTHNWKSPGTDNIHNYWYKKFSSIHPFLYNHFNTFIQSPHLLPQYITHGVTYMIPKDTNDTKNPAKYRPITCLQTLYKILTACVSEIIYEHLTKNNILAEQQKGCRKNSQGCKEQLTIDAITMNSAVKSRKDIHTMFIDYQKAFDSVPHSWLLHVLNLYKIHPTLKQFLGTSMQNWQTVLKINSSSSTVATEPICIRRGIFQGDALSPLWFCMALNPLSHLLDQTGTGFTLNSNHTQYTLTHLMYMDDIKLYAADKEALYQLADATQQFSDDICMSFGVDKCKILSIVKGKFQNNSYTLLSGASIEPMDEQSTYKYLGFKQSRQIQQKISKQELLKKFTHRLNLILKSNLNSRNTIKAINTFAIPILTYSFGIIRWSNTDIKKLQRTIHTLLTKHRKHHPKSCIQRLTLPRQEGGRGLIDIHNLHNKQILSLRAYFHNKSETSSLHKQVTETDNKLTPLNLQNTNTQINEHIVSTQQKIAAWSEKALHGRHRACLSQPHVDKIKSNEWLKRGELFPETEGFMLAIQDQIIATRNYRKYIIKDTNQPTDLCRHCNNASETIQHITGACKSLAQTDYKHRHDQVAAIIHQQLAFKFKLVSEMKPYYKYKPEVALENNDQKIYWDRTIITDKTIHYNRPDITVHDKTNKTVYLIDIAIPNSHNIQATISEKLSKYQDLAIEIKTQWKVQTVHIVPIVLSSTGIIPKSLTQSLNTLQMPNHTFYMLQKATILNTCRITRKFLTSSTLSSTFSI

SEQ ID NO: 30890 - protein, 1422 aa, Noctua fimbriata
MPRAAWLGERLVASVPTLDNRGPPVLFSLAAVNAGLCCGRLFKSLATRGISMNTRSKTKKQLLAKLPQIDDETSQSSSSSPSSLFPSIPSSSQSFLVTPTPSSSSISIQSVDVVQETNFVDDTVPAARTVTSRRKWSIDMNKFILRTYLHLTHMETDKNAYLPSLHTKFLEKYPDMQVGRQRIGDQRRAIVQKKLLSQETIDQIYEEVRAELQIVHTQIQQHSTQSKAPINTQPGQRMKWTNEYNEAIIRIYYTTTQLETNKTAYRKHLHEGFINIYPELAHLTEQRLSDQVRAIINNKYIHTNRLDEIKNQVAIELRNSNTYTQNIQHINNDSQQPDENIHSLSTQYTNIHISGTTTNTATTNSVILLNNSTETNIASQTFINTDEENFLNHIDIGHHEPTQINSDASSEKNQEIETTFQQAQQLFSDTQPTNRPYIPKQRTSKKFSAIVTYINSVILTNCVNVDTDFIKLQNVIYCAAWTAATCNGAKILGTQNVSRTYIKRKPKWQIRLEKKIQNLRASIGRLTHFNNGSRSPKLIAAVKEIKKKYQLHAQYEDPNTQTTHFLDTLKQKLNAASSRLKRYLTCTNRKMQNSKFSNNEKVFYRNLATNNSDTTTQSLDTPAPEILREFWAHIWENPVCHNHQANWVNEPAPEIPEMEYDFIPIGTFIDVIKRTHNWKSPGTDNIHNYWYKKFTSIHPFLHNHLNTFIQSPNLLPPYLTHGVTYMIPKDISDTLNPAKYRPITCLQTLYKILTACVSEVLYEHLTKNNILAEQQKGCRKNSQGCKEQLTIDAIIMNSAIKSKTDIHTMFIDYRKAFDSVPHSWLLHVLNLYKIHPTLKHFLETSMKNWQTVLKINSSSSSVATEPIRIKRGIFQGDALSPLWFCMALNPLSHLLDKTVGGFTLATNDTHYTLTHLLYMDDIKLYSADKNTLFQLADTTQQFSNDICMSFGVDKCKILSVVKGKVQNNSYILGSGESIEPMDEQSTYKYLGFNQSRQIQHKMIKQELLKKFSHRLNLILKTNLNSKNTVKAINTFAIPILTYSFGIIRWSKTDIRKLQRTINTTLTKHRKHHPKSSIQRLTLPRQEGGRGLIDIHNLHNKQILSLRAYFHNKSENSSLHKHVTEQDTKLTPLNLHNRNTQTNEILISTQDKIAAWSVKALHGRHRAYMSQPHVDKAKSNEWLKRGELFPETEGFMLAIQDQIIATRNYRKYIIKDPHQPTDLCRHCNTASETIQHITGACKSLAQTDYKHRHDQVAAIIHQQLAFKYKLISEMKPYYKYKPEIILDNNNQKIYWDRTIITDKTIHFNRPDITFHDKVSKTVYLIDIAIPNSHNIQTTISEKLSKYQDLAIEIKTQWEAQTVHIIPIVLSSTGIVPKSLMQSLNTLHMPPHTLQLLQKATILNTCRITRKFLTSSTISSTFSI

SEQ ID NO: 30891 - protein, 1267 aa, Choaspes benjaminii
MNRFIWRTYLHITKIETINLKSYLDKLHQQFSKQFPLMEATRQRIGDQRRAIIRNQLLSQNTLNQIKLEVKIELEGSNISENTNQPHNIHENQSQYSNNCDPIDRTQRSKMKWSTCLNETLMRCFYAVTDLETNLTAYRGNLRSKFIEIYPQLSHLSEQNVSDQRRAIINNKYIPDERLRLLKKEVEAKGLRYLANTQPNIGINTATLNINAGENNTEETTTGSLYNQNNTQTTLGTSEFTHYLPTTNLIETQMQNKLNEEFKNNFSKFNNTDPTSRPYIPKQRTSIKLAKLVTYINNKILPKYLTPNQDFSTLQTLIYSAAYTAATCNGTKIGIRTQNTQRKKKVAWRRRLERKIELLRTYIGRLTQYIQGNRNRKIINTLEEIKIKYQKHAQYEQPNAQLKDYLDTLKQKLNAAANRLQRYITCTARKQENISFAHNEKSFYRNLTCLNQNNNTIEDTKTPTSEALREFWAGIWQTPVEHNNNTTWINQIIQTTTSIPNMEFNDIPFDTFLQVIRRTHNWKAPGTDNIHNFWYKKFTSTHSYIHKTFNTFIKSPDTIPKYITQGITFMLPKDLSDTNNPAKYRPITCLQTIYKMLTACISDVIYKHLSKNSILAEQQKGCRKDSQGCKEQLTIDAIVMNTAAKKKRNIHTMFIDYRKAYDSIPHSWLIKVLQLYKIHPNIIYFLETSMQNWQTTLRITKNSQSLTTEPIRINRGIFQGDALSPLWFCLALNPLSNLLNQNSLGFKLVENDPGSMLSHLMYIDDIKLYADSKEDLFQLVDITQKFSNDMKMEFGVDKCRILSVNLGKILKNPYVLDSGETIEPMDQYSTYKYLGFNQSRKIKHKQTISQLIKTFKIRLNQILKTNLNSKNTVKAINTYAIPLLTYSFGIIHWSKTNLGKLQQIINTHLTKYRKHHPKACIQRLTLPRQEGGRGLIDVKNLHNKQITTLRNYFYSKSEHIPFHNSVVEADNRLTPLNLKNKEIQPNEQITSIQDKITTWAGKSLHGRHRAYLSQPHVDKDKSNEWLMRGELFPETEGFIMAIQDETIATRNYRKYILKDVRQTSDLCRHCNSAPETIQHITGSCKSLAQTDYKHRHDQVAAIVHQQIAYTHKLIPIIAPYYKYKPESVLENKNYKIYWDRTIITDKTIHYNRPDITVHDKKNKKVFIIDIAIPNSHNIQTTTSEKLSKYQDLAIELKTQWKVQTVQIIPIVMSSTGIIPKTLLENLNALDMPSYILHMLQKATIINTCRITRKFLTSATISSANFSI

SEQ ID NO: 30892 - protein, 1373 aa, Junonia neildi
MSLATRGNQMITRSKIKTNQANEPSFNDEASQASFISSTRSLFSSIPSSSQSFCVSPTPSSSISTQLTDVAQETNTVNEPVPTTSNSKLRRKWSKEMNMFILRTYLHLTNMETDTNAYLSPLHTKFLEMYPKMEVSRQRIGDQRRAIIQKKLLSQETIDQIYNEVRSELLTTQTQIESISSQLNSLTNTQIGKRMKWTNEINEAIIRIYYNITQLETNKTAYRKKLHEEFITLYPELMHITEQRLADQRRAIMNNKYIKQDRLTVIRNEVSENLRNLNRQADNVTPEQMNIHLQTNIDDQDAQVYTQNNALFNTQERNIDIYNNTHIDQTTRTVTQNTNYDMVNDTEIESENISVVHATIETNQEIEDTFLQAMQYFNDTEPTDRPYIPKQKTSRKFSIITEYINNVILPRCLNTDTNFLNLQKIIYCAAWTAAKCNGAKVSHITQQERQKQPLRKPNWQKRLEKKIENLRANIGRLTQFIRGNRNQRVVATVETIKVKYQLHAQHDNANTQLEHFLDTLKQKLNAAASRLKRYLTCTERKLQNTKFSNNEKTFYRNLTSTSKECEHNFETPSLESVRQFWANIWENPINHNKDADWINKIPIQTPEMEFQFIPIETFTEVIKHTHNWKSPGSDNIHNYWYKRFTSAHPYIHNHLNSFIQSPHLLPAYITHGITYLLPKDTKDTTNPAKYRPITCLQTIYKILTGCISKEIYKHLTKYNILAEQQQGCRKNSRGCKEQLTIDAIVLNNAVKTKKDLHTMFVDYQKAFDSVPHSWLLHVLNLYKIHPIIISFLQISMNNWQTVLKINQASMSSLTTDPIRIRRGIFQGDALSPLWFCLALNPLSHLLNISEIGFTLNNNSSQYRLSHLLFMDDIKLYATDKNDLFKLANTTELFSKDICMKFGVDKCKILSVVKGKIVSNSYTLETGEIIEPMDENSTYKYLGFKQSRQIEQKITKQELNKKFAFRLNLILKSYLNSRNTIKAINTFAIPILTYSFGIIQWSKQDIKKLERTINSQLTKHRKHHPKSCIQRLTLPRQEGGRGLIDIHNLHNKQILSLRAYFHNKSEHSSLHKHAVETDKKYTPLNLHDRNTQKNENIISSQEKVAAWASKALHGRHQAYLSQPHVDKENSNEWLRRGELFPETEGFMLAIQDQIIATRNYRKYIIKDPNQLTDMCRHCNAASETIQHITGACKSLAQTDYKHRHDQVAAIIHQNFAHRYKLITEMNPYYKYKPESVLENRNIKIYWDRTIITDKTIHYNRPDITVHDKKNEVVFLIDIAIPNSHNILTTISEKLCKYQDLAIEIKTQWKVKTVHIVPIVISSTGIVPKSLTQSLNTLNMPPYTLHTLQKAIILNTCRITRKFLTSSTLASTFAI

SEQ ID NO: 30893 - protein, 1373 aa, Junonia neildi
MSLATRGNQMITRSKIKTNQANEPSFNDEASQASFISSTRSLFSSIPSSSQSFCVSPTPSSSISTQLTDVAQETNTVNEPVPTTSNSKLRRKWSKEMNMFILRTYLHLTNMETDTNAYLSPLHTKFLEMYPKMEVSRQRIGDQRRAIIQKKLLSQETIDQIYNEVRSELLTTQTQIESISSQLNSLTNTQIGKRMKWTNEINEAIIRIYYNITQLETNKTAYRKKLHEEFITLYPELMHITEQRLADQRRAIMNNKYIKQDRLTVIRNEVSENLRNLNRQADNVTPEQMNIHLQTNIDDQDAQVYTQNNALFNTQERNIDIYNNTHIDQTTRTVTQNTNYDMVNDTEIESENISVVHATIETNQEIEDTFHQAMQYFNDTEPTDRPYIPKQKTSRKFSIITEYINNVILPRCLNTDTNFLNLQKIIYCAAWTAAKCNGAKVSHITQQERQKQPLRKPNWQKRLEKKIENLRANIGRLTQFIRGNRNQRVVATVETIKVKYQLHAQHDNSNTQLEHFLDTLKQKLNAAASRLKRYLTCTERKLQNTKFSNNEKTFYRNLTSTSKECEHNFETPSLESVRQFWANIWENPINHNKDADWINKIPIQTPEMEFQFIPIETFTEVIKHTHNWKSPGSDNIHNYWYKRFTSAHPYIHNHLNSFIQSPHLLPAYITHGITYLLPKDTKDTTNPAKYRPITCLQTIYKILTGCISKEIYKHLTKYNILAEQQQGCRKNSRGCKEQLTIDAIVLNNAVKTKKDLHTMFVDYQKAFDSVPHSWLLHVLNLYKIHPIIISFLQISMNNWQTVLKINQASMSSLTTDPIRIRRGIFQGDALSPLWFCLALNPLSHLLNISEIGFTLNNNSSQYRLSHLLFMDDIKLYATDKNDLFKLANTTELFSKDICMKFGVDKCKILSVVKGKIVSNSYTLETGEIIEPMDENSTYKYLGFKQSRQIEQKITKQELNKKFAFRLNLILKSYLNSRNTIKAINTFAIPILTYSFGIIQWSKQDIKKLERTINSQLTKHRKHHPKSCIQRLTLPRQEGGRGLIDIHNLHNKQILSLRAYFHNKSEHSSLHKHAVETDKKYTPLNLQDRNTQKNENIISSQEKVAAWASKALHGRHQAYLSQPHVDKENSNEWLRRGELFPETEGFMLAIQDQIIATRNYRKYIIKDPNQLTDMCRHCNAASETIQHITGACKSLAQTDYKHRHDQVAAIIHQNFAHRYKLITEMNPYYKYKPESVLENRNIKIYWDRTIITDKTIHYNRPDITVHDKKNEVVFLIDIAIPNSHNILTTISEKLCKYQDLAIEIKTQWKVKTVHIVPIVISSTGIVPKSLTQSLNTLNMPPYTLHTLQKAIILNTCRITRKFLTSSTLASTFAI

SEQ ID NO: 30894 - protein, 1277 aa, Junonia vestina
MNMFILRTYLHLTNMETDTNAYLSPLHAKFLEMYPQMEVSRQRIGDQRRAIIQKKLLSQETIDQIYNEVRSELLTTQTQIESISSQLNSLTNTQIGKRMKWTNEINEAIIRIYYNITQLETNKTAYRKKLHEEFITLYPELMHITEQRLADQRRAIMNNKYIKQDRLTVIRNEVSENLRNLNRQADNISPEQMNIHLQTNIDDQDAQVYTQNNALFNTQERNIDIYNNTQIDQTTRTVTQNTNYDMVNDTEIESENISVVHATIETNQEIEDTFHQATQYFNDTEPTDRPYIPKQKTSRKFSIITEYINNVILPRCLNTDTNFLNLQKIIYCAAWTAAKCNGAKVSHITQQERQKQPLRKPNWQKRLEKKIENLRANIGRLTQFIRGNRNQRVVATVETIKVKYQLHAQHDNSNTQLEHFLDTLKQKLNAAASRLKRYLTCTERKLQNTKFSNNEKTFYRNLTSTSKECEHNFETPSLESVRQFWANIWENPINHNKDADWINKIPIQTPEMEFQFIPIETFTEVIKHTHNWKSPGSDNIHNYWYKRFTSAHPYIHNHLNSFIQSPHLLPAYITHGITYLLPKDTKDTTNPAKYRPITCLQTIYKILTGCISKEIYKHLTKYNILAEQQQGCRKNSRGCKEQLTIDAIVLNNAVKTKKDLHTMFVDYQKAFDSVPHSWLLHVLNLYKIHPIIISFLQISMNNWQTVLKINQASMSSLTTDPIRIRRGIFQGDALSPLWFCLALNPLSHLLNISEIGFTLNNNSSQYRLSHLLFMDDIKLYATDKNDLFKLANTTELFSKDICMKFGVDKCKILSVVKGKIVSNSYTLETGEIIEPMDENSTYKYLGFKQSRQIEQKITKQELNKKFAFRLNLILKSYLNSRNTIKAINTFAIPILTYSFGIIQWSKQDIKKLERTINSQLTKHRKHHPKSCIQRLTLPRQEGGRGLIDIHNLHNKQILSLRAYFHNKSEHSSLHKHAVETDKKYTPLNLHDRNTQKNENIISSQEKVAAWASKALHGRHQAYLSQPHVDKENSNEWLRRGELFPETEGFMLAIQDQIIATRNYRKYIIKDPNQLTDMCRHCNAASETIQHITGACKSLAQTDYKHRHDQVAAIIHQNFAHRYKLITEMNPYYKYKPESVLENRNIKIYWDRTIITDKTIHYNRPDITVHDKKNEVVFLIDIAIPNSHNILTTISEKLCKYQDLAIEIKTQWKVKTVHIVPIVISSTGIVPKSLTQSLNTLNMPPYTLHTLQKAIILNTCRITRKFLTSSTLASTFAI

SEQ ID NO: 30895 - protein, 1277 aa, Junonia vestina
MNMFILRTYLHLTNMETDTNAYLSPLHAKFLEMYPQMEVSRQRIGDQRRAIIQKKLLSQETIDQIYNEVRSELLTTQTQIESISSQLNSLTNTQIGKRMKWTNEINEAIIRIYYNITQLETNKTAYRKKLHEEFITLYPELMHITEQRLADQRRAIINNKYIKQDRLTVIRNEVSENLRNLNRQADNISPEQMNIHLQTNIDDQDAQVYTQNNALFNTQERNIDIYNNTQIDQTTRTVTQNTNYDMVNDTEIESENISVVHATIETNQEIEDTFHQATQYFNDTEPTDRPYIPKQKTSRKFSIITEYINNVILPRCLNTDTNFLNLQKIIYCAAWTAAKCNGAKVSHITQQERQKQPLRKPNWQKRLEKKIENLRANIGRLTQFIRGNRNQRVVATVETIKVKYQLHAQHDNSNTQLEHFLDTLKQKLNAAASRLKRYLTCTERKLQNTKFSNNEKTFYRNLTSTSKECEHNFETPSLESVRQFWANIWENPINHNKDADWINKIPIQTPEMEFQFIPIETFTEVIKHTHNWKSPGSDNIHNYWYKRFTSAHPYIHNHLNSFIQSPHLLPAYITHGITYLLPKDTKDTTNPAKYRPITCLQTIYKILTGCISKEIYKHLTKYNILAEQQQGCRKNSRGCKEQLTIDAIVLNNAVKTKKDLHTMFVDYQKAFDSVPHSWLLHVLNLYKIHPIIISFLQISMNNWQTVLKINQASMSSLTTDPIRIRRGIFQGDALSPLWFCLALNPLSHLLNISEIGFTLNNNSSQYRLSHLLFMDDIKLYATDKNDLFKLANTTELFSKDICMKFGVDKCKILSVVKGKIVSNSYTLETGEIIEPMDENSTYKYLGFKQSRQIEQKITKQELNKKFAFRLNLILKSYLNSRNTIKAINTFAIPILTYSFGIIQWSKQDIKKLERTINSQLTKHRKHHPKSCIQRLTLPRQEGGRGLIDIHNLHNKQILSLRAYFHNKSEHSSLHKHAVETDKKYTPLNLHDRNTQKNENIISSQEKVAAWASKALHGRHQAYLSQPHVDKENSNEWLRRGELFPETEGFMLAIQDQIIATRNYRKYIIKDPNQLTDMCRHCNAASETIQHITGACKSLAQTDYKHRHDQVAAIIHQNFAHRYKLITEMNPYYKYKPESVLENRNIKIYWDRTIITDKTIHYNRPDITVHDKKNEVVFLIDIAIPNSHNILTTISEKLCKYQDLAIEIKTQWKVKTVHIVPIVISSTGIVPKSLTQSLNTLNMPPYTLHTLQKAIILNTCRITRKFLTSSTLASTFAI

SEQ ID NO: 30896 - protein, 1373 aa, Junonia zonalis
MSLATRGNQMITRSKIKTNQANEPSFNDEASQASFISSTRSLFSSIPSSSQSFCVSPTPSSSISTQLTDVAQETNTVNEPVPTTSNSKLRRKWSKEMNMFILRTYLHLTNMETDTNAYLSPLHTKFLEMYPKMEVSRQRIGDQRRAIIQKKLLSQETIDQIYNEVRSELLTTQTQIESISSQLNSLTNTQIGKRMKWTNEINEAIIRIYYNITQLETNKTAYRKKLHEEFITLYPELMHITEQRLADQRRAIMNNKYIKQDRLTVIRNEVSENLRNLNRQADNVTPEQMNIHLQTNIDDQDAQVYTQNNALFNTQERNIDIYNNTHIDQTTRTVTQNTNYDMVNDTEIESENISVVHATIETNQEIEDTFHQAMQYFNDTEPTDRPYIPKQKTSRKFSIITEYINNVILPRCLNTDTNFLNLQKIIYCAAWTAAKCNGAKVSHITQQERQKQPLRKPNWQKRLEKKIENLRANIGRLTQFIRGNRNQRVVATVETIKVKYQLHAQHDNSNTQLEHFLDTLKQKLNAAASRLKRYLTCTERKLQNTKFSNNEKTFYRNLTSTSKECEHNFETPSLESVRQFWANIWENPINHNKDADWINKIPIQTPEMEFQFIPIETFTEVIKHTHNWKSPGSDNIHNYWYKRFTSAHPYIHNHLNSFIQSPHLLPAYITHGITYLLPKDTKDTTNPAKYRPITCLQTIYKILTGCISKEIYKHLTKYNILAEQQQGCRKNSRGCKEQLTIDAIVLNNAVKTKKDLHTMFVDYQKAFDSVPHSWLLHVLNLYKIHPIIISFLQISMNNWQTVLKINQASMSSLTTDPIRIRRGIFQGDALSPLWFCLALNPLSHLLNISEIGFTLNNNSSQYRLSHLLFMDDIKLYATDKNDLFKLANTTELFSKDICMKFGVDKCKILSVVKGKIVSNSYTLETGEIIEPMDENSTYKYLGFKQSRQIEQKITKQELNKKFAFRLNLILKSYLNSRNTIKAINTFAIPILTYSFGIIQWSKQDIKKLERTINSQLTKHRKHHPKSCIQRLTLPRQEGGRGLIDIHNLHNKQILSLRAYFHNKSEHSSLHKHAVETDKKYTPLNLHDRNTQKNENIISSQEKVAAWASKALHGRHQAYLSQPHVDKENSNEWLRRGELFPETEGFMLAIQDQIIATRNYRKYIIKDPNQLTDMCRHCNAASETIQHITGACKSLAQTDYKHRHDQVAAIIHQNFAHRYKLITEMNPYYKYKPESVLENRNIKIYWDRTIITDITIHYNRPDITIHDKKNEVVFLIDIAIPNSHNILTTISEKLCKYQDLAIEIKTQWKVKTVHIVPIVISSTGIVPKSLTQSLNTLNMPPYTLHTLQKAIILNTCRITRKFLTSSTLASTFAI

SEQ ID NO: 30897 - protein, 727 aa, Junonia pacoma
MEFQFIPIETFTEVIKHTHNWKSPGSDNIHNYWYKRFTSAHPYIHNHLNSFIQSPHLLPAYITHGITYLLPKDTKDTTNPAKYRPITCLQTIYKILTGCISKEIYKHLTKYNILAEQQQGCRKNSRGCKEQLTIDAIVLNNAVKTKKDLHTMFVDYQKAFDSVPHSWLLHVLNLYKIHPIIISFLQISMNNWQTVLKINQASMSSLTTDPIRIRRGIFQGDALSPLWFCLALNPLSHLLNISEIGFTLNNNSSQYRLSHLLFMDDIKLYATDKNDLFKLANTTELFSKDICMKFGVDKCKILSVVKGKIVSNSYTLETGEIIEPMDENSTYKYLGFKQSRQIEQKITKQELNKKFAFRLNLILKSYLNSRNTIKAINTFAIPILTYSFGIIQWSKQDIKKLERTINSQLTKHRKHHPKSCIQRLTLPRQEGGRGLIDIHNLHNKQILSLRAYFHNKSEHSSLHKHAVETDKKYTPLNLQDRNTQKNENIISSQEKVAAWASKALHGRHQAYLSQPHVDKENSNEWLRRGELFPETEGFMLAIQDQIIATRNYRKYIIKDPNQLTDMCRHCNAASETIQHITGACKSLAQTDYKHRHDQVAAIIHQNFAHRYKLITEMNPYYKYKPESVLENRNIKIYWDRTITDKTIHYNRPDITVHDKNNEVVFLIDIAIPNSHNILTTISEKLCKYQDLAIEIKTQWKVKTVHIVPIVISSTGIVPKSLTQSLNT

SEQ ID NO: 30898 - protein, 1277 aa, Junonia litoralis
MNMFILRTYLHLTNMETDTNAYLSPLHTKFLEMYPKMEVSRQRIGDQRRAIIQKKLLSQETIDQIYNEVRSELLTTQTQIESISSQLNSLTNTQIGKRMKWTNEINEAIIRIYYNITQLETNKTAYRKKLHEEFITLYPELMHITEQRLADQRRAIMNNKYIKQDRLTVIRNEVSENLRNLNRQADNVTPEQMNIHLQTNIDDQDAQVYTQNNALFNTQERNIDIYNNTHIDQTTRTVTQNTNYDMVNDTEIETENISVVHATIETNQEIEDTFHQAMQYFNDTEPTDRPYIPKQKTSRKFSIITEYINNVILPRCLNTDTNFLNLQKIIYCAAWTAAKCNGAKVSHITQQERQKQPLRKPNWQKRLEKKIENLRANIGRLTQFIRGNRNQRVVATVETIKVKYQLHAQHDNSNTQLEHFLDTLKQKLNAAASRLKRYLTCTERKLQNTKFSNNEKTFYRNLTSTSKECEHNFETPSLESVRQFWANIWENPINHNKDADWINKIPIQTPEMEFQFIPIETFTEVIKHTHNWKSPGSDNIHNYWYKRFTSAHPYIHNHLNSFIQSPHLLPAYITHGITYLLPKDTKDTTNPAKYRPITCLQTIYKILTGCISKEIYKHLTKYNILAEQQQGCRKNSRGCKEQLTIDAIVLNNAVKTKKDLHTMFVDYQKAFDSVPHSWLLHVLNLYKIHPIIISFLQISMNNWQTVLKINQASMSSLTTDPIRIRRGIFQGDALSPLWFCLALNPLSHLLNISEIGFTLNNNSSQYRLSHLLFMDDIKLYATDKNDLFKLANTTELFSKDICMKFGVDKCKILSVVKGKIVSNSYTLETGEIIEPMDENSTYKYLGFKQSRQIEQKITKQELNKKFAFRLNLILKSYLNSRNTIKAINTFAIPILTYSFGIIQWSKQDIKKLERTINSQLTKHRKHHPKSCIQRLTLPRQEGGRGLIDIHNLHNKQILSLRAYFHNKSEHSSLHKHAVETDKKYTPLNLHDRNTQKNENIISSQEKVAAWASKALHGRHQAYLSQPHVDKENSNEWLRRGELFPETEGFMLAIQDQIIATRNYRKYIIKDPNQLTDMCRHCNAASETIQHITGACKSLAQTDYKHRHDQVAAIIHQNFAHRYKLITEMNPYYKYKPESVLENRNIKIYWDRTIITDKTIHYNRPDITVHDKKNEVVFLIDIAIPNSHNILTTISEKLCKYQDLAIEIKTQWKVKTVHIVPIVISSTGIVPKSLTQSLNTLNMPPYTLHTLQKAIILNTCRITRKFLTSSTLASTFAI

SEQ ID NO: 30899 - protein, 1373 aa, Junonia grisea
MSLATRGNQMITRSKIKTNQANEPSFNDEASQASFISSTRSLFSSIPSSSQSFCVSPTPSSSISTQLTDVAQETNTVNEPVPTTSNLKSRRKWSKEMNMFILRTYLHLTNMETDTNAYLSSLHTKFLEMYPQMEVSRQRIGDQRRAIIQKKLLSQETIDQIYNEVRSELLSTQTQIESISSQLNSLTNTQIGKRMKWTNEINEAIIRIYYNITQLETNKTAYRKKLHEEFTALYPELMHITEQRLADQRRAIMNNKYIKQDRLTVIRNEVSENLRNLNRQADNVTPEQMNIHLQPNIDDQDAQVYTQNNALFNTQEINIDIYNNTHIDQTTRTVTQNTNYDMVNDTEIESENISVVHATTETNQEIEDTFLQAMQYFNDTEPTDRPYIPKQKTSRKFSIITEYINNVILPRCLNKDTNFLNLQKIIYCAAWTAAKCNGAKVSHITQQERQKQPLRKPNWQKRLEKKIENLRANIGRLTQFIRGNRNQRVVATVETIKVKYQLHAQHDNSNTQLEHFLDTLKQKLNAAASRLKRYLTCTKRKLQNTKFSNNEKTFYRNLTSTSKECEHNFETPSLESVRQFWANIWENPINHNKDADWINKIPIQTPEMEFQFIPIETFTEVIKHTHNWKSPGSDNIHNYWYKRFTSAHPYLHNHLNSFIQSPHLLPAYITHGITYLLPKDTNDTTNPAKYRPITCLQTMYKILTGCISKEIYKHLTKYNILAEQQQGCRKNSRGCKEQLTIDAIVLNNAVKTKKDIHTMFVDYQKAFDSVPHSWLLHVLNLYKIHPIIISFLQISMNNWQTVLKINQASMSSLTTDPIRIRRGIFQGDALSPLWFCLALNPLSHLLNISEIGFTLNNNSSQYRLSHLLFMDDIKLYATDKNDLFKLANTTELFSKDICMKFGVDKCKTLSVVKGKIVSNSYTLETGEIIEPMDENSTYKYLGFKQSRQIEQKITKQELNKKFAFRLNLILKSYLNSRNTIKAINTFAIPILTYSFGIIQWSKQDIKKLERTINSQLTKHRKHHPKSCIQRLTLPRQEGGRGLIDIHNLHNKQILSLRAYFHNKSEHSSLHKHAVETDKKYTPLNLQDRNTQKNENIISSQEKVAAWASKALHGRHQAYLSQPHVDKENSNEWLRRGELFPETEGFMLAIQDQIIATRNYRKYIIKDPNQLTDMCRHCNAASETIQHITGACKSLAQTDYKHRHDQVAAIIHQNFAHRYKLITEMNPYYKYKPESVLENRNIKIYWDRTIITDKTIHYNRPDITVHDKNNEVVFLIDIAIPNSHNILTTISEKLCKYQDLAIEIKTQWKVKTVHIVPIVISSTGIVPKSLTQSLNTLNMPSYILHTLQKAIILNTCRITRKFLTSSTLASTFAI

SEQ ID NO: 30900 - protein, 1373 aa, Junonia coenia
MSLATRGNQMITRSKIKTNQANEPSFNDEASQASFISSTRSLFSSIPSSSQSFCVSPTPSSSISTQLTDVAQETNTVNEPVPTTSNSKLRRKWSKEMNMFILRTYLHLTNMETDTNAYLSPLHTKFLEMYPQMEVSRQRIGDQRRAIIQKKLLSQETIDQIYNEVRSELLTTQTQIESISSQLNSLTNTQIGKRMKWTNEINEAIIRIYYNITQLETNKTAYRKKLHEEFITLYPELMHITEQRLADQRRAIMNNKYIKQDRLTVIRNEVSENLRNLNRQADNVTPEQMNIHLQTNIDDQDAQVYTQNNALFNTQERNIDIYNNTHIDQTTRTVTQNTNYDMVNDTEIESENISVVHATIETNQEIEDTFHQAMQYFNDTEPTDRPYIPKQKTSRKFSIITEYINNVILPRCLNTDTNFLNLQKIIYCAAWTAAKCNGAKVSHITQQERQKQPLRKPNWQKRLEKKIENLRANIGRLTQFIRGNRNQRVVATVETIKVKYQLHAQHDNSNTQLEHFLDTLKQKLNAAASRLKRYLTCTKRKLQNTKFSNNEKTFYRNLTSTSKECEHNFETPSLESVRQFWANIWENPINHNKDADWINKIPIQTPEMEFQFIPIETFTEVIKHTHNWKSPGSDNIHNYWYKRFTSAHPYIHNHLNSFIQSPHLLPAYITHGITYLLPKDTKDTTNPAKYRPITCLQTIYKILTGCISKEIYKHLTKYNILAEQQQGCRKNSRGCKEQLTIDAIVLNNAVKTKKDIHTMFVDYQKAFDSVPHSWLLHVLNLYKIHPIIISFLQISMNNWQTVLKINQASMSSLTTDPIRIRRGIFQGDALSPLWFCLALNPLSHLLNISEIGFTLNNNSSQYRLSHLLFMDDIKLYATDKNDLFKLANTTELFSKDICMKFGVDKCKTLSVVKGKIVSNSYTLETGEIIEPMDENSTYKYLGFKQSRQIEQKITKQELNKKFAFRLNLILKSHLNSRNTIKAINTFAIPILTYSFGIIQWSKQDIKKLERTINSQLTKHRKHHPKSCIQRLTLPRQEGGRGLIDIHNLHNKQILSLRAYFHNKSEHSSLHKHAVETDKKYTPLNLQDRNTQKNENIISSQEKVAAWASKALHGRHQAYLSQPHVDKENSNEWLRRGELFPETEGFMLAIQDQIIATRNYRKYIIKDPNQLTDMCRHCNAASETIQHITGACKSLAQTDYKHRHDQVAAIIHQNFAHRYKLITEMNPYYKYKPESVLENRNIKIYWDRTIITDKTIHYNRPDITIHDKKNEVVFLIDIAIPNSHNILTTISEKLCKYQDLAIEIKTQWKVKTVHIVPIVISSTGIVPKSLTQSLNTLNMPPYTLHTLQKAIILNTCRITRKFLTSSTLASTFAI

SEQ ID NO: 30901 - protein, 1179 aa, Junonia stemosa
MKWTNEINEAIIRIYYNITQLETNKTAYRKKLHEEFITLYPELIHITEQRLADQRRAIMNNKYIKQDRLIVIRNEVSENLRNLNRQADNVTPEQTNIQLQTNIDDQDAQVYTQNNALFNTQERNIDIYNSTHIGQITRTVTQNTNYNMVNDTEIESDNISVVHATLETNQEIEDTFHQATQYFNDTEPTDRPYIPKQKTSRKFSIITEYINNVILPRCLNTDTNFLSLQKIIYCAAWTAAKCNGAKVSHIAQQERQKQPLRKPNWQKRLEKKIENLRANIGRLTQFIRGNRNQRVVATVETIKVKYQLHAQHDNSNTQLEHFLDTLKQKLNAAASRLKRYLTCTERKLQNTKFSNNEKTFYRNLTSTSKECEHNFETPSLESVRQFWANIWENPINHNKDADWINKIPIQTPEMEFQFIPIETFTEVIKHTHNWKSPGSDNIHNYWYKRFTSAHPYIHNHLNSFIQSPHLLPAYITHGITYLLPKDTKDTTNPAKYRPITCLQTIYKILTGCISKEIYKHLTKYNILAEQQQGCRKNSRGCKEQLTIDAIVLNNAVKTKKDLHTMFVDYQKAFDSVPHSWLLHVLNLYKIHPIIISFLQISMNNWQTVLKINQASMSSLTTDPIRIRRGIFQGDALSPLWFCLALNPLSHLLNISEIGFTLNNNSSQYRLSHLLFMDDIKLYATDKNDLFKLANTTELFSKDICMKFGVDKCKTLSVVKGKIVSNSYTLETGEIIEPMDENSTYKYLGFKQSRQIEQKITKQELNKKFAFRLNLILKSYLNSRNTIKAINTFAIPILTYSFGIIQWSKQDIKKLERTINSQLTKHRKHHPKSCIQRLTLPRQEGGRGLIDIHNLHNKQILSLRAYFHNKSEHSSLHKHAVETDKKYTPLNLQDRNTQKNENIVSSKEKIAAWALKALHGRHQAYLSQPHVDKENSNEWLRRGELFPETEGFMLAIQDQIIATRNYRKYIIKDPNQLTDMCRHCNAASETIQHITGACKSLAQTDYKHRHDQVAAIIHQNFAHRYKLINEMNPYYKYKPESVLENRNIKIYWDRTIITDKTIHYNRPDITVHDKNNEVVFLIDIAIPNSHNILTTISEKLCKYQDLAIEIKTQWKVKTVHIVPIVISSTGIVPKSLTQSLNTLNMPSYILHTLQKAIILNTCRITRKFLTSSTLASTFAI

SEQ ID NO: 30902 - protein, 1223 aa, Junonia evarete
MNMFILRTYLHLTNMETDTNAYLSPLHTKFLEMYPQMEVSRQRIGDQRRAIIQKKLLSQETIDQIYNEVRSELLTTQTQIESISSQLNSLTNTQIGKRMKWTNEINEAIIRIYYNITQLETNKTAYRKKLHEEFITLYPELMHITEQRLADQRRAIMNNKYIKQDRLTVIRNEVSENLRNLNRQADNVTPEQMNIHLQTNIDDQDAQVYTQNNALFNTQERNIDIYNNTHIDQTTRTVTQNTNYDMVNDTEIESENISVVHATIETNQEIEDTFHQAMQYFNDTEPTDRPYIPKQKTSRKFSIITEYINNVILPRCLNTDTNFLNLQKIIYCAAWTAAKCNGAKVSHITQQERQKQPLRKPNWQKRLEKKIENLRANIGRLTQFIRGNRNQRVVATVETIKVKYQLHAQHDNSNTQLEHFLDTLKQKLNAAASRLKRYLTCTERKLQNTKFSNNEKTFYRNLTSTSKECEHNFETPSLESVRQFWANIWENPINHNKDADWINKIPIQTPEMEFQFIPIETFTEVIKHTHNWKSPGSDNIHNYWYKRFTRAHPYIHNHLNSFIQSPHLLPAYITHGITYLLPKDTKDTTNPAKYRPITCLQTIYKILTGCISKEIYKHLTKYNILAEQQQGCRKNSRGCKEQLTIDAIVLNNAVKTKKDLHTMFVDYQKAFDSVPHSWLLHVLNLYKIHPIIISFLQISMNNWQTVLKINQASMSSLTTDPIRIRRGIFQGDALSPLWFCLALNPLSHLLNISEIGFTLNNNSSQYRLSHLLFMDDIKLYATDKNDLFKLANTTELFSKDICMKFGVDKCKILSVVKGKIVSNSYTLETGEIIEPMDENSTYKYLGFKQSRQIEQKITKQELNKKFAFRLNLILKSYLNSRNTIKAINTFAIPILTYSFGIIQWSKQDIKKLERTINSQLTKHRKHHPKSCIQRLTLPRQEGGRGLIDIHNLHNKQILSLRAYFHNKSEHSSLHKHAVETDKKYTPLNLHDRNTQKNENIISSQEKVAAWASKALHGRHQAYLSQPHVDKENSNEWLRRGELFPETEGFMLAIQDQIIATRNYRKYIIKDPNQLTDMCRHCNAASETIQHITGACKSLAQTDYKHRHDQVAAIIHQNFAHRYKLITEMNPYYKYKPESVLENRNIKIYWDRTIITDKTIHYNRPDITVHDKNNEVVFLIDKAIPSFIDQKNCFNEQLYNSHNILTTISEKLCKVSTKISQEGK

SEQ ID NO: 30903 - protein, 1382 aa, Spilosoma lubricipeda
MHTIETYVANKARVTLKNGDMNNRVYNLRSLPGGRRGASGADAGCSSMRTIGGAELNRRAPTDKHATADIISHHSTSSIHSSPTSSLFASPASSPLSFETHIHSSRTSSTTSPLTVDVVQEANADFTGSTTAKTRARRKWTTEMNMFIWRTYLITSRLETQTRGYLDPLHKAFTEKYPTMNASKQSVGDQRRAIINNKLLPINTLDAIRLEVNSYLTQNAEPIPTLTQASTRMRWSSDINETILRIYYEITELETNMTAHRKKLHDKFIQTYPHLSHISEQRLSDQRRAIVNNRMVSEDRIRQIKNDIQAQTQSSHTTAQLNTTNSQTDLLQHISYPIQRNTCDEADLSLSQTTIDINAEDSSHAPTNSHIIDQDIINQQFHAALDSFKNSDPTSRPYLPRQKPSKRLALTVEHLNNNILPNFLSREQDFATFQTIIYSAAYTATVCNRIKVNTSRTNSKEFKPAWQRRLESKIEKFRSEIARLTQYIHGNRSNRIINAVEVIKNKYRIHAQHENNNTELEHFLDTLKQKLNAAASRLKRYLTCTARKKQNSQFSQTEKTFYRTLTSNSRNTNTQEQRAPTSESLHRFWANIWQNATQHNANANWIHTINEITSQIPVMDFEHITIDTFIRVIKHSHNWKSPGSDNLHNFWYKKLTCIHPYLHYHLNTFIQSPHLMPDYITHGVTYMLPKEPNTEDPSKFRPITCLQTVYKILTACISQTIYAHLSENDILSEQQKGCRKNSQGCKEQLTIDAITINEAYRRKLNIHTMFIDYRKAFDSVPHSWLLYILRLYKINPIIITFLQSSMQRWQTTLKLKTKSTDITTEPIRIMRGIYQGDALSPLWFCLALNPLSSLLNNSNAGYNLVTTDTRVSLTHLFYMDDIKLYATNKSDIFLLADITQQFSKDICMEFGVDKCKILSINKGIIESNRYILESGEDIEPMDSYSVYKYLGFKQSRRILQKETKEDLVNKFRHRLKLILKTHLNSKNIIKAINTFAIPILTYSFGIINWSQTDLKNLQRTINTHMTKERKHHPKSSIERLTLPRSEGGRGLIDIQNLHNKQITTLRHYFHTKSLTSSLHKQITDIDNKLTPLNLQDPHIQHNETLTTVDQKITKWADKSLHGRHRTDLSQDYVDKEKSNEWLKKGELFPETEGFMLAIQDQIIITRNYKKFIIRDPNQTTDICRHCNSAPETIQHITGACKSLAQTDYKHRHDQVATIVHQHLAHNYNFISQKIPYYKYKPDTILENRACKIYWDRTILTDKTIHYNRPDITVHDKITKSIYIIDIAVPNSHNLQSTISEKLSKYQDLAIELKTQWKAHTVHIVPIVLSSTGIVPKTLTQNLELLHMPSHSIYLLQKATILNTCRITRKFLTSSSISSTYSI

SEQ ID NO: 30904 - protein, 764 aa, Spilosoma lubricipeda
MDFEHITIDTFIRVIKHSHNWKSPGSDNLHNFWYKKLTCIHPYLHYHLNTFIQSPHLMPDYITHGVTYMLPKEPNTEDPSKFRPITCLQTVYKILTACISQTIYAHLSENDILSEQQKGCRKNSQGCKEQLTIDAITINEAYRRKLNIHTMFIDYRKAFDSVPHSWLLYILRLYKINPIIITFLQSSMQRWQTTLKLKTKSTDITTEPIRIMRGIYQGDALSPLWFCLALNPLSSLLNNSNAGYNLVTTDTRVSLTHLFYMDDIKLYATNKSDIFLLADITQQFSKDICMEFGVDKCNILSINKGIIESNRYILESGEDIEPMDSYSVYKYLGFKQSRRILQKETKEDLVNKFRHRLKLILKTHLNSKNIIKAINTFAIPILTYSFGIINWSQTDLKNLQRTINTHMTKDRKHHPKSSIERLTLPRSEGGRGLIDIQNLHNKQITTLRHYFHTKSLTSSLHKQITDIDNTLTPLNLQDPHIQHNETLTTVDQKITKWADKSLHGRHRTDLSQDYVDKEKSNEWLKKGELFPETEGFMLAIQDQVIITRNYKKFIIRDPNQTTDICRHCNSAPETIQHITGACKSLAQTDYKHRHDQVATIVHQHLAHNYNFISQKIPYYKYKPDTILENRACKIYWDRTILTDKTIHYNRPDITVHDKITKSIYIIDIAVPNSHNLQSTISEKLSKYQDLAIELKTQWRAQTVHIVPIVLSSTGIVPKTLTQNLELLHMPSHSIYLLQKATILNTCRITRKFLTSSSISSTYSI

SEQ ID NO: 30905 - protein, 1382 aa, Spilosoma lubricipeda
MHTIETYVANKARVTLKNGDMNNRVYNLRSLPGGRRGASGADAGCSSMRTIGGAELNRRALTDKHATADIISHHTTSSIHSSPTSSLFASPASSPLSFETHIHSSRTSSTTSPLTVDVVQEANADFTGSTTAKTRARRKWTTEMNMFIWRTYLITSRLETQTRGYLDPLHKAFTEKYPTMNASKQSVGDQRRAIINNKLLPINTLDAIRLEVNSYLTQNAEPIPTLTQGSTRMRWSSDINETILRIYYEITELETNMTAHRKKLHDKFIQTYPHLSHISEQRLSDQRRAIVNNRMVSEDRIRQIKNDIQAQIQSSHTIAQLNTTNSQTDLLQHISYPIQRNTCDEADLSLSQTTIDINAEDSSHVPTNSHIIDQDIINQQFHAALDSFKNSDPTFRPYLPRQKPSKRLALTVEHLNNNILPNFLSREQDFATFQTIIYSAAYTATVCNRIKVNTSRTNSKEFKPAWQRRLETKIEKFRSEIARLTQYIHGNRSNRIINAVEVIKNKYRIHAQHENNNTELEHFLDTLKQKLNAAASRLKRYLTCTARKKQNSQFSQTEKTFYRTLTSNSRNTNTQEKRAPTSESLHRFWANIWQNATQHNANANWIHTINEITSQIPVMDFEHITIDTFMRVIKHSHNWKSPGSDNLHNFWYKKLTCIHPYLHYHLNTFIQSPHLMPDYITHGVTYMLPKEPNTEDPSKFRPITCLQTVYKILTACISQTIYAHLSENDILSEQQKGCRKNSQGCKEQLTIDAITINEAYRRKLNIHTMFIDYRKAFDSVPHSWLLYILRLYKINPIIITFLQSSMQRWQTTLKLKTKSTDVTTEPIRIMRGIYQGDALSPLWFCLALNPLSSLLNNSNAGYNLVTTDTRVSLTHLFYMDDIKLYATNKSDIFLLADITQQFSKDICMEFGVDKCKILSINKGIIEGNRYILESGEDIEPMDSYSVYKYLGFKQSRRILQKETKEDLVNKFRHRLKLILKTHLNSKNIIKAINTFAIPILTYSFGIINWSQTDLKNLQRTINTHMTKERKHHPKSSIERLTLPRSEGGRGLIDIQNLHNKQITTLRHYFHTKSLTSSLHKQITDIDNKLTPLNLQDPHFQHNETLTTVDQKITKWADKSLHGRHRTDLSQDYVDKEKSNEWLKKGELFPETEGFMLAIQDQVIITRNYKKFIIRDPNQTTDICRHCNSAPETIQHITGACKSLAQTDYKHRHDQVATIVHQHLAHNYNFISQKIPYYKYKPDTILENRACKIYWDRTILTDKTIHYNRPDITVHDKITKSIYIIDIAVPNSHNLQSTISEKLSKYQDLAIELKTQWKAHTVHIVPIVISSTGIVPKTLTQNLELLHMPSHSIYLLQKATILNTCRITRKFLMSSSISSTYSI

SEQ ID NO: 30906 - protein, 764 aa, Schrankia costaestrigalis
MDFQFITIDTLSDVIKRTHNWKSPGSDNIHNYWYKKFSFIYPYLHNHINTFIQTPNLMPQYITHGVTYMLPKENNTIDPSKYRPITCLQTIYKLVTSCIGKTINKHLSQNNIIAEQQKGCTKYSQGCKEQLTIDAITINEACNKKLDIHTMFIDFRKAFDSVPHSWLLHILEIYKINPTIITFLKHSMKHWKTVLKLKENSLTLTSEPISILRGIFQGDALSPLWFCLALNPLSTLLNNNNLGYQLKLPDSQFSLTHLFYMDDIKLYATNEIDLFRLADLTQQFSDDIFMQFGVDKCNILSISNGDIVSNRYVLGTGKTIEPMDDMTTYKYLGFRQSRKILQKETKIELTKKFRVRLNLILKSHLNSKNLIKAINTFAIPILIYSFGIINWTQTELKNLQRIINTHLTKHRKHHPKSSIERLILPRKEGGRGLIHIQNLHNKLITTLRNYFHSKSQHSDLHKHITEIDSKLTPLNLKNKQSQPNEIVINAEHNITKWSAKSLHGRHRSDLGQIYVDKEKSNEWLTRGELFPETEGFMIAIQDQIITTRNFKKFIIKDPNQTSDLCRHCHAASETIQHITGACKFLVQSDYKHRHDQVAAIVHQHLAHQNNFIDKKTPYYKYKPDTVLDNRTCKIYWDRTIITDKTIHYNRPDITVHDKTNNIVYIIDIAIPNTHNIQSTIAEKLTKYQDLAIELKTQWRARTVHIVPIVLSSTGVIPKTLSHSLNILHMPPHSLNLLQKATILNTCRITRKFLTSSSVSSAYTI

SEQ ID NO: 30907 - protein, 1132 aa, Spilarctia lutea
MRWSSDINETILRIYYEITELETNMTAHRKKLHDKFIHTYPHLSHISEQRISYQRRAIVNNGMVSADRIRQIKNDIQAQIQSSHTTDQLNTTYSQTDLSQHVSSTQINSEDSLHAPTNSFIIDGDNINQEFHEALETFKNTDPTSRSYLPRQRPSKRLALIVEHLNNNILPNYLSRDQDFATFQTILYSAAYTATVCNGIKLNCNKTSSKEFKPAWRRRLETKIEKFRSEIARLTQYIHGNRSNRIINAVEVIKNKYRIHAQHENMNTELEHFLDTLKQKLNAAASRLKRYLTCTARKKQNHQFSQTEKTFYRTLTSNAQNTNTQEQRSPTSESLHRFWANIWENTTQHTENANWIHTINEMSSHVPVMEFGQITIDTFARVINHSHNWKSPGSDNLHNYWYKKLTCIHPYLHYHLNTFIQSPHLMPDYITHGVTYMLPKEPNTEDPSKFRPITCLQTVYKILTACISQTIYAHLSENDILAEQQKGCRKNSQGCKEQLTIDAITINEAYRKKLNIHTMFIDYRKAFDSVPHSWLLYILRLYKINPIIITFLQSSMQRWQTVLKLKNESTNITTEPIRIMRGIYQGDALSPLWFCLALNPLSSLLNISNAGYNLVTTDTRVSLTHLFYMDDIKLYATNKSDIFLLADITQQFSKDICMEFGVDKCKILSINKGKLESNRYILQSGEDIQPMDSYSFYKYLGFKQSRRILQKDTKEELVNKFKFRLKLILKTHLNSKNIIKGINTFAIPILTYSFGIINWTQTDLKNLQRTINTQMTKDRKHHPKSSIERLTLPRNEGGRGLIDIQNLHNKQITILRNYFHTKSLTSPLHKQITDIDNKLTPLNLQDRHTQLNETLTTVEQKITKWADKSLHGRHRTDLSQNYVDKEKSNEWLKKGELFPETEGFMLAIQDQVIITRNYKKFIIRDPTQTIDLCRHCNSAPETIQHITGACKTLAQTDYKHRHDQVAAIVHQHLAHNYNFINQKIPYYKYKPDTILENGACKIYWDRTILTDKTIHYNRPDITVHDKVTKVIYIIDIAIPNSHNLQSTISEKLSKYQDLAIELKTQWKVNTVHIVPIVLSSTGIVPKTLAQNLELLHMPSHYIYLLQKATILNTCRITRKFLTSSSISSTYSI

SEQ ID NO: 30908 - protein, 1415 aa, Spilosoma lubricipeda
MVRHLHEKNNNNNKPSKIPPYVRAEDLATWGADMHTIETYVANKARVTLKNGDMNNRVYNLRSLPGGRWGASGADAGCSSMRTVGGAELNRRAPTDKHATADIISHHTTSSIHSSPTSSLFASPASSPLSFETHIHSSRTSSTTSPLTVDVVQEANADFTGSTTAKTRARRKWTTEMNMFIWRTYLITSRLETQTRGYLDPLHKAFTEKYPTMNASKQSVGDQRRAIINNKLLPINTLDAIRLEVNSYLTQNAEPIPTLTQASTRMRWSSDINETILRIYYEITELETNMTAHRKKLHDKFIQTYPHLSHISEQRLSDQRRAIVNNRMVSEDRIRQIKNDIQAQIQSSHTIAQLNTTNSQTDLLQHISYSIQRNTCDEADLSLSQTTIDINAEDSSHVPTNSHIIDQDIINQQFHAALDSFKNSDPTSRPYLPRQKPSKRLALTVEHLNNNILPNFLSREQDFATFQTIIYSAAYTATVCNRIKINTSRTNSKEIKPAWQRRLETKIEKFRSEIARLTQYIHGNRSNRIINAVEIIKNKYRIHAQHENNNTELEHFLDTLKQKLNAAASRLKRYLTCTARKKQNSQFSQTEKTFYRTLTSNSRNTNTQEQRAPTSESLHRFWANIWQNATQHNANANWIHTINEITSQIPVMDFEHITIDTFIRVIKHSHNWKSPGSDNLHNFWYKKLTCIHPYLHYHLNTFIQSPHLMPGYITHGVTYMLPKEPNTEDPSKFRPITCLQTVYKILTACISQTIYAHLSENDILSEQQKGCRKNSQGCKEQLTIDAITINEAYRRKLNIHTMFIDYRKAFDSVPHSWLLYTLRLYKINPIIITFLQSSMQRWQTTLKLKTKSTDITTEPIRIMRGIYQGDALSPLWFCLALNPLSSLLNNSNAGYNLVTTDTRVSLTHLFYMDDIKLYATNKSDIFLLADITQQFSKDICMEFGVDKCKILSINKGIIESNRYILESGEDIEPMDSYSVYKYLGFKQSRRILQKETKEDLVNKFRHRLKLILKTHLNSKNIIKAINTFAIPILTYSFGIINWSQTDLKNLQRTINTHMTKERKHHPKSSIERLTLPRSEGGRGLIDIQNLHNKQITTLRHYFHTKSLTSSLHKQITDIDNKLTPLNLQDPHIQHNETLTTVDQKITKWADKSLHGRHRTDLSQDYVDKEKSNEWLKKGELFPETEGFMLAIQDQVIITRNYKKFIIRDTNQTTDICRHCNSAPETIQHITGACKSLAQTDYKHRHDQVATIVHQHLAHNYNFISQKIPYYKYKPDTILENRACKIYWDRTILTDKTIHYNRPDITVHDKITKSIYIIDIAVPNSHNLQSTISEKLSKYQDLAIEIKTQWKAHTVHIVPIVLSSTGIVPKTLTQNLELLHMPSHSIYLLQKATILNTCRITRKFLTSSSISSTYSI

SEQ ID NO: 30909 - protein, 1335 aa, Spilosoma lubricipeda
MRTIGGAELNRRAPTEKHTTADVISHHITSSTHSSPTSSLFPSLASSPLSFETIINTSRTSSTTSPLTVDVVQEANADVTGPTTAKSRARRKWTTEMNMFIWRTYLITSRLETQTRGYLDPLHKAFTEKYPTMNASKQSVGDQRRAIINNKLLPINTLDAIRLEVTSYFTQNTEPIPTLTQASARMRWSSDINETILRIYYEITELETNMTAHRKKLHDKFIQTYPHLSHISEQRLSDQRRAIVNNRMVSEDRIREIKNDIQTQIQSSHTTDQINTTFSQTDLSSHISYSTQRNTIEEADLSLHQATIHINAEDPLHVSTNPHIIDQDNINQQFHAALDTFKNTDPTSRPYLPRQKPSKRLALIVEYLNNTILPNFLSREEDFATFQTILYSAAYTATVCNGIKVNSHKTSPREFKPAWRRRLETKIEKFRSEIARLTQYIQGNRSNRIINAVEVIKNKYRIHAQHENINTEIEHFLDTLKQKLNAAASRLKRYLTCTARKKQNNQFSQTEKLFYRTLTSNSQNTNTQELRSPTSESLHRFWANIWENTTQHNHNANWIHTINEISSHVPVMEFEQITIDTFARVIKHSHNWKSPGSDNLHNYWYKKFTCIHPYLHYHLNMFIQSPHLMPDYITHGVTYMLPKEPNTGDPSKFRPITCLQTVYKILTACITQTIYAHLSQNDILAEQQKGCRKNSQGCKEQLTIDAITINEAYRKKLNIHTMFIDYRKAFDSVPHSWLLYILRLYKINPIIITFLQSSMQRWQTVLKLKNESTNITTEPIRIMRGIYQGDALSPLWFCLALNPLSSLLNISNAGYNLVTTDTRVPLTHLFYMDDIKLFATNKDDIFLLADITQQFSKDICMEFGVDKCKILSINKGKIESNRYILESGEDIQPMDSYSFYKYLGFKQSRRILQKETKEDLINKFKHRLKLILKTHLNSKNIIKAINTFAIPILTYSFGIINWTQTDLKKLQRTINTQMTKDRKHHPKSSIERLTLPRNEGGRGLIDIQNLHNKQITILRNYFHIKSLTSPLHKQIIDIDKKLTPLNLHDRHTQLNETLTTVEQKITKWAGKSLHGRHRTDLSQDYVDKEKSNEWLKKGELFPETEGFMLAIQDQIIITRNYKKFIIRDPTQTIDLCRHCNSAPETIQHITGACKALAQTDYKHRHDQVATIIHQHLAHNYNFISHKIPYYKYKPDTILENRACKIYWDRTILTDKTIHYNRPDITVHDKVTKVIYIIDIAIPNSHNLQSTISEKLSKYQDLAIELKTQWKVNTVHIVPIVLSSTGIVPKTLTQNLELLHMPPYSIYLLQKATILNTCRITRKFLTSSSISSTYSI

SEQ ID NO: 30910 - protein, 1382 aa, Spilosoma lubricipeda
MHTIETYVANKARVTLKNGDMNNRVYNLRSLPGGRRGASGADAGCSSMRTIGGEELNRRAPTDKHATADIISHHTTSSIHSSPTSSLFASPASSPLSFETHIHSSRTSSTTSPLTVDVVQEANADFTGSTTAKTRARRKWTTEMNMFIWRTYLITSRLETQTRGYLDPLHKAFTEKYPTMNASKQSVGDQRRAIINNKLLPINTLDAIRLEVNSYLTQNAEPIPTLTQASTRMRWSSDINETILRIYYEITELETNMTAHRKKLHDKFIQTYPHLSHISEQRLSDQRRAIVNNRMVSEDRIRQIKNDIQAQIQSSHTIAQLNTTNSQTDLLQHISYPIQRNTCDEADLSLSQTTIDINAEDSSHVPTNSHIIDQDIINQQFHAALDSFKNSDPTSRPYLPRQKPSKRLALTVEHLNNNILPNFLSREQDFATFQTIIYSAAYTATVCNRIRVNTSRTNSKEFKPAWQRRLETKIEKFRSEIARLTQYIHGNRSNRIINAVEVIKNKYRIHAQHENNNTELEHFLDTLKQKLNAAASRLKRYLTCTARKKQNSQFSQTEKTFYRTLTSNSRNTNTQEQRAPTSESLHRFWANIWQNATQHNANANWIHTINEITSQIPVMDFEHITIDTFIRVIKHSHNWKSPGSDNLHNFWYKKLTCIHPYLHYHLNTFIQSPHLMPDYITHGVTYMLPKEPNTEDPSKFRPITCLQTVYKILTACISQTIYAHLSENDILSEQQKGCRKNSQGCKEQLTIDAITINEAYRRKLNIHTMFIDYRKAFESVPHSWLLYILRLYKINPIIITFLQSSMQRWQTTLKLKTKSTDITTEPIRIMRGIYQGDALSPLWFCLALNPLSSLLNNSNAGYNLVTTDTRVSLTHLFYMDDIKLYATNKSDIFLLADITQQFSKDICMEFGVDKCKILSINKGIIESNRYILESGEDIEPMDSYSVYKYLGFKQSRRIHQKETKEDLVNKFRHRLKLILKTHLNSKNIIKAINTFAIPILTYSFGIINWSQTDLKNLQRTINTHMTKERKHHPKSSIERLTLPRSEGGRGLIDIQNLHNKQITTLRHYFHTKSLTSSLHKQITDIDNKLTPLNLQDPHIQHNETLTTVDQKITKWADKSLHGRHRTDLSQDYVDKEKSNEWLKKGELFPETEGFMLAIQDQVIITRNYKKFIIRDTNQTTDICRHCNSAPETIQHITGACKSLAQTDYKHRHDQVATIVHQHLAHNYNFISQKIPYYKYKPDTILENRACKIYWDRTILTDKTIHYNRPDITVHDKITKSIYIIDIAVPNSHNLQSTISEKLSKYQDLAIELKTQWKAHTVHIVPIVLSSTGIVPKTLTQNLELLHMPSHSIYLLQKATILNTCRITRKFLTSSSISSTYSI

SEQ ID NO: 30911 - protein, 764 aa, Spilosoma lubricipeda
MDFEHITIDTFIRVIKHSHNWKSPGSDNLHNFWYKKLTCIHPYLHYHLNTFIQSPHLMPDYITHGVTYMLPKEPNTEDPSKFRPITCLQTVYKILTACISQTIYAHLSENDILSEQQKGCRKNSQGCKEQLTIDAITINEAYRRKLNIHTMFIDYRKAFDSVPHSWLLYILRLYKINPIIITFLQSSMQRWQTTLKLKTKSTDITTEPIRIMRGIYQGDALSPLWFCLALNPLSSLLNNSNAGYNLVTTDTRVSLTHLFYMDDIKLYATNKSDIFLLADITQQFSKDICMEFGVDKCKILSINKGIIESNRYILESGEDIEPMDSYSFYKYLGFKQSRRILQKETKEDLVNKFRHRLKLILKTHLNSKNIIKAINTFAIPILTYSFGIINWSQTDLKNLQRTINTHMTKERKHHPKSSIERLTLPRSEGGRGLIDIQNLHNKQITTLRHYFHTKSLTSSLHKQITDIDNKLTPLNLQDPHIQHNETLTTVDQKITKWADKSLHGRHRTDLSQDYVDKEKSNEWLKKGELFPETEGFMLAIQDQIIITRNYKKFIIRDPNQTTDICRHCNSAPETIQHITGACKSLAQTDYKHRHDQVATIVHQHLAHNYNFISQKIPYYKYKPDTILENRACKIYWDRTILTDKTIHYNRPDITVHDKITKSIYIIDIAVPNSHNLQSTISEKLSKYQDLAIELKTQWKAHTVHIVPIVLSSTGIVPKTLTQNLELLHMPSHSIYLLQKATILNTCRITRKFLTSSSISSTYSI

SEQ ID NO: 30912 - protein, 1361 aa, Schrankia costaestrigalis
MSLATRGNNMENNNSQRYNLRSLSSRNRVTPIATKRRNSVELSTNNVIQYTDSLTNSSPRSSLFPSPNSSLKSYHIQSEFNSVSSHSSLSSPLAVDVVQEAVTADVTGPATVKSRARRRWTIDMNMFIWRTYLIITKLETITRGYLDPLHNSFTAKYPEMNASKQSIGDQRRAIINNKLLPLSTLNEIKNEVAIYLEHNETPSITLTQSTQRMRWSNDVNETILRIYYEITELETNTTAYRQKLHEKFIETYPHLSHLSEQRISDQRRAIINNKMISETRINEIKNNVRTRLPTFDTVRSLNTHQFENSSQPDTTTLSELNAEEIDFSITQDTINNTQQNPNNTNSAHTPHHNDIDEQFNLSLDTFINTNPTTRPYLPKQKPSRKFATIVEYINQTILPRILNTDQDFETFQTILYSAAYTAVVCNGAKINLSTRTTTPFKPSWQKRLETKIQKYRSEIARLTQYKHGNRSYRIITAVEAIKSKYQTHAQYENANSEVEHFLDTLKQKLNTAASRLKRYLTCTIRKKQNIQFTNNEKVFYRGLTSSNRQNTNTQGQAFPTLDNLRQYWANIWENPLQHNENAEWSEVVREATHDIPQMDFQFITIDTLSDVIKRTHNWKSPGSDNIHNYWYKKFSFIYPYLHNHINTFIQTPNLMPQYITHGVTYMLPKENNTIDPSKYRPITCLQTIYKLVTSCISKTINKHLSQNNIIAEQQKGCTKYSQGCKEQLTIDAITINEACNKKLDIHTMFIDFRKAFDSVPHSWLLHILEIYKINPTIITFLKHSMKHWKTVLKLKENSLTLTSEPISILRGIFQGDALSPLWFCLALNPLSTLLNNNNLGYQLKLPDSQFSLTHLFYMDDIKLYATNEIDLFRLADLTQQFSDDICMQFGVDKCNILSISNGDIVSNRYVLGTGETIEPMDDMTTYKYLGFRQSRKILQKETKIELTKKFRVRLNLILKSHLNSKNLIKAINTFAIPILIYSFGIINWTQTELKNLQRIINTHLTKHRKHHPKSSIERLILPRKEGGRGLIHIQNLHNKLITTLRNYFHSKSQHSDLHKHIAEIDNKLTPLNLKNKQSQPNEIVINAEHNITKWSAKSLHGRHRSDLGQIYVDKEKSNEWLTRGELFPETEGFMIAIQDQIITTRNFKKFIIRDPNQTSDLCRHCHAASETIQHITGACKFLVQSDYKHRHDQVAAIVHQHLAHQNNFIDKKTPYYKYKPDTVLDNRTCKIYWDRTIITDKTIHYNRPDITVHDKTNNIVYIIDIAIPNTHNIQSTIAEKLTKYQDLAIELKTQWRARTVHIVPIVLSSTGVIPKTLSHSLNILHMPPHSLNLLQKATILNTCRITRKFLTSSSVSSAYTI

SEQ ID NO: 30913 - protein, 1364 aa, Spilarctia lutea
MHTTETYVANRARVTLLHGDMNNRVYNLRSLPGGRRGASGADAGCSSMRTIGGAELNRRAPTDKHTTADVISHRISSSTQSSPTSSLFPSPASSPLSFETHINSNHTSSTTSPLTVDVVQEANADVTGPTTAKSRARRKWTIEMNMFIWRTYLITSRLETQTRGYLDPLHKAFTEKYPTMNASKQSLGDQRRAIINNKLLPINTLDAIRLEVNSFLTQNTEPIPTLTQASSRMRWSSDINETILRIYYEITELETNMTAHRKKLHDKFIHTYPHLSHISEQRISDQRRAIVNNGMVSADRIRQIKNDIQAQIQSSHTTDQLNTTYSQTDLSQHVSSTQINSEDSLHVPTNSFIIDGDNINQQFHEALETFKNTDPISRSYLPRQRPSKRLALIVEHLNNNILPNYLSRDQDFATFQTILYSAAYTATVCNGIKLNCNKTSSKEFKPAWRRRLETKIEKFRSEIARLTQYIHGNRSNRIINAVKVIKNKYRIHAQHENMNTELEHFLDTLKQKLNAAASRLKRYLTCTARKKQNHQFSQTEKTFYRTLTSNAQNTNTQEQRSPTSESLHRFWANIWENTTQHNENANWIHTINEMSSHVPVMEFGQITIDTFARVIKHSHNWKSPGSDNLHNYWYKNLTCIHPYLHYHLNTFIQSPHLMPDYITHGVTYMLPKEPNTEDPSKFRPITCLQTVYKILTACISQTIYAHLSENDILAEQQKGCRKNSQGCKEQLTIDAITINEAYRKKLNIHTMFIDYRKAFDSVPHSWLLYILRLYKINPIIISFLQSSMQRWQTSLKLKTESTDITTEPIRIMRGIYQGDALSPLWFCLALNPLSSLLNNSNAGYNLVTTDTRVSLTHLFYMDDIKLYATNKSDIFLLADITQQFSKDICMEFGVDKCKVLSINKGIIESNRYILESGEDIEPMDSYSIYKYLGFKQSRRILQKETKADLVDKFKYRLKLILKTHLNAKNIIKAINTFAIPILTYSFGIINWSQTDLKNLQRTINTHMTKSRKHHPKSSIERLTLPRSEGGRGLIDIQNLHNKQITILRNYFYTKSLTSSLHKQVTDIDNKLTPLNLLNRHTQHNETLTTVDQKITKWSDKSLHGRHRTDLSQDYVDKEKSNEWLKKGELFPETEGFMLAIQDQVIITRNFKKNIIRDPNQTTDTCRHCNSAPETMQHITGACKSLAQTDYKHRHDQVAAIVHQHLAHNYNFISQKIPYYKYKPDTILENRACKIYWDRTILTDKTIHYNRPDITVHDKITKAIYIIDIAIPNSHNLQSTISEKLSKYQDLAIELKTQWKVNTVHIVPIVISSTGIVPKTLTQNLELLHMPSHSFYLLQKATILNTCRITRKFLTSSYISSTYSI

SEQ ID NO: 30914 - protein, 1381 aa, Spilosoma lubricipeda
MHTIETYVANKARVTLLNGDMNNRVYNLRSLPGGRRGASGADAGCSSMRTIGGAELNRRASTEKHTTADVISHHITSSTHSSPTSSLFPSLASSPLSFETIINTSRTSSTTSPLTVDVVQEANADVTGPTTAKSRARRKWTTEMNMFIWRTYLITSRLETQTRGYLDPLHKAFTEKYPTMNASKQSVGDQRRAIINNKLLPINTLDAIRLEVTSYFTQNTEPIPTLTQASARMRWSSDINETILRIYYEITELETNMTAHRKKLHDKFIQTYPHLSHISEQRLSDQRRAIVNNGMVSEDRIREIKNDIQAQIQSLHTTDQINTTYSQTDLSPHVYSTQKNTIEEADLSLSQATTHINAEDPIQVSTNSHIIDQDNINQQFYAALDTFKNTDPTSRPYLPRQKPSKRLALIVEYLNNTILPNFLSREEDFATFQTILYSAAYTATVCNGIKVNSHKTSSREFKPAWRRRLETKIEKFRSEIARLTQYIQGNRSNRIINAVEVIKNKYRIHAQHENINTEIEHFLDTLKQKLNAASSRLKRYLTCTARKKQNNQFSQTEKLFYRTLTSNSQNTNTQELRSPTSESLHRFWANIWENTTQHNHNANWIHTINEISSHVPVMEFEQITIDTFARVIKHSHNWKSPGSDNLHNYWYKKFTCIHPYLHYHLNMFIQSPHLMPDYITHGVTYMLPKEPNTGDPSKFRPITCLQTVYKILTACITQTIYAHLSENDILAEQQKGCRKNSQGCKEQLTIDAITINEAYRKKLNIHTMFIDYRKAFDSVPHSWLLYILRLYKINPIIITFLQSSMQRWQTVLKLKNESTNITTEPIRIMRGIYQGDALSPLWFCLALNPLSSLLNISNAGYNLVTTDTRVPLTHLFYMDDIKLFATNKDDIFLLADITQQFSKDICMEFGVDKCKILSINKGKIESNRYILESGEDIQPMDSYSFYKYLGFKQSRRILQKETKEDLINKFKHRLKLILKTHLNSKNIIKAINTFAIPILTYSFGIINWTQTDLKKLQRTINTQMTKDRKHHPKSSIERLTLPRNEGGRGLIDIQNLHNKQITILRNYFHIKSLTSPLHKQIIDIDKKLTPLNLHDRHTQLNETLTTVEQKITKWAGKSLHGRHRTDLSQDYVDKEKSNEWLKKGELFPETEGFMLAIQDQIIITRNYKKFIIRDPTQTIDLCRHCNSAPETIQHITGACKALAQTDYKHRHDQVATIIHQHLAHNYNFISHKIPYYKYKPDTILENRACKIYWDRTILTDKTIHYNRPDITVHDKVTKVIYIIDIAIPNSHNLQSTISEKLSKYQDLAIELKTQWKVNTVHIVPIVLSSTGIVPKTLTQNLELLHMPPYSIYMLQKATILNTCRITRKFLTSSSISSTYSI

SEQ ID NO: 30915 - protein, 1087 aa, Schrankia costaestrigalis
MISETRINEIKNNVRTRLPTFDTVRSLNTHQFENSSQPDTTTLSELNAEEIDFSITQDTINNTQQNPNNTNSAHTPHHNDIDEQFNLSLDTFINTNPTTRPYLPKQKPSRKFATIVEYINQTILPRILNTDQDFETFQTILYSAAYTAVVCNGAKINLSTRTTTPFKPSWQKRLETKIQKYRSEIARLTQYKHGNRSYRIITAVEAIKSKYQTHAQYENANSEVEHFLDTLKQKLNTATSRLKRYLTCTIRKKQNIQFTNNEKVFYRGLTSSNRQNTNTQGQAFPTLDNLRQYWANIWENPLQHNENAEWSEVVREATHDIPQMDFQFITIDTLSDVIKRTHNWKSPGSDNIHNYWYKKFSFIYPYLHNHINTFIQTPNLMPQYITHGVTYMLPKENNTIDPSKYRPITCLQTIYKLVTSCISKTINKHLSQNNIIAEQQKGCTKYSQGCKEQLTIDAITINEACNKKLDIHTMFIDFRKAFDSVPHSWLLHILEIYKINPTIITFLKHSMKHWKTVLKLKENSLTLTSEPISILRGIFQGDALSPLWFCLALNPLSTLLNNNNLGYQLKLPDSQFSLTHLFYMDDIKLYATNEIDLFRLADLTQQFSDDICMQFGVDKCNILSISNGDIVSNRYVLGTGETIEPMDDMTTYKYLGFRQSRKILQKETKIELTKKFRVRLNLILKSHLNSKNLIKAINTFAIPILIYSFGIINWTQTELKNLQRIINTHLTKHRKHHPKSSIERLILPRKEGGRGLIHIQNLHNKLITTLRNYFHSKSQHSDLHKHIAEIDNKLTPLNLKNKQSQPNEIVINAEHNITKWSAKSLHGRHRSDLGQIYVDKEKSNEWLTRGELFPETEGFMIAIQDQIITTRNFKKFIIRDPNQTSDLCRHCHAASETIQHITGACKFLVQSDYKHRHDQVAAIVHQHLAHQNNFIDKKTPYYKYKPDTVLDNRTCKIYWDRTIITDKTIHYNRPDITVHDKTNNIVYIIDIAIPNTHNIQSTIAEKLTKYQDLAIELKTQWRTRTVHIVPIVLSSTGVIPKTLSHSLNILHMPPHSLNLLQKATILNTCRITRKFLTSSSVSSAYTI

SEQ ID NO: 30916 - protein, 1361 aa, Schrankia costaestrigalis
MSLATRGNTMENNNSQRYNLRSLSSRRRVTPIATKRLNSVELSTNNVIQYTDSFANSSPRSSLFPSPNSSLKSYHIQSEFNSVSSHSSPSSPLAVDVVQEAVTADVTGPAAVKSRARRRWTIDMNMFIWRTYLIITKLETITRGYLDPLHNSFTAKYPEMNASKQSIGDQRRAIINNKLLPLSTLDEIKNEVAIYLENNETPSITLTQSTQRMRWSNDVNETILRIYYEITELETNTTAYRQKLHEKFIETYPHLSHLSEQRISDQRRAIINNKMISETRSNEIKNNVQTHLPTFDTVRSLNTYQFENSSQPDTTAISELNAEEIDFSITQDMINNTQQNPNNTNSAHTAHHNDIDEQFNLSLDTFINTNPTTRPYLPKQKPSRKFATIVEYINQTILPRFLNTDQDFETFQTILYSAAYTAVVCNGVKINLSTRTTRPFKPSWQKRLETKIQKYRSEIARLTQYKHGNRSYRIITAVEAIKSKYQTHAQHENANSEVEHFLDTLKQKLNTAASRLKRYLTCTIRKKQNIQFTNNEKVFYRGLASSNRQNTNTQRQAFPTLDNLRQYWANIWENPLQHNKNAEWSEVVREATHDIPQMDFQFITIDTLLDVIKRTHNWKSPGSDNIHNYWYKKFSFTYPYLHNHINTFIQTPNLMPQYITHGVTYMLPKENNTIDPSKYRPITCLQTIYKLITSCISKTINKHLSQNNIIAEQQKGCTKYSQGCKEQLTIDAITINEACNKKLDIHTMFIDFRIAFDSVPHSWLLHILEIYKINPTIVTFLKHSMKHWKTVLKLKEHSLTLTSEPISILRGIFQGDALSPLWFCLALNPLSTLLNNNNLGYQLKLPDSQFSLTHLFYMDDIKLYATNEFDLFRLADITQQFSDDICMQFGVDKCNILSISKGNIVSNRYVLGTGETIEPMDDMTTYKYLGFRQSRKILQKETKIELTKKFRIRLNLILKSHLNSKNLIKAINTFAIPILIYSFGIINWTQTELKNLQRIINTHLSKHRKHHPKSSIERLILPRKEGRRGLIHIQNLHNKLITTLRNYFHSKSQHSELHKHITEIDNKLTPLNLRNKQSQPNEIVINTEHNITKWSAKSLHGRHRSDLGQIYVDKEKSNEWLSRGELFPETEGFMVAIQDQIKTTRNFKKFIIKDPNQTSDLCRHCHTASETIQHITGACKFLVQSDYKHRHDQVAAIVHQHLAHQNNFIDKKTPYYKYKPDTILDNRTCKIYWDRTIITDKTIHYNRPDITVHDKTNNIVYIIDIAIPNTHNIQSTIAEKLTKYQDLAIELKTQWRARTVHIVPIVLSSTGVIPKTLSHSLNILHMPPHSLHLLQKATILNTCRITRKFLTSSSVSSAYTI

SEQ ID NO: 30917 - protein, 731 aa, Spilarctia lutea
MAFEHITIDTFIGVIKHSHNWKSPGSDNLHNYWYKKFTRIHPYLHYHLNTFIQSPNLMPDYITHGVTYMLPKEPNTEDPSKFRPITCLQTVYKVLTACISQTIYAHLSQNDILSEQQKGCRKNSQGCKEQLTIDAITINEAYRKKLNIHTMFIDYRKAFDSVPHSWLLYILRLYKINPIIISFLQSSMQRWQTSLKLKTESTDITTEPIRIMRGIYQGDALSPLWFCLALNPLSSLLNNSNAGYNLVTTDTRVSLTHLFYMDDIKLYATNKSDIFLLADITQQFSKDICMEFGVDKCKVLSINKGIIESNRYILESGEDIEPMDSYSIYKYLGFKQSRRILQKETKADLVDKFRYRLKLILKTHLNAKNIIKAINTFAIPILTYSFGIINWSQTDLKNLQRTINTHMTKSRKHHPKSSIERLTLPRSEGGRGLIDIQNLHNKQIAILRNYFHTKSLTSSLHKQITDIDNKLTPLNLLNRHTQHNETLTTVDQKITKWSDKSLHGRHRTDLSQDYVDKEKSNEWLKKGELFPETEGFMLAIQDQVIITRNFKKTIIRDSNRHDQVAAIVHQHLAHNYNFISQKIPYYKYKPDTILENRACKIYWDRTILTDKTIHYNRPDITVHDKITKAIYIIDIAIPNSHNLQSTISEKLSKYQDLAIELKTQWKVNTVHIVPIVISSTGIVPKTLTQNLELLHMPSHTFYLLQKATILNTCRITRKILTSSSISITYSI

SEQ ID NO: 30918 - protein, 1334 aa, Spilosoma lubricipeda
MRTIGGAELNRRAPTDKHATADIISHHTTSSTHSSPTSSLFASPASSPLSFETHINSNRTSSTTSPLTVDVVQEANADFTGPTTAKTRARRKWTTEMNMFIWRTYLTTSRLETQTRGYLDPLHKAFTETYPTMNASKQSVGDQRRAIINNKLLPINTLDTIRLEVNSYLTQNSEPIPTLTQASTRMRWSSDINETILRIYYEITELETNMTAHRKKLHDKFIQTYPHLSHISEQRLSDQRRAIVNNRMVSEHRIRQIKNDIQAQIQSSHTTAQLNTTNSQTDFSQYISNPIQRNTCDEADLSLSQTTIYINAEDSSRVPTNSQINQDIINQQFHAALDSFKNSDPTSRPYLPRQKPSKRLALTVEHLNNNILPNFLSREQDFATFQTIIYSAAYTATVCNRIKVNTSKTNSKDFKPAWQRRLETKIEKFRSEIARLTQYIHGNRSNRIINAVEVIKNKYRIHAQHENNNTELEHFLDTLKQKLNAAASRLKRYLTCTARKKQNSQFSQTEKTFYRTLTSNSRNTNTQEQRTPTSESLHRFWANIWQNATQHNANANWIHTINEITSQIPVMDFEHITIDTFIRVIKHSHNWKSPGSDNLHNFWYKKFTCIHPYLHYHLNTFIQSPHLMPDYITHGVTYMLPKEPNTEDPSKFRPITCLQTVYKILTACISQTIYAHLSENDILSEQQKGCRKNSQGCKEQLTIDAITINEAYSRKLNIHTVFIDYRKAFDSVPHSWLLYILRLYKINPIIITFLQSSMQRWQTTLKLKTKSTDITTEPIRIMRGIYQGDALSPLWFCLALNPLSSLLNNSNAGYNLVTTDTRVSLTHLFYMDDIKLYATNKSDIFLLADITQQFSKDICMEFGVDKCKILSINKGIIESNRYILESGEDIEPMDSYSVYKYLGFKQSRRILQKETKEDLVNQFRHRLKLILKTHLNSKNIIKAINTFAIPILTYSFGIINWSQTDLKNLQRTINTHMTKDRKHHPKSSIERLTLPRSEGGRGLIDIQNLHNKQITTLRHYFHTKSLTSPLHKQITDIDNKLTPLNLQDPHIQHNETLTTVDQKIKKWADKSLHGRHRTDLSQDYVDKEKSNEWLKKGELFPETEGFMLAIQDQVIITRNYKKFIIRDPNQTTDICRHCNSAPETIQHITGACKSLAQTDYKHRHDQVATIVHQHLAHNYNFISQKIPYYKYKPDTILENRACKIYWDRTILTDKTIHYNRPDITVHDKITKSIYIIDIAVPNSHNLQSTISEKLSKYQDLAIELKTQWKAHTVHIVPIFLSSTGIVPKTLTQNLELLHMPSHSIYLLQKATILNTCRITRKFLTSSSISSTYSI

SEQ ID NO: 30919 - protein, 1364 aa, Spilarctia lutea
MHTTETYVANRARVTLLHGDMNNRVYNLRSLPGGRRGASGADAGCSSMRTIGGAELNRRAPTDKHTTADVISHRISSSTHSSPTSSIFPSPASSPLSFETHINSNHTSSTTSPLTVDVVQEANADVTGPTTAKSRARRKWTIEMNMFIWRTYLITSRLETQTRGYLDPLHKAFTEKYPTMNASKQSLGDQRRAIINNKLLPINTLDAIRLEVNSFLTQNTEPIPTLTQASSRMRWSSDINETILRIYYEITELETNMTAHRKKLHDKFIHTYPHLSHISEQRISDQRRAIVNNGMVSADRIRQIKNDIQAQIQSSHTTDQLNTTYSQTDLSQHVSSTQINSEDSLHAPTNSFIIDGDNINQEFHEALETFKNTDPTSRSYLPRQRPSKRLALIVEHLNNNILPNYLSRDQDFATFQTILYSAAYTATVCNCIKLNCNKTSSKEFKPAWRRRLETKIEKFRSEIARLTQYIHGNRSNRIINAVEVIKNKYRIHAQHENMNTELEHFLDTLKQKLNAAASRLKRYLTCTARKKQNHQFSQTEKTFYRTLTSNAQNTNTQEQRSPTSESLHRFWANIWENTTQHTENANWIHTINEMSSHVPVMEFGQITIDTFARVINHSHNWKSPGSDNLHNYWYKKLTCIHPYLHYHLNTFIQSPHLMPDYITHGVTYMLPKEPNTEDPSKFRPITCLQTVYKILTACIGQTIYAHLSENDILAEQQKGCRKNSQGCKEQLTTDAITINEAYRKKLNIHTMFIDYRKAFDSVPHSWLLYILRLYKINPIIITFLQSSMQRWQTVLKLKNESTNITTEPVRIMRGIYQGDALSPLWFCLALNPLSSLLNISNAGYNLVTTDTRVSLTHLFYMDDIKLYATNKSDIFLLADITQQFSKDICMEFGVDKCKILSINKGKLESNRYILQSGEDIQPMDSYSFYKYLGFKQSRRILQKDTKEELVNKFKFRLKLLLKTHLNSKNIIKGINTFAIPILTYSFGIINWTQTDLKNLQRTINTQMTKYRKHHPKSSIERLTLPRNEGGRGLIDIQNLHNKQITILRNYFHTKSLTSPLHKQITDIDNKLTPLNLQDRHTQLNETLTTVEQKITKWPDKSLHERHRTDLSQNYVDKEKSNAWLKKGELFPETEGFMLAIQDQVIITRNYKKFIIRDPTQTIDLCRHCNSAPETIQHITGACKTLAQTDYKHRHDQVAAIVHQHLAHNYNFINQKIPYYKYKPDTILENGACKIYWDRTILTDKTIHYNRPDITVHDKVTKVIYIIDIAIPNSHNLQSTISEKLSKYQDLAIELKTQWKVNTVHIVPIVLSSTGIVPKTLAQNLELLHMPSHYIYLLQKATILNTCRITRKFLTSSSISSTYSI

SEQ ID NO: 30920 - protein, 1382 aa, Spilosoma lubricipeda
MHTIETYVANKARVTLKNGDMNNRVYNLRSLPGGRRGASGADAGCSSMRTIGGAELNRRAPTDKHATADIISHHTTSSIHSSPTSSLFASPASSPLSFETHIHSSRTSSTTSPLTVDVVQEANADFTGSTTAKTRARRNWTTEMNMFIWRTYLITSRLETQTRGYLDPLHKAFTEKYPTMNASKQSVGDQRRAIINNKLLPINTLDAIRLEVNSYLTQNAEPIPTLTQASTRMRWSSDINETILRIYYEITELETNMTAHRKKLHDKFIQTYPHLSHISEQRLSDQRRAIVNNKMVSEDRIRQIKNDIQAQIQSSHTIAQLNTTNSQTDLLQHISYPIQRNTCDEADLSLSQTTIDINAEDSSHVPTNSHIIDQDIINQQFHAALDSFKNSDPTSRPYLPRQKPSKRLALTVEHLNNNILPNFLSREQDFATFQTIIYSAAYTATVCNRIKVNTSRTNSKEFKPAWQRRLETKIEKFRSEIARLTQYIHGNRSNRIINAVEVIKNKYRIHAQHENNNTELEHFLDTLKQKLNAAASRLKRYLTCTARKKQNSQFSQTEKIFYRTLTSNSRNTNTQEQRAPTSESLHRFWANIWQNATQHNANANWIHTINEITSQIPVMDFEHITIDTFIRVIKHSHNWKSPGSDNLHNFWYKKLTCIHPYLHYHLNTFIQSPHLMPDYITHGVTYMLPKEPNTEDPSKFRPITCLQTVYKILTACISQTIYAHLSENDILSEQQKGCRKNSQGCKEQLTIDAITINEAYRRKLDIHTMFIDYRKAFDSVPHSWLLYILRLYKINPIIITFLQSSMQRWQTTLKLKTKSTDINTEPIRIMRGIYQGDALSPLWFCLALNPLSSLLNNSNAGYNLVTTDTRVSLTHLFYMDDIKLYATNKSDIFLLADITQQFSKDICMEFGVDKCKILSINKGIIESIRYILESGEDIEPMDSYSIYKYLGFKQSRRIHQKETKEDLVNKFRHRLKLILKTHLNSKNIIKAINTFAIPILTYSFGIINWSQTDLKNLQRTINTHMTKERKHHPKSSIERLTLPRSEGGRGLIDIQNLHNKQITTLRHYFHTKSLTSSLHKQITYIDNKLTPLNLQDPHIQHNETLTTVDQKITKWADKSLHGRHRTDLSQDYVDKEKSNEWLKKGELFPETEGFMLAIQDQVIITRNYKKFIIRDTNQTTDICRHCNSAPETIQHITGACKSLAQTDYKHRHDQVATIVHQHLAHNYNFISQKIPYYKYKPDTILENRACKIYWDRTILTDKTIHYNRPDITVHDKITKSIYIIDIAVPNSHNLQSTISEKLSKYQDLAIELKTQWKAHTVHIVPIVLSSTGIVPKTLTQNLELLHMPSHSIYLLQKATILNTCRITRKFLTSSSISSTYSI

SEQ ID NO: 30921 - protein, 1355 aa, Autochton oryx
MSKRVYNLRPLPGGRRGASGADAGCSSMRTIGGEELNRRTLTGKNATADIIISHPNNPSNSSPLSSLFPSPISSPNPFQNSSYPDDSLSIPLSSSSSSLSSPLTIDVVQEVTASNNGPTIAKSRARRKWTIEMNMFIWRTYLIASRLETHTRGYLDLLHKAFIEKFPEMNASKQSIGDQRRAIVNNKLLPTTVLQEIKEEVTKYLQENEPSLPTLTRASARMRWSDDINETILRIFYEITELETNMTAHRKKLRDKFIQIYPHLTHLSEQRISDQRRVIVNNKMLSEAKILEIRHDVERELQKSNTLTQVNENHPQNTLMQPIHIESTQIPINGDIPLISPSTTNINFAEQEIHTNNNSNFIDHEKIKQNFNLALDTFKNTDPTLRPYLPRQKPSKKLALIVEYVNKNVLPYFLTNKQDFITFQTILYSAAYTVVICNGTKINFSGTVKRNVKPPWQRRLENKIDTFRAEIARLTQYIRGNRGNRIKTAVDNIKRKYQIHAQYENINTDLEHFMDTLKQKLSAASSRLKRYITCTTRKKHNSQFTNTEKSFYRNLTYNNQNLSRQNKVPTPENLHKYWSNIWEKPVQHNLEAEWINVIKEATIHIPEMNFEHITADIFVDVIKNTHNWKSPGTDNIHNYWYKKFTSIYPYLHKHLNTFIHSPHLIPQYITHGVTYMLPKNTITQDPANYRPITCLQTVYKILTACISKTIYSHLEYYDILAEQQKGCRKNSQGCKEQLTIDAIVINEAYSKKLDIHSMFIDYRKAFDSVPHSWLLQILRIYKINPQIIRFIEVSMQNWKTILKLRQHSSTITTDPIRILRGIFQGDALSPLWFCLSLNPLSTLLNNSNSGYNLITTDNRFSLSHLLYMDDIKLYASNINDLYLLADLAQQFSTDICMEFGVDKCKILSIQKGHIENNKYSLEDGQDIEPMDENSTYKYLGFKQSRKLLHKATKIEITNKFKNRLNLVLKTHLNSRNMIKAINTFCIPILTYSFGIINWSQTDLKNLQRTINTHMTKHRKHHPKSSIERLTLPRREGGRGITDIQNLHNKQISTLRSYFYTKSQHSLLHKQVTEIDSKLTPLNLKNTNTQFNEVLVTIDQKIAKWANKSLHGRHRTDLSQNYVDKEKSNDWLMKGELFPETEGFMLAIQDQIITTKNYRKYIIKDNNQLSDSCRQCNSAAETIQHITGACKALVQSDYKHRHDQVAAIVHQHLAHMYNFIHKKNPYYKYKPATILENQTTKIYWDRTIITDKTIHYNRPDIILHDKKTYTVYIIDIAIPNSLNIELTISEKLSKYKELTIEIKTQWKVHKVHIVPIVVRGYCFYHLKNLVEPLFFMELVTDAHGWQWPLTIRWTAD

SEQ ID NO: 30922 - protein, 1381 aa, Spilosoma lubricipeda
MHTIETYVANKARVTLLNGDMNNRVYNLRSLPGGRRGASGADAGCSSMRTIGGAELNRRASTEKHTTADVISHHITSSTHSSPTSSLFPSLASSPLSFETIINTSRTSSTTSPLTVDVVQEANADVTGPTTAKSRARRKWTTEMNMFIWRTYLITSRLETQTRGYLDPLHKAFTEKYPTMNASKQSVGDQRRAIINNKLLPINTLDAIRLEVTSYFTQNTEPIPTLTQASARMRWSSDINETILRIYYEITELETNMTAHRKKLHDKFIQTYPHLSHISEQRLSDQRRAIVNNGMVSEDRIREIKNDIQAQIQSLHTTDQINTTYSQTDLSPHVYSTQRNTIEEADLSLSQATTHINAEDPIQVSTNSHIIDQDNINQQFYAALDTFKNTDPTSRPYLPRQKPSKRLALIVEYLNNTILPNFLSREEDFATFQTILYSAAYTATVRNGIKVNSHKTSSREFKPAWRRRLETKIEKFRSEIARLTQYIQGNRSNRIINAVEVIKNKYRIHAQHENINTEIEHFLDTLKQKLNAASSRLKRYLTCTARKKQNNQFSQTEKLFYRTLTSNSQNTNTQELRSPTSESLHRFWANIWENTTQHNHNANWIHTINEISSHVPVMEFEQITIDTFARVIKHSHNWKSPGSDNLHNYWYKKFTCIHPYLHYHLNMFIQSPHLMPDYITHGVTYMLPKEPNTGDPSKFHPITCLQTVYKILTACITQTIYAHLSENDILAEQQKGCRKNSQGCKEQLTIDAITINEAYRKKLNIHTMFIDYRKAFDSVPHSWLLYILRLYKINPIIITFLQSSMQRWQTVLKLKNESTNITTEPIRIMRGIYQGDALSPLWFCLALNPLSSLLNISNAGYNLVTTDTRVPLTHLFYMDDIKLFATNKDDIFLLADITQQFSKDICMEFGVDKCKILSINKGKIESNRYILESGEDIQPMDSYSFYKYLGFKQSRRILQKETKEDLINKFKHRLKLILKTHLNSKNIIKAINTFAIPILTYSFGIINWTQTDLKKLQRTINTQMTKDRKHHPKSSIERLTLPRNEGGRGLIDIQNLHNKQITILRNYFHIKSLTSPLHKQIIDIDKKLTPLNLHDRHTQLNETLTTVEQKITKWAGKSLHGRHRTDLSQDYVDKEKSNEWLKKGELFPETEGFMLAIQDQIIITRNYKKFIIRDPTQTIDLCRHCNSAPETIQHITGACKALAQTDYKHRHDQVATIIHQHLAHNYNFISHKIPYYKYKPDTILENRACKIYWDRTILTDKTIHYNRPDITVHDKVTKVIYIIDIAIPNSHNLQSTISEKLSKYQDLAIELKTQWKVNTVHIVPIVLSSTGIVPKTLTQNLELLHMPPYSIYMLQKATILNTCRITRKFLTSSSISSTYSI

SEQ ID NO: 30923 - protein, 1361 aa, Schrankia costaestrigalis
MSLATRGNNMENNNSQRYNLRSLSSRNRVTPIATKRRNSVELSTNNVIQYTDSLTNSSPRSSLFPSPNSSLKSYHIQSEFNSVSSHSSPSSPLAVDVAQEAVTADVTGPATVKSRARRRWTIDMNMFIWRTYLIITKLETITRGYLDPLHNSFTAKYPEMNASKQSIGDQRRAIINNKLLPLSTLNEIKNEVAIYLEHNETPSITLTQSTQRMRWSNDVNETILRIYYEITELETNTTAYRQKLHEKFIETYPHLSHLSEQRISDQRRAIINNKMISETRINEIKNNVRTRLPTFDTVRSLNTHQFENSSQPDTTTLSELNAEEIDFSITQDTINNTQQNPNNTNSAHTPHHNDIDEQFNLSLDTFINTNPTTRPYLPKQKPSRKFATIVEYINQTILPRILNTDQDFETFQTILYSAAYTAVVCNGAKINLSTRTTTPFKPSWQKRLETKIQKYRSEIARLTQYKHGNRSYRIITAVEAIKSKYQTHAQYENANSEVEHFLDTLKQKLNTAASRLKRYLTCTIRKKQNVQFTNNEKVFYRGLTSSNRQNTNTQGQAFPTLDNLRQYWANIWENPLQHNENAEWSEVVREATHDIPQMDFQFITIDTLSDVIKRTHNWKSPGSDNIHNYWYKKFSFIYPYLHNHINTFIQTPNLMPQYITHGVTYMLPKENNTIDPSKYRPITCLQTIYKLVTSCISKTINKHLSQNNIIAEQQKGCTKYSQGCKEQLTIDAITINEACNKKLDIHTMFIDFRKAFDSVPHSWLLHILEIYKINPTIITFLKHSMKHWKTVLKLKENSLTLTSEPISILRGIFQGDALSPLWFCLALNPLSTLLNNNNLGYQLKLPDSQFSLTHLFYMDDIKLYATNEIDLFRLADLTQQFSDDICMQFGVDKCNILSISNGDIVSNRYVLGTGETIEPMDDMTTYKYLGFRQSRKILQKETKIELTKKFRVRLNLILKSHLNSKNLIKAINTFAIPILIYSFGIINWTQTELKNLQRIINTHLTKHRKHHPKSSIERLILPRKEGGRGLIHIQNLHNKLITTLRNYFHSKSQHSDLHKHIAEIDNKLTPLNLKNKQSQPNEIVINAEHNITKWSAKSLHGRHRSDLGQIYVDKEKSNEWLTRGELFPETEGFMIAIQDQIITTRNFKKFIIRDPNQTSDLCRHCHAASETIQHITGACKFLVQSDYKHRHDQVAAIVHQHLAHQNNFIDKKTPYYKYKPDTVLDNRTCKIYWDRTIITDKTIHYNRPDITVHDKTNNIVYIIDIAIPNTHNIQSTIAEKLTKYQDLAIELKTQWRARTVHIVPIVLSSTGVIPKTLSHSLNILHMPPHSLNLLQKATILNTCRITRKFLTSSSVSSAYTI

SEQ ID NO: 30924 - protein, 1361 aa, Schrankia costaestrigalis
MSLATRGNNMENNNSQRYNLRSLSSRNRVTPIATKRRNSVELSKNNVIQYTDSLTNSSPRSSLFPSPNSSLKSYHIQSEFNSVSSHSSPSSPLAVDVVQEAVTADVTGPATVKSRARRRWTIDMNMFIWRTYLIITKLETITRGYLDLLHNSFTTKYPEMNASKQSIGDQRRAIINNKLLPLSTLNEIKNEVAIYLEHNETPSITLTQSTQRMRWSNDVNETILRIYYEITELETNTTAYRQKLHEKFIETYPHLSHLSEQRISDQRRAIINNKMISETRINEIKNNVRTRLPTFDTVRSLNTHQFENSSQPDTTTLSELNAEEIDFSITQDTINNTQQNPNNTNSAHTPHHNDIDEQFNLSLDTFINTNPTTRPYLPKQKPSRKFATIVEYINQTILPRILNTDQDFETFQTILYSAAYTAVVCNGAKINLSTRTTTPFKPSWQKRLETKIQKYRSEIARLTQYKHGNRSYRIITAVEAIKSKYQTHAQYENANSEVEHFLDTLKQKLNTAASRLKRYLTCTIRKKQNIQFTNNEKVFYRGLTSSNRQNTNTQGQAFPTLDNLRQYWANIWENPLQHNENAEWSEVVREATHDIPQMDFQFITIDTLSDVIKRTHNWKSPGSDNIHNYWYKKFSFIYPYLHNHINTFIQTPNLMPQYITHGVTYMLPKENNTIDPSKYRPITCLQTIYKLVTSCISKTINKHLSQNNIIAEQQKGCTKYSQGCKEQLTIDAITINEACNKKLDIHTMFIDFRKAFDSVPHSWLLHILEIYKINPTIITFLKHSMKHWKTVLKLKENSLTLTSEPISILRGIFQGDALSPLWFCLALNPLSTLLNNNNLGYQLKLPDSQFSLTHLFYMDDIKLYATNEIDLFRLADLTQQFSDDICMQFGVDKCNILSISNGDIVSNRYVLGTGETIEPMDDMTTYKYLGFRQSRKILQKETKIELTKKFRVRLNLILKSHLNSKNLIKAINTFAIPILIYSFGIINWTQTELKNLQRIINTHLTKHRKHHPKSSIERLILPRKEGGRGLIHIQNLHNKLITTLRNYFHSKSQHSDLHKHIAEIDNKLTPLNLKNKQSQPNEIVINAEHNITKWSAKSLHGRHRSDLGQIYVDKEKSNEWLTRGELFPETEGFMIAIQDQIITTRNFKKFIIRDPNQTSDLCRHCHAASETIQHITGACKFLVQSDYKHRHDQVAAIVHQHLAHQNNFIDKKTPYYKYKPDTVLDNRTCKIYWDRTIITDKTIHYNRPDITVHDKTNNIVYIIDIAIPNTHNIQSTIAEKLTKYQDLAIELKTQWRARTVHIVPIVLSSTGVIPKTLSHSLNILHMPPHSLNLLQKATILNTCRITRKFLTSSSVSSAYTI

SEQ ID NO: 30925 - protein, 1362 aa, Telegonus anausis
MSKRVYNLRPLPGGRRGASGAGAGCSSMRTIGGEELNRRTPTEENATADIISHPNTSTLSSPLSSLFPSPTSSPNTFHDPFYSDHSSPVPLSSSSSSPLTVDVVQEACASHDGPTTAKSRARRKWTVEMNTFIWRTYLITTKLETHTRGYLDPLHKAFIEKYPEMKASKQSIGDQRRAIVNNKLLSTTTLQEIKDEVANFLQQNEQPHPTLTQSTARMRWSDEINETILRIYYEITELESNMTAHRKKLHDKFILIYPHLAHLSEQRISDQRRVIINNNMLNEAKILAIRHDVETQLRKPDTLTQLNENHLQNTSSEINTDRTQTTAKENTSRLSNVQMTEQNIHTNNTNFIDQEKIKYNFNLALDTFKNIEPTLRPFLPRQKPSKKLAVIVDYINKNILPNILSTDQDFMTFQTILYSAAYTTVTCNGTKIHSIRVVRKDKRPPWQRRLESKIDIYRAEIARLTQYIRGNRSNRIQTAVEKIKKKYQVHAQYENINTDLEHFMDTLKQKLNAAASRLRRYITCTARKKQNTQFLNTEKAFYRDLITNSQKSNTLPSRAPTPENLHSFWSNIWENPIQHNVKADWINVINEETKNIPEMEFEHISIDTLLHVIKSTHNWKSPGSDNIHNYWYKKFTSIHLYLHHHLNTFIRSPHLMPQYITHGVTYMLAKETNTDDPAKYRPITCLQTIYKILTSCISSIINSHLTDHNILAEQQKGCRKNSQGCKEQLTIDAIVINEAYSKKRDIHSMFIDYRKAFDSVPHSWLLQILHLYKINPNIIHFIESSMQNWKTVIKLKQHSTTITTDPIRILRGIFQGDSFSPLWFCLALNPLSSLLNKTNAGYILKTTSNRFTLTHLLYMDDIKLYAGNKHDLFQLADLAQQFSTDICMEFGVDKCKILSIHKGQIENNRYTLETGQNIDPMDQNSTYKYLGFRQSRKIQHKETKAEITNKFKNRLNLVLKSHLNARNIVKAINTYCIPILTYSFGIINWSQTDLKNLQRTINTHMTKHRKHHPKSSIERLTLSRKEGGRGIIDVHNLHNKQISTLRHFFHIKSQHSLLHKQVTQIDTKLTPLNLRDTNTQSNETLITIDQKVAKWAGKSLHGRHRTDLSQNYVDKERSNDWLSRGELFPETEGFMLAIQDQVIVTKNYRKHIIKDTNQLSDSCRHCNSAPETIQHITGACKSLVQTDYKHRHDQVAAIVHQHLAHLYKFIKKKHPYYKYKPATILENQTSKIYWDRTIITDKTIHYNRPDITLHDKKSNIIYIIDIAIPNSHNIQSTISDKLSKYQDLAIELKTQWKAHVVHIVPIVLSSTGIIPKTLTQSLDILRMPAHSQHLLQKATILNTCRITRKFLTSSSVSSTYLI

SEQ ID NO: 30926 - protein, 1142 aa, Urbanus evona
MRWSDDINETILRIYFEITELETNMTAHRKKLYDKFILTYPHLAHLSEQRISDQRRVIVNNNMLTEAKILAIRHDVETQLRQSNTLTQSNENHLQNTSLDLITDITQTATNENTSRASQVQRAEQNIHSNLIDHEKIKHKFNLALDTFKNTQPTLRPFLPRQKPSKKLAVIIDYINKNILPSILNSDQDFMTFQSILYSAAYTAVICNGTKIQSIRTLNKDKIPPWQRRLERKIDILRAEIARLTQYIRGNRSNRIEIAVEKIKKKYQVHAQYENINTELEHFMDTLKQKLNAASSRLRRYITCTSRKKQNSQFSNTEKAFYRGLTFNNQKSIMLQNRVPTPENLHKFWSDIWENPVHHNVEADWMNVINEETKHIPEMKFEDISIDTLLHVIKGTHNWKSPGSDNIHNYWYKKFTSIHLYLHHHLNTFIRSPHLMPQYITLGVTYMIPKEPNTEDPAKYRPITCLQTIYKILTACISKTIYTHLIDHDILAEQQKGCRKNSQGCKEQLTIDAIVINEAYTKKEDIHSMFIDYRKAFDSVPHSWLLQTLQIYKINPNIIHFIESTMQNWKTVIKLRQHTTTNNTDPIRIQRGIFQGDSLSPLWFCLALNPLSTLLNKSNAGYNVKTTGSRLTLTHLLYMDDIKLYANNIHDLIQLADLTQQFSSDIRMEFGVDKCKILSIHNGQIESNSYTLETGQNIDPMDPNSTYKYLGFQQSRKIHHKEIRLEITNKFKNRLNLILKTHLNSRNLVKAINTYCIPILTYSFGIINWSQTALKNLQRTINTHLTKHRKHHPKSSIERLTLSRKEGGRGIIDIQNLHNKQITILRHFFHTKSQQSLLHNQVTQIDNKLTPLNLRNTNTQNNEALITNDQKIAKWVGKSLHGRHRTDLSQNHVDKERSNDWLTRGELFPETEGFMLAIQDQVIATKNYRKYIFKDTNQLSDLCRHCNSAPETIQHITGACKSLVQSDYKHRHDQVAAIIHQHLAHMYKFIQKKNPYYKYKPATILENETSKIYWDRTIITDKTIHYNRPDITLHDKKSNTIYIIDVAIPNSHNIQATISEKLSKYQDLAIELKTQWKAHIVHIVPIVLSSTGIIPKTLTQSLDILRMPAHSHHLLQKATILNTCRLTRKFLTSSSISSTYFI

SEQ ID NO: 30927 - protein, 1362 aa, Astraptes apastus
MSKRVYNLRPLPGGRRGASGAGAGCSSMRTTGGEELSRRTPTVKNATADTISHPDHSSNSSPLSSLFSSPISSPNPYQNPSSFDHSSSVSSSSSSPLTVDVVQEANASHNGPTIVKSRARRKWTIEMNKFIWRTYLITSQLETQTRGYLDPLYKAFIEKYPEMHASKQNIGDQRRAIVNNKLLSTTILQETKDEVTKFLQQTEQPLPTLTPASVRMRWSDEINEKILRIYYEVTELETNMTAHRKKLHDKFIETYPHLAHFSEQRISDQRRVIVNNKMLSEVRILQIRQDVETQIQRSNTYIQINQNQSQNSSLRQIADTTQHDEVPLPLQADLHMNFAEQEIHTNNYSNLIDHDTIKKQFNLALETFTHTEPTLRPYLPRQKPSKKLALTIDYINKNILPSILTTDQDFITLQTILYSAAYTVVLCNGTKINSSRTFRSDVRPPWQRRLENKIGTFRSEIGRLTQYIHGNRSNRIITEVEKIRRKYQVHSQYENINTESEHFLDTLKQKLNAASSRLRRYVTCTARKRQNTQFTNTEKNFYRSIAPNNQNKNTQESGIPTIENLHKFWSNIWENPVQHNLEAEWLNIIKESTKNIPAMNFEQITLDTFVNVIKGTHNWKSPGTDNIHNYWYKKFTSIYPYLHKHLNTFIQSPHLMPYYITHGVTYMLPKDINTEDPAKYRPITCLQTIYKIFTSCISKTIYAHLSQNNILAEQQKGCRKNSQGCKEQLTIDAVVISKAFTEKQDIHTMFIDYRKAFDSVPHSWLLHILRLYKINPSIINFIESCMQNWKTILKIKQHSSTMTTDSIRILRGIFQGDALSPLWFCLSLNPLSTLLNNSNAGYNLINTYDRLLLTHLLYIDDIKLYASNIDDLFQLADLVQQFSTDICMEFGVDKCKILSIYKGHIENNTYALETGQDIEPLDENSSYRYLGFKQSRKLLQKETKTEITNKFKNRLNLILKTHLNSRNIMKAINTFCIPILTYSFGIIGWSQTDLKNLQRIINTHLTKHRKHHPKSSIERLTLPRKEGGRGIIDIKNLHNKQISILRHYFHTKAHDSLLHKQVVEIDNKLTPLNLRNRNSQHNETLITANQKVAKWAGKSLHGRHRTDLSQTYVDKEKSNDWLMRGELFPETEGFMLAIQDQIIATKNYRKYIIKDTNQLSDLCRRCNSASETIQHITGACKALVQSDYKHRHDQVAAIVHQHLAHKYKFILKKDPYYKYRPATVLENHTTKIYWDRTIITDKTIHFNRPDITLHDKKNNTVYIVDIAIPNSHNIQSTISEKLSKYQDLAIELKTQWKAHIVHIVPIVLSSTGIIPKTLTQSLDILGMPAHSHYLLQKATILNTCRITRKFLTASSVSSTYFI

SEQ ID NO: 30928 - protein, 1120 aa, Astraptes hopfferi
MTAYRKKLHDKFILTYPHLAHLSEQRISDQRRVIINNNMLAETKILAIRHDVETKLRKSNILTQLNENHLQNTSSEIITDTTQTTKENTSRLTDVQMAEQNIHTNNSNLIDQEKIKYNFNLALDTFKNIEPTLRPFLPRQKPSRKLAVIVDYINKNILPNILSRDQDFMTFQTILYSAAYTTVTCNGTKIHPIRAHKKDKRPPWQRRLESKIDTYRAEIGRLTQYIRGNRSNRLQTAVEKIKNKYKVHAQYENINTDLEHFMDTLKQKLNAAASRLRRYITCTARKKQNTQFLNTEKAFYRSLMTNNQNSNTLQSRAPTPENLHSFWSNIWENPIQHNVNAYWINIINEETKNIPEMEFEHISIDTLLHVIKSTHNWKSPGTDNIHNYWYKKFTSIHLYLHHHLNTFIRSPHLMPQYITHGVTYMLAKETNTDDPAKYRPITCLQTIYKILTSCISSTIYSHLTDHNILAEQQKGCRKNSQGCKEQLTIDATVINEAYSKKRDIHSMFIDYRKAFDSVPHSWLLQILHFYKINPSIIHFIESSMQNWKTVIKLKQHSTTITTDPIRILRGIFQGDSLSPLWFCLALNPLSTLLNKTNAGYILKTTSNRFTLTHLLYMDDIKLYASNIHDLFQLADLAQQFSTDICMEFGVDKCKILSIHKGQIENNSYTLETGQNIDPMDQNSTYKYLGFRQSRKIQHKETKAEITNKFKNRLNLVLKSHLNARNIVKAINTFCIPILTYSFGIINWSQTDLKNLQRTINTHMTKHRKHHPKSSIERLTLSRKEGGRGIIDVQNLHNKQISTLRHFFHTKSQHSLLHKQVTQIDIKLTPLNLRDTNTQCNEALITIDQKVAKWAGKSLHGRHRTDLSQNYVDKERSNDWLSRGELFPETEGFMLAIQDQVIATKNYRKHIIKDTNQFSDSCRHCNSAPETIQHITGACKSLVQTDYKHRHDQVAAIIHQHLAHVYKFIQKKHPYYKYKPATILENQASKIYWDRTIITDKTIHFNRPDITLHDKKSNTIYIIDVAIPNSHNIQSTISDKLSKYQDLAIELKTQWKAHIVHIVPIVLSSTGIIPKTLTQSLDILRMPAHSQHLLQKATILNTCRITRKFLTSSSVSSTYLI

SEQ ID NO: 30929 - protein, 1203 aa, Aguna metophis
MNASKQSIGDQRRAILNNKLLSTTTLKEIRDEVATYLQQNEQPLSILTQTSSRMRWSDEINETILRIYYEITELETNMTAHRKKLHNKLIQTYPHLAHLSEQRISDQRRVIVNNKMLPEAKILQIKQSVEKQLKTSNTLTQFNESHPQIPLLQPIINTTLTPTNDEVTSSLSQTTINTSHEEQEIHINSSSKHIDHEKIKQQFSLAFDTFKDTQPTSRPYLPKQRPSRKLALIIDYLNTHILPNILNGDQDYLIFQTIVYSAAYTAVVCNGTKINSTRTPSSDVKPPWQRRLEMKINIFRAEIARLTQYINGNRSNRIILAVETIKRKYQVHAQYENINTHLPHFLDTLKQKLNAASSRLRRYLTCTARKKQNTLFSNSEKFFYRSLTSDNQNSNKQQCKVPRAEDLHTFWSGIWGNPVHHNPKSEWINVINETTKHIPIMNFEHITIDTFINVIKNTHNWKTPGTDNIHNYWYKKLTSIHPYLHKHLNTFIQSPSLMPEYITQGVTYMLPKETDTEDPANYRPITCLQTIYKILTSCICKTIYSHLSDHAILVEQQKGCRKFSQGCKEQLTIDAIVINEAYTKEQDIHSMFIDYRKAFDSVPHSWLLHVLRLYKINPNIINFLKISMQNWQTILKVKQNSSIIATDSIRILRGIFQGDALSPLWFCLALNPLSTLLNNSNVGHNLNTIDRRYSLTHLLYMDDIKLYASNIDNLFQLADLAQEFSTDICMEFGVDKCKILSIHNGAIESNSYALQTGHAIEPMDENSTYKYLGFKQSRKILHKQTKSEITNKFINRLNLVLKTHLNSKNMVKAINTFCIPILTYSFGIIKWSQTDLKKLQRTVNTHMTKHRKHHPKSSIERLTLPRKEGGRGLINIQNLHNKQITTLRHYFHTKSLKSPLHKQVTDIDNKLTPLNLRNRNTQHNEVLITADQKLAKWAGKSLHGRHRTDLSQNYVDKDKSNDWLMKGELFPETEGFMLAIQDQIIATKNYRKYIIKDTNQLSDLCRHCNSAPETIQHITGACKSLVQSDYKHRHDQVAAIIHQHLAHRYNFIIKKNPYYKYKPETILENQTCRIYWDRTIITDKTIHYNRPDITLHDKKSNTVYIIDIAIPNTHNVQSTISEKLSKYQDLAIELKTQWKAHAVHIVPIVLSSTGIVPRTLNQCLNILNMPLNSHQLLQKAIILNTCRITRKFLTSSISSTYFI

SEQ ID NO: 30930 - protein, 1364 aa, Cecropterus takuta
MNKRVYNLRPLPGGRRGASGADARCSSMRTIGGEELNRRTPTEKNATAGIISHPNYSTNSSPLSSLFPSPSSSPNPFHNPSYSDHSSSLPSSSSSPLTVDVVQEATASHDGPTTAKLRARRKWTVEMNTFIWRTYLITTRLETHMRGYLDPLHKAFVEKYPEMKASKQSIGDQRRAIVNNKLLSAATLQEIKYDVANFLQKDEQPFPTITQASTRMRWSDDINETILRIYYEITDLETNMTAHRKKLHDKFIQTYPHLAHITEQRISDQRRVIVNNKMISEAKILEIRHDVETKLRTFNTPSQNINEHHLHNICQSVTNTTQITTNEDSSLLSQVQMMEPDIHANNHTSNNNLIDHEKIKQHFNLALDNFKNTDPTLRPFLPRQKSSKKLASIVDYINKNILPNILCSDQDFMEFQTVMYSAAYTTVICNGAKIYSNSTHGKDKRPPWQRRLESKIAIIRAEIARLTQYSRGNRSNRIKTAVDKIKKKYQIHAQYENMNTDLEHFMDTLKQKLNAASSRLKRYIICTTRKKQNAQFSNTEKAFYRGLIPNNHNSNTQENRVPTSEVLHRYWSDIWGKPVQHNEEAEWINAINEETKHIPEMNFEHITIDTLLHVIKGTHNWKSPGTDNIHNYWYKKFTSIHPHLHNHLNTFIRLPHLMPQYITHGITYMLPKETNAEDPAKYRPITCLQTIYKILTACISRTIYSHLIDNEILAEQQKGCRKYSQGCKEQLTIDAIVINEAYSKKLDIHSMFIDYRKAFDSVPHSWLLKILRLYKINPNIIHFIESSMQNWKTVIKFRQHCSTMMTDSIRILRGIFQGDALSPLWFCLALNPLSTLLNNSNAGYILKTTGNQFSLTHLLYMDDIKLYAGNKYNLFQLADLTQQFSTDICMEFGVDKCKILSIHKGQIESNSYVLETGLNIDPMDENSTYKYLGFRQSRKIIQKDTKAEITNKFKNRLNLVLKTHLNARHTVKAINTFCIPILTYSFGVINWSQTDLKNLQRTINTHMSKHRKHHPKSSIERLILPRKEGGRGIIDIQNLHNKQISTLRHFFHTKSQHSLLHRQVTEIDMKLTPLNLRNTNTQPNEALNTIEQKLAKWAGKSLHGRHRTDLSQNYVDKEKSNDWLIRGELFPETEGFMLAIQDQIIATKNYRKYIIKDTNQLSDLCRHCNSAPETIQHITGACKSLAQSDYKHRHDQVAAIVHQHLAYMYKFIKKKNPYYKYKPVTILENQITKIYWDRTIITDKTIYYNRPDITLHDKKSNSVYIIDVAIPNSHNIQSTISEKLSKYQDLAIELKTQWKAHVVHIVPIVLSSTGIIPKTLSQSLDMLHMPRHSHHLLQKATILNTCRITRKFLTSSSISSTYSI

SEQ ID NO: 30931 - protein, 1022 aa, Ectomis pervivax
MIAHRKKLHDKFIQIYPHLGHLSEQRISDQRRAIVNNKMLSEAKILQIKNDVKTQLQVSNPYSHPIHSKSTTSQISTAQTMTHIAFDPSLPQDNHTNKRNYIDHEKLKQEFNLAFDNFKNTEPTSRPYLPRQKPSKKFALIVDYINKNILSEILISDRDFSTFQAILYSAAYTAVVCNGSKINSISTKSKDLRAPWQIRLESKIDKFRAEIARLTQYIHGNRSNRIIRTVEIIKSKYQVHAQYENINTELQHFLDTLKQKLNAAANRLKRYLTCTARKKQNTQFTNSEKAFYRGLTFNNDESRTQESTLPTAETLHKFWSGIWENPVHHNFNAKWITNIEETTKHIPEMNFEHISMDTLTEVIKNTHNWKSPGTDNIHNYWYKKFTNIYPYLHNHLTTFINSPHLMPQYITHGVTYMIPKDTHTEDPAKYRPITCLQTIYKILTACVSKTVYAHLSDHNILAEEQKGCRKNSQGCKEQLTIDAIVLNEAYTKKLDIHNMFIDYRKAFDSVPHSWLLHTLRLYKINPTIINFLQSSMQNWETVLKLKKHSSTITTKSIHIQRGIYQGDALSPLWFCLSLNPLSTLFNTVNAGYYLKTTENRFLLTHLLYMDDIKLYAENIGDLFKLADIAQVFSSDICMEFGVDKCNILSVTKGQIESNKYALESGQNIEPMDENSYYKYLGFNQSRKILQKQTKAEITNKFRNRLNLILKTHLNSRNIVKVINSFDISILTYSFGVINWSQSDLKNLQRIINTHMTKHRKHHPKSSIERLTLPRKEGGRGIIDIQNLHNKQISTLRHYFYTRSQHSLLHKQVTEIDNKFTPLNLRNKSIQPKEILITIDQKVAKWADKSLHGRHRTELSRNYVDVEKSNGWLIKRELFPETEGFLLAIQDQVVATKNYRKYIIKDTNQPSDLCRHCNSAAETIQHITGACKSLVQSDYRHRHDQVAAIVHQHLAHLYNFINKKVSYYKYKPATLLENQSSKIYWDRTIITDKTIHYNRPDITVHDKTNNIVYIIDIAIPNSQ

SEQ ID NO: 30932 - protein, 1236 aa, Cecropterus albociliatus
MNMFIWRTYLIISKLETHTRGYLDSLHKAFIEKYPEMNASKQSVGDQRRAIVNNKLLSTIVLREIKDEVTKHLQQNEQSIPTLTQTAVRMRWSDEINETILRIYYEVTELETNMTAHRKKLHDKFIQTYPHLAHLSEQRISDQRRVIVNNKMLPETKLLQIRHSVETHLQISNTHLTQYNSTNSQNTSLPIRDMTNEDIDPRPSHINVYADLVRHEIHTQTNCSYIDCEKIKQHFNLTLDRFTNTDPTTRPYLPRQKPSKKLAFIVDYLNTQILPNILTINQDFIAFQTIIYAAAYTAVSCNGTKIYYNRKLRSDIRPPWQRRLENKIEIFRAEIARLTQYIRGNRSNKIRTAVEKIRTKYQTHAQYENVNTDLEHFLDTLKQKLNAASSRLRRYVICTARKKQNAQFINTEKAFYRSLAFNNPNFKNSGNRIPTAEKLQKFWGDIWENPAQHNQKANWMNTINETTKDIPDMSFENITTDIFLQVLKSTHNWKSPGTDNIHNYWYKKFTSIHPYLQDHINTFIQSPHLMPQYITHGVTYMLPKDSNTEDPAKYRPITCLQTIYKILTACISKIIYNHLSDHNILAEQQKGCRKNSQGCKEQLTIDAIVINETYKKKQDIHSMFIDYRKAFDSVPHSWLLQILRLYKINLNIVNFLETSMQNWKTVLKINNHSSTITTDPIRILRGIFQGDALSPLWFCLALNPLSTLLNKSNAGYNLKTSSGRFSLTHLLYMDDIKLYASNINDLFTLAGIAEQFSTDICMEFGVDKCKILSIQKGQIQSNTYALETGQDIEPMGENSTYKYLGFKQSRKILQRETKVEITNKFKSRLNLVLKTHLNSRNMVKAINTFCVPILTYSFGIINWSQTELKKLQTIINTHMTKHRKHHPKSSVERLTLPRKEGGRGIIDIQNLHNKQISTLRHYFHIKSQHSLLHKQVTEIDNKLTPLNLKNNNTQPNEALLTVDQKIAKWAVKSLHGRHRTDLSENYVDKEKSNDWLMKGELFPETEGFMLAIQDQIITTKNYRKYIIKDTNQLSDLCRHCNSAPETIQHITGACKSLAQSDYKHRHDQVAAIVHQHLAHMYHFIPNKNPYYKYKPVTILENQNSKIYWDRTIITDKTVHFNRPDITIHDKKNNTVYIIDIAIPNTHNIQSTISEKLSKYQDLAIELKTQWKASIVHIVPIVLSSTGIIPKTLTQSLNILNMPSHSHHLLQKATILNTCRITRKFLTSSSVSATYTI

SEQ ID NO: 30933 - protein, 859 aa, Astraptes talus
MDTLKQKLNAASSRLRRYITCTARKKQNSQFSNTEKAFYRGLICNNQKLNMLQNRVPTPENLHKFWSDIWENPAQHNVEADWMKVINEETKHIPDMKFEHISIDTLLHVIKSTLNWKSPGSDHIHNYWYKKFTSLHVYLHHHLNTFIRTPQLMPEYITLGVTHMLPKESDTEDPAKYRPIACLQTIYKILTACINRTIYSHLVDHDILAEQQKGCRKNSQGCKEQLTIDSIVINEAYSKKENIHSMFIDYRKAFDSVPHSWLLQVLQLYKIHPSIIHFLETTMRNWKTVLKLRQHSNTITTDPIRILRGIFQGDSLSPLWFCLALNPLSTLLNKSKAGYIVKTTGNRFTLTHLLYMDDIKLYASNIQDLIQLADITQKFSSDICMEFGIDKCKILSIHKGQIENNSYTLETGQNIDPMDQNSTYKYLGFRQSRKIHHKEIKAEITYKFKNRLNLVLKTHLNSRNIVKAINTYCVPILTYSFGIINWSQTDLKNLQRTINTHMTKHRKHHPKSSIERLTLSRKEGGRGIIDVQNLHNKQISTLRHFFHIKSQQSLLHKQVTQIDNKFTPLNLRDTNIQSCEALITNDQKIAKWTSKSLHGRHRTDLSQSHVDKERSNDWLTRGELFPETEAFMLAIQDQVIATKNYRKYIIKDTNQLSDLCRHCNSASETIQHITGACKSLVQSDYKHRHDQVAAIVHQHLAHMYKFIRKKNPYYKYKPTTILENQTTKIYWDRTIITDKTIHYNRPDITLHDKKSNTIYIIDVAIPNSHNIQATISEKLSKYQDLAIELKTQWKANIVHIVPIVLSSTGLIPKTLNQSLDILRMPAHSHHLLQKATILNTCRITRKFLTSSSVSSTYFI

SEQ ID NO: 30934 - protein, 1231 aa, Urbanus sp.
MNTFIWRTYLIITKLETHTRGYLDPLHKAFVEKFPEMRASKQSIGDQRRAIVNNKLLSTITLQGIKDEVAIFLQQNVQPHLTLTQSTSRMRWSDDINETIIRIYFEITELETNMTAHRKKLYDKFILTYPHLAHLSEQRISDQRRVIVNNKMLTEAKILAIRHDVETQLRQSNTLTQSNENHLQNTPLEVIADITQTTSNENTSQASQVQRAEHNIHSNLIDHEKIKEKFNLALDTFKDIEPTLRPFLPRQKPSKKLAVIIDYINKNILPNLLNSDQDFMTFQSILYSAAYTAVICNGTKIQFIRTLSKDKRPPWQRRLESKIDILRADIARLTQYIHGNRSNRVKIAVEKIQKKYQVHAQYENINTELEHFMDTLKQKLNAASSRLRRYITCTSRKKQNSQFSNTEKAFYRGLTFNNQKSIMLQNRVPTPENLHKFWSDIWENPVQHNVEADWMNVINEETKHIPEMKFEDITIDTLLHVIKGTHNWKSPGSDNIHNYWYKKFTSIHLYLHHHLNTFIRSPHLMPQYITLGVTYMIPKELNTEDPAKYRPITCLQTIYKILTACISKTIYTHLTDHDILAEQQKGCKKNSQGCKEQLTIDAIVTNEAYSKREDIYSMFIDYRKAFDSVPHSWLLQILQIYKINSNIIHFIESTMQNWKTVIKLRQHTTTIDTDPIRILRGIFQGDSLSPLWFCLALNPLSTLLNKSKAGYNVKSTGNRLTLTHLLYMDDIKLYANNIHDLTQLADLTQQFSSDIRMEFGVDKCKILSIHNGQIESNSYTLETGQNIDPMDPNSTYKYLGFQQSRKIHHKEIRAEITNKFKSRLNLVLKTHLNSRNIVKAINTYCIPILTYSFGIINWSQTVLKNLQRTINTHLTKHRKHHPKSSIERLTLSRKEGGRGIIDIQNLHNKQITTLRHFFHTKSQQSLLHKQVTQIDNKLTPLNLRDTNTQSNEALITNDQKVAKWVGKSLHGRHRTDLNQNHVDKERSNDWLTRGELFPETEGFMLAIQDQVIATKNYRKYIIKDTNQLSDLCRHCNSAPETIQHITGACKSLVQSDYKHRHDQVAAIVHQHLAHMYKFIQKKNPYYKYKPTTILENETSKIYWDRTIITDKTIHYNRPDITLHDKKSNTIYIIDVAIPNSHNIQATISEKLSKYQDLAIELKTQWKAHIVHIVPIVLSSTGIIPKTLTQSLDILRMPAHSHHLLQKATILNTCRLTRKFLTSSSVSSTYFI

SEQ ID NO: 30935 - protein, 1362 aa, Cecropterus toxeus
MSKRVYNLRPLPGGRRGASGADAGCSSMRTIGGEQLNRRTLTGKNATADVISHHTNSSNSSPLSSLFPSPNSSPNPFQNPTYLEPSPSSSSSSSSPLTVDVAQETNVSHNEPTTAKSRARRKWTIEMNMFIWRTYLIISKLETHTRGYLDLLHKAFIEKYPEMNASKQSVGDQRRAIVNNRLLSTTVLREIRDEVTKHLQHNEQSLPTLTQTAVRMRWSDEINEAILRIYYEVTELETNMIAHRKKLHDKFIQTYPHLAHLSEQRISDQRRVIINNKMLPETKLLQIRHGVETHLQISNTHITQYNSNHSQNTSLPIRDMIHEDIDPRPSQVNVCTNHTGQEIHTQTNCNYINCEEIKQHFYLTLDRFKNTDPTTRPYLPRQKPSKKLAFIVDYLNTQILPNILTINQDFITFQTVVYAAAYTAVTCNGTKIKYNRKFTSDIRPPWQRRLENKIDIFRAEIARLTQYIRGNRSNRIRTAVEKIRTKYQTHAQYENVNTDLEHFLDTLKQKLNAASSRLRRYVTCTARKKQNAQFVNTEKAFYRSLMSNNTNFKKLENRIPTADKLQKFWGDIWENPVQHNQKAQWIHTINETTKHIPDMSFEHITTDIFLYVLKSTHNWKSPGTDNIHNYWYKKFTSIHPYLQEHINTFIQSPHLMPQYITHGVTYMLPKDSNTEDPAKYRPITCLQTIYKILTACISKVIYNHLSDHNILAEQQKGCRKNSQGCKEQLTIDAIVINEAYKKKQDTYSMFIDYRKAFDSVPHSWLLQILRLYKINSNIINFIETSMQNWKTVLKISNHSSTITTDPIRILRGIFQGDALSPLWFCLALNPLSTLLNKTNAGYNLKTSSNRFSLTHLLYMDDIKLYAGNINDLFTLAGIAEQFSTDICMEFGVDKCKILSIQKGQIQSNTYALETGQDIEPMGENSTYKYLGFKQSRKILQRETKVEITDKFKNRLNLVFKSHLNSRNMVKAINTFCIPILTYSFGIINWSQTELKKLQRIINTHMTKHRKHHPKSSVERLTLPRKEGGRGIIDVHNLHNKQISTLRHYFHTKSQHSLLHKQVTEIDNKFTPLNLKNNNTQPNEALITVDQKIAKWAVKSLHGRHRTDLSENYVDKEKSNDWLMKGELFPETEGFMLAIQDQIITTKNYRKYIIKDTNQHSDLCRHCNSAPETIQHITGACKSLAQSDYKHRHDQVAAIIHQHLAHMYHFIPNKNPYYKYKPVTILENQNTKIYWDRTIITDKTVHFNRPDITLHDKTNNNVYIIDIAIPNTHNIQSTISEKLSKYQDLAIELKTQWKASIVHIVPIVLSSTGIIPKTLIQSLNILNMPSHSHHLLQKATILNTCRITRKFLSSSSVSATYTI

SEQ ID NO: 30936 - protein, 1397 aa, Spodoptera frugiperda
MPTLETGGPPVSFTLATVNAGLCCGRLFRSLATRGNHMITRSKLKKQSEATPQLDDESSQFSSSSSTSLFPSISSTSQSFCVSPTPSSSSTIQSVDVVQLANSVDEVVPTTKTAKTRRKWTTDMNEFILRNYLLLTNMETDKNAYLPSLHTKFLEKFPSMEVSRQRIGDQRRAIVQKKLLPQTKIDQIYEQVGTELQITPITQQHSTITHVTPTNNTQPNIQPGQRMKWTKEYNETIMKIYYKITYLETNKTAYRKSLHEQFITSFPELSHITEQRLSDQVRAIINNKYINVSRLAEIKKQVSEQLLHETDTNQHLSTHSYISEYSDENIHTQPIISNTHTDMHTNNVSQDTNRNTDTITPTHTPNLDGNFLNDIHLEQFDTIHTNTEINQEIENLFQQAHQYFTDTDPTNRPYIPKQKTSRKFSATVNYINNNILPNYATIDTDFNNLQTVIYSAAWTAAKYNGAKITYTVQTERQTIHTRKRKWQIRLERKIKCLRANIGRLSQYIKGNRSPRLVAAVEIIKSKYRLHAQYENPNTQMTHFLDTMKQKLNAASSRLRRYLTCTNRKLENSRFANNEKFFYRNLTSTGTLTQNVQTPSAETLREFWADIWENPVCHNHTAAWIHDVDLEHEGMQFECIPIDIFLNVIKNTQNWKSPGTDHIHNYWYKKFTTLHPFLHNHLNTFIQSPHLLPTYITQGITYMIPKDTNDSTNPAKYRPITCLQTFYKILTACISNIIYDHLTKHNILAEQQKGCRKYSQGCKEQLTIDAVVMNHAVKSKTDIHTMFIDYQKAFDSVPHSWLLHVLNLYKIHPTIKSFLQSSMQNWQTILKINQSTTAIITQPINIKRGIFQGDALSPLWFCMALNPLSHLLNKTNAGYTLTNNSTQYTISHLMYMDDIKLYAADQMLLSHLADVTQQFSIDICMQFGVDKCKVMSVVKGKFENNSYTLETGQTIAPMEKHDTYKYLGFMQSRQIQHKNTRQELIKKFTHRLNLILKTNLNARNTIKAINTFAIPILTYSFGIIQWSKTNTRKLQRIINTTLTKHRKHHPKSCIQRLTLPRKEGGRGLIDIRNLHNKQISSLRTYFHSKSEHSPLHRQVAETDKNFTPLNLHNRDTQTNEIIVTDEDKIAVWSQKALHGRHRSFLSQPHVDKIKSNELKRGELFPETEGFMLAIQDQIIATRNYRKFIMRDPNQQNDLCRHCNLASETIQHITGACKSLAQTDYKHRHDQVSAIIHQHLAYKYSLIDQMIPYYKYKPETILENRNYKIYWDRTIVTDKTIHFNRPDITVHDKINKTVYLIDIAIPNSHNIQSTISEKLSKYQDLAIEIKTQWRAQTVHIVPIVLSTTGIIPKSLTQSLNTLHMPTYTLHTLQKATILNTCRITRKFLTSSTLSSTYSI

SEQ ID NO: 30937 - protein, 937 aa, Junonia zonalis
MVQKFHILLRMKVKKKPPRKPNWQKRLENKIRKLRANIGRLTQFIRGNRSRRVVAEVETIKVKYQLHTQYDNSNTQLEHFLDTLKQKLNAAACRLKRYLTCTERKLQNTKFSNNERNFYRKLTSTSNDHDHNLETPSPEVVREFWSNIWENPVQHNKDADWINMIQAQTPEMEFQFIPIETFLEVIKHTHNWKSPGTDNIHNYWYKKFTSIHPYIHNHLNSFIQSPHLLPAYITHGITYLLPKDINDTANPAKYRPITCLQSIYKILTACISKEIYKHLTKYNILAEQQQGCRKNSRGCKEQLTIDAIVLNSAIKTKRDIHTMFIDYQKAFDSVPHSWLLHVLKLYKIHPKITSFLQNSMNNWQTVVKITQASMVTLTTEPIRIQRGIFQGDALSPLWFCMALNPLSLLLNKSNAGFTLHDNSTQYRLSHLLYMDDIKLYATNKNELFNLAYTTEQFSNDICMKFGVDKCKILSVIEGKIVNNSYTLGTGELIEPMDENSTYKYLGFMQSRQIHQKLTKQELSKKFSYRLNLILKTHLNSKNTIKAVNTFAIPILTYSFGIIQWSKQDIKKLQRTINSHFTKHRKHHPKSCIQRLTLPRQEGGRGLIDIQNLHNKQILSLREYFQNKSKQSSLHKHITVTDKKLTPLNLYDRNPQKNEHVISTEEKIAAWSKKALHGRHQAFLSQPHVDKENSNEWLRRGELFPETEGFMLAIQDQIVATRNYRKFIIKDPNQLTDMCRHCNAASETIQHITGACKSLAQTDYKHRHDQIAAIIHQHFAYRYKFINEMNPYYKYKPESVLDNRKIKIYWDRTIITDKTIHYNRPDITVHDKNKEIVFLIDIAIPNSHNLLSTIAEKLSKYQDLAIEIKSQWKVKTVHIVPIVISSTGIVPKSLTQSLNTLNMPLYTLHTLQKAIILNTCRITRKFLTSSSPASTFTI

SEQ ID NO: 30938 - protein, 1283 aa, Junonia stemosa
MNIFILRTYLHLTNMETDTNAYLSPLHSKFLEMYPQMEVSRQRIGDQRRAIVQKKLLPQETINQIYEEVRSELAAIQTQIEHHSTQLVTLSNTQASKRMKWTKEINEAIIRIYYRITLIETNKTAYRKKLHEEFINLYPELIHITEQRLADQRRAIINNKYIKQDRLTEIRKQVSEELHYENRQAGNINNEHSNIQPQTSMDDSNVHTYTKNNSLSNTQEQNFDINNSTNLVTRTETLNTNDIITNDTLNNTELEEPGSIVQSNDFHAILETNQEIEDTFNQALQYFNNTEPTKRPYIPKQKTSRKFSIITQYINTVILPRFLNVDSDFDTLQKIIYCAAWTAVKCNGAKISHITQNESQKKPPRKPNWQKRLENKIRKLRANIGRLTQFIRGNRSRRVVAEVETIKVKYQLHAQYDNSNTQLEHFLDTLKQKLNAAACRLKRYLTCTERKLQNTKFSNNERNFYRKLTSTSDDHDHNLETPSPEVVREFWSNIWENPVQHNKDADWINMIQAQTPEMEFQFIPIETLLEVIKHTHNWKSPGTDNIHNYWYKKFTSIHPYIHNHLNSFIQSPHLLPAYITHGITYLLPKDINDTANPAKYRPITCLQSIYKILTACISNEIYKHLTKYNILAEQQQGCRKNSRGCKEQLTIDAIVLNSAIKTKRDIHTMFIDYQKAFDSVPHSWLLHVLNLYKIHPKITTFLQNSMNNWQTVVKITQASMVTLTTEPIRIQRGIFQGDALSPLWFCMALNPLSLLLNKSNAGFTLHDNSTQYRLSHLLYMDDIKLYATNKNELFNLANTTEQFSNDICMKFGVDKCKILSVIEGKIVNNSYTLGTGELIEPMDENSTYKYLGFRQSRQIHQKLTKQELSKKFSYRLNLILKTHLNSKNTIKAVNTFAIPILTYSFGIIQWSKQDMKKLQRTINSHFTKHRKHHPKSCIQRLTLPRLEGGRGLIDIQNLHNKQILSLREYFQDKSKQSSLHKHITVTDKKLTPLNLYDINPQKNEHVISTEEKIAAWSKKALHGRHQAFLSQPHVDKENSNEWLRRGELFPETEGFMLAIQDQIVATRNYRKFIIKDPNQLNDMCRHCNAASETIQHITGACKSLAQTDYKHRHDQIAAIIHQHFAYRYKFINEMNPYYKYKPESVLDNRKIKIYWDRTIITDKTIHYNRPDITVHDKNKEIVFLIDIAIPNSHNLLSTIAEKLSKYQDLAIEIKSQWKVKTVHIVPIVISSTGIVPKSLTQSLNTLNMPLYTLHTLQKAIILNTCRITRKFLTSSSPASTFTI

SEQ ID NO: 30939 - protein, 1378 aa, Junonia litoralis
MSLATRGNQMITRSKIKTNQANEPSFNDEASQASFISSTRSLFSSIPSSSQSFCVSPTPSSSISTQLTDVAQETNTVNEPVPTTSNVKSRRKWSTEMNIFILRTYLHLTNMETDTNAYLSPLHSKFLEMYPQMEVSRQRIGDQRRAIVQKKLLPQETINQIYEEVRSELAAIQTQIEHHSTQLVTLSNTQASKRMKWTKEINEAIIRIYYRITLIETNKTAYRKKLHEEFINLYPELIHITEQRLADQRRAIINNKYIKQDRLTEIRKQVSEELHYENRQAGNINNEHSNIQPQRSMHDSNVYIYTKNNSLSNTQEQNFDINNINLVTRTETLNTNDIITNDTLNNTEIEEPGSIVQSNEVHAILETNQEIEDTFNQALQYFNNTEPTKRPYIPKQKTSRKFSIITQYINTVILPRFLNVDSDFDTLQKIIYCAAWTAVKCNGAKISHITQNESQKIPPRKPNWQKRLENKIRKLRANIGRLTQFIRGNRSRRVVAEVETIKVKYQLHAQYDNSNTQLEHFLDTLKQKLNAAACRLKRYLTCTERKLQNTKFSNNERNFYRKLTSTSNDHDHSLETPSPEVVREFWSNIWENPVQHNKDADWIHMIQAQTPEMEFQFIPIETFLEVIKHTHNWKSPGTDNIHNYWYKKFTSIHPYIHNHLNSFIQSPHLLPAYITHGITYLLPKDINDTANPAKYRPITCLQSIYKILTACISKEIYKHLTKYNILAEQQQGCRKNSRGCKEQLTIDAIVLNNAIKTKRDIHTMFIDYQKAFDSVPHSWLLHVLKLYKIHPKITSFLQNSMNNWQTVVKITQASMVTLTTEPIRIQRGIFQGDALSPLWFCMALNPLSLLLNKSNAGFTLHDNSTQYRLSHLLYMDDIKLYATNKNELFNLAYTTEQFSNDICMKFGVDKCKILSVIEGKIVNNSYTLGTGELIEPMDENSTYKYLGFMQSRQIYQKLTKQELSKKFSYRLNLILKTHLNSKNTIKAVNTFAIPILTYSFGIIQWSKQDMKKFQRTINSHFTKHRKHHPKSCIQRLTLPRLEGGRGLIDIQNLHNKQISSLREYFHDKSKQSLLHKHITVTDKKLTPLNLYDRNPQKNEHVISTEEKIAAWSKKALHGRHQAFLSQSHVDKENSNEWLRRGELFPETEGFMLAIQDQIVATRNYRKFIIKDPNQLTDMCRHCNAASETIQHITGACKSLAQTDYKHRHDQIAAIIHQHFAYRYKFINEMNPYYKYKPESVLDNRKIKIYWDRTIITDKTIHYNRPDITVHDKNKEIVFLIDIAIPNSHNLLSTIAEKLSKYQDLAIEIKSQWKVKTVHIVPIVISSTGIVPKSLTQSLNTLNMPLYTLHTLQKAIILNTCRITRKFLTSSSPASTFTI

SEQ ID NO: 30940 - protein, 1370 aa, Junonia pacoma
MITRSKIKKVQANEPYFHDEASQASFMSSTRSLFPSIPSSSQSFCVSPTPSSSISTQLTDVAQETNTVNEPVPTTSNVKSRRKWSTEMNTFILRTYLHLTNMDTDTNAYLSPLHSKFLEMYPQMEVSRQRIGDQRRAIVQKKLLPQETINQIYEEVRSELAAIQTQIEHHSTQLVTLSNTQASKRMKWTKEINEAIIRIYYRITLIETNKTAYRKKLHEEFINLYPELIHITEQRLADQRRAIINNKYIKQDRLTEIRKQVSEELHYENRQAGNINNEHSNIQPQTSMDDSNVHTYTKNNSLSNTQEQNFDINNSTNLVTRTETLNTNDIITNDTLNNTELEEPGRIVQSNDFHAILETNQEIEDTFNQALQYFNNTEPTKRPYIPKQKTSRKFSIITQYINTVILPRLLNVDSDFDTLQKIIYCAAWTAVKCNGAKISHITQNESQKKTPRKPNWQKRLENKIRKLRANIGRLTQFIRGNRSRRVVAEVETIKVKYQLHTQYDNSNTQLEHFLDTLKQKLNAAACRLKRYLTCTERKLQNTKFCNNERNFYRKLTSTSNDYDHNLETPSPEVVREFWSNIWENPVQHNKDADWINMIQAQTPEMEFQFIPIETLLEVIKHTHNWKSPGTDNIHNYWYKKFTSIHPYIHNHLNSFIQSPHLLPAYITHGITYLLPKDINDTANPAKYRPITCLQSIYKILTACISNEIYKHLTKYNILAEQQQGCRKNSRGCKEQLTIDAIVLNSAIKTKRDIHTMFIDYQKAFDSVPHSWLLHVLNLYKIHPKITTFLQNSMNNWQTVVKITQASMVTLTTEPIRIQRGIFQGDALSPLWFCMALNPLSLLLNKSNAGFTLHDNSTQYRLSHLLYMDDIKLYATNKNELFNLANTTEQFSNDICMKFGVDKCKILSVVEGKIVNNSYTLGTGELIEPMDENSTYKYLGFRQSRQIHQKLTKQELSKKFSYRLNLILKTHLNSKNTIKAVNTFAIPILTYSFGIIQWSKQDMKKLQRTINSHFTKHRKHHPKSCIQRLTLPRLEGGRGLIDIQNLHNKQILSLREYFQDKSKQSSLHKHITVTDKKLTPLNLYDINPQKNEHVISTEEKIAAWSKKALHGRHQAFLSQPHVDKENSNEWLRRGELFPETEGFMLAIQDQIVATRNYRKFIIKDPNQLNDMCRHCNAASETIQHITGACKSLAQTDYKHRHDQIAAIIHQHFAYRYKFINEMNPYYKYKPESVLDNRKIKIYWDRTIITDKTIHYNRPDITVHDKNKEIVFLIDIAIPNSHNLLSTIAEKLSKYQDLAIEIKSQWKVKTVHIVPIVISSTGIVPKSLTQSLNTLNMPLYTLHTLQKAIILNTCRITRKFLTSSSPASTFTI

SEQ ID NO: 30941 - protein, 1282 aa, Junonia vestina
MNIFILRTYLHLTNMETDTNAYLSPLHSKFLEMYPQMEVSRQRIGDQRRAIVQKKLLPQETINQIYEEVRSELAAIQTQIEHHSTQLVTLSNTQASKRMKWTKEMNEAIIRIYYRITLIETNKTAYRKKLHEEFINLYPELIHITEQRLADQRRAIINNKYIKPDRLTEIRKQVSEELHYDNRQAGNINNEHSNIQPQTSMHDSNVHIYTKNNSLSNTQEQNFDINNINLVTRTETLNTNDIITNDTLNNTELEEPGSIVQSNEVHAILETNQEIEDTFNQALQYFNNTEPTKRPYIPKQKTSRKFSIITQYINTVILPRFLNVDSDFDTLQKIIYCAAWTAVKCNGAKISHITQNESQKKPPRKPNWQKRLENKIRKLRANIGRLTQFIRGNRSRRVVAEVETIKVKYQLHTQYDNSNTQLEHFLDTLKQKLNAAACRLKRYLTCTERKLQNTKFCNNERNFYRKLTTTSNDHDHNLETPSPEVVREFWSNIWENPVQHNKDADWINMIQAQTPEMEFQFIPIETLLEVIKHTHNWKSPGTDNIHNYWYKKFTSIHPYIHNHLNSFIQSPHLLPAYITHGITYLLPKDINDTANPAKYRPITCLQSIYKILTACISKEIYKHLTKYNILAEQQQGCRKNSRGCKEQLTIDAIVLNSAIKTKRDIHTMFIDYQKAFDSVPHSWLLHVLKLYKIHPKITSFLQNSMNNWQTVVKITQASMVTLTTEPIRIQRGIFQGDALSPLWFCMALNPLSLLLNKSDAGFTLHDNSTQYRLSHLLYMDDIKLYATNKNELFNLANTTEQFSNDICMKFGVDKCKILSVIEGKIVNNSYTLGTGELIEPMDENSTYKYLGFMQSRQIHQKLTKQELSKKFSYRLNLILKTHLNSKNTIKAVNTFAIPILTYSFGIIQWSKQDMKKLQRTINSHFTKHRKHHPKSCIQRLTLPRQEGGRGLIDIQNLHNKQILSLREYFQDKSKQSSLHKHITVTDKKLTPLNLYDRNPQKNEHVISTEEKIAAWSKKALHGRHQAFLSQPHVDKENSNEWLRRGELFPETEGFMLAIQDQIVATRNYRKFIIKDPNQLTDMCRHCNAASETIQHITGACKSLAQTDYKHRHDQIAAIIHQHFAYRYKFINEMNPYYKYKPESVLDNRKIKIYWDRTIITDKTIHYNRPDITVHDKNKEIVFLIDIAIPNSHNLLSTIAEKLSKYQDLAIEIKSQWKVKTVHIVPIVISSTGIVPKSLTQSLNTLNMPLYTLHTLQKAIILNTCRITRKFLTSSSPASTFTI

SEQ ID NO: 30942 - protein, 1379 aa, Junonia genoveva
MSLATRGNQMITRSKIKTNQANEPSFNDEASQASFISSTRSLFSSIPSSSQSFCVSPTPSSSISTQLTDVAQETNTVNEPVPTTSNVKSRRKWSTEMNIFILRTYLHLTNMETDTNAYLSPLHSKFLEMYPQMEVSRQRIGDQRRAIVQKKLLPQETINQIYEEVRSELAAIQTQIEHHSTQLVTLSNTQISKRMKWTKEMNEAIIRIYYRITLIETNKTAYRKKLHEEFINLYPELIHITEQRLADQRRAIINNKYIKQDRLTEIRKQVSEELRYENRQAENINNEHSNIQPQTSMDDSNVHIYTKNNSLSNRQKQNFDINNSTNLVTRTETLNTNDIITNDTLNNTELEEPGSIVQSNEVHAILETNQEIEDTFNQALQYFNNTEPTKRPYIPKQKTSRKFSIITQYINTVILPRFLNVDSDFDTLQKIIYCAAWTAVKCNGAKISHITQNESQKIPPRKPNWQKRLENKIRKLRANIGRLTQFIRGNRSRRVVAEVETIKVKYQLHTQYDNSNTQLEHFLDTLKQKLNAAACRLKRYLTCTERKLQNTKFSNNERNFYRKLTSTSNDHDHNLETPSPEVVREFWSNIWENPVQHNKDADWINMIQAQTPEMEFQFIPIETFLEVIKHTHNWKSPGTDNIHNYWYKKFTSIHPYIHNHLNSFIQSPHLLPSYITHGITYLLPKDINDTTNPAKYRPITCLQSIYKILTACISKEIYKHLTKYNILAEQQQGCRKNSRGCKEQLTIDAIVLNSAIKTKRDIHTMFIDYQKAFDSVPHSWLLHVLKLYKIHPKITSFLQNSMNNWQTVVKITQASMVTLTTEPIRIQRGIFQGDALSPLWFCMALNPLSLLLNKSDAGFTLHDNITQYRLSHLLYMDDIKLYATNKNELFNLANTTEQFSNDICMKFGVDKCKILSVVEGKIVNNSYTLGTGELIEPMDENSTYKYLGFMQSRQIHQKLTKQELSKKFSYRLNLILKTHLNSKNTIKAVNTFAIPILTYSFGIIQWSKQDMKKFQRTINSHFTKHRKHHPKSCIQRLTLPRLEGGRGLIDIQNLHNKQISSLREYFHDKSKQSLLHKHITVTDKKLTPLNLYDRNPQKNEHVISTEEKIAAWSKKALHGRHQAFLSQPHVDKENSNEWLRIGELFPETEGFMLAIQDQIVATRNYRKFIIKDPNQLTDMCRHCNAASETIQHITGACKSLAQTDYKHRHDQIAAIIHQHFAYRYKFINEMNPYYKYKPESVLDNRKIKIYWDRTIITDKTIHYNRPDITVHDKNKEMVFLIDIAIPNSHNLLSTIAEKLSKYQDLAIEIKSQWKVKTVHIVPIVISSTGIVPKSLTQSLNTLNMPLYTLHTLQKAIILNTCRITRKFLTSSSPASTFTI

SEQ ID NO: 30943 - protein, 774 aa, Junonia neildi
MIQAQTPEMEFQFIPIETFLEVIKHTHNWKSPGTDNIHNYWYKKFTSIHPYIHNHLNSFIQSPHLLPAYITHGITYLLPKDINDTANPAKYRPITCLQSIYKILTACISKEIYKHLTKYNILAEQQQGCRKNSRGCKEQLTIDAIVLNNAIKTKRDIHTMFIDYQKAFDSVPHSWLLHVLKLYKIHPKITSFLQNSMNNWQTVVKITQASMVTLTTEPIRIQRGIFQGDALSPLWFCMALNPLSLLLNKSNAGFTLHDNSTQYRLSHLLYMDDIKLYATNKNELFNLAYTTEQFSNDICMKFGVDKCKILSVIEGKIVNNSYTLGTGELIEPMDENSTYKYLGFMQSRQIYQKLTKQELSKKFSYRLNLILKTHLNSKNTIKAVNTFAIPILTYSFGIIQWSKQDIKKLQRTINSHFTKHRKHHPKSCIQRLTLPRLEGGRGLIDIQNLHNKQILSLREYFQNKSKQSSLHKHITVRDKKLTPLNLYDRNPQKNEHVISTEEKIAAWSKKALHGRHQAFLSQPHVDKENSNEWLRRGELFPETEGFMLAIQDQIVATRNYRKFIIKDPNQLTDMCRHCNAASETIQHITGACKSLAQTDYKHRHDQIAAIIHQHFAYRYNFINEMNPYYKYKPESVLDNRKIKIYWDRTIITDKTIHYNRPDITVHDKNKEIVFLIDIAIPNSHNLLSTIAEKLSKYQDLAIEIKSQWKVKTVHIVPIVISSTGIVPKSLTQSLNTLNMPLYTLHTLQKAIILNTCRITRKFLTSSSPASTFTI

SEQ ID NO: 30944 - protein, 1369 aa, Junonia grisea
MITRSKIKKVQANEPYFHDEASQASFMSSTRSLFPSIPSSSQSFCVSPTPSSSISTQLTDVAQETNTVNEPVPTTSNVKSRRKWSTEMNIFILRTYLHLTNMETDTNAYLSPLHSKFLEMYPQMEVSRQRIGDQRRAIVQKKLLPQETINQIYEEVRSELAAIQTQIEHHSTQLVTLSNTQASKRMKWTKEMNEAIIRIYYRITLIETNKTAYRKKLHEEFINLYPELIHITEQRLADQRRAIINNKYIKQDRLTEIRKQVSEELHYENRQAGNINNEHSNIQPQRSMHDSNVYIYTKNNSLSNTQEQNFDINNINLVTRTETLNTNDIITNDTLNNTELEEPGSIVQSNEVHAILETNQEIEDTFNQALQYFNNTEPTKRPYIPKQKTSRKFSIITQYINTVILPRFLNVDSDFDTLQKIIYCAAWTAVKCNGAKISHITQNESQKKPPRKPNWQKRLENKIRKLRANIGRLTQFIRGNRSRRVVAEVETIKVKYQLHTQYDNSNTQLEHFLDTLKQKLNAAACRLKRYLTCTERKLQNTKFSNNERNFYRKLTSTSNDHDHSLETPSPEVVREFWSNIWENPVQHNKDADWINMIQAQTPEMEFQFIPIETFLEVIKHTHNWKSPGTDNIHNYWYKKFTSIHPYIHNHLNSFIQSPHLLPAYITHGITYLLPKDINDTANPAKYRPITCLQSIYKILTACISKEIYKHLTKYNILAEQQQGCRKNSRGCKEQLTIDAIVLNSAIKTKRDIHTMFIDYQKAFDSVPHSWLLHVLKLYKIHPKITSFLQNSMNNWQTVVKITQASMVTLTTEPIRIQRGIFQGDALSPLWFCMALNPLSLLLNKSNAGFTLHDNSTQYRLSHLLYMDDIKLYATNKNELFNLAYTTEQFSNDICMKFGVDKCKILSVIEGKIVNNSYTLGTGELIEPMDENSTYKYLGFMQSRQIHQKLTKQELSKKFSYRLNLILKTHLNSKNTIKAVNTFAIPILTYSFGIIQWSKQDIKKLQRTINSHFTKHRKHHPKSCIQRLTLPRQEGGRGLIDIQNLHNKQILSLREYFQNKSKQSSLHKHITVTDKKLTPLNLYDRNPQKNEHVISTEEKIAAWSKKALHGRHQAFLSQSHVDKENSNEWLRRGELFPETEGFMLAIQDQIVATRNYRKFIIKDPNQLTDMCRHCNAASETIQHITGACKSLAQTDYKHRHDQIAAIIHQHFAYRYKFINEMNPYYKYKPESVLDNRKIKIYWDRTIITDKTIHYNRPDITVHDKNKEIVFLIDIAIPNSHNLLSTIAEKLSKYQDLAIEIKSQWKVKTVHIVPIVISSTGIVPKSLTQSLNTLNMPLYTLHTLQKAIILNTCRITRKFLTSSSPASTFTI

SEQ ID NO: 30945 - protein, 1283 aa, Junonia evarete
MNIFILRTYLHLTNMETDTNAYLSPLHSKFLEMYPQMEVSRQRIGDQRRAIVQKKLLPQETINQIYEEVRSELAAIQTQIEHHSTQLATLSNTQASKRMKWTKEMNEAIIRIYYRITLIETNKTAYRKKLHEEFINLYPELIHITEQRLADQRRAIINNKYIKQDRLTEIRKQVSEELHYENRQAENINNEHSNIQPQTSMDDSNVHVYTKNNSLSNRQEQNFDINNSTNLVTRTETLNTNDIITNDTLNNTELEEPGSIVQSNEVHAILETNQEIEDTFNQALQYFNNTEPTKRPYIPKQKTSRKFSIITQYINTVILPRFLNVDSDFDTLQKIIYCAAWTAVKCNGAKISHITQNESQKKPPRKPNWQKRLENKIRKLRANIGRLTQFIRGNRSRRVVAEVETIKVKYQLHTQYDNSNTQLEHFLDTLKQKLNAAACRLKRYLTCTERKLQNTKFSNNERNFYRKLTSTSNDHDHSLETPSPEVIREFWSNIWENPVQHNKDADWINMIQAQTPEMEFQFIPIETFLEVIKHTHNWKSPGTDNIHNYWYKKFTSIHPYIHNHLNSFIQSPHLLPSYITHGITYLLPKDINDTTNPAKYRPITCLQSIYKILTACISKEIYKHLTKYNILAEQQQGCRKNSRGCKEQLTIDAIVLNSAIKTKRDIHTMFIDYQKAFDSVPHSWLLHVLKLYKIHPKITSFLQNSMNNWQTVVKITQASMVTLTTEPIRIQRGIFQGDALSPLWFCMALNPLSLLLNKSDAGFTLHDNITQYRLSHLLYMDDIKLYATNKNELFNLAYTTEQFSNDICMKFGVDKCKILSVVEGKIVNNSYTLGTGELIEPMDENSTYKYLGFMQSRQIHQKLTKQELSKKFSYRLNLILKTHLNSKNTIKAVNTFAIPILTYSFGIIQWSKQDIKKLQRTINSHFTKHRKHHPKSCIQRLTLPRQEGGRGLIDIQNLHNKQILSLREYFQNKSKQSSLHKHITVTDKKLTPLNLYDRNPQKNEHVISTEEKIAAWSKKALHGRHQAFLSQPHVDKENSNEWLRRGELFPETEGFMLAIQDQIVATRNYRKFIIKDPNQLTDMCRHCNAASETIQHITGACKSLAQTDYKHRHDQIAAIIHQHFAYRYKFINEMNPYYKYKPESVLDNRKIKIYWDRTIITDKTIHYNRPDITVHDKNKEIVFLIDIAIPNSHNLLSTIAEKLSKYQDLAIEIKSQWKVKTVHIVPIVISSTGIVPKSLTQSLNTLNMPLYTLHTLQKAIILNTCRITRKFLTSSSPASTFTI

SEQ ID NO: 30946 - protein, 1370 aa, Junonia evarete
MITRSKIKKVQANEPYFHDEASQASFMSSTRSLFPSIPSSSQSFCVSPTPSSSISTQLTDVAQETNTVNEPVPTTSNVKSRRKWSTEMNIFILRTYLHLTNMETDTNAYLSPLHSKFLEMYPQMEVSRQRIGDQRRAIVQKKLLPQETINQIYEEVRSELAAIQTQIEHHSTQLATLSNTQISKRMKWTKEMNEAIIRIYYRITLIETNKTAYRKKLHEEFINLYPELIHITEQRLADQRRAIINNKYIKQDRLTEIRKQVSEELHYENRQAGNINNEYSNIQSQTSMDDSNVHIYTKNNSLSNTQEQNFGINNSTNLVTRTETLNTNDIITNDILNNTELEEPGSIVQSNEVHAILETNQEIEDTFNQALLYFNNTEPTKRPYIPKQKTSRKFSIITQYINTVILPRFLNVDSDFDTLQKIIYCAAWTAVKCNGAKISHITQNESQKKPPRKPNWQKRLENKIRKLRANIGRLTQFIRGNRSRRVVAEVETIKVKYQLHTQYDNSNTQLEHFLDTLKQKLNAAACRLKRYLTCTERKLQNTKFSNNERNFYRKLTSTSNDHDHKLETPSPEVVREFWSNIWENPVQHNKDADWINMIQAQTPEMEFQFIPIETLLEVIKHTHNWKSPGTDNIHNYWYKKFTSIHPYIHNHLNSFIQSPHLLPAYITHGITYLLPKDTNDTTNPAKYRPITCLQSIYKILTACISKEIYKHLTKYNILAEQQQGCRKNSRGCKEQLTIDAIVLNSAIKTKRDIHTMFIDYQKAFDSVPHSWLLHVLKLYKIHPKITSFLQNSMNNWQTVVKITQASMVTLTTEPIRIQRGIFQGDALSPLWFCMALNPLSLLLNKSNAGFTLHDNSTQYRLSHLLYMDDIKLYATNKNELFNLANTTEQFSNDICMMFGVNKCKILSVIEGKIVNNSYTLGTGELIEPMDENSTYKYLGFMQSRQIHQKLTKQELSKKFSYRLNLILKTHLNSKNTIKAVNTFAIPILTYSFGIIQWSKQDIKKLQRTINSHFTKHRKHHPKSCIQRLTLPRLEGGRGLIDIENLHNKQILSLREYFQDKSKQSSLHKHITVTDKKLTPLNLYDRNPQKNEHVISTEEKIAAWSKKALHGRHQAFLSQPHVDKENSNEWLRRGELFPETEGFMLAIQDQIVATRNYRKFIIKDPNQLTDMCRHCNAASETIQHITGACKSLAQTDYKHRHDQIAAIIHQHFAYRYKFINEMNPYYKYKPESVLDNRKIKIYWDRTIITDKTIHYNRPDITVHDKNKEIVFLIDIAIPNSHNLLSTIAEKLSKYQDLAIEIKSQWKVKTVHIVPIVISSTGIVPESLTQSLNTLNMPLYTLHTLQKAIILNTCRITRKFLTSSSPASTFTI

SEQ ID NO: 30947 - protein, 1392 aa, Junonia neildi
MTAGFYSFFNKILFITYNNLFNNNITRSKIKKVQANEPYFHDEASQASFMSSTRSLFPSIPSSSQSFCVSPTPSSSISTQLTDVAQETNTVNEPVPTTSNVKSRRKWSTEMNIFILRTYLHLTNMETDTNAYLSPLHSKFLEMYPQMEVSRQRIGDQRRAIVQKKLLPQETINQIYEEVRSELAAIQTQIEHHSTQLVTLSNTQASKRMKWTKEINEAIIRIYYRITLIETNKTAYRKKLHEEFINLYPELIHITEQRLADQRRAIINNKYIKQDRLTEIRKQVSEELHYENRQAGNINNEHSNIQPQRSMHDSNVYIYTKNNSLSNTQEQNFDINNINLVTRTETLNTNDIITNDTLNNTEIEEPGSIVQSNEVHAILETNQEIEDTFNQALQYFNNTEPTKRPYIPKQKTSRKFSIITQYINTVILPRFLNVDSDFDTLQKIIYCAAWTAVKCNGAKISHITQNESQKKPPRKPNWQKRLENKIRKLRANIGRLTQFIRGNRSRRVVAEVETIKVKYQLHAQYDNSNTQLEHFLDTLKQKLNAAACRLKRYLTCTERKLQNTKFSNNERNFYRKLTSTSNDHDHSLETPSPEVVREFWSNIWENPVQHNKDADWIHMIQAQTPEMEFQFIPIETFLEVIKHTHNWKSPGTDNIHNYWYKKFTSIHPYIHNHLNSFIQSPHLLPAYITHGITYLLPKDINDTANPAKYRPITCLQSIYKILTACISKEIYKHLTKYNILAEQQQGCRKNSRGCKEQLTIDAIVLNNAIKTKRDIHTMFIDYQKAFDSVPHSWLLHVLKLYKIHPKITSFLQNSMNNWQTVVKITQASMVTLTTEPIRIQRGIFQGDALSPLWFCMALNPLSLLLNKSNAGFTLHDNSTQYRLSHLLYMDDIKLYATNKNELFNLAYTTEQFSNDICMKFGVDKCKILSVIEGKIVNNSYTLGTGELIEPMDENSTYKYLGFMQSRQIYQKLTKQELSKKFSYRLNLILKTHLNSKNTIKAVNTFAIPILTYSFGIIQWTKQDIKKLQRTINSHFTKHRKHHPKSCIQRLTLPRQEGGRGLIDIQNLHNKQILSLREYFQNKSKQSSLHKHITVTDKKLTPLNLYDRNPQKNEHVISTEEKIAAWSKKALHGRHQAFLSQSHVDKENSNEWLRRGELFPETEGFMLAIQDQIVATRNYRKFIIKDPNQLTDMCRHCNAASETIQHITGACKSLAQTDYKHRHDQIAAIIHQHFAYRYKFINEMNPYYKYKPESVLDNRKIKIYWDRTIITDKTIHYNRPDITVHDKNKEIVFLIDIAIPNSHNLLSTIAEKLSKYQDLAIEIKSQWKVKTVHIVPIVISSTGIVPKSLTQSLNTLNMPLYTLHTLQKAIILNTCRITRKFLTSSSPASTFTI

SEQ ID NO: 30948 - protein, 1418 aa, Telemiades fides
MKSSYTNKNKNNHHCDAFVKTRTYNLRPLPGTNRELIRPDSPCSTMQTYETHVANQAKVTLQYRVMSNKMYNLWPLPGGRRGASGADAGCFSMRTISGEELNRRASTDKNATADITPHHTNSLISSPPSSLFPSPSSSPNLFQNTSSLGSSLSVPLSLSSSPSTVNVVQEANVFQDGPTTAKSCARRKWTIDMNMFIWRTYLILSKLETQTRGYLHQLHMAFIEKYPEMNASKQRIGDQRRAIVRNKLLSTTTLQEIKYEVIKYLGESNSSPPTFTQTSTRMHWSDEINETILRIYYEVTELETNMTAHRKKLHNRFIEAYPHLAHLSEQRISDQRRVIVRNKMVSEAKIHQIKQDIHTHLQGSNSHTHFIYTQNTSHTDTQTNTIQTITHMEINRLQQEKHTNNSNFIDHEKIKQEFSLALDTFKNTEPTLRPYLPRQKPSKKLALIVDYINKNILPNVLSNDHDFTTFQTILYSAAYTAVLCNRIKINSVRTYTNNFRPPWQRRLENKIEGLRAEIARLTQYIRGNRSIRIIDAVEKIKCKYQVHAQHENINTELVHFLDTLKQKLNAAASRLKRYLACTVRKKQNTQFINTEKSFYRGLTSNNQNTHTKDTLPTAESMYRFWSNIWENPIQHNLNAEWIDDINEKTKHIPEMNFEFITTETFVDVIKHTHNWKSPGTDNIHNFWYKKFTSIYTHLLKHLNTFIQSPHLMPQYITYGVTYMIPKDTNTEDPAKYRPITCLQTIYKILTACISKTIYAHLSDHDILAEQQKGCRKNSQGCKEQLTIDALVINQAYSKKQDIHSMFIDYRKAFDSVPHSWLLHILTLYKISPAIIHFLESSMQNWKTELKLKQHSGTITTEPIRILRGIYQGDALSPLWFCLALNPLSALLNNTNAGYILKTTDKQYSLTHLLYMDDIKLYSNNVNNLFHLADITQKFSTDICMEFGVDKCKILSIDKGKIENNSYALDTVQNIEAMDENSYYKYLGFKQSRKIHQKQTKIEITNKFKTRLNFIFKTHLNSRNIVKAINTYGIGILTYSFGIINWTQTELKNLQRIINTQMTKHRKHHPKSSIERLTLPRKEGGRGIIDIQNLHNKQIHTLRQYFQTKSQLSLLHKQVTEIDNKLTPLNLRDRNPQPNEALVTLEQKIAKWASKSLHGRHRSEMSQNYVDVEKSNEWLMKGELFPETEGFMLAIQDQIIATKNYRKFIIKDPNQVSDLCRHCNSASETTQHITGACKSLVQSDYKHRHDQVAAIVHQHLAHKYSFINKKDPYYKYKPDTILENQSCKIYWDRTIITDKTIHFNRPDITLHDKTNNTVYIIDIAIPNSHNIQSTISEKLSKYQDLAIELKTQWKAQVVHIVPIVLSSTGIIPKTLTQSLNILHMPTYIHHLLQKAVILNTCRITRKFLTSSSVSSTYSI

SEQ ID NO: 30949 - protein, 1368 aa, Polygonus savigny
MSKSMYNLRPLPGGRRGASGADAGCFSMRTISGEELNRRAPTENNATADIITLHTNSSNPSSPSSLFPSPTSSPKSFHSLSFTRNPSGSSPSSSLSSSLAVDVVQEAHASLDGPTTVKSCARRKWTTEMNTFIWRTYLILSRLETQTRGYLDSLHTAFTEKYPEMNASKQRIGDQRRAIIRNKLLSDTTLKQIKEEVTKYLGENEPPPPTLTQTSTRMRWSDEINETIIRIYYEVTELETNMTAHRKKLRDKFIEIYPNLVHLSEQRISDQRRAIVNNKMITGGKILQIRREVDTHLQKSNTCIHHTHSQNTSSQINTDTTQISEREVNTLLPQTTTRIHFKEQENTTNDSHLTHLIDKDKINQEFDLALNTFKNTDPILRPYLPRQKPSKKLALIVDHINKNILPSILSTDQDYRTFQTILYSAAYTAVMCNGTKIYSVRTITKDCRPPWQRRLQNKIDRLRTEIARLTQYIRGNRSIRIIRAVENIKSKYQVHAQYEDLNTELEQFLDTLKQKLNAAASRLKRYLTCTARKKQNIQFTDREKVFYRSLTSDNQNLHIKENRLPTAENIHRFWSDIWEHPVEHNLKADWIDAINDSAKHIPEMNFEHITIDTLVDVIKNTHNWKSPGTDNIHNYWYKKFTSIHTYLHKHLNIFVQSPHTMPEYITNGITYMLPKDINSTDDPAKYRPITCLQTIYKILTACISKTIYSHLSEHNILAEQQKGCRKNSQGCKEQLTIDSIVINEAYTKKQDIHSMFIDYRKAFDSVPHSWLLHILKLYKISPTIIKFLEQSMQNWKTVLKLKQHSSTITTEPIRILRGIYQGDALSPLWFCLSLNPLSSLLNNSDAGYKLKTSDSQFSLTHLLYMDDIKLYASNISNLFHLADIAQMFSTDICMEFGVDKCKILSINKGQIANNSYALETGQDIEPMNENSYYKYLGFKQSRKIHHKDIKVEITNKFKNRLNLIFKTHLNSRNIVKAVNTFSIGILTYSFGIINWSQTNLKNLQRIINTYMTKHRKHHPKSSVERLTLPRKEGGRGIIDIQNLHNRQISTLRHYFHAKSHNSLLHKQITEIDNKLTPLNLKDRNTQPNEALITINQKTEKWGSKTLHGRHRTELSQTYVDLEKSNEWLIKGELFPDTEGFMLAIQDQVIATKNYRKYIIKDVNQLSDYCRHCNSAPETIQHITGACKFLVQSDYRHRHDQVAGIVHQHLAHRYNFIHKKDPYYKYKPATVLENQSFKIYWDRTIITDKTVHYNRPDITVHDKSSNTVYIIDIAIPNSHNIQSTIAEKLSKYQDLAIELKTQWRAQVVHIVPIVLSSTGIIPKTLIQSLNTLRMPTYSYYLLQKAVILNTCRITRKFLTSTSVSSTYSI

SEQ ID NO: 30950 - protein, 1021 aa, Mythimna ferrago
MQANLDPISESNTEIEATFQQAQLNFNDTHPTNRPYIPKQKTSKKFSAIVSYINTVILPKHVNGDTEFIKLQTIIYCAAWTAAICNGAKIAGSTQSEHRTYKLDRKPKWQIRLEKRNQNLRANIGKLTQFMNGNRSQKLVAAVEQIKFKYQLHAQHENCNTQIEHFLDTLKQKLSAASSRLKRYITCTNRKVQNTKNKSNERIFYRNLTSNTRDTPNQTLETPSPESLREFWANIWENPVYHNDRADWVSDATTEIPDMEFEVIPIGTFVEVIKRTHNWKAPGTDNIHNYWYKKFSSIHPFLYNHLNTFIKSPHLLPIYITHGVTYMIPKDINDTINPAKYRPITCLQTLYKILTACISEAVYEHLTKNNILAEQQKGCRKHSQGCKEQLTIDAIAMNNAVKCRKDIHTMFIDYQKAFDSVPHSWLLYVLDLYKIHPTLKQFFEKSMQNWQTVLKINSSSATVATEPIRINRGIFQGDALSPLWFCMALNPLSHLLDKTDVGFTLAHNNTQYKLTHLMYMDDIKLYAADREALFQLADTTQIFSDDICMSFGVDKCMSVLKGRIQNNSYSLGSGESIEPMDEHSTYKYLGFKQSRQIQQKLSKQELLKKFSHRLNLILKNNLNSRNTIKAINTFAIPILTYSFEILHWSKTDIKKIQRTLHTLLTKHRKHHPKSCIQRLTQPRQEGGRGLIDIHNLHNKQIHSLRVYFHCKSENSLLHKHISETDKKLTPLNLQNRNTQINEHIVSTQEKIAAWSVKALHGRHRASLSQPHVDKIMSNEWLKRGELFPETEGFMLAIQDQIIATRNYRKYIMKDQNQPTDLCRHCNSASETIQHITGACKSLAQTDYKHRHDQVGSIIPQNLAYKHNFVSNMIPYYKYTPETILESQDIKIYWDRTIITDKTIHYNRPDITIHDKTNKTVYLIDIAIPNSHNIQTTISEKLGKYQDLAIEIKTQWKARTVHIVPIILSSTGIIPKSLTQSLNTLKMPAQILYMLQKATILNTCRITRKFLTSSTLTSTFSI

SEQ ID NO: 30951 - protein, 1021 aa, Mythimna ferrago
MQANLDPISESNTEIEATFQQAQLNFNDTHPTNRPYIPKQKTSKKFSAIVSYINTVILPKHVNGDTEFIKLQTIIYCAAWTAAICNGAKIAGSTQSEHRTYKLDRKPKWQIRLEKRNQNLRANIGRLTQFMNGNRSQKLVAAVDQIKFKYQLHAQHENCNTQIEHFLDTLKQKLSAASSRLKRYITCTNRKVQNTKNKSNERIFYRNLTSNTRDTPNQTLETPSPESLREFWANIWENPVYHNDRADWVSDATTEIPDMEFEVIPIGTFVEVIKRTHNWKAPGTDNIHNYWYKKFSSIHPFLYNHLNTFIKSPHLLPIYITHGVTYMIPKDINDTINPAKYRPITCLQTLYKILTACISEAVYEHLTKNNILAEQQKGCRKHSQGCKEQLTIDAIAMNNAVKCRKDIHTMFIDYQKAFDSVPHSWLLYVLDLYKIHPTLKQFFEKSMQNWQTVLKINSSSATVATEPIRINRGIFQGDALSPLWFCMALNPLSHLLDKTDVGFTLAHNNTQYKLTHLMYMDDIKLYAADREALFQLADTTQIFSDDICMSFGVDKCMSVLKGGIQNNSYSLGSGESIEPMDEHSTYKYLGFKQSRQIQQKLSKQELLKKFSHRLNLILKSNLNSRNTIKAINTFAIPILTYSFEILHWSKTDIKKIQRTLHTLLTKHRKHHPKSCIQRLTQPRQEGGRGLIDIHNLHNKQIHSLRVYFHCKSENSLLHKHISETDKKLTRLNLQNRNTQINEHIVSTQEKIAAWSVKALHGRYRASLSQPHVDKIMSNEWLKRGELFPETEGFMLAIQDQIIATRNYRKYIMKDQNQPTDLCRHCNSASETIQHITGACKSLAQTDYKHRHDQVGAIIPQNLAYKHNFVSNMIPYYKYTPETILESQDIKIYWDRTIITDKTIHYNRPDITVHDKTNKTVYLIDIAIPNSHNIQTTISEKLGKYQDLAIEIKTQWKARTVHIVPIILSSTGIIPKSLTQSLNTLKMPAQILYMLQKATILNTCRITRKFLTSSTLTSTFSI

SEQ ID NO: 30952 - protein, 1351 aa, Hemaris fuciformis
MNNRRYNLRPLPGGRRGASGADAGCFSMRSIGGEELSRRAPTDKNATADTTSYHSLSPTSSLHSLFPSPTSSPNPLNHRRRSYSSSSFSLSPVDVVQEANAISPRPTSGSKRARKKWTTEMNKFIWRTYLIATKLGTNTRGYLDQLHRAFIERYPEMEVSKQRVGDQRRAIVNNQLLPQSILTEIQNDVASYLKNNEQEPTTIIQSTGRMRWSNEINESIVRIYFEITELETNLTAYCKKMHQKFIETYPHLSHISEQRLADQKRVIINNKMVSDERLSQIKCEVQSHLISRVSVNPSDNNIAEQTNMPDQTDLSINVTHNITSITTEDAVNSRETNHNLNMEKINETFRIALDTFELTDPTTRPYIPKQRTSKMFAAIIDYIDKNILPKYLNTEQDFITFQTIIYSAAYTAAICNGSKISTDKTPHRENSKPPWQKRLENKISNYRAEIARLLLYTQGNRSKKVVAAVDIIKHKYQIHAQHEHVNTELEHFLDTLKQKLNAAASRLKRYLSCTIRKKQNIQFKNNERLFYRRLNTPDSESAIRNAPTPTPERLHQYWANIWENPIHHNVDSDWLSCVNETSENISLMEFEHISIDTVLEVIKHTHNWKSPGTDNIQNYWYKKFSSTHSFIHKHLNTFLQSPDKMPNYITHGVTYLLPKDSDTANPAKYRPITCLQTIYKILTACISKTIYSHVEKYNIFAEEQKGCRKNSQGCKEQLTIDAITITNAYKTKQNIHSMFIDYRKAFDSVPHSWLLEVLNIYKIHPILTAFLKSSMQNWKTELKINLKTGPICTKPIHIRRGIFQGDALSPLWFCLALNPLSLLLNNSKSGYNLKTNDSHFILSHLFYMDDIKLYANTKENLYNLIDITQQFSNDIHMQFGVDKCKILSVCKGKVESNSYMLDTRELIEPMDEYSTYKYLGFNQSRKIQQKETKHQLIKKFKYRVNLILKTNLNSKHTIKAINTFAVPVLIYSFGIINWSQTDLKKLQRIINTLMTKYRKHHPKSAIERLILPRHEGGRGLIDIHNLHNQQITALRSYFHAKSQQSSLHKHISDIDHKLTPLNLHDIHSQPNERTIDTQQKISKWSEKTLHGRHRSDLTQNHVDKDKSNDWLKIGELFPETEGFMLAIQDQTIPTRNFKKFIIKDPNQITDLCRHCNSASETIQHITGACKSLAQTDYKHRHDQVAAIIHQHLAYQYKFLNQKTPYYKYKPDTIHENRYCKIYWDRTIITDKTIHYNRPDITLHDKIKNIIYLIDIAIPNTHNIQSTISDKLTKYQDLAIELKTQWKAQTVQIVPIVISTTGIVPKSLQQSLEILKTPPYILSLIQKATILNTCRLTRKFLSSSSVTSTFVI

SEQ ID NO: 30953 - protein, 764 aa, Deilephila porcellus
MEYEHISIDTVLKVIRHTHNWKSPGTDNIQNYWYKKFTATHTYIQKFLNSFIQSPDTMPEYITHGITYLLPKDSDTENPAKYRPITCLQTIYKILTGCISETIYSHLSRYNILAEEQKGCRKNSQGCKEQLTIDAITINNAYKTNQNIHTMFIDYRKAFDSVPHSWLVEILHIYKIHPTLITFLKSSMQNWRTVLKITSNSSTVLTEPIQILRGIFQGDALSPLWFCMALNPLSLLLHNSKTGYNLNSVDSHFTLSHLFYMDDIKIYASNKEDLFHLIDITQKFSTDIHMQFGVDKCKILSINNGKFVHNSYRLDTGDIVEPMDAYSTYKYLGFKQSRKINQKYIKQEIINKFKHRLNLILKTDLNSKHMIKAINTFAISILTYSFGIISWSQTDLRKLQRTVNTSMTKHRKHHPKSAIERLILPRHEGGRGLIDIQNLHNKLITSLRTYFHNKSHNSFLHKCISNMDNKLTPLNLHDTHIQPNERISSIQEKIDRWAEKSLHGRHRSDLTQNHVDKEMSNEWLKRGELFPETEGFMLAIQDQIISTRNFKKFIIKDHNQTSDLCRQCNSASETIQHITGACKSLVQNDYKHRHDQVAAIIHQHIAHRYHFIKQKTPYYKYKPETVYDNKDCKIYWDRTIITDKTIHFNRPDITVHDKPNNTVYLIDIAIPNTHNIQTSISEKLTKYQDLAIELKTQWRAQTVHIVPIVVSSTGIVPKSLTQNLELLKIPRHIIYLLQKAIILNTSRITRKFLSSSSISSTLII

SEQ ID NO: 30954 - protein, 764 aa, Laothoe populi
MEFEDISLNTVTNIIKRTHNWKSPGTDNIHNYWYKKFSSTHTFIHRHLNTFIKSPDTMPGYVTHGVTYLLAKDNDTDNAAKYRPITCLQTIYKIMTACISETIYNHIDKNNLLSEQQKGCRKNSQGCKEQLTIDAITINDAYKHKQNIHTMFIDYRKAFDSVPHSWLLEVLYIYKIHPTIISFLQSSMQNWKTALKLKLDTNPITTDHISILRGIFQGDALSPLWFCLALNPLSALLNKNNIGYNLNCNDSQFTLSHLFYMDDIKLFATSQTDLFKLADITQQFSNDIHMHLGVDKCKILSIHKGKIQPNNYTLETGENIDPMDEFSSYKYLGFKQSRRIHQKETKQELIKKFKHRINLILRTNLNSKHTVKAINTFAIPILTYSFGVIKWSQTDLKKLQRIINTHMTKHRKHHPKSAIERLILPRHEGGRGLIDIQNLHNKQITSLRHYFHTKSQRSSLHKHASNVDNKLTPLNLRDTNTQPNETIIDTQQKILKWAQKSLHGRHRTDLTQNYVDKEKSNEWLKRGELFPETEGFMLAIQDQTILTRNYKKIIIKDPNQTTDYCRHCNSAPETVQHITGACKSLVQTDYKHRHDQLAAIIHQHIAHQYNFIHKKVPYYKYKPDTVLENKHCKIYWDRTIITDKTIHYNRPDITVHDKNSNYIYLIDIAIPNTHNLQTTISDKLTKYQDLAIELKTQWRAHTVHIIPIVLSSTGIIPKSLNQSLKTLNMPTHIQHLLQKATILNTCRITRKFLSSSSISSTYNI

SEQ ID NO: 30955 - protein, 1417 aa, Laothoe populi
MLVCLYNNNNNTPPKILPYVRVEHQTTWGADMRNTETYAANKVKVTLMEIMNNKRYNLRPLPGGRRGASGADAGCFSMRTIGGEELNRRAPTDKNTTADITYHMHSSSPTNSSLHSLFPSPNSSPNPLQKRNMSRSSSLTSSPVSVVVEADAVNPRPTIGSKRARLKWTDDMNKFIWRTYLITTKLETNTRGYLDLLHSTFTDKYPDMEVSKQRVGDQRRAIINNKLLPTSVLTEIRGDVATYLQCNEQPPTTIIKKTGRMTWSNDVNETIIRIYFEVTELESNLTACRKKMHSRFIELFPHLSHISEQRLSDQKRVIINNKMVPNERIAQIRHEVAIQTSHTVSHTNLNITAHTPIHTQTDNSLHETNCTQTNTLEEIINPSSQPNTTESHENPSNNTLLSTYKLDHDKINQQFIIALDQFKATNPTSRPHIPKQRTSKKLATITEYINTTILPNFLNADQDYTTFQTIIYSAAYTAAVCNGAKIIAALHPYKKSKPPWQRRLENKINTFRIEIAHLIQYIQGNKRRKIIATVETIKNKYKTHAQYDNTNTELIHFLDTIKQKLSTAASRLKRYTTCTARKRQNTQFINNERVFYREMNSHDNRGSDKRNPLAPPVEQLRQFWSDIWENPLQHKRNADWLDSIYETTTDIPAMEFEDISLNTVTNIIKRTHNWKSPGTDNIHNYWYKKFSSTHTFIHRHLNTFIKSPDTMPGYVTHGVTYLLAKDNDTDNPAKYRPITCLQTIYKIMTACISETIYNHIDKNNLLSEQQKGCRKNSQGCKEQLTIDAITINDAYKHKQNIHTMFIDYRKAFDSVPHSWLLEVLYIYKIHPTIISFLQSSMQNWKTALKLKLDTNPITTDHISILRGIFQGDALSPLWFCLALNPLSALLNKNNIGYNLNCNDSQFTLSHLFYMDDIKLFATSQTDLFKLADITQQFSNDIHMHFGVDKCKILSIHKGKIQPNNYTLETGENIDPMDEFSSYKYLGFKQSRRIHQKETKQELIKKFKHRINLILRTNLNSKHTVKAINTFAIPILTYSFGVINWSQTDLKKLQRIINTHMTKHRKHHPKSAIERLILPRHEGGRGLIDIQNLHNKQITSLRHYFHTKSQRSSLHKHASNVDNKLTPLNLRDTNTQPNETIIDTQQKILKWAQKSLHGRHRTDLTQNYVDKEKSNEWLKRGELFPETEGFMLAIQDQTILTRNYKKFIIKDPNQTTDYCRHCNSAPETVQHITGACKSLVQTDYKHRHDQVAAIIHQHIAHQYNFIHKKVPYYKYKPDTVLENKHCKIYWDRTIITDKTIHYNRPDITVHDKNSNYIYLIDIAIPNTHNLQTTISDKLTKYQDLAIELKTQWRAHTVHIIPIVLSSTGIIPKSLNQSLKTLNMPTHIQHLLQKATILNTCRITRKFLSSSSISSTYNI

SEQ ID NO: 30956 - protein, 1372 aa, Deilephila porcellus
MRPLPGGRRGASGADAGCHSMRTIGGEELNRRAPTDKHITADTIISDSLSSSYSSLNSLFPSPNSSPNPLETRNSSLSSSSSSLLASSPVDVVQVANAANPGPVTGSKRARKKWTNEMNKFIWRTYLITTKLGSNTRGYLDSLHRAFMEKYPEMDVSKQRIGDQRRAIVNNQLLPTSVLTEIERDVSNFLQNNEQPPTTITQTAGRMRWSNDINESIIRIYFEVTEAETNLTAYCKKMHQKFKDTYPHLSHISEQRLADQKRVIFNNKMVSPERIQCIKREVEIQLMHTQPSNSNIHLFSNCREHDVTSHTQINIPDGNFVDDVDAIALDPNEETATLPNQLITLNNRQQEQFIGNSYNLDHNYINQQFFLTLETFKLSVPTERPYIPKQRCSKKFAYIVNYINKNILPNFLNAEQDFTDFQTIVYSAAYTAAECNGTKIVTERTNQAGKYKPPWQTRLEKKIAILRTEIARLTLYTQGNRGRKILAAVELLKNKYKVHAQHENLNTQLEHFLDTLKQKLSAAASRLKRYLTCTNRKKQNTQFRNNERNFYRGLSGSDNRNTYTHNRPTPTPDRLRQYWADIWENPLEHNTHADWIHEITESTKDIHVMEYEHISIDTVLKVIRHTHNWKSPGTDNIQNYWYKKFTATHTYIHNFLNSFIQSPDTMPEYITHGITYLLPKDSDTENPAKYRPITCLQTIYKILTGCISETIYSHLSRYNILAEEQKGCRKNSQGCKEQLTIDAITINNAYKTNQNIHTMFIDYRKAFDSVPHSWLVEILHIYKIHPTLITFLKSSMQNWRTVLKITSNSSTVLTEPIQILRGIFQRDALSPLWFCMALNPLSLLLHNSKTGYNLNSVDSHFTLSHLFYMDDIKIYASNKEDLFHLIDITQKFSTDIHMQFGVDKCKILSINNGKFVHNSYRLDTGDIVEPMDAYSTYKYLGFKQSRKINQKDIKQEIINKFKHRLNLILKTDLNSKHMIKAINTFAISILTYSFGIISWSQTDLRKLQRTVNTYMTKHRKHHPKSAIERLILPRHEGGRGLIDIQNLHNKLITSLRTYFHNKSHNSFLHKYTSNMDNKLTPLNLHDTHIQPNERISSIQEKIDRWAEKSLHGRHRSDLTQNHVDKEMSNEWLKRGELFPETEGFMLAIQDQIISTRNFKKFIIKDHNQTSDLCRQCNSASETIQHITGACKSLVQNDYKHRHDQVAAIIHQHIAHRYHFIKQKTPYYKYKPETVYDNKDCKIYWDRTIITDKTIHYNRPDITVHDKPNNTVYLIDIAIPNTHNIQTSISEKLTKYQDLAIELKTQWRAQTVHIVPIVVSSIGIVPKSLTQNLELLKIPRHIIYLLQKAIILNTCRITRKFLSSSSISSTLII

SEQ ID NO: 30957 - protein, 1095 aa, Laothoe populi
MVSNERIAQIRHEVAIQTSHTVSHTNLNITAHTPIHTQTDNNLHETNCTQTNTLEEIINPSSQPNTTESHENPSNNTLLSSYKLDHDKINQQFIIALDQFKATNPTSRPHIPKQRTSKKLATITEYINTTILPNFLNADQDYTTFQTIIYSAAYTAAVCNGAKIIAALHPYKKSKPPWQRRLENKINTFRIEIAHLIQYIQGNKRRKIIATVETIKNKYKTHAQYENTNTELIHFLDTIKQKLSTAASRLKRYNTCTARKRQNTQFIYNERVFYREINSHDNRGSDKRNPLAPPVEQLRQFWSDLWENPLQHKRNADWLDSIYETATDIPAMEFEDIPLNTVTNIIKRTHNWKSPGTDNIHNYWYKKFSSTHTFIHRHLNTFIKSPDTMPDYVTHGVTYLLAKDNDTDNPAKYRPITCLQTIYKIMTACISETIYNHIDKNNLLSEQQKGCRKNSQGCKEQLTIDAITINDAYKHKQNIHTMFIDYRKAFDSVPHSWLLEVLYIYKIHPTIISFLQSSMQNWKTALKLKLDTNPITTDHISILRGIFQGDALSPLWFCLALNPLSALLNKNNIGYNLNSNDSQFTLSHLFYMDDIKLFATSQTDLFKLADITQQFSNDIHMHFGVDKCKILSIHKGKIQPNNYTLETGENIDSMDEFTSYKYLGFKQSRRIHQKETKQELIKKFKHRINLILKTNLNSKHTVKAINTFAIPILTYSFGVINWSQTDLKKLQRIINTHMTKHRKHHPKSAIERLILPRHEGGRGLIDIQNLHNKQITSLRHYFHTKSQRSSLHKHASNVDNKLTPLNLRDTNTQPNETIIDTQQKILKWAQKSLHGRHRTDLTQNYVDKEKSNEWLKRGELFPETEGFMLAIQDQTILTRNYKKFIIKDPNQTTDYCRHCNSAPETVQHITGACKSLVQTDYKHRHDQVAAIIHQHIAHQYNFIHKKVPYYKYKPETVLENKHCKIYWDRTIITDKTIHYNRPDITVHDKNSNYIYLIDIAIPNTHNLQTTISDKLTKYQDLAIELKTQWRAHTVHIIPIVLSSTGIIPKSLNQSLKTLNMPTHIQHLLQKATILNTCRITRKFLSSSSISSTYNI

SEQ ID NO: 30958 - protein, 1361 aa, Urbanus esmeraldus
MSKRVYNLRPLPGGRRGASGADAGCSSMRTIGGEELNRRAPTENNATADIISHPSHSSHSSPLSSLFPSPNSSPNPFLNPPYFDPASSIPSSSSSSPLTVDVVQEANVSHDGPTTAKLRARRKWTTEMNMFIWRTYLIISRLETHTRGYLDPLYKAFIEKYPEMNASKQSIGDQRRAIVNNKLLPTRLLKEIRDDVTKNLQQNDQPLPTLTQTAARMRWSDDINETILRIYYEVTELETNMTGHRKKLHDKFIQTYPHLAHLSEQRISDQRRVIVNYKMLSENKILQIRHDVETHLQISNTFTLFNHNISQNIQPITDTTHEDVFPQPSQVSMHTNIAGIHIDTRNNCNHIDCEKIKKQFNLALETFKNTDPTMRPYLPRQKPSKKLAFIVDYLNTHILPNILTTNQEFIAFQTILYSAAHTAVICNGTKINPIRTLVKNSKPPWQRRLETKINIFRAEIARLTQYIRGNRSNKIMIAVQKIKIKYQVHNQYENVNTDLEHFLDTLKQKLNASSSRLRRYVTCTARKKQNAQFINTEKAFYRNLTSKNQNLNRPENRLPTAENLHKFWENIWQNPVQHNIEANWIDIINESTRHIPDMIFEHITSDIFLHVIKSTHNWKSPGTDNIHNYWYKKFTSIHPYLHNHLNAFIQTPHLMPQYITHGVTYMLPKDKNTEDPSKYRPITCLQTIYKILTACLSKTIYNHLSDNNILAEQQKGCRKNSQGCKEQLTIDAVVLNEAYKKKQDIHSMFIDYRKAFDSVPHSWLLYILRLYKINPNIVNFIETSMQNWKTVLKINHNSSSITTDPIQILRGIFQGDALSPLWFCLALNPLSTLLNNSTAGYNLKTIDDRFSLTHLLYMDDIKLYASNINDLFTLADIAQRFSTDICMEFGIDKCKILSIHKGKIESNRYALETGQDIEPMEENSTYKYLGFKQSRKIIHKETKTEITNKFKNRLNLVFKTHLNSRNMIKAVNTFSIPILTYSFGIINWSQTELKNLQRIINTHMTKHRKHHPKSSIERLTLPRKEGGRGIIDIQNLHNKQISTLRHYFHTKSQYSLLHKQVTEIDNKLTPLNLRNRNTQPNEGLITTDQKIAKWAVKSLHGRHRTDLSQNYVDKEKSNDWLMKGELFPETEGFMLAIQDQIIATKNYRKYIIKDTSQQSDLCRHCTSAPETIQHITGACKSLVQTDYKHRHDQVAAIVHQHLAHMYNFIPNKSPYYKYKPTTILENQTIKIYWDRTILTDKTVHFNRPDITLHDKSNNTVYIIDIAIPNSHNIQSTISEKLSKYQDLAIELKTQWKAQIVHIVPIVLSSTGIIPKTLAQSLDILRMPTHSYYLLQKATILNTCRITRKFLTSSSVSSTYSI

SEQ ID NO: 30959 - protein, 1326 aa, Autochton zarex
MRTIGGKELNRRTPTEKNVTADVISHNTNSSSSSPLSSLFPSPNSSPNSFQNPSSLRPSSSSLSSSSSPSPSPVTVDVAQETDVSHKGPTTAKSRARRKWTVEMNMFIWRTYLIISRLETHTRGYLDSLHKAFIEKYPEMNASKQSVGDQRRAIVNNKLLSTTVIREIKDEVTKHLQQNQQQIPTLTQTTVRMRWSDEINETILRIYYEVTELETNMTAHRKKLHDKFIETYPHLAQLSEQRISDQRRVIINNKMLPESKILQIRHGVETHLQISSTLTQSDSNHSQNTSLQLRDVTHQDISSPPSQVHTRQEIHTHNNCNYIDCEKIKEHFNLTLDTFKNTDHRHKLFKKLAYIVDYLNTQILPNTLTPNQDFITFQTIIYSAAYTAVICNGTKIYHNRKITRDTKPPWQRRLENKIDIFRAEIARLTQYIRGNRSNRIITAVEKIRKKYQIHAQYENVNTELEHFLDTLKQKLSAASSRLKRYVTCTARKKQNAQFINTEKAFYRSLTSKNQNLNRTENKLPTAENLQKFWGNIWENPVQHNQETEWINIINEETEHISEMTFEHITTDIFLHVIKSTHSWKSPGTDNIHNYWYKKFTNIHTYLHDHLNTFIQSPHLMPQYITHGVTYMLPKENNTEDPAKYRPITCLQTIYKILTACISKTIYNHLSDHNILAEQQKGCRKNSQGCKEQLTIDAVVMNEAYFKKQDTHSMFIDYRKAFDSVPHSWLLHVLRLYKINANIVNFIETSMQNWKTVLKISSHSSAITTDPIRILRGIFQGDALSPLWFCLALNPLSTLLNNSNAGYNLKTTGNRFSLTHLLYMDDIKLYAGNINDLFTLADIAQQFSTDICMEFGIDKCKILSIHKGQIQSNMYALDTGQDIESMEENSTYKYLGFKQSRKILQRDTKAEITNNLKNRLNLVLKTHLNSRNLVKAINTFCIPILTYSFGIIKWSQTDLKNLQRIINTHMTKHRKHHPKSSIERLTLPRKEGGRGIIDIQNLHNKQISTLRQYFHTKSQHSLLHKQVTEIDNKLTPLNLKDNNTQPNEALINVDQKVAKWAVKSLHGRHRTDLSENYVDKEKSNDWLTKGELFPETEGFMLAIQDQIITTKNYRKYIIKDPNQLSDLCRHCNSAPETIQHITGACKSLVQSDYKHRHDQVASIVHQHLAHMYNFIPNKNPYYKYKPVTILENSTTKIYFDRTIITDKTVHYNRPDITLHDKKNNTVYIIDIAIPNSHNIQSTISEKLTKYQDLAIELKTQWKARIVHIVPIVLSSTGIIPKTLSQSLNILHMPSHSYYLLQKATILNTCRITRKFLTSSSVSSTYSI

SEQ ID NO: 30960 - protein, 1363 aa, Urbanus velinus
MSKRVYNLRPLPGGRRGASGAGAGCSSMRTIGGEELNRRTPTENNTTADIISHPNHSSNSSPLSSLFPSPNSSPNPFQNPSYFDPASSIPSSLSSSPMTVDVVQEANVSSDGSTTAKLRARRKWTTEMNMFIWRTYLIISRLETHTRGYLDPLHKSFVEKYPEMNASKQSIGDQRRAIVNNKLLSTTKLEEIKDDVTKYLQQNDQPLPTLTQTPARMRWSDDINETILRIYFEVTELETNMTAHRKKLHDKFIQTYPHLAHLSEQRISDQRRVIVNNKMLSENKILQIRHEVETQLQISNTSTLFNDNISQNIPLHSFRDMTLEDVGLPSSQVTMHTNLAAPHIDTLNNCNYIDCEKIKKQFNLALEIFKNTDPTMRPYLPRQKPSKKLAFIVDYLNTHILPNILTTNQEFLAFQTIVYSAAHTAVICNGTKINPIRTSVKVSRPPWQRRLENKIDILRAEIARLTQYIRGNRSNKIMIAVQKIKTKYQVHNQYENVNTDLEHFLDTLKQKLNASSSRLRRYITCTTRKKQNAQFINTEKAFYRNLTSKNQNLNRSENTLPTAENLHKFWGNIWQNPVQHNLEADWIDIINETTRHIPDMIFEHITSEIFLHVIKNTHNWKSPGTDNIHNYWYKKFTSIHPYLLNHLNTFIHTPHLMPKYITHGVTYLLPKDKNTEDPSKYRPITCLQTIYKILTACLSKTIYNHLSDNNILTEQQKGCRKNSQGCKEQLTIDAIVLNEAYTKKQDIHSMFIDYRKAFDSVPHSWLLYILRLYKINPSIVNFIETSMQNWKTVLKINHNSSSITTDPIQILRGIFQGDALSPLWFCLALNPLSTLLNNSNAGYNLKTTDDRFSLTHLLYMDDIKLYASNINDLFTLADIAQRFSTDICMEFGIDKCKILSIHKGKIESNRYALETGQDIEPMEENSTYKYLGFKQSRKIIHKETKTEITNKFKKRLNLVFKTHLNSRNMVKAINTFSIPILTYSFGIINWSQTDLKNLQRIINTHMSKHRKHHPKSSIERLTLPRKEGGRGIIDIQNLHNKQISTLRHYFHTKSQHSLLHKQVTEIDNKLTPLNLRNRNTQPNETLITTDQKIAKWAVKSLHGRHRTDLSENYVDKEKSNDWLMKGELFPETEGFMLAIQDQIIATKNYRKYIIKDSSQLSDLCRHCSSAPETIQHITSACKSLVQSDYKHRHDQVAAIVHQHLAHMYNFIPNKSPYYKYKPVTILENQTTKIYWDRTILTDKTVHFNRPDITLHDKSNNTVYIIDIAIPNSHNIQSTISEKLSKYQDLAIELKTQWKARIVHIVPIVLSSTGIIPKTLSQSLDILRMPTHSHYLLQKATILNTCRITRKFLTSSSISSTYSI

SEQ ID NO: 30961 - protein, 1335 aa, Chioides albofasciatus
MRTIGGEELNRRTPTEKNATADVISHHTDSSKSSPLSSLFPSPNSSPNPFQNACFHEHSSSESLSSSSSSPLIVDVVQEVKASHDEPTTAKTRARRKWTIEMNTFIWRTYLIITRLETHTRGYLDPLHKAFIEKYPAMNASKQSIGDQRRAIVNNKLLPITILKEIKDEVTIHLQQHEQTTPTLTQTTTRMRWSDDINETILRLYYEVTELETNLTAHRKKLHDKFIQTYPHLAHISEQRISDQRRVIVNNKMLPETKILQIRQDVETQLLISKTLPQFNDNHSNNASLPLITDMTHEDSVPIQVTIHTNDTGQETHTNNNHNHIDYKKIKQHFDLALDKFKNTDPTLRPYLPRQKPSKKLALTVDYLNTHILPNILTTEQDFITFQTVLYSAAYTAVICNGTRIKESRTLRRDTRPPWQRRLENKIEIFRVEIARLTQYIRGNRSNRIMTAVEKIKTKYQVHAQYEQENTELEHFLDTLKQKLNAASSRLRRYLTCTARKKQNAQFTNTEKAFYRSLTSKNENLNRSENRLPDAKKLHTFWSGIWENPVQHNTEAEWINIINGSTQHIPEMKFEHITFDTLLHVIKSTHNWKSPGTDNIHNYWYKKFTSIHPYLHNHLNTFIRSPHLMPQYITHGVTYMLPKDINTEDPSNYRPITCLQTIYKILNACISKSIYTHLSDHDILAEQQKGCRKNSQGCKEQLTIDAVVINEAYQKKQDIHSMFIDYRKAFDSVPHSWLLHILQLYKINSNIIDFIKISMQNWKTVLKISHYSSTITTDPIRILRGIFQGDALSPLWFCLALNPLSTLLNNSNAGYNLINTENRFLLTHLLYMDDIKLYADSINDLFLLADITQQFSSDICMEFGVDKCKILSIHKGQLESNRYALETEQDIEPMEENSTYKYLGFRQSRKILQKETKVEITNKFKNRLNLVLKTHLNSRNMIKAINTFSIPILTYSFGIINWSQTDLKNLQRIINTHMTKHRKHHPKSSIERLTLPRKEGGRGIIDIQNLHNKQISTLRYYFHTKSQSSDLHKLVTEIDNKLTPLNLKNRNKEPNETLISIDQKLAKWAIKSLHGRHRTDLSQTHVDKEKSNDWLMKGELFPETEGFILAIQDQIIATKNYRKFIIKDTNQLSDLCRHCNSAPETIQHITGACRSLVQSDYKHRHDQVAAIVHQHLAHIYNFIPKKNPYYKYKPVTILENQAAKIYWDRTIITDKTVHYNRPDITLHDKKSNTVYIIDIAIPNSHNLQSTISEKLSKYQDLAIELKTQWKVRIVHIVPIVLSSTGIIPKTLAQSLDILHMPKHAHHLLQKATILNTCRIVRKFLTSSSVSSAYSI

SEQ ID NO: 30962 - protein, 1337 aa, Telegonus cellus
MRTVGGEELNRRTPTEKNVTADVIAHHSNTSISSPLSSLFPSPNSSPNPFQNPSYFDPSSSVPLSSSSLSPLTVDVVQEANVSHDGPTTAKSRARRKWTIEMNMFIWRTYLIISRLETHTRGYLDPLHKAFIEKYPEMNASKQSIGDQRRAIVNNKLLSTTLLREIKDDVTKHLQQNNQPLPTLTQTAARMRWSDDINETILRFYYEVTELETNMTAHRKKLHDKFIQNYPHLAHLSEQRISDQRRVIVNNKMLSETKIIQIRYDVETQLQISKTPTQFNDSLTQNSSLQPIRDMTHEDVGPPLSQVTMHTNLAGQPIHIHNNCNYIDSEKIKQHFNLALDTFKNTEPTLRPYLPRQKPSKKLALIVNHLNTHILPNILTDNQDFIAFQTILYSAAYTAVICNGTKITPIRTPLRDSRPPWQRRLENKIDIFRAEIARLTQYIRGNRSNRIMIAVEKIKAKYQVHAQYENLNTELEHFLDTLKQKLKAASSRLRRYVTCTARKKQNAQFINTEKAFYRSLTSKNQNLNRLESRLPTPENLHKFWGDIWENPVQHNLEAEWINIIKETTKHIPEMIFEHITSDIFLHVIKSTHNWKSPGTDNIHNYWYKKLTSIHPYLHKHLNTFIQSPHLMPQYITHGVTYMLPKDNNTEDPSKYRPITCLQTIYKILTACISKTIYNHLSDHNILAEQQKGCRKNSQGCKEQLTIDAIVLNEAYTKKQDIHTMFIDYRKAFDSVPHSWLLHILQLYKISPNLINFIQTSMQSWKTVLKISHHSSSITTDPIQILRGIFQGDALSPLWFCLALNPLSTLLNNNNTGYNLKTTDNQFSLTHLLYMDDIKLYANNISNLFTLADIAQQFSTDICMEFGVDKCKILSIHKGQMECNRYALETGQDIEPMEENSTYKYLGFKQSRKIKQKETKAEITNKFKNRLNLIFKTHLNSRNMVKAINTFSIPILTYSFGIINWSQTDLKNLQRIINTHMTKHRKHHPKSSTERLTLPRKEGGRGIIDIQNLHNRQISTLRQYFYTKSLHSLLHKQVTEIDNKLTPLNLKNRNTQPNEALTTIDQKVAKWAIKSLHGRHRTDLSENYVDKEKSNDWLMKGELFPETEGFMLAIQDQIITTKNYRKFIIKDTNLLSDLCRHCNSAPETIQHITGACKSLVQSDYKHRHDQVAAIVHQHLAHMYKFIPNKNPYYKYKPVTILENQTSKIYWDRTILTDKTVHFNRPDITLHDKNNNTVYIIDIAIPNSHNIQSTISEKLSKYQDLAIELKTQWKARIVHIVPIVLSSTGIIPKSLTQSLDILRMPTHAHHLLQKATILNTCRITRKFLTSSFVSSTYSI

SEQ ID NO: 30963 - protein, 1334 aa, Urbanus sp.
MRTIGGEELNRRAPTENNATADIISHPNHSSNSSPLSSLFPSPNSSPNLFHNPSYIDSASSIPSSLSSSPLTVDVVQEANVSCDGSTTAKLRARRKWTTEMNTFIWRTYLIISRLETHTRGYLDPLHKAFIEKYPDMNASKQSIGDQRRAIVNNKLLPTTKLKEIKDDVSKHLQQNDQPLPTLTQTAARMRWSDEINETILRIYYEVTELETNMTTHRKNLHVKFIQTYPHLAHLSEQRISDQRRAIVNNKMLSDNKILQIRHEVETQLQISNTFTLFDDNISQNIPLQPIRDTTLEDAGPLPSQVTMHTNLAHMDTHNTCKYIDCEKIKNQFNLALETFKNTDPTMRPYLPRQKPSRKLAFIVDYLNTHILPNILTTNQEFIAFQTILYSAAHTAVICNGTKINPIRTSVKDSKPPWQRRLESKIDILRAEIARLTQFIRGNRSNKIMITVQKIKTKYQVHNQYENVNTDLEHFLDTLKQKLNASSSRLRRYVTCTARKKQNAQFINAEKAFYRNLTSKNQNLNRSENTLPTAENLHKFWENIWQNPVQHNLDANWLDIINETTRHIPDMIFEHITSDIFLHVIKSTHNWKSPGTDNIHNYWYKKFTSTHPYLQNHLNTFIHTPHLMPQYITHGVTYMLPKDKNTEDPSKYRPITCLQTIYKILTACLSKTIYNHLLDNNILAEQQKGCRKNSQGCKEQLTIDAIVLNEAYIKKQDIHSMFIDYRKAFDSVPHSWLLHILRLYKINPNIINFIETSMQNWKTVLKINHNFSSITTDPIQILRGIFQGDALSPLWFCLALNPLSALRNNSTLGYNLKTTDDRFSLTHLLYMDDIKLYASNINDLFTLADIAERFSTDICMEFGIDKCKILSVHKGKIESNRYALETGQDIEPMEENSTYKYLGFKQSRKIIHKETKTEITNKFKNRLNLVFKTHLNSRNMVKAINTFSIPILTYSFGIIKWSQTDLKNLQRIINTHMSKHRKHHPKSSIERLTLPRKEGGRGIIDIQNLHNKQISTLRHYFHTKSQHSLLHKQVTEIDNKLTPLNLRNRNTQPNEAFITSDQKIAKWAVKSLHGRHRTDLSENYVDKEKSNDWLMKGELFPETEGFMLAIQDQIIATKNYRKYIIKDTSQISDLCRHCNSAPETIQHITGACKSLVQSDYKHRHDQVAAIVHQHLAHMYNFIPNKSPYYKYKPVTILENQSTKIYWDRTILTDKTVHFNRPDITLHDKSNNTVYIIDIAIPNSHNIQSTISGKLSKYQDLAIELKTQWKARIVHIVPIVLSSTGIVPKTLTQSLNILRMPTHSHYLLQKATILNTCRITRKFLSSSSVSSTYSI

SEQ ID NO: 30964 - protein, 1398 aa, Astraptes hopfferi
MCLPYRRNCSNSMCSETIVKVKCQRHLTLVKVKSSLIKYMHVKIDLSFVSYLKRIPISFLKLKGQDRCILFGKSNLKGFLFAEMFKLRYHHTNSSNPSPISSLFPSPNSSPNPFQNSSYVDPSSSVSSSSSSPLTVDVVQEANASHDGPTTAKSRARRKWTIEMNMFIWRTYLIISRLETHTRGYLDPLHKAFTEKYPEMNASKQSIGDQRRAIVNNKLLSTTLLREIKDDVTKHLQQNNQPLPTLTQTAARMRWSDDINETIIRIYYEVTELETNMIAHRKKLHDKFIETYPHLAHLSEQRISDQRRVIVNNKMLSETKITRIRHEVETQLQITNTPMQSNDNLTQNLSQPIRNMTHGAVDPSLSQVSMHPNIPRQHIHINNNCNYIDREKITQHFNIALDTFKNTEPILRPYLPRQKPSKKLASIVDHLNTHILPNILTDNQDFITFQTIVYSAAYTAVICNGTKINPIRTLVKDSRPPWQRRLENKIDIFRAEIGRLTQYISGNRSKRIVIAVEKIKTKYQVHAQYENVNTELQHFLDTLKQKLNAASSRLRRYITCTARKKQNTQFINTEKAFYRNLTSKNQNLNRPECKLPTTENLHKFWGDIWENPVQHNLQAEWINIIKDTTEHIPEMSFEHITIDIFLNVIKSTHNWKSPGTDNIHNYWYKKFTSIHPYLHNHLNTFIQSPHLMPQYITHGVTYMLPKDNNTEDPSKYRPITCLQTIYKILTACISKTIYNHLSEHNILAEQQKGCRKNSQGCKEQLTIDAIVLNEAYVKKQDIHTMFIDYRKAFDSVPHSWLLHILQLYKISPNIINFIQTSMQNWKTVLKISHHASTITTGQIQILRGIFQGDALSPLWFCLALNPLSTLLNNSNTGYSLKTTDNQFSLTHLLYMDDIKLYASNISSLFTLADIAQQFSTDICMEFGVDKCKILSIHKGQIECNRYALDTGQDIEPMEENSTYKYLGFKQSRKIKQKETKAEITNKFKNRLNLVFKTHLNSRNMVKAINTFSIPILTYSFGIINWSQTDLKKLQRIINTHMTKHRKHHPKSSIERLTLPRKEGGRGIIDIQNLHNKQISTLRQYFYTKSLHSLLHKQVTEIDNKLTPLNLKNRNTQPNEALVTMDQKVAKWAIKSLHGRHRTDLSENYVDKEKSNDWLMKGELFPETEGFMLAIQDQIISTKNFRKYIIKDTNQLSDLCRHCNSAPETIQHITGACKCLVQSDYKHRHDQVAAIVHQHLAHMYKFIPNKNPYYKYKPVTILENQTTKIYWDRTILTDKTVHFNRPDITLHDKNNNTVYIIDIAIPNSHNIQSTISEKLSKYQDLAIELKTQWKARIVHIVPIVLSSTGIIPKSLTQSLNILGMPTHSHHLLQKATILNTCRITRKFLTSSSISSTYLI

SEQ ID NO: 30965 - protein, 1043 aa, Astraptes enotrus
MTHADVGPSPSQLTIDTNPAGPQIHTHKNCNYIDCEKIKHQFRLALETFTNTDPTLRPYLPRQKPSKNLALVVQYLNTHILPNILNTNQDFIAFQTILYSAAYTAVICNGTKINPIRTFVRDSKPPWQRRLENKIDIFRAEIARLTQYIHGNRSNKIMIAVEKIKKKYQVHAQYENINTELEHFLDTLKQKLNAASSRLRRYVTCTARKKQNAQFINTEKAFYRNLTTRNQNLNRPESKLPTAENLHKFWGDIWENPVQHNLEAEWIDIITETTKSIPEMIFEHITSDTFLHVIKSTHNWKSPGTDNIHNYWYKKFTSTHPYLHNHLNTFIQTPHLMPKYITHGVTYMLPKDNNTEDPSKYRPITCLQTIYKILTACLSNTIYNHLSDHNVLAEQQKGCRKNSQGCKEQLTIDAVVLNEAYINKQDIHSMFIDYRKAFDSVPHSWLLHILRLYKISPNIVNFIATSMQNWKTVLKINHNSSSITTDPIKILRGIFQGDALSPLWFCLCLNPLSTLLNNSPAGYNLKTTDNQFSLTHLLYMDDIKLYANNINDLFTLADIVQQFSTDICMEFGIDKCKILSIHKGRIESNRYALETGQDIEPMEENSTYKYLGFKQSRKIIHKETKTEITNKFKNRLNLVFKTHLNSRNMVKAINTFSIPILTYSFGIINWTQTDLKNLQRIINTHMSKHRKHHPKSSIERLTLPRKEGGRGIIDIQNLHNRQISTLRYYFHLKSQHSLLHKQITEIDNKYTPLNLKNRNTQSNEALITIDQKIAKWAVKSLHGRHRTDLSENYVDKEKSNDWLMKGELFPETEGFMLAIQDQIINTKNYRKYIIKDTNQLSDLCRHCNSAPETIQHITGACKSLVQSDYKHRHDQVAAIVHQHLAHIYNFIPNKIPYYKYKPVTILENQTSKIYWDRTILTDKTVHFNRPDITLHDKSNNTVYIIDIAIPNSHNIQSTISEKLSKYQDLAIELKTQWKARIVHIVPIVLSSTGIIPKTLTQSLDILRMPTHSHHLLQKATILNTCRITRKFLTSSSVSSAYSI

SEQ ID NO: 30966 - protein, 1367 aa, Telegonus cellus
MSKRVYNLRPLPGGRRGASGADAGCSSMRTIGGEELNRRTPTEKHATADIIPHPSIFPDSSPLSSLFPSPISSPNPFQNLSYLDRSESLPLSSSSSSPLTVDVVQDANASHDGPTTAKLRARRKWTIEMNMFIWRIYLITTRLETHTRGYLDPLHKAFIEKYPEMNASKQNIGDQRRAIVNNKLLSTTTLHEIKDEVTKYLQKRTNEQQLPTLTQASTRMRWSDDINETILRIYFEITELETNMTAHRKKLHDKFIQTYPHLSHLSEQRISDQRRVIVNNKMLTEAKILEIRHDVEIKLKKSNTTTNCNENELQTTTLKQITDTIQITTNEEIPPLSQVTHTNFTEQEIHTSSSNFIDNEEIKKQFDLALHSFKNTEPAMRPYLPRQKSSKKLALIVDYINRDILPNILTNNQDFITFQTILYSAAYTAVICNGTKVNSVRTVRSDIKPPWQRRLESKINILRAEIGRLTQYILGNRSNRIKTAVDKIKIKYQVHAQYENINTELEHFMDTLKQKLNTAASRLKRYITCTARKKQNTQFTNTEKAFYRGLTINNQNSIRQQNTAPTPENLHQFWSDIWENPVHHNAEADWIHLITEETKHIPEMNFEHITIDTFLHVIKNTHNWKSPGTDNIHNYWYKKFTSIYPYLHYHLNIFIKSPQLMPPYITHGVTYMLPKETNTEDPAKYRPITCLQTVYKILTACISKTIYCHLSDHDILAEQQKGCRKNSQGCKEQLTIDAIVINEAYSKKRDIHSMFIDYRKAFDSVPHSWLLQILRLYKINPSIIHFIEYSMQNWNTVLKVRQPSSTIITDPIHILRGIFQGDAFSPLWFCLALNPLSTLLNNSNAGYNLISTDSRFSLTHLLYMDDIKLYAGNINDLFQLADLAQQFSTDICMEFGVDKCKILSIHKGQIESNRYALESGQDIEPMDENSAYKYLGFKQSRKILQKETKVEITNKFKNRLNSVLKTHLNSRNMVKAINTYCIPILTYSFGIINWSQTDLKNLQRTINTHMTKHRKHHPKSSIERLTLPRKEGGRGITDIQNLHNKQITTLRHYFHIKSQQSPLHKQITEMDSKLTPLNLRNTNTQSNEALTTIDQKAAKWASKSLHGRHRTDLSQNYVDKERSNDWLMKGELFPETEGFMLAIQDQIIATKNYRRYIIKDINQPLDLCRHCNSASETIQHITGACKSLVQSDYKHRHDQVAAIVHQHLAHMYNFILKKSPYYKYKPATILENQTSKIYWDRTIITDKTIHFNRPDITLHDKKSNTVYIIDIAIPNSHNIQSTISGKLSKYQDLAIELKTQWKARIVHIVPIVLSSTGIIPKTLIQSLNILRMPTHSQHLLQKATILNTCRITRKFLTSSSVSSTYSI

SEQ ID NO: 30967 - protein, 1365 aa, Epargyreus clarus
MSKRVYNLRPLPGGRRGASGADAGCSSMRTIGGEELNRRTPTEKSVTADIISHPSNSSISSPSSSLFPSPTSSPNSSRNPSYLDRSSSVPLSSSSSPLTVDVVQEANASHNVPTTAKSRARRKWTIEMNMFIWRTYLITTRLETHTRGYLDSLHKAFIEKYPEMSASKQNIGDQRRAIVNNKLLSTNTLQEIKDEVTTYLQQNKQPLPSLTQTSARMRWSDEINETILRIYYEITELETNMTAHRKKLYNKFIQIYPHLAHISEQRISDQRRVIVNNKMLTDAKILEIRHTVETQLEKSNTLTQFNENYLPNTLLQPVTDTTEITTNEDIPQHSQVIPTNFTEQEIHTNNHRNHIDHAKIKEHFNLALDTFKNTEPTMRPYLPTQKSSKKLALIVDYINKNILPAILTDDQDFITFQTILYSAAYTAVICNGTKISSITSRTLRRDTRPPWQRRLESKIDIYRAEVGRLTQYIRGNRTNRIKTAVEKIKKKYQVHAQYENINTELEHFMDTLKQKLNTASSRLKRYITCTARKKQNTQFTSTEKAFYRGLTYNKQTSNARQECIEPTPENLHKFWSDIWENPVQHNLKAEWINVIKEATKNIPEMIFEHITFETFVHVIKSTHNWKSPGTDNIHNYWYKKFTSIYPYLHNHLNKFILSPQLMPQYITHGITYMIPKENNTEDPSKYRPITCLQTIYKILTACISKTIYSHLSDHDILAEQQKGCRKNSQGCKEQLTIDAIVINEAYSKKHDIHTLFIDYCKAFDSVPHSWLLQIIKINPSIVEFLETSMKNWKTVLKIRQPSSTITTDPIRILRGIFQGDALSPLWFCLALNPLSTLLNNSTAGYNLITTDNRFSLTHLLYMDDIKLYAGNVNDLFQLADLTQQFSTDICMEFGVDKCKILSINKGHIETNKYALETGQDIEPMDVNSAYKYLGFKQSRKILQKETKAELTNKFKHRLNLVLKTHLNSRNMVKAINTFSIPILTYSFGIINWTQTDLKNLQRTINTHLTKHRKHHPKSSIERLTLPRKEGGRGIIDVQNLHNKQISSLRHYFHSKSQHSLLHKQVAEIDSRLTPLNLKNTNSQSNEALITVDQKIAKWVGKSLHGRHRTDLSQNYVDKEKSNDWLVRGELFPETEGFMLAIQDQIIATKNYRKFIIKDTNQPSDLCRHCNSAPETIQHITGACKSLVQSDYKHRHDQVAAIVHQHLAHRYNFILKKNPYYKYKPATILENQTCKIYWDRTIITDKTIHFNRPDITLHDKKSNIVYIIDIAIPNSHNLQSTISEKLTKYQDLAIELKTQWKARIVHIVPIVLSSTGIIPKTLTQSLNILQMPTHSHHLLQKATILNTCRITRKFLTSSSISSTYSI

SEQ ID NO: 30968 - protein, 1355 aa, Hemaris fuciformis
MEIMSNRRYNLRPLPGGRRGASGADAGCFSMRPIGGEGLNRRAPTDKNTTADVTITRCSSFTSSSSIDTLFPSPSSSPNSSEKHYLLRSASSSSPTSSPVDDVLEAKATNPRPATGCKRARKKWTDDMNKFIWRTYLISTKLETNTRGYLDLLHQKFIEKYPEMDVSKQRVGDQRRAIINNQLLPMSILTEIKIEVTSYLQNNEQPITTITQTSGRMRWSNDVNETIIRIFFEVTELETNLTAYCKKMHDKFINTYPHLSHISEQRLADQKRAIINNKMLSVEKIEQIKREIEEQLKTHVNHTQHSETHIRVDNFDDTLDAIAENNPHQTENLRYHSEENNNNIDYDDINQQFFMVLETFKSTNPTTRPYIPKQRTSKKLANIVAYLNEKILPNFLNTVQDFPTFQTIVYSAAYTAAVINGAKIRAEGAPPKEVPKPPWQRRLENKIAILRAEIARLTQYIRGNRGRKIMKAVEIIRNKYQIHAQHEHLNSELVHFLDTMKQKLNAAASRLKRYITCTARKTQNTIFKNNERSFYRGLKTHDSNNVDHTNKLPTPENLRQFWSGVWEAPHQHNTQADWLGSVNESTINIPVMEFEHIPIDTVLHVIKRTHNWKAPGSDNIHNYWYKKFTSTHTSIHRHLNTFIQSPQIIPEYVTHGVTYLLPKDSDSENPAKYRPITCLQTIYKIFTACISETIYYHLDKYNVLAEEQKGCRKGSQGCKEQLTIDAITINSACKTNQNIHTMFIDYRKAFDSVPHSWLLEVLRIHKIHPTLITFLKSAMQNWKTVLKIKHNSSPVITEPIRILRGIFQGDALSPLWFCMALNPLSFLLQKSNIGYNLSCNDSQFTLSHLFYMDDIKLYANTEENLYNLIDIAQQFSNDIHMQFGVDKCKILSINKGKIQLNSYMLDTGEIIEPMDEYSTYKYLGFKQSRKIQQKDTKQELIQKFKHRLNLILKTQLHSKHTIKGINTFAIPILTYSFGIINWSQTDLKKLQRIINTLMSKHRKHHPKSAIERIILPRHEGGRGFIDIQNLHNRQIKTLRSYFHTKSEQSSLHKHASDTDKKLTPLNLHDTHTQVNEKIISAEEKIAKWAEKSLHGRHRSDLTQNHVDKDKSNEWLKVGELFPETEGFMLAIQDQVILTRNYKKFIIKDPKQATDLCRHCNSASETIQHITGACKALVQTDYKHRHDQVAAIIHQHIAHYYKFISQKVPYYKYKPEIIHENRHCKIYWDRTIITDKTIHYNRPDITIHDKLSNTVHLIDIAIPNTHNIQTTISDKLTKYQDLAIELKTQWKAQSVHIVPIVISSTGIVPKSLKDSLDMLKTPPYILHIIQKAIILNTCRITRKFLSSSSVSSTFTI

SEQ ID NO: 30969 - protein, 1366 aa, Deilephila porcellus
MENMNNKRYNLRPLPGGRRGASGADAGCYSMRTIGGEELNRRASTDKNTTADIIIRGSLSPSNSSISSLFPSTNSSPNPLEYRNTSRLSSSSSSSISSPVDVVLEANATNPGPITGPKRARKKWTDDMNKFIWRTYLITTKLGSNTRGYLDTLHRAFVEKFPEMDVSKQRVGDQRRAIVNNRLVPSSILTEIETDVANFLQNNEQPPNTITQTTGRMRWSNDINESILRIYFETTELETNLTAYCKKMHDKFINLYPNLSHISEQRLADQKRAIINNKMVSEDRIQQIKREVEIQLSHTSTTHSNLNFNSNHVHEDLTPHTQINTFEEDVGTIATYQLRNQVQRNTINFPRTNLYNVDYDKINQQFYMTLETFKHTHPTERPYIPKQRTSKKFACIVEYINKNILPNFLNTEQDFLSFQTIVYSAAYTAAICNGAKIVTERAPHEKYKAPWQKRLENKVGILRAEIARLTQYLQGNTSRRIIKAIEIIKNKYKIHAQYDSLNTELEHFLDTIKQKLNATASRLKRYVTCTARKKQNTQFKNNERLFYRGLNEFDHSDSNHVRTPTPETLRQYWATMWENPLQHNSNAHWISSINESTVNIPVMEFEYLPIDMVLKVIKHTHNWKSPGSDNIQNYWYKKFTLTHTHIHRHLNAFIESPETMPDYITQGITYLLPKDNDTENPAKYRPITCLQTIYKILTACISETIYSHLSKYNILAEEQKGCRKNSQGCKEQLTIDAITINSAYKTNQNIHTMFIDYRKAFDSVPHSWLLEVLNIYKIHPTIITFLKSSMQNWKTVLKLKHSSNSIITEPIHILRGIFQGDALSPLWFCLALNPLSLLLHNSKAGYTLNPINSQFTLSHLFYMDDIKLYARSKEDLFRLTDITQEFSNDIHMGFGVDKCKILSINRGKLQNNSYMLDSGESIEPMDEYSTYKYLGFKQSRKIQLKETKQELIKKFKHRLTLILKTHLNSKNTVKAINTFAIPILTYSFGIINWSQTDLKKLQRIINTFMTKHRKHHPKSAIERLILPRNEGGRGLIDIQNLHNKQITTLRSYFHTKSNHSPLHKNASITDIKLTPLNLHDTQTQPNEKIIDIQQKIARWAEKSLHGRHRSDLTQNHVDKEMSNEWLKIGELFPETEGFILAIQDQTILTRNYRKFIIKDPNQTTDVCRHCNSASETIQHITGACKSLVQTDYKHRHDQVAAIIHQHLAHQYKFIDGKVPYYKYKPATVYENSKCKIYWDRTIITDKTIHYNRPDITLHNKLNNTIYLIDIAIPNTHNIQSTISDKLTKYQDLAIELKTQWRASTVHIVPIIISSTAIVPKNLTQNLELLKIPPYIIHLLQKATILNTCRITRKFLSSSSISSSFTI

SEQ ID NO: 30970 - protein, 1355 aa, Hemaris fuciformis
MEIMSNRRYNLRPLPGGRRGASGADAGCFSMRPIGGEGLNRRAPTDKNTTADVTITRCSSFTSSSSIDTLFPSPSSSPNSSEKHYLLRSASSSSPTSSPVDDVLEAKATNPRPATGCKRARKKWTDDMNKFIWRTYLIATKLETNTRGYLDLLHQKFIEKYPEMDVSKQRVGDQRRAIINNQLLPMSILTEIKIEVTSYLQNNEQPITTITQTSGRMRWSNDVNETIIRIFFEVTELETNLTAYCKKMHDKFINTYPHLSHISEQRLADQKRAIINNKMLTVEKIEQIKREIEEQLKTHVNHTQHIETHIRVDNFDDTLDAIAENNPHQTENLRYHSEENNNSIDYDDINQQFFMVLETFKSTSPTSRPYIPKQRTSKKLSSIVAHLNEKILPNFLNADQDFPTFQTIVYSAAYTAAVINGAKIRAEGTPPKEVPKPPWQRRLENKIAILRAEIARLTQYIRGNRGRKIMKAVEIIRNKYQIHAQHEHLNSELVHFLDTMKQKLNASASRLKRYITCTARKTQNTIFKNNERSFYRGLKTHDPNNVDHTHKLPTPENLRQFWSGVWEAPHQHNTQADWLGSVNESTINIPVMEFEHIPIDTVLHVIKRTHNWKAPGSDNIHNYWYKKFTSTHTSIHRHLNTFIQSPQIIPEYVTHGVTYLLPKDSDSENPAKYRPITCLQTIYKIFTACISETIYYHLDKYNVLAEEQKGCRKGSQGCKEQLTIDAITINSACKTNQNIHTMFIDYRKAFDSVPHSWLLEVLRIHKIHPTLITFLKSAMQNWKTVLKIKHNSSPVITEPIRILRGIFQGDALSPLWFCMALNPLSFLLQKSNIGYNLSCNDSQFTLSHLFYMDDIKLYANTEENLYNLIDIAQQFSNDIHMQFGVDKCKILSINKGKIQLNSYMLDTGEIIEPMDEYSTYKYLGFKQSRKIQQKDTKQELIQKFKHRLNLILKTQLHSKHTIKGINTFAIPILTYSFGIINWSQTDLKKLQRIINTLMSKHRKHHPKSAIERLILPRHEGGRGLIDIQNLHNRQIKTLRSYFHTKSEQSSLHKHASDIDKKLTPLNLHDTHTQVNEKIISAEEKIAKWAEKSLHGRHRSDLTQNHVDKDKSNEWLKVGELFPETEGFMLAIQDQVILTRNYKKFIIKDPKQATDLCRHCNSASETIQHITGACKALVQTDYKHRHDQVAAIIHQHIAHYYKFISQKVPYYKYKPEIIHENRHCKIYWDRTIITDKTIHYNRPDITIHDKLSNTVHLIDIAIPNTHNIQTTISDKLTKYQDLAIELKTQWKAQSVHIVPIVISSTGIVPKSLKDSLDMLKTPPYILHIVQKAIILNTCRITRKFLSSSSVSSTFTI

SEQ ID NO: 30971 - protein, 1355 aa, Hemaris fuciformis
MEIMSNRRYNLRPLPGGRRGASGADAGCFSMRPIGGEGLNRRAPTDKNTTADVTITRCSSFTSSSSIDTLFPSPSSSPNSSEKHYLLRSASSSSPTSSPVDDVLEAKATNPRPATGCKRARKKWTDDMNKFIWRTYLISTKLETNTRGYLDLLHQKFIEKYPEMDVSKQRVGDQRRAIINNQLLPMSILTEIKIEVTSYLQNNEQPITTITQTSGRMRWSNDVNETIIRIFFEVTELETNLTAYCKKMHEKFINTYPHLSHISEQRLADQKRVIINNKMLSVEKIEQIKREIEEQLKTHVNHTQHSETHIRVDNFDDTLDAIAENNPHQTENLSYHSEENNNNIDYDDINQQFFIVLETFKSTNPTTRPYIPKQRTSKKLANIVAYLNEKILPNFLNTVQDFPTFQTIVYSAAYTAAVINGAKIRAEGAPPKEVPKPPWQRRLENKIAILRAEIARLTQYIRGNRGRKIMKAVEIIRNKYQIHAQHEHLNSELVHFLDTMKQKLNAAASRLKRYITCTARKTQNTIFKNNERSFYRGLKTHDSNNVDHTNKLPTPENLRQFWSGVWEAPHQHNTQADWLGSVNESTINIPVMEFEHIPIDTVLHVIKRTHNWKAPGSDNIHNYWYKKFTSTHTSIHRHLNTFIQSPQIIPEYVTHGVTYLLPKDSDSENPAKYRPITCLQTIYKIFTACISETIYYHLDKYNVLSEEQKGCRKGSQGCKEQLTIDAITINSACKTNQNIHTMFIDYRKAFDSVPHSWLLEVLRIHKIHPTLITFLKSAMQNWKTVLKIKHNSSPVITEPIRILRGIFQGDALSPLWFCMALNPLSFLLQKSNIGYNLSCNDSQFTLSHLFYMDDIKLYANTEENLYNLIDIAQQFSNDIHMQFGVDKCKILSINKGKIQLNSYMLDTGEIIEPMDEYSTYKYLGFKQSRKIQQKDTKQELIQKFKHRLNLILKTQLHSKHTIKGINTFAIPILTYSFGIINWSQTDLKKLQRIINTLMSKHRKHHPKSAIERLILPRHEGGRGLIDIQNLHNRQIKTLRSYFHTKSEQSSLHKHASDTDKNLTPLNLHDTHTQVNEKIISAEEKIAKWAEKSLHGRHRSDLTQNHVDKDKSNEWLKVGELFPETEGFMLAIQDQVILTRNYKKFIIKDPKQATDLCRHCNSASETIQHITGACKALVQTDYKHRHDQVAAIIHQHIAHYYKFISQKVPYYKYKPEIIHENRHCKIYWDRTIITDKTIHYNRPDITIHDKLSNTVHLIDIAIPNTHNIQTTISDKLTKYQDLAIELKTQWKAQSVHIVPIVISSTGIVPKSLKDSLDMLKTPPYILHIVQKAIILNTCRITRKFLSSSSVSSTFTI

SEQ ID NO: 30972 - protein, 1264 aa, Hestina assimilis
MMILNNYYLINITSFNNHVSTKKIIIIRKWTIEMNKFIWRTYLITSKLETQTRGYLDPLHNAFTEKYPEMNASKQSIGDQRRAIVNNKLLPLSTLTTIKDEVASYLEQNIDPPLTLTQTSARIRWSDDMNETILRIYFEVTGLESNTTAYRKKLHDKFLQAYPHLSQLSEQRISDQKRAILNNKMVSEDKIKQIKKEVKKRMQLSQTFTHTNDNQTQNNLLHTPSPSTTNKEENISLIQQRTHSQKNTTYAVDYAKIEQQFNLALDTFINTDPTLRPHLPRQKPSKKLALIVDYLNNNILPQFLNKDQDFGTFQTIIYSAAYTAVICNGTKINFDRIPTRKVKPAWHRRLEIKIEKFRSEIGRLTQYIQGNRSQRILRAVEAVKNKYQKHAQYENSNTEIEHFLDTLKQKLNAAASRLKRYLNCTARKKQNTQFTHTEKKFYRSLTCNKQNSNTRAIRLPTPESLHQFWFNTWGNPFEHNINAEWKNNVTRTAEHIPNMEFEHITTDTFIRILKHTHNWKAPGTDNIHHYWYKKFTCVHPFLHSHLNTFIHSPHTMPAYITHGITYMISKDTNTEDPSKYRPITCLQTVYKILTACISDTIQEHISEHRILSEQQKGCRKNSQGCKEQLIIDSVVINEAYNKKRDIHSMFIDYRKAFDSVPHSWLLYILQLYKINPTIIKFLESSMHNWQTILQLKQHSTTITTEPIRIQRGIYQGDALSPLWFCLVLNPLSNLLSYNTTGYNLTTNCNSNNFSLTHLFYMDDIKLFASNKEELFRLADITQQFSKDIGMEFGVDKCNTLSINKSNIVHNRYVLETGESIEPMNDYTTYKYLGFKQSRKIIQKDTKAELTQKFKQRLNLILKSHLNSKNIVKAINTFAIPVLTYSFGVINWSQTELKHLQRIVNTHLTKHRKHHPKSSIERLTLPRSEGGRGLLDIQNLHNRQITTLRNYFHTKSQHSSLHKQITDLDKKLTPLNLHDKNTQYNETLTTVEQKIARWANKSLHGRHRTDLSQSHVDKEKSNDWLKKGELFPETEGFMLAIQDQIIITRNYRKFILRDNNQTSDQCRHCNSTSETIQHITGACKSLVQNDYKHRHDQVAAIVHQYLAYKYKFIEKRDPYYKYKPNVILENSSCKIYWDRTIITDKTIHFNRPDITVHDKVNNIVYIIDIAIPNSHNLQLTISEKLSKYQDLAIEIKTQWKAQTVHIVPIVLSSTGIVPKTLTHSLNILDMPTHVLTLLQKATILNTCRITRKFLTSSSLSSTYSI

SEQ ID NO: 30973 - protein, 1354 aa, Parapoynx stratiotata
METNNKRYNLRPLPGGRRGALGADAECYSMRTIGDGGLSRRAPLEQSSTADIILHSPFSSSSHSLFPSPSSSPCSFEFDTIPRSSTVSPLSVDVVQEASADDAAPAAGNKRARQKWTDDMNRFIWRTYLIATNLETNTRGYLEVLHKKFTELFPNVKASKQRLGDQRRAIVNKKLLSQTSLDEIRNDVQANLQQHGISTLHLTQKSGSRMCWSNELNESILRIYYEVTDLETNTTAHRKKLHTRFIELHPQLAHISEQRISDQRRVIVNNKMIKDNRIKEIKEEVERQIQINKQHNHNTQHNTSLDSSLNNSQNDNYIPQISEFLGDENLLVENRNNKSDPLYDMITSEFTKAFNTFINTDPISRPYIPKQRNSKKLAKIINFIDRNIIPKYLATDQDFITLQAVIYSAAYTTALCNGTRINTTQKIDANKKLKYKPAWQKRLERKIQEFRAEIGRLTQYIQGNRSRKLIKAVDNIQIKYREHSQYENENTQPEHYLDTLKQKLNAASSRLNRYLTCTDRKTQNTQFLNNEKIFYRNLTAAHTNTTNQLTDTPDPETFREYWSGIWEDPIEHNKNAAWINQTSDTAPISEMEFEYIPIDTFTQVLRRTHNWKAPGSDNIQNFWYKKFETTHSHLYKHINNFIETPDIMPLYITEGVTYMIPKDITDLKNPAKYRPITCLQTIYKILTACLSETINKHLDNHNLLAEQQKGCRKNSQGCKEQLTIDSVILNKTFKSKNDIHTMFIDYRKAFDSVPHSWLLHVLKLYKIHPTIAEFLKTSMRSWKTVLKIKNNTPGSITAAPISIQRGIFQGDSLSPLWFCLALNPLSSLLNKRNSGIKVTDNYSLSHLMYMDDIKLYASSKDDLFRLADITQEFSRDIHMQFGVDKCKILSISKGKIENNSYILESSYTIESLDHNSTYKYLGFNQSRQIQQKYTKTQLTNKFKQRLHLILKSHLNSKNTTKAINTYAIPILTYSFGIINWSKTDLKKLQRNINTHLTTYRKHHPKASTIRITLPRQEGGRGIIDITNLHNRQIDTLRTYFHSKSTQTTLHQAIVDSDLKLTPLNLHDKHTKPTEIPIDTAAKMAAWAAKSLHGRHRTHLNQPHVDKDKSNEWLRKGELFPETEGFMIAIQDEVILTRNYRKYIIKDSNQPTDLCRHCNSASETIQHITGACKSIAQTDYKHRHNQVASIVHQHLAHKYQFVPKMTPYYKYSPTTVHENNNIKLYWDRTIITDKTIHYNRPDITVHDKINKVAYLIDIAIPNTHNLQNTVSEKLGKYQELAIEIKTQWKVKTVHIIPIIISSTGVIPKSLVHSLETLEMPPYILNLMQKAVILNTCRITRKFLTFSTLSSTVTFQ

SEQ ID NO: 30974 - protein, 1384 aa, Amphipyra tragopoginis
MITRSKTKKVIKADVPPLDDETTKMSSSSSTRSLFPSIPSSSHSFCVSPTSSSSSISIQPADVEQETNSVNEPVPTTSSVTVRRKWSIEMNEFILRTYLHLTHMETDINAYLPPLHTKFLEKYPHMQVSRQRIGDQRRAIVQKKLIPQKTIDKIYEEVKMELQTIQTQIQRHSSQFSTTANTQRMRWSNEYNEAIIRIYFRITELETNKTAYRKKLHQEFITLYPNLTHLTEQRIADQRGAIINNKYINDDRLAQIKQEVAEELHIISGRINPSRLTENTQSNAQTRSPSNIEYPDVNNIYTLNPQHRRTHINLDMTTNTQTAVDPLDFNITHTQNDFVTLTLTDSQNTNENSFLNDIQVEQLISTHPDIETVLEINPEIDNTFQQAQQYFNNTDPTSRPYIPKQKTSRKFHAIVKYIDTIIMPKYVNSDTDFNTLQNVIYCAAWTAATCNGAKMSYAPQNEHPTQLHRKPKWQIRLESKIQDLRANIGRLTEYIRGNRNRRVVAAVEAIKIKHQIHAQHEPSNTQMNHFLDTLKQKLNAASSRLKRYLTCTARKQQNTKFTNNEKNFYRNLTVTHGNTNNQNIDTPSPEALREFWGNIWENPVQHNNDAAWINETYQSTIDIPQMEFEFIPIDTFIDVIKRTHNWKSPGTDNIHNYWYKKFTSIHPHIHNFLNTFIQSPHTLPAYITQGVTYMLPKDMNDTQNPAKYRPITCLQTIYKILTACISEVVYKHLDKFNILAEQQKGCRKNSQGCKEQLTIDAIIMNSAMKNKKDIHTMFIDYQKAFDSVPHSWLLHVLHLYKIHPTLISFLQTSMTNWQSILKIKQSSTQSLTTEPIRIQRGIFQGDALSPLWFCLALNPLSHLLNNTNTRSIHTNNETQYTLSHLMYMDDIKLFAADKDTLFKLADTTQQFSQDIHMQFGVDKCKILSITKGKYQNNSYTLETGAAIEPMDENSTYKYLGFKQSRQIQQKSTKQELQKKFCHRLNLILKSHLNSRNTIKAINTFAVPILTYSFGIIKWSKTDIKKLQRTVNTNLTKHRKHHPKSCIQRLTLPRQEGGRGLIDIRNLHNKQINSLRTYFHTKSEHSLLHSHVTELDKKLTPLNLQDRNAQTNETFTNKQQKIAAWAEKSLHGRHRSHLSQPHVDKEKSNEWLKRGELLCAIQDEIIATRNYRKYIIKDLNQPTDLCRHCNTASETIQHITGACKSLAQTDYKHRHDQVAAIIHQHLAYKYQLITKMSPYYKYKPETVLENINYKIYWDRTIITDKTIHYNRPDVTVHDKSNRVVYLIDIAIPNSHNIQSTISEKLSKYQDLAIELKTQWRAQTVHIVPVVLSSTGIIPKSLQQSLNTLHMPTYTLHMIQKATILNTCRITRKFLTSSTLSSTYSI

SEQ ID NO: 30975 - protein, 804 aa, Laothoe populi
MPTPERLRQFWANIWENPIHHKVNADWLESVSEAGRDIPEMDFEHIPIDTVIHVIKHTHNWKSPGTDNIQNYWYKKFTFAHTFIHKHLETFIQSPHIMPEYITHGVTYMLPKDKDTENPAKYRPITCLQTIYKILTGCISEIMYNHISKHKILTEEQKGCRKNSQGCKEQLIIDSITINNAYRTKQNIHTMFIDYRKAFDSVPHSWLLEVLQIYKINPTIITFLQASMQTWKTVLKITVGTNSVTTDPIRIMRGIFQGDALSPLWFCLALNPLSVLLNNTDTGYCLTTTDTQFKISHLFYMDDIKLFADNQQNLFYLADTTQQFSNDIHMQFGVDKCKILSVHKGNIQQNSYKLETCEEIEPMDESSTYKYLGFKQSRKIDQKQTKLELTTKFKHRLNLILKTNLNSKNTIKAVNTYAIPVLTYSFGIINWSQTDLKKLQRIINTLMTKYRKHHPKSAVERLVLPRLEGGRGLIDIQNLHNKQVTTLRTYFHTKSEYSPLHKHASNMDKNLTPLNLHDTHTQPNENIIDTQQKITRWAEKSLHGRHRTDLNQNYVDKLKSNEWLKKGELFPETEGFMLAIQDQIILTRNYRKFIIKDPNLTTDLCRHCNSASETIQHITGACKYLAQTDYKHRHDQVAAIIHQHIAHQHNFIQKKVPYYKYKPEAVHENKQCKIYWDRTIITDKTIHYNRPDITVHDKNSNTIYLIDIAIPNTHNIQTTISDKLTKYQDLAIELRTQWAAQTVHIIPIVLSSTGIVPKTLTQSLEILNMPTYILYLIQKAIILNTCRITQKFLSSSSLSSTFTI

SEQ ID NO: 30976 - protein, 804 aa, Laothoe populi
MPTPERLRQFWANIWENPIHHKVNADWLESVSEAGRDIPEMDFEHIPIDTVIHVIKHTHNWKSPGTDNIQNYWYKKFTFAHTFIHKHLETFIQSPHIMPEYITHGVTYMLPKDKDTENPAKYRPITCLQTIYKILTGCISEIMYNHISKHKILTEEQKGCRKNSQGCKEQLIIDSITINNAYRTKQNIHTMFIDYRKAFDSVPHSWLLEVLQIYKINPTIITFLQASMQTWKTVLKITVGTNSVTTDPIRIMRGIFQGDALSPLWFCLALNPLSVLLNNTDTGYCLTTTDTQFKISHLFYMDDIKLFADNQQNLFYLADTTQQFSNDIHMQFGVDKCKILSVHKGNIQQNSYKLETCEEIEPMDESSTYKYLGFKQSRKIDQKQTKLELTTKFKHRLNLILKTNLNSKNTIKAVNTYAIPVLTYSFGIINWSQTDLKKLQRIINTLMTKYRKHHPKSAVERLVLPRLEGGRGLIDIQNLHNKQVTTLRTYFHTKSEYSPLHKHASNMDKNLTPLNLHDTHTQPNENIIDTQQKITRWAEKSLHGRHRTDLNQNYVDKLKSNEWLKKGELFPETEGFMLAIQDQIILTRNYRKFIIKDPNLTTDLCRHCNSASETIQHITGACKYLAQTDYKHRHDQVAAIIHQHIAHQHNFIQKKVPYYKYKPEAVHENKQCKIYWDRTIITDKTIHYNRPDITVHDKNSNTIYLIDIAIPNTHNIQTTISDKLTKYQDLAIELRTQWAAQTVHIIPIVLSSTGIVPKTLTQSLEILNMPTYILYLIQKAIILNTCRITRKFLSSSSLSSTFTI

SEQ ID NO: 30977 - protein, 804 aa, Laothoe populi
MPTPERLRQFWANIWENPIHHKVNADWLESVSEAGRDIPEMDFEHIPIDTVIHVIKHTHNWKSPGTDNIQNYWYKKFTFAHTFIHKHLETFIQSPHIMPEYITHGVTYMLPKDKDTENPAKYRPITCLQTIYKILTGCISEIMYNHISKHKILTEEQKGCRKNSQGCKEQLIIDSITINNAYRTKQNIHTMFIDYRKAFDSVPHSWLLEVLQIYKINPTIITFLQASMQTWKTVLKITVGTNSVTTDPIRIMRGIFQGDALSPLWFCLALNPLSVLLNNTDTGYCLTTTDTQFKISHLFYMDDIKLFADNQQNLFYLADTTQQFSNDIHMQCGVDKCKILSVHKGNIQQNSYKLETCEEIEPMDESSTYKYLGFKQSRKIDQKQTKLELTTKFKHRLNLILKTNLNSKNTIKAVNTYAIPVLTYSFGIINWSQTDLKKLQRIINTLMTKYRKHHPKSAVERLVLPRLEGGRGLIDIQNLHNKQVTTLRTYFHTKSEYSPLHKHASNMDKNLTPLNLHDTHTQPNENIIDTQQKITRWAEKSLHGRHRTDLNQNYVDKLKSNEWLKKGELFPETEGFMLAIQDQIILTRNYRKFIIKDPNLTTDLCRHCNSASETIQHITGACKYLAQTDYKHRHDQVAAIIHQHIAHQHNFIQKKVPYYKYKPEAVHENKQCKIYWDRTIITDKTIHYNRPDITVHDKNSNTIYLIDIAIPNTHNIQTTISDKLTKYQDLAIELRTQWAAQTVHIIPIVLSSTGIVPKTLTQSLEILNMPTYILYLIQKAIILNTCRITRKFLSSSSLSSTFTI

SEQ ID NO: 30978 - protein, 1393 aa, Laothoe populi
MRNTETYAANKVKVTLMEIMNNKRYNLRPLPGGRRGASGADAGCFSMRTIGGEELNRRAPTDKNTTAEITTCNSSPTNSSSHLFTSPHSSPNLPEKINLSQSSSSSSSSSSSSSSSSSSADVVQQANAVDTGPTAGSKRARLKWTDDMNKFIWRTYLIITKLGTNTRGYLDPLHRAFTDKYPEMSVSRQRVGDQRRAIINNNLLPAPVLTEIKNEVSIYLQDNLQPLPTITQTSSRMSWSNEVNEAIMRIYFEVTELETNHTAYRKKMHDKFIDIYPDLSYISEQRISDQKRVIVNNKMISEQRIQQIRCEVESQITLTNCSQYNSSANTQTNTQLYNMTGSTDIIPTNTSEELLTPRIQQISASTEYQEVILNNSPTNVYLNQEEIDQVFTIALEMFKTTEPTARPFIPKQRASKKLATVIEYINNTILPKFLNSDQDFITFQTIIYSAAYTAAKYNGAKIAEYGTHRRVSTKPPWQRRLENKISILRAEIARLTQYIHGNRSRKVIAAVDIIKSKYQIHAQYEHINTELHHFLDTVKQKLNAAASRLKRYVTCSARKKQNKQFINNERIFYRGLNATENRSNRHQQSMPTPERLRQFWANIWENPIHHKVNADWLESVSEAGRNITEMDFEHIPIDTVIHVIKHTHNWKSPGTDNIQNYWYKKFTFAHTFIHKHLNTFIQSPHIMPEYITHGVTYMLPKDKDTENPAKYRPITCLQTIYKILTGCISEIMYNHISKHKILTEEQKGCRKNSQGCKEQLIIDSITINNAYKTKQNINTMFIDYRKAFDSVPHSWLLEVLQIYKINPTIITFLQASMQTWKTVLKITVGTNSVTTDPIRIMRGIFQGDALSPLWFCLALNPLSVLLNNTDTGYCLTTTDTQFKISHLFYMDDIKLFADNEQNLFYLADTTQQFSNDIHMQFGVDKCKILSVHKGNIQQNSYKLETCEEIEPMDESSTYKYLGFKQSRKIDQKQTKLELTTTFKHRLNLILKTNLDSKNTIKAVNTYAIPVLTYSFGIINWSQTDLKKLQRIINTLMTKYRKHHPKSAVERLVLPRLEGGRGLIDIQNLHNKQVTTLRTYFHTKSEYSPLHKHASNMDKKLTPLNLHDTHTQPNENIIDTQQKITRWAEKSLHGRHRTDLNQNYVDKLKSNEWLKKGELFPETEGFMLAIQDQIILTRNYRKFIIKDPNLTTDLCRHCNSASETIQHITGACKSLAQTDYKHRHDQVAAIIHEHIAHQHNFIQKKAPYYKYKPEAVHENKQCKIYWDRTIITDKTIHYNRPDITVHDKNSNTIYLIDIAIPNTHNILTTISDKLTKYQDLAIELKTQWAAQTVHIIPIVLSSTGIVPKTLTQSLEILNIPTYILYLIQKAIILNTCRITRKFLSSSSLSSTFTI

SEQ ID NO: 30979 - protein, 804 aa, Laothoe populi
MPTPERLRQFWANIWENPIHHKVNADWLESVSEAGRDIPEMDFEHIPIDTVIHVIKHTHNWKSPGTDNIQNYWYKKFTFAHTFIHKHLNTFIQSPHIMPEYITHGVTYMLPKDKDTENPAKYRPITCLQTIYKILTGCISEIMYNHISKHKILTEEQKGCRKNSQGCKEQLIIDSITINNAYRTKQNIHTMFIDYRKAFDSVPHSWLLEVLQIYKINPTIITFLQASMQTWKTVLKITVGTNSVTTDPIRIMRGIFQGDALSPLWFCLALNPLSVLLNNTDTGYCLTTTDTQFKISHLFYMDDIKLFADNQQNLFYLADTTQQFSNDIHMQFGVDKCKILSVHKGNIQQNSYKLETCEEIEPMDESSTYKYLGFKQSRKIDQKQTKLELTTKFKHRLNLILKTNLNSKNTIKAVNTYAIPVLTYSFGIINWSQTDLKKLQRIINTLMTKYRKHHPKSAVERLVLPRLEGGRGLIDIQNLHNKQVTTLRTYFHTKSEYSPLHKHASNMDKKLTPLNLHDTHTQPNENIIDTQQKITRWAEKSLHGRHRTDLNQNYVDKLKSNEWLKKGELFPETEGFMLAIQDQIILTRNYRKFIIKDPNLTTDLCRHCNSASETIQHITGACKYLAQTDYKHRHDQVAAIIHQHIAHQHNFIQKKVPYYKYKPEAVHENKQCKIYWDRTIITDKTIHYNRPDITVHDKNSNTIYLIDIAIPNTHNILTTISDKLTKYQDLAIELRTQWAAQTVHIIPIVLSSTGIVPKTLTQSLEILNMPTYILYLIQKAIILNTCRITRKFLSSSSLSSTFTI

SEQ ID NO: 30980 - protein, 1383 aa, Laothoe populi
MRNTETYAANKVKVTLMEIMNNKRYNLRSLSGGRRGASGADAGCFSMRTIGGEELNRRAPTDKNTTAEITTCNSSPTNSSSHLFTSPHSSPNLSEKINLSQSSSSSSSSADVVQQANAVDTRPTAGSKRARLKWTNDMNKFIWRTYLIITKLGTNTRGYLDPLHRAFTDKYPEMSVSRQRVGDQRRAIINNNLLPAPVLTEIKNEVSIYLQDNLQPLPTITQTSSRMSWSNEVNEAIMRIYFEVTELETNHTAYRKKMHEKFIDIYPDLSYISEQRISDQKRVIVNNKMISEQRIQQIRCEVESQITLTNCSQYNSSANTQTNTQLYNMTGSTDIIPNNTSEELLTPRIQQISASTEYQEVILNNSPTNVYLNQEEIDQVFTIALEMFKTTEPTARPFIPKQRASKKLATVIEYINNTILPKFLNSDQDFITFQTIIYSAAYTAAKYNGAKIAEYGTHRRVSTKPPWQRRLENKISILRAEIARLTQYIHGNRSRKVIAAVDTIKSKYQIHAQYEHINTELHHFLDTVKQKLNAAASRLKRYVTCSARKKQNKQFINNERIFYRGLNATENRSNRHQQSMPTPERLRQFWANIWENPIHHKVNADWLESVSEAGRDITEMDFEHIPIDTVIHVIKHTHNWKSPGTDNIQNYWYKKFTFAHTFIHKHLNTFIQSPHIMPEYITHGVTYMLPKDKDTENPAKYRPITCLQTIYKILTGCISEIMYNHISKHKILTEEQKGCRKNSQGCKEQLIIDSITINNAYKTKQNIHTMFIDYRKAFDSVPHSWLLEVLQIYKINPTIITFLQASMQTWKTVLKITVGTNSVTTDPIRIMRGIFQGDALSPLWFCLALNPLSVLLNNTDTGYCLTTTDTQFKISHLFYMDDIKLFADNEQNLFYLADTTQQFSNDIHMQFGVDKCKILSVHKGNIQQNSYRLETCEEIEPMDESSTYKYLGFKQSRKIDQKQTKLELTTKFKHRLNLILKTNLNSKNTIKAVNTYAIPVLTYSFGIINWSQTDLKKLQRIINTLMTKYRKHHPKSAVERLVLPRLEGGRGLIDIQNLHNKQVTTLRTYFHTKSEYSPLHKHASNMDKKLTPLNLHDTHTQPNENIIDTQQKITRWAEKSLHGRHRTDLNQNYVDKLKSNEWLKKGELFPETEGFMLAIQDQIILTRNYRKFIIKDPNLTTDLCRHCNSASETIQHITGACKSLAQTDYKHRHDQVAAIIHQHIAHQHNFIQKKVPYYKYKPEAVHENKQCKIYWDRTIITDKTIHYNRPDITVHDKNSNTIYLIDIAIPNTHNILTTISDKLTKYQDLAIELKTQWAAQTVHIIPIVLSSTGIVPKTLTQSLEILNMPTYILYLIQKAIILNTCRITRKFLSSSSLSSTFTI

SEQ ID NO: 30981 - protein, 827 aa, Omphaloscelis lunosa
MKFNNNEKIFYRNLTTNNRDTTNQTIETPSSETLREFWANIWENPVYHNNRTDWENETTRKIPEMEFEFIPIDTFIDIIKRTHNWKSPGTDHIHNYWYKKFSSIHPFLHNHLNTFIQSPNLLPTYLTHGITYMIPKDMNDTINSAKYRPITCLQTLYKILTACVSEVIYEHLTKNNILAEQQKGCRKNSQGCKEQLTIDAITMNSAIKNRKDIHTMFIDYQKAFDSVPHSWLLKVLYKIHPTLKNFLETSMQNWQTVLKINSYSSTVSTEPICIKRGIFQGDALSPLWFCMALNPLSHLLDKTDVGFTLKNNDAQYTLTHLMYMDDIKLYAADKKALFQLADTTQQFSDDICMSFGVDKCKILSVLKGKIQNNSYTLASGESIEPMDEQITYKYLGFKQSRQIQQKISKQELHKKFSHRLNLILKSNLNSRNTIKAINAFAIPILTYSFGIIRWSKTDIKKLQYTVNTLLTKHRKHHPKSCIQRLTLSRQEGGRGLIDIHNLHNKQILSLRAYFHNKSEHSSLHKQVTDTDKKLTPLNLQNRNTQINEHIVSTQQKIAEWSAKALHGRHRAYLSQPHVDKVKSNEWLKRGELFPETEGFMLAIQDQIVATRNYRKYIIKDQHQPTDLCRHCNTASETIQHITGACKSLAQTDYKHRHDQVAAIIHQQLAYKYKLVNEMIPYYKYKPEIILESKDQKIYWDRTIITDKTIHYNRPDITVHDKTNKTVYLIDIAIPNSHNIQTTISEKLSKYQDLAIEIKTQWKAQTVHIVPVVLSSTGVIPKSLTQSLNTLQIHTHTLYMLQKATILNTYRITRKFLTSSTLSSTFSI

SEQ ID NO: 30982 - protein, 1411 aa, Abrostola tripartita
MVQTRSKTKRPQVPGEPSSSTGTDGSQAEARLRGAKNPREATLPRQTIQATNEEHDMHSDTEYSSATPSSAQSYCDPFVISSPSSSSLLSLNSIQPEDVAQETNFVNEPVPISSSAVTRRKWSTEMNKFILRTYFQLTNLETDTNAYLPSLHTKFVEKYPAMQVSHQRVGDQRRAIMQKKLLPQITIDQIYQEVKSELRVFETQTQQRLTLFETQTHAHTGQRMKWTNEYNEAIIRIYFKITQLETNKTAYRKYLHEEFINLYPSLAHITEQRVADQRRAIINNKYINNDRLEEIKQDVAAELNITQIESTNGENLGLQLQSNTEHLNIYNHAINTENANLNPSSFDNNRQLVDMVQRSSAPARIEQLGLTPTDSLNTGENILVQNIEYDQAQALHIHAAEDLQVNPEIEDTFQQAHQCFIGSDPTTRPYIPKQKSSRKFSTIVNYINNAILPRYVNNDVNFAQLQSIIYCAGWTAAKCNGARISHCTLTQYRSRPHKKPKWQIRLENKIGSLRANIGRLTQFLRGNRSRKVVAAVKAIQQTYQIHAQYEILNSQLEHFLDTLKQKLGAASSRLKRYVKCTERKTQNTKFTNNEKIFYRNLTSSNNTVGNQDMELPNPNTLRAFWATIWENPVQHNNYANWINETTEQISEMDCEHIPLDTFVGVIKRTHNWKSPGTDNIHNYWYKKFTNIHPSMYNHLNTFIQFPHLLPTYITHGVTYMIPKDTNDTTNPAKYRPITCLQTVYKILTACISEVVNKHLTINNILSEEQKGCRKNSQGCKEQLTIDAITLNSAVKGKKDIHTMFIDYQKAFDSVPHSWLLHVLHQYKIHPALITFLQYSMKNWQTVLKINQVASEPIRIQRGIFQGDALSPLWFCLALNPLSKLLNETNAGYTFTNDFAQFSLTHLMYMDDIKLYAPNKESLFKLADITQQFSKDIHMQFGVDKCKILSITRGKVVHNNYILETGESIDPMDEFSPYKYLGFKQSRQIHQKITKQELRRKFTHRLNLILKTHLNSKNLIKAINSFAIPILTYSFGIIQWSKTDIKNLQRTINTHLTKHRKHHPKSCIQRLTLPREEGGRGLIDIHNLHNKQIISLRTYFHAKSGHSSLHDNVVKTDINLTPLNLHNRNTQTNEYLISTQQKIASWTEKALHGRHRACISQPHVDKDKSNEWLSRGELFPETEGFMLAIQDQIIATRNYRKFIIKDPNLATDLCRHCNSASETIQHITGACKSLAQTDYKHRHNQVAAIIHQQLAYTSKLITDINPYYKYKPETILENRYYKIYWDRTIITDKTIHYNRPDITVHDKTNKVVYLIDIAIPNSHNIQTTISEKLSKYQDLAIEIKTQWKAQTVHIVPIVVSSTGVIPKSLSQSLNTLNMPSYTLHMLQKATILNTCRIVRKFLTSSISSNFTI

SEQ ID NO: 30983 - protein, 1411 aa, Abrostola tripartita
MVQTRSKTKRPQVPGEPSSSTGTDGSQAEARLRGAKNPREATLPRQTIQATNEEHDMHSDTEYSSATPSSAQSYCDPFVISSPSSSSLLSLNSIQPEDVAQETNFVNEPVPISSSAVTRRKWSTEMNKFILRTYFQLTNLETDTNAYLPSLHTKFVEKYPAMQVSRQRVGDQRRAIMQKKLLPQISIDQIYQEVKSELRVFETQTQQRLTLFETQTHAHTGQRMKWTNEYNEAIIRIYFKITQLETNKTAYRKYLYEEFINLYPSLAHITEQRVADQRRAIINNKYINNDRLEEIKQEVAAELNITQIESTNSENLGLQLQSNTEHLNIYNHAINTENANLNPSSFDNNRQLVDMVQRSSAPARIEQLGLTPTDSLNTGENILVQNIEYDQAQALHIHAAEDLQVNPEIEDTFQQAHQCFIGSDPTTRPYILKQKSSRKFSTIVNYINNAILPRYVNNDVDFAQLQSIIYCAAWTAAKCNGARISHCTLTQYRSRPHKKPKWQIRLENKIGSLRANIGRLTQFLRGNRNRKVAAAVKAIQQTYQIHAQYEILNSQLEHFLDTLKQKLGAASSRLKRYVKCTERKTQNTKFTNNEKIFYRNLTSSNNRVGNQDMELPNPNALRAFWATIWENPVQHNNYANWINETTEQIPEMDFEHIPLDTFKGVIKRTHNWKSPGTDNIHNYWYKKFTNIHPSMYNHLNTFIQFPHLLPTYITHGVTYMIPKDTNDTTNPAKYRPITCLQTVYKILTACISEIINKHLTINNILSEEQKGCRKNSQGCKEQLTIDAITLNSAVKGKKDIHTMFIDYQKAFDSVPHSWLLHVLHQYKIHPALITFLQSSMKNWQTVLKINQVASEPICIQRGIFQGDALSPLWFCLALNPLSKLLNETNAGYIFTNNFAQFSLTHLMYMDDIKLYATNKESLFKLADITQQFSKDIHMQFGVDKCKILSITKGKVVHNNYILETGESIDPMDEFSPYKYLGFKQSRQIHQKITKQELRRKFTHRLNLILKTHLNSKNLIKAINSFAIPILTYSFGIIQWSKTDIKNLQRTINTHLTKHRKHHPKSCIQRLTLPREEGGRGLIDIHNLHNKQIISLRTYFHAKSDHSSLHDNVVKTDINLTPLNLHNRNTQTNEYLISTQQKIASWTEKALHGRHRACISQPHVDKDKSNEWLSRGELFPETEGFMLAIQDQIIATRNYRKFIIKDPNLATDLCRHCNSASETIQHITGACKSLAQTDYKHRHDQVAAIIHQQLAYNSKLITDINPYYKYKPETILENRYYKIYWDRTIITDKTIHYNRPDITVHDKTNKVVYLIDIAIPNSHNIQTTISEKLSKYQDLAIEIKTQWKAQTVHIVPIVVSSTGVIPKSLSQSLNTLNMPSYTLHMLQKATILNTCRIVRKFLTSSISSNFTI

SEQ ID NO: 30984 - protein, 1377 aa, Mimas tiliae
MEIMSNKRYNLRPLPGGRRGASGADAGCFSMRTIGGEELNRRAPTDKHITADTIARRIHSSSPTNSSLHSLFPSPTSSPNPSENRNTPRSSSSSISSPVDVVQQANAVNPGPTTGSKRARLKWTEDMNKFIWRTYLITTKLETNTRGYLEPLHRAFTDKYPEMNTSRQRVGDQRRAIINRGLLPSSILAEIRSEVANFLQCNEQSVITVTQTTGRMSWSNDINESIIRIYFEVTEIETNLTAYRKKMHDRFINLYPHLSHISEQRISDQKRVITNNNMVSAERIQQIKREVESQRGKNTHNNTNLKLTTNTQTHTQTDTALNNTDFISPNSPEESIALPTQCISAATEYQERLLNNTHTNTVYLLDHDKINKQFNNALDTFKTTNPTSRPYIPKQRPSRKFASIIEYIDNTILPKFLNLEQNFTTFQTIVYAASYTAAVCNGAKIVTENVQRRGKTKPAWQRRLENKIAILRVEIAHLTQYIHGNRSKKIIASVKKIKSKYHTHAQYENINTELDHFLDTLKQKLNAAASRLKRYITCTDRKRQNIQFSNNERTFYRGLNSRDNRRADTENLPSPTAEQHQRYWAELWENPLRHNVNTDWLQSINEATADIPTMEYQHIPIDTVIKVIKNTHNWKSPGTDNIQNYWYKKFTSTHICIHRHLNNFIQSPDSIPDYTTHGITYLLPKDNDTLNPAKYRPITCLQTIYKILTACISDIIHTHLSKHNLLSEQQKGCRKNSQGCKEQLTIDAVAINNAYKSKHNIHTMFIDYRKAFDSVPHSWLLEVLHIHKINPILIAFLESSMQNWKTVLKIKHNTNSIITDPIRILRGIFQGDSLSPLWFCLALNPLSVLLNKSSTGYDLNSDDTEFTLSHLFYMDDIKLYANDKKDLFSLADITQQFSNDIHMQFGVDKCKILSVHRGKIQHNSYILQTGENIEPMDEYSSYKYLGFNQSRRIHQKQTKQELIKKFKHRLNLILKTSLNSKHTIKAINTFAIPILTYSFGIINWSQTDLKKLQRIINTHMTKYRKHHPKSAIERLILPRHEGGRGLIDIQNLHNNQIAKLRGFFHTKSHHSTLHKHISYTDKKLTPLNLQNKYTQPNETLIDSQQKISKWAEKSLHGRHRTDLTQNHVDKQMSNEWLKKGELFPETEGFMLAIQDQTISTRNYKKFILKDPNQTTDLCRHCASASETIQHITGACKTLVQTDYKHRHDQVAAIIHQHITYKYKFIDKMVPYYKYKPETVHENRNCKIYWDRTIITDKTIHFNRPDITVHDKNSNIIHLIDIAIPNTHNIQSTIADKLTKYQDLAIELKTQWRAHAVHIVPIVLSSTGVVPKSLSQNLEILNMPTNILHLIQKATILNTCRITRKFLSSSSVSSIYTI

SEQ ID NO: 30985 - protein, 1377 aa, Mimas tiliae
MEIMSNKRYNLRPLPGGRRGASGADAGCFSMRTIGGEELNRRAPTDKHITADTIARRIHSSSPTNSSLHSLFPSPTSSPNPSENRNTPRSSSSSISSPVDVVQQANAVNPGPTTGSKRARLKWTEDMNKFIWRTYLITTKLETNTRGYLEPLHRAFTDKYPEMNTSRQRVGDQRRAIINRGLLPSSILAEIRSEVANFLQCNEQSVITVTQTTGRMSWSNDINESIIRIYFEVTEIETNLTAYRKKMHDRFINLYPHLSHISEQRISDQKRVITNNNMVSAERIQQIKREVESQRGKNTHNNTNLKLTTNTQTHTQTDTALNNTDFISPNSPEESIALPTQCISAATEYQERLLNNTHTNTVYLLDHDKINKQFNNALDTFKTTNPTSRPYIPKQRPSRKFASIIEYIDNTILPKFLNLEQNFTTFQTIVYAASYTAAVCNGAKIVTENVQRRGKTKPAWQRRLENKIAILRVEIAHLTQYIHGNRSKKIIASVKKIKSKYHTHAQYENINTELDHFLDTLKQKLNAAASRLKRYITCTDRKRQNIQFSNNERTFYRGLNSRDNRRADTENLPSPTAEQHQRYWAELWENPLRHNVNTDWLQSINEATADIPTMEYQHIPIDTVIKVIKNTHNWKSPGTDNIQNYWYKKFTSTHICIHRHLNNFIQSPDSMPDYTTHGITYLLPKDNDTLNPAKYRPITCLQTIYKILTACISDIIHTQLSKHNLLSEQQKGCRKNSQGCKEQLTIDAVAINNAYKSKHNIHTMFIDYRKAFDSVPHSWLLEVLHIHKINPILIAFLESSMQNWKTVLKIKHNTNSIITDPIRILRGIFQGDSLSPLWFCLALNPLSVLLNKSSTGYDLNSDDTEFTLSHLFYMDDIKLYANDKKDLFSLADITQQFSNDIHMQFGVDKCKILSVHRGKIQHNSYILQTGENIEPMDEYSSYKYLGFNQSRRIHQKQTKQELIKKFKHRLNLILKTSLNSKHTIKAINTFAIPILTYSFGIINWSQTDLKKLQRIINTHMTKYRKHHPKSAIERLILPRHEGGRGLIDIQNLHNNQIAKLRGFFHTKSHHSTLHKHISYTDKKLTPLNLQNKYTQPNETLIDSQQKISKWAEKSLHGRHRTDLTQNHVDKQMSNEWLKKGELFPETEGFMLAIQDQTISTRNYKKFILKDPNQTTDLCRHCASASETIQHITGACKTLVQTDYKHRHDQVAAIIHQHITYKYKFIDKMVPYYKYKPETVHENRNCKIYWDRTIITDKTIHFNRPDITVHDKNSNIIHLIDIAIPNTHNIQSTIADKLTKYQDLAIELKTQWRAHAVHIVPIVLSSTGVVPKSLSQNLEILNMPTNILHLIQKATILNTCRITRKFLSSSSVSSIYTI

SEQ ID NO: 30986 - protein, 1264 aa, Nymphalis polychloros
MEMNKFILRNYFYLTNLETDTNSYLSSLHIKFIDKYPHMEVSRQRIGDQRRAIIQKKLLSQETIDQIYDEVKSELQIIQTQIQKNATNLNTLTGKRIKWTNECNEAIIRIYFKITQLETNKTAYRKRLYEEFTNLYPELAHITEQRLADQRRAIINNKYIKHDRLTLIKQQVADELHQTHKLTEDRDNEHLQIREQCNNENADASKTYPGTNSQARIMQNTTVTCSDSVTLTPNDEQNVESINCLNDIDTLEVNPEIETTFLHALEYFSDTEPTTRPYIPKQRTSKKFSLITKYIDTMILKKNVNTDTDFNTLQTIIYCAAWTAAKCNGARMSFTTQNNHQNKSFRKLSWQRRLENKIEKLRANIGRLTQFIRGNRNRKVVAAVQLIKTQYQSHAQHENTNTQIEHFLDTLKQKLNAAASRLKRYLTCTARKVQNKKFANNEKIFYRNLLSTCKNSEQNLEIPPPEIFREFWANRWENPVHHNEHADWVTETTTQIPEMELKFIPIEKFIEVIKRTHNWKSPGSDNIHNYWYKKFTSIHSYIHKYLNIFIQSPYLLPKYITHGITYLVPKDKHDTTNPDKYRPITCLQTIYKILSACISEEIYKHLTKHNILAEQQKGCRKNSQGCKEQLTFDAIILNSAAKSKTDIHTMFIDYQKAFDSVPHSWLLYVLKLYNINPTLISFLQNSMQNWQTVLKIKQSSAKSLTTEPIRIQRGIFQGDALSPLWFCLALNPLSQLLNKTNAGVTLYGNNTQYNLSHLMYLDDIKLYSTDKKTLLELASITEQFSNDIHMKFGVDKCKIMSISKGKILNNSYTLETGELIEPMDEQSTYKYLGFKQSRQILQATTKQELLTRFSHRLNLILKTHLNSKNTIKAINTFAIPLLTYSFGIIQWSKSDIKKLQRTINTHFTKYRKHHPKSCIQRLTLPRKEGGRGLIDIHNLHNKQILSLRAYFHDKSEHSTLHKHATEIDKKLTPLNLHDKNPQVNEHIISTQQQMIAWANKTLHGRHQADLNQPHVDKEKSNEWLKRGELFPETEGFMLAIQDQIIATRNYRKFIIKDHNQPTDLCRHCNTASETIQHITGACISLAQTDYKHRHDQVAAIIHQHLAYKYKLITEMNPYYKYKPESVLDNRNHKIYWDRTIITDKTIHYNRPDITVHDKTNKIVYLIDIAVPNSHNIQTTISEKLSKYQDLAIEIKTQWKAQTVHIVPIILSSTGIVPKSLTQSLNTLQIPTYVLHILQKAIILNTCRITRKFMSSSTLSSTYLI

SEQ ID NO: 30987 - protein, 1371 aa, Vanessa tameamea
MITRSKINKNIQENMPSVEEETSQTSYSSSISLFPSIPSSAPFLCASSSHSSSNGAQLADVAQETIFVNEPEPITSNFKKRKKWSPEMNKFILRTYLYLTNLETDTNSYLSSLHIKFIDKYPHMEVSRQRIGDQRRAIIQKKLLAQETIDQIYDEVKAELQVIQTQVQQNSTNLQTSNKILSGKRMKWTNEWNEAIIKIYFRVTHLETNKTAYRTRLHEEFINLHPELAHITEQRLADQRRAIINNKYIKEDRLTLIKQQVADELRFTHTLAENIDNEQVQTREQSNIENIHSPNYTLKSNLEINLQSRNIQNTTFTCTNSTTATPIDDETTGGINFINDMERLNSTQSILDTTLEVNLEIENTFLRAQEHFCSTEPTSRPYIPKQKTSKKFSFITKYINTMILTKFVNTDTDFNTLQTIIYSAAWTAAKCNGARMSFSTQSNLNSNQNKSFRKPSWQRRLENKIGKLRANIGRLTQYIRGNRNRKVVAAVEVIKTQYQTHAQHENTNTQVEHFLDTLKQKLNATASRLKRYLTCTARKVQNNKFANNEKNFYRNLISTGKDIDQNLEIPPLEIFREFWANRWENPEHHNEHTDWVNETTTNIPEMQFELIPIDTFIEVITRTHNWKSAGSDNIHNYWYKKFTSTHSYLHKYLNIFIQSPHLLPKYITQGITYLIPKDKYDTTNPDKYRPITCLQTIYKILSACISEEVHKHLTKYNILAEQQKGCRKNSQGCKEQLTIDAIILNSAAKAKTDIHTMFIDYQKAFDSVPHSWLIYVLKLYRINPKLISFLQNSMQHWQTVLRIKQSSMKSLTSEPIRIQRGIFQGDALSPLWFCLALNPLSHLLNETNEGFTLYSNNSQYTLSHLMYLDDIKLYSTEKNTLFKLAKITEQFSKDIQMKFGVDKCKILSISKGKFTNNNYLLETGEQIEPMNEQDTYKYLGFKQSRQILQTTIKQELLKKFSHRLNLVLKTHLNSKNTIKAINTYAIPLLTYSFGIIHWTKSDIKKLQRTINTHLTKNRKHHPKSCIQRLTLPRQEGGRGLIDVQKLHNKQILSLRAYFHVKSEHSPLHKHATEIDKKLTPLNLHDKNTQVNENLISIQQQMSAWAGKTLHGRHLADLNQPYVDKDKSNEWLKRGELFPETEGFMLAIQDQIIATRNYRKYIMKDRNQPTDLCRHCNTVSETIQHITGACKSLAQTDYKHRHDQVAAIIHQHLAFKYKLITEMKPYYKYKPQSVLDNRNHKIYWDRTIITDKTIHYNRPDITIHDKINRVVYLIDIAVPNSHNIQTTISEKLSKYQDLAIEIKTQWKAQIVHIVPIVLSSTGIVPKSLTKSLNTLQMPTYILHMLQKATILNTCRITRKFITSSTTSSTFLI

SEQ ID NO: 30988 - protein, 1391 aa, Amphipyra tragopoginis
MITRSKTKKVIKADVPSLDDETTKMSSSSSTRSLFPSISSSSHSFCVSPTSSSSSISIQPADVAQETNSVNEPVPTTSTVIVRRKWSIEMNEFILRTYLHLTHMETDINAYLPPLHTKFLEKYPHMQVSRQRIGDQRRAIVQKKLLPQKTIDKIYEEVKIELQTIQTQIQRQSSQFSTTANTQRMRWSNECNEAIIRIYFRITELETNKTAYRKKIHQEFITLYPNLTHLTEQRIADQRGAIINNKYINDVRLAQIKQEVAEELHIISGRINPSRLTENTQSNTQTRSTSNIEYHDVNNIHTLNPQHRSTHINPDMTTNTQTTADPLDFNITHTQNDFVTLTLTDSQNTNENSFLNNIQVEQLVSTHPDIETVLEINPEIDNTFQQAQQYFTDTDPTSRPYIPKQKTSRKFYAIVKYIDTIILPKYVNSDTDFSTLQNVIYCAAWTAATCNGAKMSYAPQNEHPTQLHRKPKWQIRLESKIQDLRANIGRLTQYIRGNRNRRVVAAVEAIKIKHQIHAQHEPSNTQMNHFLDTLKQKLNAASSRLKRYLTCTARKQQNTKFTNNEKNFYRNLTVTHGNTNNQNIDTPSPEALRELWGNIWENPVQHNNDAAWINETYQSTIDIPQMEFEFIPIDTFIDVIKRTHNWKSPGTDNIHNYWYKKFTSIHPHIHNFLNTFIQSPHTLPAYITQGVTYMLPKDMNDTQNPAKYRPITCLQTIYKILTACISEVVDKHLDKFNILAEQQKGCRKNSQGCKEQLTIDAIIMNSAMKNKKDIHTMFIDYQKAFDSVPHSWLLHVLHLYKIHPTLISFLQTSMTNWQSILKIKQSSTQSLTTEPIRIQRGIFQGDALSPLWFCLALNPLSHLLNNTNTRSVHTNNETQYTLSHLMYMDDIKLFAADKDTLFKLADTTQQFSQDIHMQFGVDKCKILSITKGKYQNNSYTLETGAAIEPMDENSTYKYLGFKQSRQIQQKSTKQELQKKFCHRLNLILKSHLNSRNTIKAINTFAVPILTYSFGIIKWSKTDIKKLQRTINTNLTKHRKHHPKSCIPRFTLPRQEGGRGLIDIRNLHNKQINSLRTYFHTKSEHSLLHSHVTELDKKLTPLNLQNRNAQTNETITNKQQKLAAWAEKSLHGRHRSHLSQPHVDKEKSNEWLKRGELFPETEGFMCAIQDEIIATRNYRKYIIKDLNQPTDLCRHCNTASETIQHITGACKSLAQTDYKHRHDQVAAIIHQHLAYKYQLITKMSPYYKYKPETVLENINHKIYWDRTIITDKTIHYNRPDVTVHDKSNRVVYLIDIAIPNSHNIQNTISEKLSKYQDLAIELKTQWRAQTVHIVPVVLSSTGIIPKSLQQSLNTLHMPTYTLHMLQKATILNTCRITRKFLTSSTLSSTYSI

SEQ ID NO: 30989 - protein, 1391 aa, Amphipyra tragopoginis
MITRSKTKKVIKADVPPLDDETTKMSSSSSTRSLFPSIPSSSHSFCVSPTSSSSSISIQPADVAQETNSVNEPVPTTSSVTVRRKWSIEMNEFILRTYLHLTHMETDINAYLLPLHTKFLEKYPHMQVSRQRIGDQRRAIVQKKLIPQKTIDKIYEEVKMELQTIQTQIQRHSSQFSTTANTQRMRWSNEYNEAIIRIYFRITELETNKTAYRKKLHQEFITLYPNLTHLTEQRIADQRGAIINNKYINDDRLAQIKQEVAEELHIISGRINPSRLTENTQSNAQTRSSSNIEYPDVNNIYTLNPQHRRTHINLEMTTNTQTTVDPLDFNITHTQNDFVTLTLTDSQNTNENSFLNDIQVEQLISTHPDIETVLEINPEIDNTFQQAQQYFNNTDPTSRPYIPKQKTSRKFHAIVKYIDTIIMPKYVNSDIDFNTLQNVIYCAAWTAATCNGAKMSYAPQNEHPTQLHRKPKWQIRLESKIQDLRANIGRLTEYIRGNRNRRVVAAVEAIKIKHQIHAQHEPSNTQMNHFLDTLKQKLNAASSRLKRYLTCTARKQQNTKFTNNEKNFYRNLTVTHGNTNNQNIDTPSPEALREFWGNIWENPVQHNNDAAWINETYQSTIDIPQMEFEFIPIDTFIDVIKRTHNWKSPGTDNIHNYWYKKFTSIHPHIHNFLNTFIQSPHTLPAYITQGVTYMLPKDMNDTQNPAKYRPITCLQTIYKILTACISEVVYKHLDKFNILAEQQKGCRKNSQGCKEQLTIDAIIMNSAMKNKKDIHTMFIDYQKAFDSVPHSWLLHVLHLYKIHPTLISFLQTSMTNWQSILKIKQSSTQSLTTEPIRIQRGIFQGDALSPLWFCLALNPLSHLLNNTNTRSIHTNNETQYTLSHLMYMDDIKLFAADKDTLFKLADTTQQFSQDIHMQFGVDKCKILSITKGKYQNNSYTLETGAAIEPMDENSTYKYLGFKQSRQIQQKSTKQELQKKFCHRLNLILKSHLNSRNTIKAINTFAVPILTYSFGIIKWSKTDIKKLQRTVNTNLTKHRKHHPKSCIQRLTLPRQEGGRGLIDIRNLHNKQINSLRTYFHTKSEHSLLHSHVTELDKKLTPLNLQDRNAQTNETITNKQQKIAAWAEKSLHGRHRSHLSQPHVDKEKSNEWLKRGELFPETEGFMCAIQDEIIATRNYRKYIIKDLNQPTDLCRHCNTASETIQHITGACKSLAQTDYKHRHDQVAAIIHQHLAYKYQLITKMSPYYKYKPETVLENINYKIYWDRTIITDKTIHYNRPDVTVHDKSNRVVYLIDIAIPNSHNIQSTISEKLSKYQDLAIELKTQWRAQTVHIVPVVLSSTGIIPKSLQQSLNTLHMPTYTLHMIQKATILNTCRITRKFLTSSTLSSTYSI

SEQ ID NO: 30990 - protein, 1391 aa, Amphipyra tragopoginis
MITRSKTKKVIKADVPSLDDETTKMSSSSSTRSLFPSISSSSHSFCVSPTSSSSSISIQPADVAQETNSVNEPVPTTSTVTVRRKWSIEMNEFILRTYLHLTHMETDINAYLPPLHTKFLEKYPHMQVSRQRIGDQRRAIVQKKLLPQKTIDKIYEEVKIELQTIQTQIQRQSSQFSTTANTQRMRWSNEYNEAIIRIYFRITELETNKTAYRKKLHQEFITLYPNLTHLTEQRIADQRGAIINNKYINDVRLAQIKQEVAEELHIISGRINPSRLTENTQSNTQTRSSSNIEYPDINNIHTLNPQHRSTHINPDMTTNTQTTADPLDFNITHTQNDFVTLTLTDSQNTNENSFLDNIQVEQLVSTHPDIETVLEVNPEIDNTFQQAQQYFTNTDPTSRPYIPKQKTSRKFHAIVKYIDTIILPEYVNSDTDFSTLQNVIYCAAWTAATCNGAKMSYAPQNEHPTQLHRKPKWQIRLESKIQDLRANIGRLTQYIRGNRNRRVVAAVEAIKIKHQIHAQHEPSNTQMNHFLDTLKQKLNAASSRLKRYLTCTARKQQNTKFTNNEKNFYRNLTVTHGNTNNRNIDTPSPEALREFWGNIWENPVQHNNNAAWINETYQSTIDIPQMEFEFIPIDTFIDVIKRTHNWKSPGTDNIHNYWYKKFTSIHPHIHNFLNTFIQSPHTLPAYITQGVTYMLPKDMNDTQNPAKYRPITCLQTIYKILTACISEVVYKHLDKFNILAEQQKGCRKNSQGCKEQLTIDAIIMNSAMKNKKDIHTMFIDYQKAFDSVPHSWLLHVLHLYKIHPTLISFLQTSMTNWQSILKIKQSSTQSLTTEPIRIQRGIFQGDALSPLWFCLALNPLSHLLNNTNTRSVHTNNETQYTLSHLMYMDDIKLFAADKDTLFKLADTTQQFSQDIHMQFGVDKCKILSITKGKYQNNSYTLETGAAIEPMDENSTYKYLGFKQSRQIQQKSTKQELQKKFCHRLNLILKSHLNSRNTIKAINTFAVPILTYSFGIIKWSKTDIKKLQRTINTNLTKHRKHHPKSCIQRLTLPRQEGGRGLIDIRNLHNKQINSLRTYFHTKSEHSLLHSHVTELDKKLTPLNLQDRNAQTNETITNKQQKIAAWAEKSLHGRHRSHLCQPHVDKEKSNEWLKRGELFPETEGFMCAIQDEIIATRNYRKYIIKDLNQPTDLCRHCNTASETIQHITGACKSLAQTDYKHRHDQVAAIIHQHLAYKYQLITKMSPYYKYKPETVLENINHKIYWDRTIITDKTIHYNRPDVTVHDKSNRVVYLIDIAIPNSHNIQNTISEKLSKYQDLAIELKTQWRAQTVHIVPVVLSSTGIIPKSLQQSLNTLHMPTYTLHMLQKATILNTCRITRKFLTSSTLSSTYSI

SEQ ID NO: 30991 - protein, 1391 aa, Amphipyra tragopoginis
MITRSKTKKVIKADVPSLDDETTKMSSSSSTRSLFPSISSSSHSFCVSPTSSSSSISIQPADVAQETNSVNEPVPTTSTVTVRRKWSIEMNEFILRTYLHLTHMETDINAYLPPLHTKFLEKYPHMQVSRQRIGDQRRAIVQKKLLPQKTIDKIYEEVKIELPTIQTQIQRQSSQFSTTANTQRMRWSNEYNEAIIRIYFRITELETNKTAYRKKLHQEFITLYPNLTHLTEQRIADQRGAIINNKYINDIRLAQIKQEVAEELHIISGRINPSRLTENTQSNTQTRSPSNIEYPDVNNIHTLNPQHRSTHINPDMTTNTQTTADPLDFNITHTQNDFVTLTLTDSQNTNENSFLNNIQVEQLVSTHPDIETVLEINPEIDNTFQQAQQYFTNTDPTSRPYIPKQKTSRKFHAIVKYIDTIILPKYVNSDTDFSTLQNVIYCAAWTAATCNGAKMSYAPQNEHPTQLHRKPKWQIRLESKIQDLRANIGRLTQYIRGNRNRRVVVAVEAIKIKHQIHAQHEPSNTQMNHFLDTLKQKLNAASSRLKRYLTCTARKQQNTKFTNNEKNFYRNLTVTHGNTNNQNIDTPSPEALREFWGNIWENPVQHNNDAAWINETYQSTIDIPQMEFEFIPIDTFIDVIKRTHNWKSPGTDNIHNYWYKKFTSIHPLIHNFLNTFIQSPHTLPAYITQGVTYMLPKDMNDTQNPAKYRPITCLQTIYKILTACISEVVYKHLDKFNILAEQQKGCRKNSQGCKEQLTIDAIIMNSAMKNKKDIHTMFIDYQKAFDSVPHSWLLHVLHLYKIHPTLISFLQTSMTNWQSILKIKQSSTQSLTTESIRIQRGIFQGDALSPLWFCLALNPLSHLLNNTNTRPVHTNNETQYTLSHLMYMDDIKLFAADKDTLFKLADTTQQFSQDIHMQFGVDKCKILSITKGKYQNNSYTLETGAAIEPMDENSTYKYLGFKQSRQIQQKSTKQELQKKFCHRLNLILKSHLNSRNTIKAINTFAVPILTYSFGIIKWSKTDIKKLQRTINTNLTKHRKHHPKSCIQRLTLPRQEGGRGLIDIRNLHNKQINSLRTYFHTKSEHSLLHSHVTELDKKLTPLNLQDRNAQTNETITNKQQKIAAWAEKSLHGRHRSHLSQPHVDKEKSNEWLKRGELFPETEGFMCAIQDEIIATRNYRKYIIKDLNQPTDLCRHCNTASETIQHITGACKSLAQTDYKHRHDQVAAIIHQHLAYKYQLITKMSPYYKYKPETVLENINHKIYWDRTIITDKTIHYNRPDVTVHDKSNRVVYLIDIAIPNSHNIQNTISEKLSKYQDLAIELKTQWRAQTVHIVPVVLSSTGIIPKSLQQSLNTLHMPTYTLHMLQKATILNTCRITRKFLTSSTLSSTYSI

SEQ ID NO: 30992 - protein, 1391 aa, Amphipyra tragopoginis
MITRSKTKKVIKADVPPLDDETTKMSSSSSTRSLFPSIPSSSHSFCVSPTSSSSSISIQPADVAQETNSVNEPVPTTSSVTVRRKWSIEMNEFILRTYLHLTHMETDINAYLPPLHTKFLEKYPHMQVSRQRIGDQRRAIVQKKLIPQKTIDKIYEEVKMELQTIQTQIQRHSSQFSTTANTQRMRWSNEYNEAIIRIYFRITELETNKTAYRKKLHQEFITLYPNLTHLTEQRIADQRGAIINNKYINDDRLAQIKQEVAEELHIISGRINPSRLTENTQSNAQTRSPSNIEYPDVNNIYTLNPQHRRTHINLDMTTNTQTAVDPLDFNITHTQNDFVTLTLTDSQNTNENSFLNDIQVEQLISTHPDIETVLEINPEIDNTFQQAQQYFNNTDPTSRPYIPKQKTSRKFHAIVKYIDTIIMPKYVNSDTDFNTLQNVIYCAAWTAATCNGAKMSYAPQNEHPTQLHRKPKWQIRLESKIQDLRANIGRLTEYIRGNRNRRVVAAVEAIKIKHQIHAQHEPSNTQMNHFLDTLKQKLNAASSRLKRYLTCTARKQQNTKFTNNEKNFYRNLTVTHGNTNNQNIDTPSPEALREFWGNIWENPVQHNNDAAWINETYQSTIDIPQMEFEFIPIDTFIDVIKRTHNWKSPGTDNIHNYWYKKFTSIHPHIHNFLNTFIQSPHTLPAYITQGVTYMLPKDMNDTQNPAKYRPITCLQTIYKILTACISEVVYKHLDKFNILAEQQKGCRKNSQGCKEQLTIDAIIMNSAMKNKKDIHTMFIDYQKAFDSVPHSWLLHVLHLYKIHPTLISFLQTSMTNWQSILKIKQSSTQSLTTEPIRIQRGIFQGDALSPLWFCLALNPLSHLLNNTNTRSIHTNNETQYTLSHLMYMDDIKLFAADKDTLFKLADTTQQFSQDIHMQFGVDKCKILSITKGKYQNNSYTLETGAAIEPMDENSTYKYLGFKQSRQIQQKSTKQELQKKFCHRLNLILKSHLNSRNTIKAINTFAVPILTYSFGIIKWSKTDIKKLQRTVNTNLTKHRKHHPKSCIQRLTLPRQEGGRGLIDIRNLHNKQINSLRTYFHTKSEHSLLHSHVTELDKKLTPLNLQDRNAQTNETFTNKQQKIAAWAEKSLHGRHRSHLSQPHVDKEKSNEWLKRGELFPETEGFMCAIQDEIIATRNYRKYIIKDLNQPTDLCRHCNTASETIQHITGACKSLAQTDYKHRHDQVAAIIHQHLAYKYQLITKMSPYYKYKPETVLENINYKIYWDRTIITDKTIHYNRPDVTVHDKSNRVVYLIDIAIPNSHNIQSTISEKLSKYQDLAIELKTQWRAQTVHIVPVVLSSTGIIPKSLQQSLNTLHMPTYTLHMIQKATILNTCRITRKFLTSSTLSSTYSI

SEQ ID NO: 30993 - protein, 1391 aa, Amphipyra tragopoginis
MITRSKTKKVIKADVPPLDDETTKMSSSSSTRSLFPSIPSSSHSFCVSPTSSSSSISIQPADVAQETNSVNEPVPTTSSVTVRRKWSIEMNEFILRTYLHLTHMETDINAYLPPLHTKFLEKYPHMQVSRQRIGDQRRAIVQKKLIPQKTIDKIYEEVKMELQTIQTQIQRHSSQFSTTANTQRMRWSNEYNEAIIRIYFRITELETNKTAYRKKLHQEFITLYPNLTHLTEQRIADQRGAIINNKYINDDRLAQIKQEVAEELHIISGRINPSRLTENTQSNAQTRSPSNIEYPDVNNIYTLNPQHRRTHINLDMTTNTQTTVDPLDFNITHTQNDFVTLTLTDSQNSNENSFLNDIQVEQLISTHPDIETVLEINPEIDNTFQQAQQYFNNTDPTSRPYIPKQKTSRKFHAIVKYIDTIIMPKYVNSDTDFNTLQNVIYCAAWTAATCNGAKMSYAPQNEHPTQLHRKPKWQIRLESKIQDLRANIGRLTEYITGNRNRRVVAAVEAIKIKHQIHAQHEPPNTQMNHFLDTLKQKLNAASSRLKRYLTCTARKQQNTKFTNNEKNFYRNLTVTHGNTNNQNIDTPSPEALREFWGNIWENPVQHNNDAAWINETYQSTIDIPQMEFEFIPIDTFIDVIKRTHNWKSPGTDNIHNYWYKKFTSIHPHIHNFLNTFIQSPHTLPAYITQGVTYMLPKDMNDTQNPAKYRPITCLQTIYKILTACISEVVYKHLDKFNILAEQQKGCRKNSQGCKEQLTIDAIIMNSAMKNKKDIHTMFIDYQKAFDSVPHSWLLHVLHLYKIHPTLISFLQTSMTNWQSILKIKQSSTQSLTTEPIRIQRGIFQGDALSPLWFCLALNPLSHLLNNTNTRSIHINNETQYTLSHLMYMDDIKLFATDKDTLFKLVDTTQQFSQDIHMQFGVDKCKILSITKGKYQNNSYTLETGAAIEPMDENSTYKYLGFKQSRQIQQKSTKQELQKKFCHRLNLILKSHLNSRNTIKAINTFAVPILTYSFGIIKWSKTDIKKLQRTVNTNLTKHRKHHPKSCIQRLTLPRQEGGRGLIDIRNLHNKQINSLRTYFHTKSEHSLLHSHVTELDKKLTPLNLQDRNAQTNETITNIQQKIAAWAEKSLHGRHRSHLSQPHVDKEKSNEWLKRGELFPETEGFMCAIQDEIIATRNYRKYIIKDLNQPTDLCRHCNTASETIQHITGACKSLAQTDYKHRHDQVAAIIHQHLAYKYQLITKMSPYYKYKPETVLENINYKIYWDRTIITDKTIHYNRPDVTVHDKSNRVVYLIDIAIPNSHNIQSTISEKLSKYQDLAIELKTQWRAQTVHIVPVVLSSTGIIPKSLQQSLNTLHMPTYTLHMIQKATILNTCRITRKFLTSSTLSSTYSI

SEQ ID NO: 30994 - protein, 1074 aa, Autographa gamma
MIFHLYHFSLKVQICEDSNLEYNDTQINTELAASKSTQTQDINEETDQATLNRLCYSIDLQPNPEIESTFQLSRQCFSETDPTRRPYIPKQKTSRKFSVIVDYINRAVLPKHINGDTNFKDMQTVIYCAAWTAAKCNGTKLSQDINTEYRTQSRKAPKWKIRLVKKIGSLRVSIGRLTEFIRGNRNRRVVDTVRNIQHTYQIHAQHEDTNTEMEHFLDTLKQKLSAAASRLKRYVKCTARKTQNTRFINNEKIFYRNLPNSNNTSSRPSIEIPDINTFREFWANIWENPVTHNTEAEWINEAQRHIQEMDFEHIPLDTFAEVIKNTHNWKSPGSDNIHNYWYKKFTYLHPFIYNQLNTFIKNPHLLPLYITQGVTHMIPKDINDPTNPAKYRPITCLQTLYKILSACISEMLRKHLFQHDILCEEQKGCRKNSQGCKEQLAIDAVTINSAVKCKIDIHTMFIDYQKAFDSVPHSWLLQILRSYKIHPTLITFLQSSMSHWQTILKINQGSSQSLTTDPIRIQRGIFQGDSLSPLWFCLALNPLSQQLNKTGVGFKLTNNNTVHILSHLMYMDDIKLFANTKSSLFQLAEVTEQFSKDIHMQFGVDKCNILSIIKGKFQDNCYTLANGESILPMDSHSLYKYLGFKQSRQIQQKVTKQELRQKFTYRLKLILNTHLNAKNTIKAINTFAIPILTYSFGIIRWSKTDIVNLQRTINTKLTKHRKHHPKSCIQRLTLPRQEGGRGLIDINNLHNKQILSLRTYFHNKTDQSPLHQHIVETDKNLTPLNLQDRNSQVNELLTNIQQQVTAWASKALHGRHRACLSQPHVDKEKSNEWLKRGELFPETEGFMLAIQDQIIATRNYRKYIIKDPNLSTDLCRHCNVASETIQHITGACKSLAQSDYKHRHDQVASIIHQHLAYNNKLIPEMHPYYKYKPQTIVENRNHKIYWDRTIVTDKTIHYNRPDITVHDKINKTVYLIDVAIPNSHNLQTTISEKLSKYQDLAIEIKTQWNAQIVHIVPIVLSSTRVIPKSLLQSLDTLHMPTYILHMLQKATILNTCRITLKFLTSSTLSSAYSI

SEQ ID NO: 30995 - protein, 1391 aa, Amphipyra tragopoginis
MITRSKTKKVIKADVPSLDDETTKMSSSSSTRSLFPSISSSSHSFCVSPTSSSSSISIQPADVAQETNSVNEPVPTTSTVTVRRKWSIEMNEFILRTYLHLTLMETDINAYLPPLHTKFLEKYPHMQVSRQRIGDQRRAIVQKKLLPQKTIDKIYEEVKIELQTIQTQIQRQSSQFSTTANTQRMRWSNEYNEAIIRIYFRITELETNKTAYRKKLHQEFITLYPNLTHLTEQRIADQRGAIINNKYINDVRLAQIKQEVAEELHIISGRINPSRLTENTQSNTQTRSSSNIEYPDLNNIHTLNPQHRSTHINPDMTTNTQTTADPLDFNITHTQNDFVTLTLTDSQNTNENSFLNNIQVEQLVSTHPDIETALEINPEIDNTFQQAQQYFTNTDPTSRPYIPKQKTSRKFHAIVKYIDTIILPEYVNSDTDFSTLQNVIYCAAWTAATCNGAKMSYAPQNEHPTQLHRKPKWQIRLESKIQDLRANIGRLTQYIRGNRNRRVVAAVEAIKIKHQIHAQHEPSNTQMNHFLDTLKQKLNAASSRLKRYLTCTARKQQNTKFTNNEKNFYRNLTVTHGNTNNRNIDTPSPEALREFWGNIWENPVQHNNVAAWINETYQSTIDIPQMEFEFIPIDTFIDVIKRTHNWKSPGTDNIHNYWYKKFTSIHPHIHNFLNTFIQSPHTLPAYITQGVTYMLPKDMNDTQNPAKYRPITCLQTIYKILTACISEVVYKHLDKFNILAEQQKGCRKNSQGCKEQLTIDAIIMNSAMKNKKDIHTMFIDYQKAFDSVPHSWLLQVLHLYKIHPTLISFLQTSMTNWQSILKIKQSSTQSLTTEPIRIQRGIFQGDALSPLWFCLALNPLSHLLNNTNTRSVHTNNETQYNLSHLMYMDDIKLFAADKDTLFKLADTTQQFSQDIHMQFGVDKCKILSITKGKYQNNSYTLETGAAIEPMDENSTYKYLGFKQSRQIQQKSTKQELQKKFCHRLNLILKSHLNSRNTIKAINTFAVPILTYSFGIIKWSKTDIKKLQRTINTNLTKHRKHHPKSCIQRLTLPRQEGGRGLIDIRNLHNKQINSLRTYFHTKSEHSLLHSHVTELDKKLTPLNLQDRNAQTNETITNKQQKIAAWAEKSLHGRHRSHLCQPHVDKEKSNEWLKRGELFPETEGFMCAIQDEIIATRNYRKYIIKDLNQPTDLCRHCNTASETIQHITGACKSLAQTDYKHRHDQVAAIIHQHLAYKYQLITKMSPYYKYKPETVLENINHKIYWDRTIITDKTIHYNRPDVTVHDKSNRVVYLIDIAIPNSHNIQNTISEKLSKYQDLAIELKTQWRAQTVHIVPVVLSSTGIIPKSLQQSLNTLHMPTYTLHMLQKATILNTCRITRKFLTSSTLSSTYSI

SEQ ID NO: 30996 - protein, 1371 aa, Vanessa tameamea
MITRSKINKNIQENKPSVEEETSQTSDSSSISLFPSIPSSAPFLCASSSHSSSNGAQLADVAQETIFVNEPVPITSNFKKRKKWSPEMNKFILRTYLYLTNLETDTNSYLSSLHIKFIDKYPHMEVSRQRIGDQRRAIIQKKLLAQETIDQIYDEVKAELQVIQTQVQQNSTNLQTSNKILSGKRMKWTNEWNEAIIKIYFRVTHLETNKTAYRTRLHEEFINLHPELAHITEQRLADQRRAIINNKYIKEDRLTLIKQQVADELRFTHTLAENIDNEQVQTREQSNIENIHSPNYTLKSNLEINLQSRNIQNTTFTCTNSTTATPIDDETTGGINFINDMERLNSTLSILDTTLEVNLEIENTFLRAQEHFSSTEPTSRPYIPKQKTSKKFSFITKYINTMILTKFVNTDTDFNTLQTIIYSAAWTAAKCNGARMSFSTQSNLNINQNKSFRKPRWQRRLENKIGKLRANIGRLTQYIRGNRNRKVVAAVEVIKTQYQTHAQHENTNTQVEHFLDTLKQKLNATASRLKRYLTCTARKVQNNKFANNEKNFYRNLISTGKDIDQNLEIPPLEIFREFWANRWENPVHHNEHTDWVNETTTHIPEMQFELIPIDTFIEVITRTHNWKAAGSDNIHNYWYKKFTSTHSYLHKYLNIFIQSPHLLPKYITQGITYLIPKDKYDITNPDKYRPITCLQTIYKILSACISEEVHKHLTKYNILAEQQKGCRKNSQGCKEQLTIDAIILNSAAKAKTDIHTMFIDYQKAFDSVPHSWLIYVLKLYRINPKLISFLQNSMQHWQTVLRIKQSSMKSLTSEPIRIQRGIFQGDALSPLWFCLALNPLSHLLNETNEGFTLYSNNSQYTLSHLMYLDDIKLYSTEKNTLFKLAKITEQFSKDIQMKFGVDKCKILSISKGKFTNNNYLLETGEQIEPMNEQDTYKYLGFKQSRQILQTTIKQELLKKFSHRLNLVLKTHLNSKNTIKAINTYAIPLLTYSFGIIHWTKSDIKKLQRTINTHLTKNRKHHPKSCIQRLTLPRQEGGRGLIDVLNLHNKQILSLRAYFHVKSEHSPLHKHATEIDKKLTPLNLHDKNTQVNENLISIQQQMSAWAGKTLHGRHLADLNQPYVDKDKSNEWLKRGELFPETEGFMLAIQDQIIATRNYRKYIMKDRNQPTDLCRHCNTVSETIQHITGACKSLAQTDYKHRHDQVAAIIHQHLAFKYKLITEMKPYYKYKPQSVLDNRNHKIYWDRTIITDKTIHYNRPDITIHDKINRVVYLIDIAVPNSHNIQTTISEKLSKYQDLAIEIKTQWKAQIVHIVPIVLSSTGIVPKSLTKSLNTLQMPTYILHMLQKATILNTCRITRKFITSSTTSSTFLI

SEQ ID NO: 30997 - protein, 1391 aa, Amphipyra tragopoginis
MITRSKTKKVIKADVPSLDDETTKMSSSSSTRSLFPSISSSSHSFCVSPTSSSSSISIQPADVAQETNSVNEPVPTTSTVTVRRKWSIEMNEFILRTYLHLTHMETDINAYLPPLHTKFLEKYPHMQVSRQRIGDQRRAIVQKKLLPQKTIDKIYEEVKIELQTIQTQIQRQSSQFSTTANTQRMRWSNEYNEAIIRIYFRITELETNKTAYRKKIHQEFITLYPNLTHLTEQRIADQRGAIINNKYINDVRLAQIKQEVAEELHIISGRINPSRLTENTQSNTQTRSSSNIEYPDVNNIHTLNPQHRSTHINPDMTTNTQTTADPLDFNITHTQNDFVTLTLTDSQNTNENSFLNNIQVEQLVSTHPDIETVLEINPEIDNTFQQAQQYFTNTDPTSRPYIPKQKTSRKFHAIVKYIDTIILPEYVNSDTDFSTLQNVIYCAAWTAATCNGAKMSYAPQNEHPTQLHRKPKWQIRLESKIQDLRANIGRLTQYIRGNRNRRVVAAVEAIKIKHQIHAQHEPSNTQMNHFLDTLKQKLNAASSRLKRYLTCTVRKQQNTKFTNNEKNFYRNLTVTHGNTNNRNIDTPSPEALREFWGNIWENPVQHNNGAAWINETYQSTIDIPQMEFEFIPIDTFIDVIKRTHNWKSPGTDNIHNYWYKKFTSIHPHIHNFLNTFIQSPHTLPAYITQGVTYMLPKDMNDTQNPAKYRPITCLQTIYKILTACISEVVYKHLDKFNILAEQQKGCRKNSQGCKEQLTIDAIIMNSAMKNKKDIHTMFIDYQKAFDSVPHSWLLHVLHLYKIHPTLISFLQTSMTNWQSILKIKQSSTQSLTTEPIRIQRGIFQGDALSPLWFCLALNPLSHLLNNTNTRSVHTNNETQYTLSHLMYMDDIKLFAADKDTLFKLADTTQQFSQDIHMQFGVDKCKILSITKGKYQNNSYTLETGAAIEPMDENSTYKYLGFKQSRQIQQKSTKQELQKKFCHRLNLILKSHLNSRNTIKAINTFAVPILTYSFGIIKWSKTDIKKLQRTINTNLTKHRKHHPKSCIQRLTLPRQEGGRGLIDIRNLHNKQINSLRTYFHTKSEHSLLHSHVTELDKKLTPLNLQDRNAQTNETITNKQQKIAAWAVKSLHGRHRSHLSQPHVDKEKSNEWLKRGELFPETEGFMCAIQDEIIATRNYRKYIIKDLNQPTDLCRHCNTASETIQHITGACKSLAQTDYKHRHDQVAAIIHQHLAYKYQLITKMSPYYKYKPETVLENINHKIYWDRTIITDKTIHYNRPDVTVHDKSNRVVYLIDIAIPNSHNIQNTISEKLSKYQDLAIELKTQWRAQTVHIVPVVLSSTGIIPKSLQQSLNTLHMPTYTLHMLQKATILNTCRITRKFLTSSTLSSTYSI

SEQ ID NO: 30998 - protein, 1371 aa, Vanessa atalanta
MITRSKIKKNIQANMPSVEEETSQTAYSSSISLFPSIPSSAPFLCASSSHSSSNGAQLADVAQETIFVNEPVPITSNFKKRKKWSPEMNKFILRTYLYLTNLETDTNSYLSSLHIKFIDKYPHMEVSRQRIGDQRRAIIQKKLLAQETIDQIYDEVKAELQVIQTQVQQHSTNLQTSNKTLSGKRMKWTNEWNETIIKIYFRVTHLETNKTAYRTRLHEEFINLHPELAHITEQRLADQRRAIINNKYIKENRLTLIKQQVADELRLTHTLAENIDNEQVKTREQSNIEHINSPNYTLKPNLEINLQSRNIQNTTVTCTNSTTATPIDDETTDDINFINDMERLNSTHSVLDTTLEVNIEIENTFLRAQEHFSSTEPTSRPYIPKQKTSKKFSFITKYINTRILTKFVNTDTDFNTLQTIIYSAAWTAAKCNGARMLFSTQSNLNSNQNKSFRKPSWQRRLENKIGKLRANIGRLTQYIRGNRNRKVVAAVEVIKSQYQSHAQHENTNTQLEHFLDTLKQKLNATASRLKRYLTCTARKEQNNKFANNEKNFYRNLISTDKDIDQNLEIPPLEIFREFWANRWENPVHHNEHIDWVNETTTHIPEMQFEFIPIDTFIEVITRTHNWKSAGSDNIHNYWYKKFTSTHSYLHKYLNIFIQSPHLLPKYITQGITYLIPKDKYDTTNPDKYRPITCLQTIYKILSACISEEIHKHLTKYNILAEQQKGCRKNSQGCKEQLTIDAIILNSAVKSKTDIHTMFIDYQKAFDSVPHSWLIYVLKLYRINPTLISFLQNSMQHWQTVLRIKQSSMKSLTSEPIRIQRGIFQGDALSPLWFCLALNPLSQLLNETKEGFTLYSNNSQYTLSHLMYLDDIKLYSTEKNTLFKLAKITEQFSKDIQMKFGVDKCKILSILKGKFTNNNYLLETGEQIEPMNEQDTYKYLGFKQSRQILQTTIKKELLKKFSHRLNLVLKTHLNSKNTIKAINTYAIPLLTYSFGIIHWTKSDIKKLQRTINTNLTKNRKHHPKSCIQRLTLPRQEGGRGLIDVQNLHNKQILSLRAYFHVKSEHSPLHKHATEIDKKLTPLNLHDKNTHLTENLISIQQQMSAWAGKTLHGRHLADLNQPYVDKDKSNEWLKRGELFPETEGFMLAIQDQIIATRNYRKYIMKDRNQPSDLCRHCNTASETIQHITGACKSLAQTDYKHRHDQVAAIIHQHLAFKYKLITEMKPYYKYKPLSVLDNRNHKIYWDRTIITDKTIHYNRPDITIHDKTNRVVYLIDIAVPNSHNIQTTISEKLSKYQDLAIEIKTQWKAQIVHIVPIVLSSTGIVPKSLTKSLNTLQMPTYILHMLQKATILNTCRITRKFITSSTTSTTFLI

SEQ ID NO: 30999 - protein, 1371 aa, Vanessa atalanta
MITRSKIKKNIQANMPSVEEETSQTSYSSSISLFPSIPSSAPFLCASSSHSSSNGAQLADVAQETIFVKEPVPITSNFKKRKKWSPEMNKFILRTYLYLTNLETDTNSYLSSLHIKFIDKYPHMEVSRQRIGDQRRAIIQKKLLAQETIDQIYDEVKAELQVIQTQVQQHSTNLQTSNKTLSGKRMKWTNEWNETIIKIYFRVTHLETNKTAYRTRLHEEFINLHPELAHITEQRLADQRRAIINNKYIKENRLTLIKQQVADELRLTHTLAENIDNEQVQTREQSNIEHINSPNYTLKSNLEINLQSRNIQNTTVTCTNSTTATPIDDETTDGINFINDMERLNSTQSILDTTLEVNIEIENTFLRAQEHFSSTEPTSRPYIPKQKTSKKFSFITKYINTRILTKFVNTDTDFNTLQTIIYSAAWTAAKCNGARMSFSTQSNLNSNQNKSFRKPSWQRRIENKIGKLRANIGRLTQYIRGNRNRKVVTAVEVIKTQYQLHAQHENTNTQLEHFLDTLKQKLNATASRLKRYLTCTARKEQNNKFANNEKNFYRNLISTDKDIDQNLEIPPLEIFREFWANRWENPVHHNEHIDWVNETTTHIPEMQFEFIPIDTFIEVITRTHNWKSAGSDNIHNYWYKKFTSTHSYLHKYLNIFIQSPHLLPKYITQGITYLIPKDKYDTTNPDKYRPITCLQTIYKILSACISEEIHKHLTKYNILAEQQKGCRKNSQGCKEQLTIDAIILNSAAKSKTDIHTMFIDYQKAFDSVPHSWLIYVLKLYRINPTLISFLQNSMQHWQTVLRIKQSSMKSLTSEPIRIQRGIFQGDALSPLWFCLALNPLSQLLNETKEGFTLYSNNSQYTLSHLMYLDDIKLYSTEKNTLFKLAKITEQFSKDIQMKFGVDKCKILSILKGKFTNNNYLLETGEQIEPMNEQDTYKYLGFKQSRQILQTTIKKELLKKFSHRLNLVLKTHLNSKNTIKAINTYAIPLLTYSFGIIHWTKSDIKKLQRTINTNLTKNRKHHPKSCIQRLTLPRQEGGRGLIDVQNLHNKQILSLRAYFHVKSEHSPLHKHATEIDKKLTPLNLHDKNTHLTENVISIQQQMSAWAGKTLHGRHLADLNQPYVDKDKSNEWLKRGELFPETEGFMLAIQDQIIATRNYRKYIMKDRNQPSDLCRHCNTASETIQHITGACKSLAQTDYKHRHDQVAAIIHQHLAFKYKLITEIKPYYKYKPLSVLDNRNHKIYWDRTIITDKTIHYNRPDITIHDKTNRVVYLIDIAVPNSHNIQTTISEKLSKYQDLAIEIKTQWKAQIVHIVPIVLSSTGIVPKSLTKSLNTLQMPTYILHMLQKATILNTCRITRKFITSSTTSTTFLI

SEQ ID NO: 31000 - protein, 1391 aa, Amphipyra tragopoginis
MITRSKTKKVIKADVPPLDDETTKMSSSSSTRSLFPSISSSSHSFCVSPTSSSSSISIQPADVAQETNSVNEPVPTTSTVTVRRKWSIEMNEFILRTYLHLTHMETDINAYLPPLHTKFLEKYPHMQVSRQRIGDQRRAIVQKKLLPQKTIDKIYEEVKIELQTIQTQIQRQSSQFSTTANTQRMRWSNEYNEAIIRIYFRITELETNKTAYRKKLHTEFITLYPNLTHLTEQRIADQRGAIINNKYINGVRLAQIKQEVAEELHIISGRINPGRITENTQSNTQTRSPSNIEYPDVNNIHTLNPQHRSTHINPDMTTNTQTTADPLDFNITHTQNDFVTLTLTDSQNTNENSFLNNIQVEQLVSTHPDIETVLEINPEIDNTFQQAQQYFTNTDPTSRPYIPKQKTSRKFHAIVKYIDTIILPKYVNSDTDFSTLQNVIYCAAWTAATCNGAKMSYAPQNEHPTQLHRKPKWQIRLESKIQDLRANIGRLTQYIRGNRNRRVVAAVEAIKIKHQIHAQHEPSNTQMNHFLDTLKQKLNAASSRLKRYLTCTARKQQNTKFTNNEKNFYRNLTVTHGNTNNQNIDTPSPEALREFWGNIWENPVQHNNDAAWINETYQSTIDIPQMEFEFIPIDTFIDVIKRTHNWKSPGTDNIHNYWYKKFTSIHPHIHNFLNTFIQSPHTLPAYITQGVTYMLPKDMNDTQNPAKYRPITCLQTIYKILTACISEVVYKHLDKFNILAEQQKGCRKNSQGCKEQLTIDAIIMNSAMKNKKDIHTMFIDYQKAFDSVPHSWLLHVLHLYKIHPTLISFLQTSMTNWQSILKIKQSSTQSLTTEPIRIQRGIFQGDALSPLWFCLALNPLSHLLNNTNTRSVHTNNETQYTLSHLMYMDDIKLFAADKDTLFKLADTTQQFSQDIHMQFGVDKCKILSITKGKYQNNSYTLETGAAIEPMDENSTYKYLGFKQSRQIQQKSTKQELQKKFCHRLNLILKSHLNSRNTIKAINTFAVPILTYSFGIIKWSKTDIKKLQRTINTNLTKHRKHHPKSCIQRLTLPRQEGGRGLIDIRNLHNKQINSLRTYFHTKSEHSLLHSHVTELDKKLTPLNLQDRNAQTNETITNKQQKIAAWAEKSLHGRHRSHLSQPHVDKEKSNEWLKRGEVFPETEGFMCAIQDEIIATRNYRKYIIKDLNQPTDLCRHCNTASETIQHITGACKSLAQTDYKHRHDQVAAIIHQHLAYKYQLITKMSPYYKYKPETVLENINHKIYWDRTIITDKTIHYNRPDVTVHDKSNRVVYLIDIAIPNSHNIQNTISEKLSKYQDLAIELKTQWRAQTVHIVPVVLSSTGIIPKSLQQSLNTLHMPTYTLHMLQKATILNTCRITRKFLTSSTLSSTYSI

SEQ ID NO: 31001 - protein, 1182 aa, Vanessa cardui
MRWTNEYNEAIIRIYFKVTHLETNKTAYRTHLHEEFINLYPELAHLTEQRIADQRRAIINNKYIKYDRLTLIKQQVADELRFMHILIEDTENEQFQVREKNKITNIDASNSTLISNLEINSQSRNIQNTTFTSTNSTTATTVNDENTDDNVIHDMGRLNSIPSILDTTLEVNLEIENTFLRAKEHFTSTEPTSRPYIPKQKTSKKFCFITKYINNRILTEFINTDTDFDTLQTIIYSAAWTAAKCNGARISFSNQSTHQNKSFRKPSWQRRLENKIANLRAHIGRLTQYIRGNRNRKVTAAVELIKTQYQSHAQYENTNTQLEHFLDTLKQKLNATASRLKRYLTCTARKVQNNKFANNEKLFYRNLKSTCKDSDQNLEIPPLETFREYWANRWEDPAHHNEHTDWVNETTTHIPEMQFEFIPMETFIEVIKRTHNWKSAGSDNIHNYWYKKFTSTHSYIHKYLNIFIQSPHLLPKYITHGITYLIPKDKYDTTNPDKYRPITCLQTIYKILSACISEEIHKHLTKYNILAEQQKGCRKNSQGCKEQLTIDAIILNSAAKSKTDIHTMFIDYQKAFDSVPHSWLIYVLKLYKINPTLISFLQNSMQHWQTVLRIKQPSMKPLTSEPICIKRGIFQGDALSPLWFCLALNPLSQLLNKANTGFTLYSNNTQYTLSHLMYLDDIKLYSTEKNTLFELAKITEQFSKDIQMKFGIDKCKILSIVKGKFSNNSYLLETGEHIEPMNEHDSYKYLGFKQSRQILQTTTKQELLKKFSSRLNLVLKTHLNSKNTIKAINTYAITLITYSFGIIQWTKSDIQKLQRTINTHLTKNRKHHPKSCIQRLTLPRQEGGRGLIDIQNLHNKQILSLRAYFHDKSEHSPLHKHVTEIDKKLTPLNLHDASTQLNENRTNIQQQMSAWAAKTLHGRHLSELNQPHVDKAKSNEWLKRGELFPETEGFMLAIQDQIIATRNYRKYIMKDHNQPTDLCRHCNAASETIQHITGACKSLAQTDYKHRHDQVAAIIHQHLAFKYKLIAGMNPYYKYKPQSVLDNRNYKIYWDRTIITDKTIYYNRPDITVHDKTNRTVYLIDVAVPNSHNIQTTISEKLSKYQDLAIEIKKQWKAQTVHIVPIVLSSTGIVPKSLTKSLTTLQMPAYILHMLQKAVILNTCRITRKFMSSSTSSSTFLI

SEQ ID NO: 31002 - protein, 1358 aa, Nymphalis polychloros
MSLATRGNNMITRSKTKKYIQANVPSLEEESTQTSNSSSKSLFPSIPSSSQFLYASPPNSLSTDAQLADVAQETIFVSEPVPTTSTVTKRKKWSMEMNKFILRNYFYLTNLETDTNSYLSSLHIKFIDKYPHMEVSRQRIGDQRRAIIQKKLLSQETIDQIYDEVKSELQIIQTQIQKNATNLNTLTGKRIKWTNECNEAIIRIYFKITQLETNKTAYRKRLYEEFTNLYPELAHITEQRLADQRRAIINNKYIKHDRLTLIKQQVADELHQTHILTEDRDNEHLQIREQCNNENADASKTYPGTNSQARIMQNTTVTCSDSVTLTPNDEQNVESINCLNDIDTLEVNPEIETTFLYALEYFSDTESTTRPYIPKQRTSKKFSLITKYIDTMILKKNVNTDTDFNTLQTIIYCAAWTAAKCNGARMSFTTQNNHQNKSFRKLSWQRRLENKIEKLRANIGRLTQFIRGNRNRKVVAAVELIKTQYQSHAQHENTNTQIEHFLDTLKQKLNAAASRLKRYLTCTARKVQNKKFANNEKIFYRNLLSTCKNSEQNLEIPPPEIFREFWANRWENPVHHNEHADWVTETTTQIPEMELKFIPIETFIEVIKRTHNWKSPGSDNIHNYWYKKFTSIHSYIHKYLNIFIQSPYLLPKYITHGITYLVPKDKHDTTNPDKYRPITCLQTIYKILSACISEEIYKHLTKHNILAEQQKGCRKNSQGCKEQLTFDAIILNSAAKSKTDIHTMFIDYQKAFDSVPHSWLLYVLKLYNINPTLISFLQNSMQNWQTVLKIKQSSAKSLTTEPIRIQRGIFQGDALSPLWFCLALNPLSQLLNKTNAGVTLYGNNTQYNLSHLMYLDDIKLYSTDKKTLLELASITEQFSNDIHMKFGVDKCKIMSISKGKILNNSYTLETGELIEPMDEQSTYKYLGFKQSRQILQTTTKQELLTRFSHRLNLILKTHLNSKNTIKAINTFAIPLLTYSFGIIQWSKSDIKKLQRTINTHFTKYRKHHPKSCIQRLTLPRKEGGRGLIDIHNLHNKQILSLRAYFHDKSEHSTLHKHATEIDKKLTPLNLHDKNPQVNEHIISTQQQMIAWANKTLHGRHQADLNQPHVDKEKSNEWLKRGELFPETEGFMLAIQDQIIATRNYRKFIIKDHNQPTDLCRHCNTASETIQHITGACISLAQTDYKHRHDQVAAIIHQHLAYKYKLITEMNPYYKYKPESVLDKRNHKIYWDRTIITDKTIHYNRPDITVHDKTNKIVYLIDIAVPNSHNIQTTISEKLSKYQDLAIEIKTQWKAQTVHIVPIVLSSTGIVPKSLTQSLNTLQIPTYVLHILQKAIILNTCRITPKFMSSSTLSSTYLI

SEQ ID NO: 31003 - protein, 1358 aa, Nymphalis polychloros
MSLATRGNNMITRSKTKKYIQANVPSLEEESTQTSNSSSKSLFPSIPSSSQFLYASPPNSLSTDAQLADVAQETIFVSEPVPTTSTVTKRKKWSMEMNKFILRNYFYLTNLETDTNSYLSSLHIKFIDKYPHMEVSRQRIGDQRRAIIQKKLLSQETIDQIYDEVKSELQIIQTQIQKNATNLNTLTGKRIKWTNECNEAIIRIYFKITQLETNKTAYRKRLYEEFTNLYPELAHITEQRLADQRRAIINNKYIKHDRLTLIKQQVADELHQTHKLTEDRDNEHLQIREQCNNENADASKTYPGTNSQARIMQNTTVTCSDSVTLTPNDEQNVESINCLNDIDTLEVNPEIETTFLHALEYFSDTEPTTRPYIPKQRTSKKFSLITKYIDTMILKKNVNTDTDFNTLQTIIYCAAWTAAKCNGARMSFTTQNNHQNKSFRKLSWQRRLENKIEKLRANIGRLTQFIRGNRNRKVVAAVQLIKTQYQSHAQHENTNTQIEHFLDTLKQKLNAAASRLKRYLTCTARKVQNKKFANNEKIFYRNLLSTCKNSEQNLEIPPPEIFREFWANRWENPVHHNEHADWVTETTTQIPEMELKFIPIEKFIEVIKRTHNWKSPGSDNIHNYWYKKFTSIHSYIHKYLNIFIQSPYLLPKYITHGITYLVPKDKHDTTNPDKYRPITCLQTIYKILSACISEEIYKHLTKHNILAEQQKGCRKNSQGCKEQLTFDAIILNSAAKSKTDIHTMFIDYQKAFDSVPHSWLLYVLKLYNINPTLISFLQNSMQNWQTVLKIKQSSAKSLTTEPIRIQRGIFQGDALSPLWFCLALNPLSQLLNKTNAGVTLYGNNTQYNLSHLMYLDDIKLYSTDKKTLLELASITEQFSNDIHMKFGVDKCKIMSISKGKILNNSYTLETGELIEPMDEQSTYKYLGFKQSRQILQATTKQELLTRFSHRLNLILKTHLNSKNTIKAINTFAIPLLTYSFGIIQWSKSDIKKLQRTINTHFTKYRKHHPKSCIQRLTLPRKEGGRGLIDIHNLHNKQILSLRAYFHDKSEHSTLHKHATEIDKKLTPLNLHDKNPQVNEHIISTQQQMIAWANKTLHGRHQADLNQPHVDKEKSNEWLKRGELFPETEGFMLAIQDQIIATRNYRKFIIKDHNQPTDLCRHCNTASETIQHITGACISLAQTDYKHRHDQVAAIIHQHLAYKYKLITEMNPYYKYKPESVLDNRNHKIYWDRTIITDKTIHYNRPDITVHDKTNKIVYLIDIAVPNSHNIQTTISEKLSKYQDLAIEIKTQWKAQTVHIVPIILSSTGIVPKSLTQSLNTLQIPTYVLHILQKAIILNTCRITRKFMSSSTLSSTYLI

SEQ ID NO: 31004 - protein, 1358 aa, Nymphalis polychloros
MSLATRGNNMITRSKTKKYIQANVPSLEEESTQTSNSSSKSLFPSIPSSSQFLYASPPNSLSTDAQLADVAQETIFVSEPVPTTSTVTKRKKWSMEMNKFILRNYFYLTNLETDTNSYLSSLHIKFIDKYPHMEVSRQRIGDQRRAIIQKKLLSQETIDQIYDEVKSELQIIQTQIQKNATNLNTLTGKRIKWTNECNEAIIRIYFKITQLETNKTAYRKRLYKEFTNLYPELAHITEQRLADQRRAIINNKYIKHDRLTLIKQQVADELHQTHKLTEDRDNEHLQIREQCNNENADASKTYPGTNSQARIMQNTTVTCSDSVTLTPNDEQNVESINCLNDIDTLEVNPEIETTFLHALEYFSDTEPTTRPYIPKQRTSKKFSLITKYIDTMILKKNVNTDTDFNTLQTIIYCAAWTAAKCNGARMSFTTQNNHQNKSFRKLSWQRRLENKIEKLRANIGRLTQFIRGNRNRKVVAAVQLIKTQYQSHAQHENTNTQIEHFLDTLKQKLNAAASRLKRYLTCTARKVQNKKFANNEKIFYRNLLSTCKNSEQNLEIPPPEIFREFWANRWENPVHHNEHADWVTETTTQIPEMELKFIPIETFIEVIKRTHNWKSPGSDNIHNYWYKKFTSIHSYIHKYLNIFIQSPYLLPKYITHGITYLVPKDKHDTTNPDKYRPITCLQTIYKILSACISEEIYKHLTKHNILAEQQKGCRKNSQGCKEQLTFDAIILNSAAKSKTDIHTMFIDYQKAFDSVPHSWLLYVLKLYNINPTLISFLQNSMQNWQTVLKIKQSSAKSLTTEPIRIQRGIFQGDALSPLWFCLALNPLSQLLNKTNAGVTLYGNNTQYNLSHLMYLDDIKLYSTDKKTLLELASITEQFSNDIHMKFGVDKCKIMSISKGKILNNSYTLETGELIEPMDEQSTYKYLGFKQSRQILQTTTKQELLTRFSHRLNLILKTHLNSKNTIKAINTFAIPLLTYSFGIIQWSKSDIKKLQRTINTHFTKYRKHHPKSCIQRLTLPRKEGGRGLIDIHNLHNKQILSLRAYFHDKSEHSTLHKHATEIDKKLTPLNLHDKNPQVNEHIISTQQQMIAWANKTLHGRHQADLNQPHVDKEKSNEWLKRGELFPETEGFMLAIQDQIIATRNYRKFIIKDHNQPTDLCRHCNTASETIQHITGACISLAQTDYKHRHDQVAAIIHQHLAYKYKLITEMNPYYKYKPESVLDNRNHKIYWDRTIITDKTIHYNRPDITVHDKTNKIVYLIDIAVPNSHNIQTTISEKLSKYQDLAIEIKTQWKAQTVHIVPIVLSSTGIVPKSLTQSLNTLQIPTYVLHILQKAIILNTCRITRKFMSSSTLSSTYLI

SEQ ID NO: 31005 - protein, 1371 aa, Vanessa atalanta
MITRSKIKKNIQANMPSVEEETSQTSYSSSISLFPSIPSSAPFLCASSSHSSSNGAQLADVAQETIFVKEPVPITSNFKKRNKWSPEMNKFILRTYLYLTNLETDTNSYLSSLHIKFIDKYPHMEVSRQRIGDQRRAIIQKKLLAQETIDQIYDEVKAELQVIQTQVQQHSTNLQTSNKTLSGKRMKWTNEWNETIIKIYFRVTHLETNKTAYRTRLHEEFINLHPELAHITEQRLADQRRAIINNKYIKENRLTLIKQQVADELRLTHTLAENIDNEQVQTREQSNIEHINSPNYTLKSNLEINLQSRNIQNTTVTCTNSTTATPIDDETTDGINFINDMERLNSTQSILDTTLEVNIEIENTFLRAQEHFSSTEPTSRPYIPKQKTSKKFSFITKYINTRILKKFVNTDTDFNTLQTIIYSAAWTAAKCNGARMSFSTQSNLNSNQNKSFRKPSWQRRLENKIGKLRANIGRLTQYIRGNRNRKVVTAVEVIKTQYQLHAQHENTNTQLEHFLDTLKQKLNATASRLKRYLTCTARKEQNNKFANNEKNFYRNLISTDKDIDQNLEIPPLEIFREFWANRWENPVHHNEHIDWVNETTTHIPEMQFEFIPIDTFIEVITRTHNWKSAGSDNIHNYWYKKFTSTHSYLHKYLNIFIQSPRLLPKYITQGITYLIPKDKYDTTNPDKYRPITCLQTIYKILSACISEEIHKHLTKYNILAEQQKGCRKNSQGCKEQLTIDAIILNSAAKSKTDIHTMFIDYQKAFDSVPHSWLIYVLKLYRINPTLISFLQNSMQHWQTVLRIKQSSMKSLTSEPIRIQRGIFQGDALSPLWFCLALNPLSQLLNETKEGFTLYSNNSQYTLSHLMYLDDIKLYSTEKNTLFKLAKITEQFSKDIQMKFGVDKCKILSILKGKFTNNNYLLETGEQIEPMNEQDTYKYLGFKQSRQILQTTIKKELLKKFSHRLNLVLKTHLNSKNTIKAINTYAIPLLTYSFGIIHWTKSDIKKLQRTINTNLTKNRKHHPKSCIQRLTLPRQEGGRGLIDVQNLHNKQILSLRAYFHVKSEHSPLHKHATEIDKKLTPLNLHDKNTHLTENVISIQQQMSAWAGKTLHGRHLADLNQPYVDKDKSNEWLKRGELFPETEGFMLAIQDQIIATRNYRKYIMKDRNQPSDLCRHCNTASETIQHITGACKSLAQTDYKHRHDQVAAIIHQHLAFKYKLITEIKPYYKYKPLSVLDNRNHKIYWDRTIITDKTIHYNRPDITIHDKTNRVVYLIDIAVPNSHNIQTTISEKLSKYQDLAIEIKTQWKAQIVHIVPIVLSSTGIVPKSLTKSLNTLQMPTYILHMLQKATILNTCRITRKFITSSTTSTTFLI

SEQ ID NO: 31006 - protein, 1391 aa, Amphipyra tragopoginis
MITRSKTKKVIKADVPPLDDETTKMSSSSSTRSLFPSIPSSSHSFCVSPTSSSSSISIQPADVAQETNSVNEPVPTTSSVTVRRKWSIEMNEFILRTYLHLTHMETDINAYLPPLHTKFLEKYPHMQVSRQRIGDQRRAIVQKKLIPQKTIDKIYEEVKMELQTIQTQIQRHSSQFSTTANTQRMRWSNEYNEAIIRIYFRITELETNKTAYRKKLHQEFITLYPNLTHLTEQRIADQRGAIINNKYINDDRLAQIKQEVAEELHIISGRINPSRLTENTQSNAQTRSPSNIEYPDVNNIYTLNPQHRRTHINLDMTTNTQTAVDPLDFNITHTQNDFVTLTLTDSQNTNENSFLNDIQVEQLISTHPDIETVLEINPEIDNTFQQAQQYFNNTDPTSRPYIPKQKTSRKFHAIVKYIDTIIMPKYVNSDTDFNTLQNVIYCAAWTAATCNGAKMSYAPQNEHPTQLHRKPKWQIRLESKIQDLRANIGRLTEYIRGNRNRRVVAAVEAIKIKHQIHAQHEPSNTQMNHFLDTLKQKLNAASSRLKRYLTCTARKQQNTKFTNNEKNFYRNLTVTHGNTNNQNIDTPSPEALREFWGNIWENPVQHNNDAAWINETYQSTIDIPQMEFEFIPIDTFIDVIKRTHNWKSPGTDNIHNYWYKKFTSIHPHIHNFLNTFIQSPHTLPAYITQGVTYMLPKDMNDTQNPAKYRPITCLQTIYKILTACISEVVYKHLDKFNILAEQQKGCRKNSQGCKEQLTIDAIIMNSAMKNKKDIHTMFIDYQKAFDSVPHSWLLHVLHLYKIHPTLISFLQTSMTNWQSILKIKQSSTQSLTTEPIRIQRGIFQGDALSPLWFCLALNPLSHLLNNTNTRSIHTNNETQYTLSHLMYMDDIKLFAADKDTLFKLADTTQQFSQDIHMQVGVDKCKILSITKGKYQNNSYTLETGAAIEPMDENSTYKYLGFKQSRQIQQKSTKQELQKKFCHRLNLILKSHLNSRNTIKAINTFAVPILTYSFGIIKWSKTDIKKLQRTVNTNLTKHRKHHPKSCIQRLTLPRQEGGRGLIDIRNLHNKQINSLRTYFHTKSEHSLLHSHVTELDKKLTPLNLQDRNAQTNETFTNKQQKIAAWAEKSLHGRHRSHLSQPHVDKEKSNEWLKRGELFPETEGFMCAIQDEIIATRNYRKYIIKDLNQPTDLCRHCNTASETIQHITGACKSLAQTDYKHRHDQVAAIIHQHLAYKYQLITKMSPYYKYKPETVLENINYKIYWDRTIITDKTIHYNRPDVTVHDKSNRVVYLIDIAIPNSHNIQSTISEKLSKYQDLAIELKTQWRAQTVHIVPVVLSSTGIIPKSLQQSLNTLHMPTYTLHMIQKATILNTCRITRKFLTSSTLSSTYSI

SEQ ID NO: 31007 - protein, 933 aa, Nymphalis io
MTFLTQNNHQNKSYRKPSWQRRLENKIRKLRANIGRLTQFIRGNRNPKVVAAVDLIKTQYQSHAQYENTNTHIEHFLDTLKQKLNAAASRLKRYLMCTARKIENKTFANNEKIFYRNLLSNCKDNEQNLEIPPPEIFRQFWAKTWENPIEHNEHADWVNEITTHIPEMEFNFLPIETFIDVIKRMHNWKSPGSDNIHNYWYKKFSSIHSYIHKYLNTFIQSPHLLPKYITHGITYLVPKDKHDTTNPDKYRPITCLQTIYKILSACISEEIYKHLTKHNILAEQQKGCRKNSQGCKEQLTFDAIILSSAVKSKSDIHTMFIDYQKAFDSVPRSWLLYVLKLYKINPTLISFLQNSMQNWQTVLKIKQSSMKSLTTEPIRIQRGVFQGDVLSPLWFCLALNPLSLLLNKTNTGFTLYGNNTQYNLSHLMYMDDIKLYSTDKNKLLELASITEQFSKDIHMKFGVDKCKILSISKGKILNNSYTLETGEQIEPMDEQSTYKYLGFKQSRQILQTTTKQELLTKFSHRLNLVLKTHLNSKNTIKAINTFAIPLLTYSFGIIQWSKSDIKKLQRTINTHFTKYRKHHPKSCIQRLTLPRKEGGRVLIDIHNLHNKQILSLRPYFHDKSEHSPLHRHATEIDKKLTPLNLHDKNTQVNEHIISTQQQMLAWTEKTLHGRHRAYLNQPHVDKEKSNEWLKRGELFPETEGFMLAIQDQIIATRNYRKYIMKDNNQPTDLCRQCNAASETIQHITGACKSLAQTDYKHRHDQVAAIIHQHLAYKYKLITEMNPYYKYKPESVLDTRNHKIYWDRTIITDKTICYNIPVITVHDKINGIVYLIDIAVPNSHNIQTTISEKLSKYQDLAIEIKTQWKAQTVHIVPIVLSSTGIVPKSLTQSLNTLQMPAYILHILQKAIILNTCRITRKFISSSTLSSTFLI

SEQ ID NO: 31008 - protein, 1371 aa, Vanessa atalanta
MITRSKIKKNIQANMPSVEEETSQTSYSSSISLFPSIPSSAPFLCASSSHSSSNGAQLADVAQETIFVKEPVPITSNFKKRKKWSPEMNKFILRTYLYLTNLETDTNSYLSSLHIKFIDKYPHMEVSRQRIGDQRRAIIQKKLLAQETIDQIYDEVKAELQVIQTQVQQHSTNLQTSNKTLSGKRMKWTNEWNETIIKIYFRVTHLETNKTAYRTRLHEEFINLHPELAHITEQRLADQRRAIINNKYIKENRLTLIKQQVADELRLTHTLAENIDNEQVQTREQSNIEHINSPNYTLKSNLEINLQSRNIQNTTVTCTNSTTATPIDDETTDGINFINDMERLNSTQSILDTTLEVNIEIENTFLRAQEHFSSTEPTSRPYIPKQKTSKKFSFITKYINTRILTKFVNTDTDFNTLQTIIYSAAWTAAKCNGARMSFSTQSNLNSNQNKSFRKPSWQRRLENKIGKLRANIGRLTQYIRGNRNRKVVTAVEVIKTQYQLHAQHENTNTQLEHFLDTLKQKLNATASRLKRYLTCTARKEQNNKFANNEKNFYRNLISTDKDIDQNLEIPPLEIFREFWANRWENPLHHNEHIDWVNETTTHIPEMQFEFIPIDTFIEVITRTHNWKSAGSDNIHNYWYKKFTSTHSYLHKYLNIFIQSPHLLPKYITQGITYLIPKDKYDTTNPDKYRPITCLQTIYKILSACISEEIHKHLTKYNILAEQQKGCRKNSQGCKEQLTIDAIILNSAAKSKTDIHTMFIDYQKAFDSVPHSWLIYVLKLYRINPTLISFLQNSMQHWQTVLRIKQSSMKSLTSEPIRIQRGIFQGDALSPLWFCLALNPLSQLLNETKEGFTLYSNNSQYTLSHLMYLYDIKLYSTEKNTLFKLAKITEQFSKDIQMKFGVDKCKILSILKGKFTNNNYLLETGEQIEPMNEQDTYKYLGFKQSRQILQTTIKKELLKKFSHRLNLVLKTHLNSKNTIKAINTYAIPLLTYSFGIIHWTKSDIKKLQRTINTNLTKNRKHHPKSCIQRLTLPRQEGGRGLIDVQNLQNKQILSLRAYFHVKSEHSPLHKHATEIDKKLTPLNLHDKNTHLTENVISIQQQMSAWAGKTLHGRHLADLNQPYVDKDKSNEWLKRGELFPETEGFMLAIQDQIIATRNYRKYIMKDRNQPSDLCRHCNTASETIQHITGACKSLAQTDYKHRHDQVAAIIHQHLAFKYKLITEIKPYYKYKPLSVLDNRNHKIYWDRTIITDKTIHYNRPDITIHDKTNRVVYLIDIAVPNSHNIQTTISEKLSKYQDLAIEIKTQWKAQIVHIVPIVLSSTGIVPKSLTKSLNTLQMPTYILHMLQKATILNTCRITRKFITSSTTSTTFLI

SEQ ID NO: 31009 - protein, 1368 aa, Blastobasis lacticolella
MITRSKSKTFTQARVPVVDDEVTLASLSTSPRSLFSSLSSSPPSYLRTYQLTHRSERSSIDSNMITQATNADDLVPSDHFISSSSTSFSSLPIDVVPEAIADLPTPVTGRNRARRKWTLDMNKFIWRHYLIGTNFESNTRGYLDYLYQKFTEKYPTMKASKQNLGDQRRAIINNNLLPTNILEEIRKEVTTYLEQEPTHTAPQSIETIRKRMYWSKEMNETILRIYYEVTEMETDLTAHRKKLHRTFIELYPHLQHLSEQRISDQRRVILNNKMISEEIIEQIKQEVQNKIQSANRHTSSNDSQEQIVPIIYTNTVADSCITANNITLHDCANPNETEYYPSGSETNRTVDVIDVSLMDKIHKYFKATLEMFKSSDPTTRPYIPRQKSCKKLAVIVSYIDKYILPEYLTTNTDFSTLQTLIYSAAYTAASCNGTKIDPRNKNKTEKRTPPWQKRMESKIDKLRKQIGHLTEYIQGNRNRKVSATVEEIKINYQIHATYEDRNTELQHFLDTMKQKLIVTSSRLKRYLTCKTRKTENCRFINNEKLFYKSLAARQQEQPTNANIATPTPEEHRNFWAGIWEDPVEHNKNAEWITVTRETTATIPQMVFEYIPVDTFINVIKRTHNWKAPGTDNIHNFWYKKLTTIHPHIHNHLNTFIQSPNTMPDYITQGITYMIPKDKSDPNNPEKYRPITCLQTIYKILTSCISDTMYNHLSEHNILAEQQKGCRKKSQGCKEQLTIDAIVLNRAVKNKKNIHTMFIDYQKAFDSVPHSWLLQVLELYKIHPKIYSFLQYAMGKWQTTLKITQGKDSLITEPIRIQRGIFQGDALSPLWFCLALNPLSDSLNRTNTGITLTNNDTEHILSHLMYMDDIKLFGSSKENLFKLANVTQQFSEDIKMKFGVDKCKILSVNRGKIQNNNYALETGESITAMDENSTYKYLGFRQSRQIRQKETKIELTTKFKSRLNLILKTHLNSRNTVKAINTFAIPVLTYSFGIIHWSQTELNHIQRTINTSLTKHRKHHPKACIQRLTLPRIEGGRGLIDIPNLHTKQIQTLRSYFHAKTEHSTLHLHITELDIKYTPLNLADRQAIVRPEDVQNKIEAWAGKSLHGRHRTHLSQPHVDKEKSNEWLKRGELFPETEGFMFAIQDEVIATRNYIKYIIKDTTQRTDTCRHCNSASETIQHITGGCKSLAQTDYKHRHDQVASIIHQQLAFKYQFLAKIAPYYKYKPQTVLENSAHKIYWDRTILTDKTIHCNRPDITVFDKSQQTVYLIDIAIPNTHNIQATISEKLSKYQDLAIELKTQWKAKIVQIIPVVLSSTGVVPKSLSQSLETLQMPSHVTHMLQKAVVLNTCRITRKFLTSSTITSAVIQF

SEQ ID NO: 31010 - protein, 1264 aa, Blastobasis lacticolella
MPVTGRNRARRKWTLDMNKFIWRHYLIGTNLESNTRGYLDYLYQKFTEKYPTMKASKQNLGDQRRAIINNNLLPTNILEEIRKEVTTYLEQEPTHTAPQTIETIRKRMYWSKEMNETILRIYYEVTEMETDLTAHRKKLHRTFIELYPHLQHLSEQRISDQRRVILNNKMISEEIIEQIKQEVQNKIQSANRHTSSNDSQEQIFSIIHTNTVADSCITANNITLHDCANPNETEYYPSGSETNRTVDVIDVSLMDKIHKYFKATLEMFKSSDPTTRPYIPRQKSCKKLAVIVSYIDKYILPEYLTTNTDFSTLQTLIYSAAYTAASCNGTKIDPRNKNKTEKRTPPWQKRMESKIDKLRKQIGHLTEYIQGNRNRKVSATVEEIKINYQIHATYEDRNTELQHFLDTMKQKLIVTSSRLKRYLTCKTRKTENCRFINNEKLFYKSLAARQQEQPTNANIATPTPEEHRNFWAGMWEDPVEHNKNAEWITVTRETTATIPQMVFEYIPVDTFINVIKRTHNWKAPGTDNIHNFWYKKLTTIHPHIHNHLNTFIQSPNTMPDYITQGITYMIPKDKSDPNNPEKYRPITCLQTIYKILTSCISETMYNHLSEHNILAEQQKGCRKKSQGCKEQLTIDAIVLNRAVKNKKNIHTMFIDYQKAFDSVPHSWLLQVLELYKIHPKIYSFLQYAMGKWQTTLKITQGKDSLITEPIRIQRGIFQGDALSPLWFCLALNPLSDSLNRTNTGITLTNNDTEHILSHLMYMDDIKLFGSSKENLFKLANVTQQFSEDIKMKFGVDKCKILSVNRGKIQNNNYALETGESITAMDENSTYKYLGFRQSRQIRQKETKIEITTKFKSRLNLILKTHLNSRNTVKAINTFAIPVLTYSFGIIHWSQTELNHIQRTINTSLTKHRKHHPKACIQRLTLPRIEGGRGLIDIPNLHTKQIQTLRSYFHAKTEHSTLHLHITELDIKYTPLNLADRQAIVRPEDVQKKIEAWAGKSLHGRHRTHLSQPHVDKEKSNEWLKRGELFPETEGFMFAIQDEVIATRNYIKYIIKDTTQRTDTCRHCNSASETIQHITGGCKSLAQTDYKHRHDQVASIIHQQLAFKYQFLAKIAPYYKYKPQTVLENSAHKIYWDRTILTDKTIHYNRPDITVFDKSQQTVYLIDIAIPNTHNIQATISEKLSKYQDLAIELKTQWKAKIVQIIPVVLSSTGVVPKSLSQSLETLQMPSHVTHMLQKAVVLNTCRITRKFLTSSTITSAVIQF

SEQ ID NO: 31011 - protein, 1371 aa, Autographa gamma
MSLASRGNNMITRSKTKTLLAITPTVDDVTTSSSHPSSPSSLFSSISSPQRSYSDSFHNSSSSPLSSPSSSSSIYREQLEDVAQVTNIVNEPVPTNSSVTVRRKWSLEMNKFILRTYLQLTNMETDINAYLSSLHIKFIEKYPEFQVSRQRIGDQRRAIIQKKLLTQSTIDEIYSEVRSELQHSDTQLHSTQTQPGQRMKWTRELNEAIIRIYFRITNLETNKTAYRKSLHEELINMYPNMSHLTEQRVADQRRAIINNKYINNDRLEELKQEIARELRNTHTQINNSIEQNDTYFPDNTACTNIETNSILYENCSLEYNITQTQTEQEGTFTHTQNINDETDQAAMRRSHCNFDLQPNLEIESTFELARQYFSDTDPTKRPYIPKQKTSRKFIVIVNYINRVILSKHVNIDTTFKDMQTVVYCAAWTAAKSNGAKISQDIQTEHRRRPRRVPKWQIRLQKKIGSLRMNIGRLTQFIRGNRSRRIVDTVNTIQQTYQIHAQHEDINTHMEHFLDTLKQKLSAAASRLKRYVKCTDRKMQNIQFTNNEKTFYRNLASGNNPSNCPNIELGPDINTFREFWANIWENPVYHNFEAEWINEPQTHILEMDFEHIPLDTFAEVIKNTHNWKSPGTDNIHNYYYKKFTYLHPFIYSHLNSFIKNPHLLPPYITQGVTYMIPKDINDPTNPAKYRPITCLQTLYKILTACLSKVVHKHLLKYDILAEEQKGCRKSSQGCKEQLTIDAVTMNSAVKGKRDIHTMFIDYQKAYDSVPHSWLLHILRLYKIHPSIITFLESSMSHWLTILKINPTSLQALTTEPIRIQRGIFQGDSFSPLWFCLALNPLSEQLNKTSAGFKLTHNNTEYNLSHLMYMDDIKLFASTKSSLFQLAEITEQFSKDIHMQFGVDKCNIMSITKGKFEDNRYTLVNGECIEPMDTHSLYKYLGFKQSRQIQHKVTKQELRQKFIHRLKLILNTHLNSKNTTKAINAFAIPILTYSFGIIHWSKTDLTNLQRVINTHLTKHRKHHPKSCTQRLTLPRKEGGRGLIDIKNLHNKQILTLRTYFHDKVEQSSLHFHIVETDKKLTPLNLQDRNNQMNELLTTIQHQLTAWTTKALHGRHRACLSQPHVDKDKSNEWLIRGELFPETEGFMLAIQDQVIATRNYRKYIIKDPNLPTDLCRHCNVASETIQHITGACKSLAQSDYKHRHDQVASIIHQHLAHTYKLITEMQPYYKYKPQTIVENRNHKIYWDRTIITDKTIHYNRPDITVHDKINKTVYLIDVAIPNSHNLQATISEKLSKYQDLAIEIKTQWDAQTVHIVPIVLSSTGVIPKSLLQSLETLHMPSYILHMIQKATILNTCRITRKFLTSSTLSSGYSI

SEQ ID NO: 31012 - protein, 1379 aa, Autographa pulchrina
MSLASRGNNMITRSKTKNLLALRPSLNDETILVSHPSSPQSLFSSTSSTQRSYSDPLLSSSSSPLSSPSSFSINREQLEDVAQGTNLVNEPVPTTSSVTVRRKWSLEMNKFILRTYLQLTNMETDMNAYLPSLHIKFIEKYPECTVSRQRIGDQRRAILQKKLLTQNIIDEIYSEVRSELQHSETQTQLYTTQTLLVPNTQPGQRMKWTMELNEAIIRIYLRITNLETNKTTYRRRLYEELISMYPSLFYLTEQRVADQRRAIINNKYIKNDRLEEIKQEVARELRNANTQIESRMDQSDTYCLTGNTVSTNVETNSISYENCNLEYNNSQIHSEHEALTSTHTQNINDENDQAALTTSCYSIDLQPNIEIENTFQLAWQYFSNTDPTKRPYIPKQKTSRKFSVIVNYVNRTVLPKHVNRNTNFKDMQTVIYCAAWTAAKCNGTKIAQDVQTEHRTQPRRAPKWQIRLENKIGSLRENIGRLTEYIRGNRSQRVLDTVRTIQQTNQIHAQHEDRNTQMEHFLDTLKQKLSAASSRLKRYVKCTARKTQNIRFINNEKTFYRNLTNSNNSSIRPTAEIPNMNTFREFWANLWENPVHHNNEAEWINDTPIQIQEMDFEHIPLDTFAEVIRHTHNWKSPGTDNIHNFWYKKFSYLHPFIYNHLNTFIKNPHLLPSYITQGHTYMIPKDINDPTNPAKYRPITCLQTLYKILTACISEVIHKHLLQHNILSEEQKGCRKNSKGCKEQLTIDAVTINSAVKNKSDIHTMFIDYQKAYDSVPHSWLLQILELYKIHPTLTAFLQSSMGHWQTILKINHGSLQSLTSDPIRIQRGIFQGDSLSPLWFCLSLNPLSELLNKTGAGFKFTNHNIEYNLSHLMYMDDIKLYANTKSSLFQLADITEQFSKDIHMQFGVDKCNILSITKGRFEGNRYTLTNGECIEPMDSHSLYKYLGFKQSRQIQQKVTKQELRQKLTYRLKLILNTHLNSKNTIKAINTFAIPILTYSFGIIHWSKTDMMNLQRIINTQMTKHRKHHPKSCIQRLTLPRKEGGRGLIDINNLHNKQILSLRTYFHNKTEHSSLHHHIVETDKHLTPLNLQDRNDQITEIQTTIQHQLTAWTTKALHGRHRACLSQPHVDKDKSNEWLKRGELFPETEGFMLAIQDQIIATRNYRKYIIKDPNLPTDLCRHCNLASETIQHITGACKSLAQSDYKHRHDQVAAIIHQHLAHSNKLITEMNPYYKYKPQTILENRNHKIYWDRTIITDKTIHYNRPDITVHDKINKTVYLIDIAIPNSHNLQTTISEKLSKYQDLAIEIKTQWNAQIVHIVPIVLSSTGVIPKSLLQSLDTLHMPLYILHMLQKATILNTCRITRKFLTSSTLSSAYSI

SEQ ID NO: 31013 - protein, 1364 aa, Autographa gamma
MSLASRGNNMITRSKTKTLLAITPVLDDETTLVSHPSSPKSLFSSISSPQRSYCDPLSSPSSSPISSPSSYSINREPLEDVAQVTNLVNEPVPTTSSVTVRRKWSIEMNKFILRTYLQLTNMETDMNAYLPSLHTQFIQKYPECQVSRQRIGDQRRAIIHKKLLPQNVIDQIYSEVRAELQNFVTQTHLHSTHTQLVPDTQPGQRMKWTMELNEAIIRIYFRITNLETNKTAYRKSLHEELINMYPSMSHLTEQRVADQRRAIINNNYIKNDRIEEIKQEISRELGNTNTQLENNINIETSSILYESHNLEYNITQIHTEREALTFTHTQDINDITDQAAQSPPCYNLDLPPNPEIESTFELACQYFSDTDITRRPYITKQKTSRKFSVIVNYINRVILPKHVNSDSTFKDMQNIVYCAAWAAAKCNGTKISQDIQTEHRIQPRRAPKWQIRLEKKIGSLRVNIGRLKEFIKGNRSRRILETVRNIQQTHQIHAQHEDTNTQMEHFLDTLKQKLSAAASRLKRYVKCTARKTQNIKFSNNEKTFYRNLANSKNTSSCPNTEIPDINNFRGFWANLWENPVHHNIEAEWINETPTQIPEMDFEHIPLDTFAEVIKHTHNWKSPGTDNIHNYWYKKFTYLHPFIYSHLNSFIKNPHLLPPYITQGVTYMIPKDINDPINPAKYRPITCLQTLYKILTACISKIVHKHLLKYNILSEEQKGCRKSSQGCKEQLTIDAVTMNSAVKGKRDIHTMFIDYQKAYDSVPHSWLLHILSLYKIHPTLINFLQSSMGHWQTILKLNQASSQSLTTDPIRIQRGIFQGDSLSPLWFCLALNPLSEQLNKSGAGFNLTNNNRVYNLSHLMYMDDIKLFANTKSSLFQLAEITEQFSKDIHMQFGVDKCNILSITKGRFEENRYTLVNGECIEPMDAHSLYKYLGFKQSRQIQQKMTKQELRQKFIYRLKLILNTHLNSKNIIKAINTFAIPILTYSFGIIRWSKTDIMNLQRTINTQLTKHRKHHPKSCIQRLTLPRQEGGRGLIDINNLHNKQILSLRTYFHNKIAESSLHYHIVETDKNLTPLNLHDRNSQENELFNTIQHQLTAWTTKALHGRHRACLSQPHVDKDKSNEWLKRGELFPETEGFMLAIQDQIIATRNYRKYIIKDPNLPTDLCRHCNVASETIQHITGACKSLAQSDYKHRHDQVAAIIHQHLAHTYKLITEMQPYYKYKPQTVIENRNHKIYWDRTIITDKTIHYNRPDITVHDKINKIVYLIDVAIPNSHNVQATISEKLSKYQDLAIEMKTQWDAQIVHIVPIVLSSTGVIPKSLLQSLDTLHMPSYILHMLQKATILNTCRITRKFLTSSTLSSTYSI

SEQ ID NO: 31014 - protein, 1364 aa, Autographa gamma
MSLASRGNNMITRSKTKTLLAITPTLDDVTTSSSHPSSPSSLFSSISSPQRSYCDPFHNSSSSPLSSPSSSNSINREQLEDVAQVTNIVNEPVPTTSSVTVRRKWSIEMNKFILRTYLQLTNMETDMNAYLSSLHIKFIERYPECQVSRQRIGDQRRAIIQKKLLTQSTIDEIYSEVRSELQHSDTQTQLYSTQTQLAPNTQPGQRMKWTRELNEAIVRIYLRITNLETNKTAYRKSLHEELINMYPNMSHLTEQRVADQRRAIINNKYINNDRLEEIKQEIARELRNTNTQIENINIETNSIVYEDSNLEYNNTQINNELAASTSTQTQDINEETDQATLNRPWYSIDLQPNPEIESTFQLSRQYFSETDPTRRPYIPKQKTSRKFSVIVNYINRAVLPKHINSDTNFKEMQTVIYCAAWTAAKCNGTKISQDIQTEHRTQPRKLPKWQIRLEKKIGDLRANIARLTEYIRGNRSQRILDRVRNIQRTYQVHAQHEDTNTQMEHFLDTLKQKLSAAASRLKRYVKCTARKTQNIKFMNNEKTFYRNLATSNNASSIPNIESPDINTFREFWANLWENPVHHNTEAEWITDTPSHIIDMDYEYIPLDTFVEVIKHTHNWKSPGTDNIHNYWYKKFTYLHPFIYNQLNTFIKNPHLVPLYITQGVTYMIPKDINERTNPAKYRPITCLQTLYKILTACISKIVHKHLLKYDILAEEQKGCRKNSQGCKEQLTIDAVTMNSAVKGKRDIHTMFIDYQKAYDSVPHSWLLHVLKLYKIHPTLITFLQSSMSHWQTILKINQASSQSLTTDPIRIQRGIFQGDSLSPLWFCLSLNPLSEQLNKTSAGFLLTYNNTEYNLSHLMYMDDIKLFASTKSMLFQLAEKTEQFSKDIHMQFGVDKCNILSITKGKFEDNRYTLVSGKCIEPMDRQSLYKYLGFKQSKQIQHKVTKQELRQKFMHRLKLILNTHLNSKNTIKAINTFAIPILTYSFGIIHWSKTDMMNLQRIINTQMTKHRKHHPKSCIQRLTLPRKEGGRGLIDINNLHNKQILSLRTYFHNKTEHSSLHHHIVEADKHLTPLNLQDRNDQISESLTTIQHQLTAWNTKALHGRHRACLSQPHVDKDKSNEWLIRGELFPETEGFMLAIQDQVIATRNYRKYIIKDPSLPTDLCRHCNLASETIQHITGACKSLAQSDYKHRHDQVAAVIHQHLAHSNKLITEMNPYYKYKPQTILENRNYKIYWDRTIITDKTIHYNRPDITVHEKINKTVYLIDIAIPNSHNIQTTISEKLSKYQDLAIEIKTQWNVQVVHIVPIVLSSTGVIPKSLLQSLNTLNMPSYILHMLQKATILNTCRITRKFLTSSTLSSAYSI

SEQ ID NO: 31015 - protein, 1364 aa, Autographa gamma
MSLASRGNNMITRSKTKTLLAITPTLDDVTTSSSHPSSPSSLFSSISSPQRSYCDPFHNSSSSPLSSPSSSNSINREQLEDVAQMTNIVNEPVPTTSSVTVRRKWTLEMNKFILRTYLQLTNMETDMNAYLPSLHIKFIERYPECQVSRQRIGDQRRAIIQKKLLIQSTIDEIYSEVRSELQHSDTQTQLYSTQTQLAPNTQPGQRMKWTRELNEAIVRIYLRITNLETNKTAYRKSLHEELINMYPNMSHLTEQRVADQRRAIINNKYINNDRLEEIKQEIARELRNTNTQIENINIETNSIVYEDSNLEYNNTQINNELAASTSTQTQDINEETDQATLNRPWYSIDLQPNPEIESTFQLSRQYFSETDPTRRPYIPKQKTSRKFSVIVNYINRAVLPKHINSDTNFKEMQTVIYCAAWTAAKCNGTKISQDIQTEHRTQPRKLPKWQIRLEKKIGDLRANIARLTEYIRGNRSQRILDRVRNIQRTYQVHAQHEDTNTQMEHFLDTLKQKLSAAASRLKRYVKCTARKTQNIKFMNNEKTFYRNLATSNNASSIPNIESPDINTFREFWANLWENPVHHNTEAEWITDTPSHIIDMDYEYIPLDTFVEVIKHTHNWKSPGTDNIHNYWYKKFTYLHPFIYNQLNTFIKNPHLVPLYITQGVTYMIPKDINERTNPAKYRPITCLQTLYKILTACISKIVHKHLLKYDILAEEQKGCRKNSQGCKEQLTIDAVTMNSAVKGKRDIHTMFIDYQKAYDSVPHSWLLHVLKLYKIHPTLITFLQSSMSHWQTILKINQASSQFLTTDPIRIQRGIFQGDSLSPLWFCLSLNPLSEQLNKTSAGFKLTYNNTEYNLSHLMYMDDIKLFASTKSMLFQLAEKTEQFSKDIHMQFGVDKCNILSITKGKFEDNRYTLVSGECIEPMDRQSLYKYLGFKQSKQIQHKVTKQELRQKFMHRLKLILNTHLNSKNTIKAINTFAIPILTYSFGIIHWSKTDMMNLQRIINTQMTKHRKHHPKSCIQRLTLPRKEGGRGLIDINNLHNKQILSLRTYFHNKTEHSSLHHHIVEADKHLTPLNLQDRNDQISESLTTIQHQLTAWNTKALHGRHRACLSQPHVDKDKSNEWLIRGELFPETEGFMLAIQDQVIATRNYRKYIIKDPSLPTDLCRHCNLASETIQHITGACKSLAQSDYKHRHDQVAAVIHQHLAHSNKLITEMNPYYKYKPQTILENRNYKIYWDRTIITDKTIHYNRPDITVHDKINKTVYLIDIAIPNSHNIQTTISEKLSKYQDLAIEIKTQWNVQVVHIVPIVLSSTGVIPKSLLQSLNTLNMPSYILHMLQKATILNTCRITRKFLTSSTLSSAYSI

SEQ ID NO: 31016 - protein, 1354 aa, Cecropterus casica
MSKRVYNLRPLPGGRRGASGADAGCSSMRTIGGEELNRRTSTEKNVTADVISHHTNSSNISPLSSLFPSPNSSPNPFQNNSYLETSSSSSPLIVDVAQETNVSHHEPTTAKSRARRKWTIEMNKFIWRTYLITSRLETHTRGYLDPLHKAFIEKYPEMNASKQSIGDQRRAIVNNKLLPTITLREIRDEVTKYLQQNTQSPPILIQTSARMRWSDEINEKIVRIYFEITELETNMTAHRKKLHDKFIETYPHLAHLSEQRISDQRRVIVNNKMLPEARILQIRQEVRTQIEKSNTLTQISESYSQNSTLQQIADTTQTIIHEDVEPPSQVRGLSVTEQETNTYNFSKLIDRERIQRQFNLALDTFKNTDPTLRPYLPRQKPSKKLALIIDYLNKNSLPNSLSTEQDFITLQTILYSAAYTAVLCNGTKINSSKTFKTDCRPPWQRRLENKISIFRAEIGRLSQYILGNRSNRIMIAVEKIKIKYQVHSRYENINTQLEHFLDTLKQKLNAASRLRRYVTCGARKKQNTQFTYTEKAFYRGLSSHNQNINMQENKTPTAENLHKFWGNIWEKPVQHNIEAEWLNGINETTKNIPIMDFEHLTLDMFVDVVKGTHNWKSPGTDNIHNYWYKKFTSIYPYLLNHLNTFIQSPHLMPQYITHGVTYMLPKESNTEDPAKYRPITCLQTIYKILTACISKTINAHLTQHDILAEQQKGCRKDSQGCKEQLTIDAIVINEAYTAKQDIHTMFIDYRKAFDSVPHSWLLHILTLYKINPNIIHFIETCMQNWKTILKIKQRSSIITTDPIRILRGIFQGDALSPLWFCLSLNPLSTLLNNNAGYKLVTTDDRISLTHLLYMDDIKLYASNVDDLFQLADLAQQFSIDICMEFGVDKCKILSIYKGQIENNKYALENGQDIEPLDENSSYRYLGFKQSRKILQKETKAEITNKFKHRLNLVLKTHLNSRNVIKAINTFCIPILTYSFGIINWSQTELKNLQRIINTHLTKYRKHHPKSSIERLTVPRKEGGRGIIDIQNLHNKQIFTLRHYFHTKARHSILHKQVTEIDNKLTPLNLRNRHTQPNETPITIDQKIAKWAGKSLHGRHRTDLSQTYVDKEKSNDWLTKGELFPETEGFMLAIQDQIIVTKNYRKYIIKDTTQLSDLCRLCNSASETIQHITGACKSLVQSDYKHRHDQVAAIVHQHLAHMYKFIIKKDPYYKYKPATVLENQNTKIYWDRTILTDKTIHFNRPDITLLDKKSNAVYIIDIAIPNSHNIQSTISEKLSKYQDLAIELKTQWNAHIVHIVPIVLSSTGIVPKTLTQSLDIIRMPAHSHYLLQKATILNTCRITRKFLTSSSTRHA

SEQ ID NO: 31017 - protein, 1300 aa, Tuta absoluta
MPSRSSTASPMSEDVVQEAFAAISVPTPGITSARKRWSSEMNEFIWRNYLILTKNETNTRSYLDALHQKFTDAFPEMDVSRQRVGDQRRAIINNKLLTQSRLDAIRIEIISLLENGNIPSNQPNPTQNSGSRMRWSNELNESIIRTFLEVTHIETDMTANRKRLHTKFVERHPQLSHISEQRLSDQRRAIVNNKMIPQQRIQQIRLEVEAQLLTNQRQSEPDNTPEHDFNEQTTLITMTPITETEETELSLNTNITPDIHLHGGRNITPSNDDSNSNTPHADLTQKIKDQFILATEKFTNTDPTKRPYIPKQKSSKKLALIVEYINLNILPDYLNTEQDFNELQTIIYVAAYTAAICNGAKIDIERRTINTNRRTKPSWQKRLEDKVRNLRSEIARLTQFKNGNRSPRIVSSVEEIKNKYQIHAQYENPNTEVNHFLDTLKQKLNIVSSRLKRYKACTARKSQNRQFINNEKVFYRNLSSPPQNTHNAVEPPTPETLKEFWGNIWEKPVEHNQNAEWIDEARRAAEITPEMSFEFIPVETFIQVLRRAHNWKSPGSDNLHAYWYKKFTKTHPHLHNQLNTFIQSPDTMPTFITHGITYMLPKDKLDSQNPAKYRPITCLQVIYKILTGCLSELIYQHVIENNILAEQQKGCRKYSQGCKEQLTLDAVTLNHAYKKKKDIYTMFIDYRKAFDSVPHTWLLEVLRLYKIDPKIVTFLEASMKNWQTILKINQSSESITTEAINIKRGIFQGDSLSPLWFCLALNPLSNLINQSIIGFQLNSEHDSRISHLMYMDDIKLFASSETELNTLADITQQFSSDIKMQFGVDKCKTLSVSQGKLIHNPYLLETGELIEPMDELNTYKYLGFQQSRQIKQKQTKIDLTHKFIHRLNLILNSELNSRNTTKAINTFAIPTLTYSFGIINWTQTDLKKIQRTIHTTLTKFRKHHPKACIQRITLPRQEGGRGLIDVNNLHNKQITTLRKYFHNKSEHSSLHKHATDTDIKLTPLNLHDRQTQPNEKLTESKHKIATWSGKSLHGRHRSHLCQTYVDKDKSNEWLRKGELFPETEGFMLAIQDEVIATRNYKKHILKDPNQTNDLCRHCNSASETIQHITGSCRSIVQTDYKHRHDQVASIIHQELAHKYKFIDNRKQPYYKYKPEIILEDSNYKIYWDRTILTDRTVHYNRPDITLHDKQTKTVYLIDVAIPNTHNIQTTISDKLSKYQDLAIEIKTQWRANTVHIVPIVLSSTGIIPKTLSNSLKILNISTNLTYSLQKATVLNTCRITRKFLPSSTINSSSESSAILG

SEQ ID NO: 31018 - protein, 1375 aa, Tuta absoluta
MEESRKMYNLRPLPGGRRGTPGASAGCHSMRTTGGGGLNRRVPPEQNTTAEPQSPSSSPPNSLYSTPISSPYRIEMPSRSSTASPMSEDVVQEAFAAISVPIPGITSARKRWSSEMNEFIWRNYLILTKNETNTRSYLDALHQKFTDAFPEMDVSRQRVGDQRRAIINNKLLTQSRLDAIRIEIISLLENGNIPSNQPNPTQNSGSRMRWSNELNESIIRTFLEVTHIETDMTANRKRLHTKFVERHPQLSHISEQRLSDQRRAFVNNKMIPQQRIQQIRLEVEAQLLTNQRQSEPDNTPEHDFNEQTTLITMTPITETEETELSLNTNITPDIHLHGGRNITPSNDDSNSNTPHADLTQKIKDQFILATEKFTNTDPTKRPYIPKQKSSKKLALIVEYINLNILPDYLNTEQDFNELQTIIYVAAYTAAICNGAKIDIERRTINTNRRTKPSWQKRLEDKVRNLRSDKARLTQFKNGNRSPRIVSSVEEIKNKYQIHAQYENPNTEVNHFLDTLKQKLNIVSSRLKRYKACTARKSQNRQFINNEKVFYRNLSSPPQNTHNAVEPPTPETLKEFWGNIWEKPVEHNQNAEWIDEARRAAEITPEMSFEFIPVETFIQVLKRAHNWKSPGSDNLHAYWYKKFTKTHPHLHNQLNTFIQSPDTMPTFITHGITYMLPKDKLDSQNPAKYRPITCLQVIYKILTGCLSELIYQHVIENNILAEQQKGCRKYSQGCKEQLTLDAITLNHAYKKKKDIYTMFIDYRKAFDSVPHTWLLEVLRLYKIDPKIVTFLEASMKNWQTILKINQSSESITTEPINIKRGIFQGDSLSPLWFCLALNPLSNLINQSIIGFQLNSEHDSRISHLMYMDDIKLFASSETELNTLADITQQFSSDIKMQFGVDKCKTLSVSQGKLIHNPYLLETGELIEPMDELNTYKYLGFQQSRQIKQKQTQIDLTHKFIHRLNLILNSELNSRNTTKAINTFAIPTLTYSFGIINWTQTDLKKIQRTIHTTLTKFRKHHPNACIQRITLPRQEGGRGLIDVNNLHNKQITTLRKYFHNKSEHSSLHKHATDTDIKLTPLNLHDRQTQPNEKLTESKHKIATWSGKSLHGRHRSHLCQTYVDKDKSNEWLRKGELFPETEGFMLAIQDEVIATRNYKKHILKDPNQTNDLCRHCNSASETIQHITGSCRSIVQTDYKHRHDQVASIIHQELAHKYKFIDNRKQPYYKYKPEIILEDSNYKIYWDRTILTDRTVHYNRPDITLHDKQTKTVYLIDVAIPNTHNIQTTISDKLSKYQDLAIEIKTQWRANTVHIVPIVLSSTGIIPKTLSNSLKILNISTNLTYSLQKATVLNTCRITRKFLTSSTINSSSESSAILG

SEQ ID NO: 31019 - protein, 764 aa, Noctua janthe
MEFEFIPIGTFIDVIKRTHNWKSPGTDNIHNYWYKKFSSIHPFLHNHLNTFIHSPHLLPSYITHGVTYMIPKDINDTINPAKYRPITCLQTIYKILTACLSEVVYEHLTKNNILSEQQKGCRKNSQGCKEQLTIDAVTMNSAVKSKTDIHTMFIDYQKAFDSVPHSWLLNVLSLYKIHPTLKNFLQMSRQNWQTVLKINSSSSTVATGPIHIKRGIFQGDALSPLWFCMALNPLSHLLDKTATGFTLTNSNKYTLTHLMYMDDIKLYAADKNALVVLADTTQQFSDDICMSFGVDKCKMLSVVKGKIQNNSYTLGSGQLIEPMDEQSTYKYLGFKQSRQIHQKMTKQELVNKYSHRLNLILKTNLNSKNTIKAINTFAIPILTYSFGIIRWSNTDIKKLQRTLNTSLTKYRKHHPKSSIHRLTLPRQEEGRGLIDIHNLHNKQIHSLRAYFHNKSESSALHKHVTENDTKLTPLNLHNRNTQINELVISTAEKIAAWSAKALHGRHRAYLSQPHVDKAKSNEWLKRGELFPETEGFMLAIQDQIIATRNYRKYIIKDPHQPTDLCRHCNTASETIQHITGACKSLAQTDYKHRHDQVASIIHQHLAFKYQLISEMKPYYKYKPELILDNNNQKIYWDRTIITDKTIHFNRPDITLHDKANKTVYLIDIAIPNSHNIQTTISEKLSKYQDLAIEIKTQWKAQTVHIVPIVLSSTGIVPKSLMQSLNTLHLPSHTLQLLQKATILNTCRITRKFLTSSTISSTFSI

SEQ ID NO: 31020 - protein, 1377 aa, Hypolimnas misippus
MYPYHSERRALLWLTVTSLATRGNNMITRSKIKKIQANVPLSDDEATQASFVSSTRSLFPSIPSSSQSFCVSPTPSSSISIQPADVAQETNVVKEPVPTTSNAKSRRKWSTEMNIFILRTYLYLTNMETDTKAYLSPLHSKFLEMYPQMEVSRQRIGDQRRAIIQKKLLPQEMIDQIYEEVKTELIAVQTQIERHSTQIKALTNTQIGKRMKWTNEINESIIRIYYRITQLETNKTAYRKKLHEEFINLYPDLINITEQRLADQRRAIISNKYIEQDRLTVIKNQVSEELNYLNIHTENVNHSNTQPHTDTQNNSVSNTQVRNVSTYNSTLSDLATPLVTQNVHTSNNTGIEEFNIIESDVHATLETNQEIEDAYHQAQQYFNHTEPTNRPYIPKQKTSKKFYYITEYINTRILPRYLNIETDFNTLQKIIYCAAWTAAKCNGTRISNNKHNERQKQPLRKPNWQKRLENKIGELRANIGRLTQFIRGNRSRKVVAAVETVKAKYQLHAQHDNSNTQLEHFLDTLKQKLNAAASRLKRYLTCTERKLQNTKFSRNEKNFYRYLTSTTKGCDRNLETPSPEIVREFWANIWENPVHHNENADWINMIPTQTSEMDFQFIPIETFLEVIKHIHNWKSPGTDNIHNYWYKRFTSVHPYILNHLNSFILSPHLLPAYITHGITYLLPKDTNDTTNPAKYRPITCLQSIYKILTACISKEIYKHLTNCNILAVQQQGCKKNSRGCKEQLTIDAIVLNNAVKTKRDIHTMFIDYQKAFDSVPYSWLIHVLRLYKIHPTIISFLQHSMKNWQTVVRITQASMVSLTTEPIHIQRGIFQGDALSPLWFCLALNPLSHLLNNSNTGFTLNDNSTQYCLSHLLYMDDLKLYATTKNELFELANTTELFSKDICMKFGVDKCRILSIVKGKIVNNSYTLETGELIEPMDETSTYKYLGFRQSRQIQQKLTKQELSKKFLLRINLILKTQLNSKNTIKAVNTFAIPILTYSFGIIQWSKQDIKKLQRTINSQLTKHRKHHPKACIQRLTLPRQEGGRGLIDIQNLHNKQILSLRAYFHDKSEQSLHKLATETDKKLTPLNLHDRNPQKNECLISTQEKVAAWAKKVLHGRHQAYLSQPHVDKENSNEWLRRGELFPETEGFMLAIQDQIITTRNYRKYIIKDHNQLTDMCRHCNAASETVQHITGACKSLAQTDYKHRHDQVAAIIHQHFAYKYKLITDMNPYYKYKPESVLENRNIKIYWDRTIITDKTIHYNRPDITVHDKNNEIVFLIDIAIPNSHNILSTISEKLSKYQDLAIEIKTQWKVKTVHIVPIVLSSTGIVPKSLIQSLNILNMPTYILHMLQKAIILNTCRITRKFLTSSTLASTFTI

SEQ ID NO: 31021 - protein, 1418 aa, Noctua fimbriata
MPRAAWLGERLVASVPTLDNRGPPVLFSLAAVNAGLCCGRLFKSLATRGISMNTRSKTKKRLQAKLPQIDDETSQSSSSSPSSLFPSIPSSSQSFLVTPTPSSSSISIQSVDVVQETNFVDDTVPAARTVTSRRKWSIDMNKFILRTYLHLTHMETDKNAYLPSLHTKFLEKYPDMQVGRQRIGDQRRAIVQKKLLSQETIDQIYEEVRAELQIVHTQIQQHSTQSKAPINTQPGQRMKWTNEYNEAIIRIYYTTTQLETNKTAYRKHLHEGFINIYPELAHLTEQRLSDQVRAIINNKYIHTNRLDEIKNQVAIELRNSNTYTQNIQHINNDSQQPDENIHSLSTQYTNIHISGTTTNTATTNSVILLNNSTETNIASQTFINTDEENFLNHIDIGHHEPTQINSDASFEKNQEIETTFQQAQQLFSDTQPTNRPYIPKQRTSKKFSAIVTYINSVILTNCVNVDTDFIKLQNVIYCAAWTAATCNGAKILGTQNVSRTYIKRKPKWQIRLEKKIQNLRASIGRLTHFNNGSRSPKLIAAVKEIKKKYQLHAQYEDPNTQTTHFLDTLKQKLNAASSRLKRYLTCTNRKMQNSKFSNNEKVFYRNLATNNSDTTTQSLDTPAPEILREFWAHIWENPVCHNHQANWVNEPAPEIPEMEYDFIPIGTFIDVIKRTHNWKSPGTDNIHNYWYKKFTSIHSFLYNHLNTFIQSPNLLPPYLTHGVTYMIPKDISDTLNPAKYRPITCLQTLYKILTACVSEVLYEHLTKNNILAEQQKGCRKNSQGCKEQLTIDAITMNSAIKSKTDIHTMFIDYRKAFDSVPHSWLLHVLNLYKIHPTLKHFLETSMKNWQTVLKINSSSSSVATEPIRIKRGIFQGDALSPLWFCMALNPLSHLLDKTVGGFTLATNDTHYTLTHLLYMDDIKLYSADKNTLFQLADTTQQFSNDICMSFGVDKCKILSVVKGKVQNNSYILGSGESIEPMDEQSTYKYLGFNQSRQIQHKMIKQELLKKFSHRLNLILKTNLNSKNTVKAINTFAIPILTYSFGIIRWSKTDIRKLQRTINTTLTKHRKHHPKSSIQRLTLPRQEGGRGLIDIHNLHNKHRAYFHNKSENSSLHKHVTEQDTKLTPLNLHNRNTQTNEILISTQDKIAAWSVKALHGRHRAYMSQPHVDKAKSNEWLKRGELFPETEGFMLAIQDQIIATRNYRKYIIKDPHQPTDLCRHCNTASETIQHITGACKSLAQTDYKHRHDQVAAIIHQQLAFKYKLISEMKPYYKYKPEIILDNNNQKIYWDRTIITDKTIHFNRPDITFHDKVSKTVYLIDIAIPNSHNIQTTISEKLSKYQDLAIEIKTQWEAQTVHIIPIVLSSTGIVPKSLMQSLNTLHMPPHTLQLLQKATILNTCRITRKFLTSSTISSTFSI

SEQ ID NO: 31022 - protein, 1382 aa, Telemiades fides
MRLRNRQIPQAGTREGESRPGPSGPGCPTYSGGGAASHMATQSRTAVGHHCHDTPGAGAGCHNMRSVSGEELNRRAPTDKNTTADITPHHIDSSNSSSTSCLFPSPTSSSHFLSISSSPLTVDVVQEANVLHDGPTTAKSCARRKWTIEMNIFIWRTYLILSRLETQTRGYLDPLHAAFIEKYPEMNASKQRVGDQRRAIVRNKLLSKTTLQEVKDEVSKYLNQNEPPLPMLTQTSTRMRWSEKINETILRIYYEVTELESNMIGHRKKLRDKFIQIYPFLEHLSEQRISDQRRAIVNNKMLRETKILEIRHEVETQLQISNTLTHTIYSQNTLSQTIADTTNIEIDLPLSHTPIYTNFEEQDNHTNKRTFIDHDKIKKQFNLTLELFKNTEPTLRPYLPKQKSSKKLALIVEYINKNILPNILTTGQNFTAFQTIVYSAAYTAVICNGTKINFDRPHTTDFKPPWQRRLENKIDNLRADIARLTQYIRGNRSPRILKAVEKIKNTYQVHAQHENMNTELEHFLDTLKQKLNTAASRLKRYLICTARKKQNTQFTNTEKVFYRGLINNNQNSHVQQNRLPTAETLHKFWADIWENSVQHNKDAEWFDTIAETTKLIPEMNFEHITTDIFLDVIKNLHNWKSPGTDNIHNYWYKKFTTIHPHLHNHLNEFIQSPHLMPQYITHGITHMLPKNTSTEDPANYRPITCLQTIYKILTACISKTVYAHLLDHDILAEQQKGCRKNSRGCKEQLIIDAVVINDSDNKNQDIHSMFIDYRKAFDSVPHSWLLHILRLYKINPTIVNFIESSMQNWKTVLKIKQHSSIITTEPICILRGIFQGDALSPLWFCLALNPLSTLLNNSNAGYNLETTDNRLSFTHLLYMDDIKLYAGNIDNLFHLADIVQKFSTDICMEFGVDKCKILSINKGQIENNTFALETGQNIEAMDENSYYKYLGIKQSRKVHHKETKVEITEKFKNRLNLIFKTHLNSKNIVKAINTFGIGILIYSFGIINWSQTDLKNLQRIINTHMTKHRKHHPKSSIERLTLPRKEGGRGIIDVQNLHNKQILTLRHYFHNKSQHSLLHKQVTKLDKKLTPLNLSDRNAQPNENLITIDQKVAKWASKSLHGRHRTELSQNYVDVEKSNEWLLKGELFPETEGFMLAIQDQIITTKNFRKYIIKDPNQLSDLCRRCNSASETTQHITGACKSLVQSDYRHRHDQVAAIVHQHLAHRYNFIHKKEPYYKYKPATILENQSIKIYWDRTIITDKTIHFNRPDITLHDKTNNTIYIIDIAIPNSHNVQSTISDKLSKYQDLAIELKTQWRAQVVHIVPIVLSSTGLIPKTLTQSLNTLHMPKYSHYLLQKAVILNTCRITRKFLTSSTISSTYSI

SEQ ID NO: 31023 - protein, 1325 aa, Polygonus savigny
MRTISGEELNRRAPTEKNVTAGVITPHHIDSSNSSPTSSLFPSPNSSLHSLSVSLSSSSSSPSTVDVVQEANAHYNGPTTAVSRARRKWTIEMNMFIWRTYLILSKLETHTRGYLDLLHAAFIEKYPEMNASKQRIGDQRRAIVRNKLLSDTTFKEIKDEVAVYLDKTESLPLTLTQTSARMRWSDEINKTILRIYYEVTQLESNMTAYRKKLHDKFIRTYPHLTHLSEQRISDQRRIIVNNKMLSEAQILQIRREVETRLQISNTRTHTIHSQNTLSPTNADTTDIVIDPSHSQTTIQRNFEEQQNCTNTSIFIDHDKIKQEFDVALDIFKKTEPTLRPYLPRQKPSKKLALIVEYINKNILPNFLTTDQDFTDFQTIVYSAAYTAVTCNRTHNTVVRTHTTDSRPPWQRRLENKINNLRAEIARLTQYIHGNRSSRIVIAVEKIKSKYQVHAQHENVNTELEHFLDTLKQKLNAAASRLKRYLICTARKKQNTQFTNTEKVFYRDLTSKKQHSHIHENRLPTAETLHKFWADIWENPVEHNLNAEWIDNIKEATKQIPEMSFEYITIDTFLDVIKNIHNWKSPGTDNIHNYWYKKFTTIHPHLHSHLNKFIQSPHLMPKYITHGVTHMMPKDTNTEDPAKYRPITCLQTIYKILTACISKTIYAHLLHNNILAEQQKGCRKNSQGCKEQLTIDAIVINESYNKKRDIHSMFIDYRKAFDSVPHSWLLYILTLYKISPTIINFIETSMKNWKTVLKIKQYSSIITTEPICILRGIYQGDALSPLWFCLSLNPLSTLLNNSNAGYSLKTTDNRLSFSHLLYMDDIKLYASNIANLFHLADIVQTFSTDICMEFGVDKCKILSINRGKIENNSYSLETGQDIEAMDKNSYYKYLGFKQSRKLHQKETKAEITTKFKNRLNLIFKTHLNSKNIVKAVNTFGIGILTYSFGIINWSQTDLKNLQRVINTYMTKHRKHHPKSAIERLTLPRKVGGRGIIDLQNLHNKQISTLRHYFHTKSEHSFFHKQVIELDKKLTPLNLSDRNTQINESLITIDQKVAKWASKSLHGRHRTELTQNYVDVEKSNEWLVKGELFPETEGFMLAIQDQIIATKNYRKYIIKDPNQLSDLCRHCSSAPETTQHITGACKSLVQSDYKHRHDQVAAIVHQHLAHRYKFIHKKQPYYKYKPATILENQSIKIYWDRTIITDKTIHYNRPDITLHDKTNNNIYIIDIAIPNSHNIQSTISEKLSKYQDLAIELKTQWKADVVHIVPIVLSSTGIIPKTLTQNLKILHMPTYSHYLLQKAVILNTCRITRKFLTAASVSSSYSI

SEQ ID NO: 31024 - protein, 975 aa, Endotricha flammealis
MIVNYINKNILSEYLNSDQDFITQQTIIYVAAYTAAITNGTKIDENRRSSREKFKPAWQKRLEKKIKNLRTDIGQLTDYIKGNRSRRITAIVEKIKDKYKTHAQYENPNKQLEHFLDTIKQKLNATSSRLKRYLACTARKTQNTQFINSEKTFYRSLATTHEQTHVHEEDTPSSETLREYWANIWENPVEHNKNAEWIKQLNCIDRILEMEFEHITADTLLRVLDRAHNWKSPGTDNIHNYWYKKFTCTHPHLLNHLNSFIETPQIMPVFMTQGITYMLPKDSTDTKNPSKYRPITCLQTIYKVLTACLSENIYNHLNKYNILAEQQKGCRRNSQGCKEQLTIDAIIMNNTVKKKKNIHAMFIDYRKAFDSVPHSWLIQVLQHYKIHPTIITFLQATTQTWQTRLKIRKATDTITTEPINVARGIFQGDSLSPLWFCLALNPLSELLNSSDIGVPLTSTDTQFNLSHLMYMDDIKLFAPTKKHLFKLADTTQKFSTDIHMDFGVDKCKILSVVRGKVKSSEQYTLESGESIESMEENNMYKYLGFNQSRQITQKETKSELIKKFKRRLNLVLKTHLNSKNTIKAINTFAIPILTYSFGIIKWSRTDLKNLQRIINTNLTKHRKHHPKSCIQRLTLPRQEGGRGLIDIHNLHNRQIKNLRTYFHSKTDHSSLHKEIVEIDTKLTPLNLQDRQTQTNEHLTDIREKVATWAAKSLHGRHRAHLSQPHVDKEKSNLWLKRGELFPETEGFMTAIQDEVIVTRNYRKYIMKDLTQPTDLCRHCNSTSETIQHITGACKSLVQTDYKHRHDQVAAIIHQHIAHRYNFIREKKPYYKYTPETILEDVKYRIYWDRTILTDKTIHFNRPDITVHDKNNKTVYLIDIAIPNSHNVQTTISEKLSKYQDLAIEIKSQWRAHTVHIVPIVLSSTGIIPKTLQNSLDILELPTYILHLIQKATILNTCRTTRKFLTASTYSATFTI

SEQ ID NO: 31025 - protein, 1267 aa, Emesis orichalceus
MNKFILRTYLHLTNMETDKNAYLPALHNKFIEMYPTMQVSRQRVGDQRRAIVQRKLLPQETIDNIYEEVKAQLQINHTQIQHSTQPKTLNNTQSGQRMKWSNDCNESIMRIYYTITQLETNKTAYRKQLHEEFINLYPDLAHITEQRLSDQVRAIVNNKYINTNRLQKIKEQVAENLGHSNTNAQIEIVNNDNSNLPQNVIAHHENNDLAISQSLSGDPYNDVITHTHINTHNGLNDINNAQLPSTLHNLNSVQEINLEIEDTFQQALQYFLDTHPTNRPYIPKQRSSRKFAAVITYINNIILPKYVNIDTDFNTTQTIVYCAAWTAAKCNGAKILNSTQNERQAATQRKPKWQTRLENKIGSLRSNIGRLTQFIRGNRSRNVVEAVEAIKTKYQLHAQHEHSNTQLEHYMDTLKQKLNAAASRLKRYITCTNRKIQNTKFINNEKFFYRNLSNNNRQVNNETIVTPSSETLRQFWANIWEKPVHHSSEAEWIEEVTPEITEMEFELLPIDTFIEIINRTHNWKSPGTDNIHNYWYKKFTTIHPYIHKHLNTFIQSPHLLPTYITQGVTYMIPKDTNDTLNPAKYRPITCLQTLYKILTACISELVNAHLSEYNILTEQQKGCRKNSQGCKEQLTIDAIAMNSAVKNRKELHTMFIDYEKAYDSVPHSWLLHVLNLYKIHPTLKIFLTYAMQNWQTELKINQSSTTVTTEPIRIKRGIFQGDALSPLWFCMALNPLSHLLEQTNAGYTLKNNNRQHNLSHLMYMDDIKLYADDKNTLFRLADITQQFSRDICMRFGVDKCKIMSVVKGEIQNNSYILDSGSYIEPMDEQSTYKYLGFKQARQIQHKIIKQELLKKFSHRINLILKTSLNSKNTIKAINTFAIPILTYSFGIIRWSKTDIKKLQRTVSTLLTKYRKHHPKSCIQRLTLPRKEGGRGLIDLQNLHNKQVLTLRSYFYNKSEHSPLHKHMAAADKKLTPLNLQDRSTQENEHIIDTQHKIALWSNKALHGRHRAVLSQLHVDKIKSNEWLRRGELFPETEGFMLAIQDQVITTRNYRKYIIKDTHQPTDLCRHCNNASETIQHITGACKSLVQTDYKHRHDQVAAIVHQQLAHQYKLIDEMTPYYKYKPETILENRSKKMYWDRTIITDKTIHYNRPDITVHDKMNKIVYLIDIAIPNSHNIQTTISDKLSKYQDLAIEIKTQWKAQTVHVVPIVLSTTGVVPTSLTQSLNTLHMPSHTLHMLQKATILNTCRITRKFLTSSTLVSTFSI

SEQ ID NO: 31026 - protein, 1366 aa, Agrochola circellaris
MNTRSKTKKQLQANLPQINDETSQFSSSSPSSLFQSIPSSSQSFRVTPTPSTSSISIQSADVVLETNIVDDTVPTARTATTRRKWSIEMNKFILRTYLHLTSMETDKNAYLPSLHTKFLEKYPAMQVSRQRIGDQRRAIVQKKLLPQDTIDQIYEEVRAELQMVHTQIQQHSTQSHTQTGQRMKWTNEHNETIMKIYYTATKLETNKTAYRKYLHEEFINKYPELTHITEQRLSDQVRAILNNKYINPIRLEEIKSQIAAELRESNTNTQNIEYISIDHLNIQTQKDLEQPDTNPYFTDTPINTLTTHISLNNSTDTDIVSQTFVNTDDGNFLNNIHIGQFGPTLTNFDAAPEINIEIEDIFQQAQHNFLDTLPTNRPYIPKQKTSRKFSAIVTYINTVILPKHVNVDTEFIKLQTIIYCAAWTAATCNGAKILSDSTQNERRTYTQRKQKWQIRLEKKIENLRANIGRLTHFINGSRSQKLIASVEEIKKKYQLHSQHENSNTQIEHFLDTLKQKLSAASSRLKRYITCSNRKVQNIKFTNNEKIFYRNLTSNNRDTTNQTLETPSSETLREFWANIWENPVYHNNRADWVNETTQEIPEMEFEFIPIDTFIDVIKRTHNWKSPGTDHIHNYWYKKLSYIHPFLHNHLNTFIQSPNLLPTYITQGVTYMIPKDMNDTINPAKYRPITCLQTLYKILTACVSEVVYEHLTKNNILAEQQKGCRKNSQGCKEQLTIDAITMNSAVKNRKDIHTMFIDYQKAFDSVPHSWLLHVLNLYKIHPTLKLFLETSMQNWQTVLKINSSSSTVATEPIYIKRGIFQGDALSPLWFCMALNPLSHLLDKTDAGFILANNDTQYTLTHLMYMDDIKLYAADKKALFQLADTTQQFSDDICMSFGVDKCKILSILKGKIQNNSYTLTSGESIEPMDEQSTYKYLGFKQSRQIQQKMAKQELQKKFSHRLNLILKSNLNSRNTIKAINTFAIPILTYSFGIIRWSKTDIKKLQRTVNILLTKHRKHHPKSCIQRLTLPRKEGGRGLIDIHNLHNKQILSLRAYFHNQSEHSSLHKQVTETDKKLTPLNLQNRNTQINEQIVSTQQKIAEWSAKALHGRHRAYLSQPHVDKVKSNEWLKRGELFPETEGFMLAIQDQIVATRNYRKYIIKDQHQPTDLCRHCNTASETIQHITGACKSLAQTDYKHRHDQVAAIIHQQLAYKYKLVSEMIPYYKYKPEIILESKDQKIYWDRTIITDKTIHYNRPDITVHDKTNKTVYLIDIAIPNSHNIQTTISEKLSKYQDLAIEIKTQWKAQTVHIVPIVLSSTGIIPTSLTLSLNTLQMPSHTLYMLQKATILNTCRITRKFLTSSTLSSTFSI

SEQ ID NO: 31027 - protein, 1367 aa, Omphaloscelis lunosa
MNTRSKTKKQLQANLRQMNDETSQFSSSSSSSLFQSIPSSSQSFRVTPTPSTSSISKQSADVVQETKFVDDTVPTARTATSRRKWSIEMNKFILRTYLHLTSMDTDKNAYLPSLHTKFLEKYPAMQVSRQRIGDQRRAIVQKKLLPQDTIDQIYDEVRAELQIVHTQIQQHSTQSHTQTGQRMKWTNEYNETIMKIYYTATKLETDKSAYRKHLLEEFINIYPELIHITEQRLSDQVRAILNNNYINPNRLEEIKNQIAAELRENNTNTQNIEYISIDHLNTPTQKDLEQPDTNTYITDTPTNTFTTHISLNNSTDPTNILSQTFVNTDDGNFLNDIHIGQFGPTITNFDAAPEINTEIEATFQQAQHNFIDTFPTNRPYIPKQKTSRKFSAIVTYINTVILPKHVNVDTEFIKLQTIIYCAAWTAATCNGAKILSDSTQNERRTYTQRKPKWQIRLEKKIENLRANIGRLTHFINGSRSEKLIAAVEEIKKKYQLHAQHENSNTQIEHFLDTLKQKLSATSSRLKRYITCTNRKVQNMKFNNNEKIFYRNLTTNNKDTAKQTIETPSSETLREFWANIWENPVYHNNRTDWENETTREIPEMEFEFIPIDTFIDIIKRTHNWKSSGTDHIHNYWYKKFSNIHPFLHNHLNTFIQSPNLLPTYLTHGVTYMIPKDMNDTINSAKYRPITCLQTLYKILTACVSEVIYEHLTKNNILAEQQKGCRKNSQGCKEQLTIDAITMNSAIKNRKDIHTMFIDYQKAFDSVPHSWLLKVLNLYKIHPTLKNFLETSMQNWQTVLKINSSSSTVATEPICIKRGIFQGDALSPLWFCMALNPLSYLLDKTDVGFTLKNNDTQYTLTHLMYMDDIKLYAADKKALFQLADTTQQFSDDICMSFGVDKCKILSVLKGKIQNNSYTLASGESIEPIDEQSTYKYLGFKQSRQIQQKMSKQELQKKFSHRLNLILKSNLNSRNTIKAINTFAIPILTYSFGIIRWSKTDIKKLQYTVNTLLTKHRKHHPKSCIQRLTLSRQEGGRGLIDIHNLHNKQILSLRAYFHNKSEHSSLHKQVTETDKKLTPLNLQNRNTQINEHIVSTQQKITEWSAKALHGRHRAYLSQPHVDKVKSNEWLKRGELFPETEGFMLAIQDQIVATRNYRKYIIKDQHQSTDLCRHCNTASETIQHITGACKSLAQTDYKHRHDQVAAIIHQQLAYKYKLVNEIIPYYKYKPEIILENKDQKIYWDRTIITDKTIHYNRPDITVHDKTNKTVYLIDIAIPNSHNIQTTISEKLSKYQDLAIEIKTQWKAQTVHIVPVVLSSTGVIPKSLTQSLNTLQMPTHILYMLQKATILNTCRITRKFLTSSILSSTFSI

SEQ ID NO: 31028 - protein, 1356 aa, Phlogophora meticulosa
MNTRSKTKKQLQANQPQIDDETSQLSSSSPSSLFSSIPSSSQSFRITPTPSLSSFSIQSADVVQETNFVDDTVPIARNATSRRKWTIEMNKFILRTYLHLTNMDTDKNAYLPSLHTKFLEKYPAMQVSRQRIGDQRRAIVQKKLLSQDTIDQIYEEARAELQMVHTQIQQHSTQSNTQFGQRMKWTNEYNEAIIRIYYTTTQLETNKTAYRKYLHEGFITIYPELAHITEQRLSDQVRAIINNRYININRLAEIKNQVALELRNSNTDTQNTEHTNSDYLNTQSQNDLEHLDPNTLTTNILPSNNPNTVTTTHTPNTEEVHFLNDIDNDLFGATETNFPSAPEINPEIEATFHQAQQHFINTHPTHRPYIPKQKTSRKFSTIVSYLNTVILPKHVNVDTEFIKLQTIIYCAAWTAATCNGAKISEISAQNERGTFRQRKPKWQIRLENKIKNLRANIGRLTHFINGSRSQHLIAAVEQIKIKYQLHAQHENSNTQIEHFLDTLKQKLSAAASRLKRYVTCTNRKVQNTKFTNNEKTFYRNLTSNNMETTNQSLETPSSETLRDFWANIWENPVCHNNHADWVNEASPEILEMKFDCIPVETFIDVIKRAHNWKSPGTDNIHNYWYKKFSSIHPFLHNHLNTFIQSPHLLPTYITHGVTYMIPKDMNDTINPAKYRPITCLQTLYKILTACVSEVIYEHLTKNNILSEQQKGCRKNSQGCKEQLTIDAIIMNSAVKSRKDIHTMFIDYQKAFDSVPHSWLSHVLNLYKINPKIKQFLETIMQNWKTVLKINSSSSTVATEPISIKRGIFQGDALSPLWFCMALNPLSHLLDKTDAGFILSNNNTQYTLTHLMYMDDIKLYAADKKSLFQLADTTQQFSDDICMSFGVDKCKILSIEKGKILNNNYTLASGESIEPMDEQSTYKYLGFKQSRQIQQKISKQELLKKFSHRLSLVLKSSLNSRNTIKAINTFAIPVLTYSFGIIRWSKTDIKKLQRTVNTLLTKHRKHHPKSCIQRLTLPRQEGGRGLIDINNLHNKQILTLRAYFHGKSENSSLHKQVTETDIKLTPLNLQNRNTLTNEHIVSTEQKIAAWAQKALHGRHRAYLSQPHVDKIKSNEWLKRGELFPETEGFMLAIQDQIIATRNYRKYIIKDRNQPTDTCRHCNSASETIQHITGACKSLAQTDYKHRHDQVAAIIHQHLAHKYKLIGEMVPYYKYKPETILENRNQKIYWDRTIITDKTIHYNRPDITVHDKSNKIVYLIDIAIPNSHNIQTTISEKLSKYQDLAIEIKTQWQAQNVHIVPIVLSSTGVVPKALTQSLNTLHMPSHTLHMLQKATILNTCRITRKFLTSSTLSSTFLI

SEQ ID NO: 31029 - protein, 1167 aa, Furcula furcula
MRWSNDINETILRIYYEVTELETNLTAHRRKMRDKFIETYPDLHHISEQRISDQRRAIINNNMVSKNRINQIQREIELQLTNTRVNLHMIPTHNIDELSQADSQENNTSLEIPNTLHNSLVDEDNIMTPTQQNTLTLIENTDTQTQIDETETPTQPSVDFDKIELVFQEAFNDFKITEPTSRPYLPKQKASKKLALIVEHINKNILPKYIKEEQDFVTFQTILYSAAYTAILSNGTKINSNRTRTQRNYKPPWQIRLENKIHKLRSEIARLIQYIRGNRSRKIVAAVQEIKEKYKTHAQYEDLNTEPEHFLDTLKQKLSAAARRLKRYLTCTTRKKQNSQFINNEKIFYRQLNSSNTVNTEDQTIPTPEILRQFWADIWENPCEHNTNAEWLNSINENTTHISEMQFNHITIETLTQVIKRTHNWKSPGTDNLHNYWYKKFTYIHAYLQNHLNRFIQSPYIMPDFITHGITYMVPKDSNTEDPAKYRPITCLQTIYKIFTACISDIIYKHLIEYDILAEEQKGCRKNSQGCKEQLTIDAVIINEASRKRRNIHSMFIDYRKAFDSVPHSWLLEVLQIYKIHPSIIAFLNASMQNWKTTLRLKSGSNSITTEPISIKRGIFQGDALSPLWFCLALNPLSFLLNKSNAGYKFTDDARFALSHLFYMDDIKLFANNKENLFLLTDITQKFSNDIHMLFGVDKCKIISVNKGEIEKNRYILDTGEEIESMDEYSVYKYLGFKQSRRIQQKQTKQELTKKFKYRLNLILKTQLNSKHTIKAINTYAIPILTYSFGIIRWSKSDIIKLQRLVNTCMTKHRKHHPKSCLERLTLPRHEGGRGLIDLQNLHNKQIASLRKYFQTKSYNSPLHKNISELDNRHTPLNLHDINTQPNEKVTDPKDKIARWTEKSLHGRHRTDLNQSHVDKEMSNEWLKKGELFPETEGFMLAIQDQIITTRNYRKYIIKDTNLPTDLCRHCNSASETIQHITGACKSLAQTDYKHRHDQVAAVIHQHIAHQHKFIKKKTPYYKYKPESVLENKDTKIYWDRTIITDKTIYYNRPDITVHNKVNNTIYIIDIAIPNTHNIQQTISDKLAKYQDLAIELKTQWKADLIHIIPIIISSTGVVPKNLIQNLQILDAPAHTLQLIQKATILNTCRITRKFLSSSALSSTYII

SEQ ID NO: 31030 - protein, 1361 aa, Furcula furcula
MSLATRGNTMITRSKSKRITQASLPLEEEPTQIHTQSQATELSHSLTSVTPHIHHVIPLSSSNNHSESESPSTSLTPVAVIQAANADIFGSTAGKSRARRKWTHDMNMFIWRTYLIITRLETNTRGYLEPLHNRFITQYPDMNVSKQNVGDQRRAIVNNKLLPLTMLNDIRNDVAGFLQETQPPSSTIIQTQGRMRWSNDINETILRIYYEVTELETNLTAHRKKMRDKFIETYPDLHHISEQRISDQRRAIINNNMVSKNRINEIRREIERQLTNTHVNLHMVPSHNIDELSQADSQENNTSLEIPNTPHNSLVDEDNIITQTQQNTLTLIENTDTQTQIDVTETPTQPCVDFDKIELVFQEAFNDFKVTEPTSRPYLPKQKASKKLALIVEHINKNILPKYINEEQDFVTFQTILYSAAYTAILSNGAKINSNGTRPQRNFKPPWQKRLENKIHKLRSEIARLIQYIRGNRSRKIVAAVQEIKEKYETHAQYEDLNTEPEHFLDTLKQKLSAAARRLKRYLTCTTRKKQNSQFINNEKIFYRQLNSNNTVNTEDQTIPTPERLRQFWADIWENPCEHNTNAEWLNSINENTTHISEMQFNHITIETLTQVIKRTHNWKSPGTDNLHNYWYKKFTYTHAYLQNHLNTFIQSPYIMPDFITHGITYMVPKDSNTEDPAKYRPITCLQTIYKIFTACISDIIYKHLNEYDILAEEQKGCRKNSQGCKEQLTIDAVIINEASRKKRNIHNMFIDYRKAFDSVPHSWLLEVLQIYKIHPSIITFLNASMQNWKTTLRLKSDSNSLTTEPISIKRGIFQGDALSPLWFCLALNPLSFLLNKSNAGYKFTDDARFALSHLFYMDDIKLFANNKENLFLLTDITQKFSNDIHMLFSVDKCKIISVNKGEIEKNRYILDTGEQIESMDEYSLYKYLGFKQSRRIQQKQTKQELTKKFKYRLNLILKTQLNSKHTIKAINTYAIPILTYSFGIIRWSKSDIIKLQRLVNTCMTKHRKHHPKSCLERLILPRHEGGRGLIDLQNLHNKQIASLRKYFQTKSYNSLLHKNISELDNRHTPLNLHDINTQPNEKVTDPKEKIARWTEKSLHGRHRTDLNQSHVDKEMSNEWLKKGELFPETEGFMLAIQDQIITTRNYRKYIIKDTNLPTDLCRHCNSASETIQHITGACKSLAQTDYKHRHDQVAAVIHQHIAHQHRFIHKKTPYYKYKPESVLENKDTKIYWDRTIITDKTIYYNRPDITVHNKVNNTVYIIDIAIPNTHNIQQTISDKLAKYQDLAIELKTQWKADLIHIIPIVISSTGVVPKNLIQNLQILDAPAHTLQLIQKATILNTCRITRKFLSSSSLSSTYII

SEQ ID NO: 31031 - protein, 1361 aa, Furcula furcula
MSLATRGNTMITRSKSKRITQACLPLEEEPTQIHTQSQATELSHSLTSVTPHIHHVIPLSSSNNHSESESPSTSLTPVAVIQAANADIFGSTAGKSRARRKWTHDMNMFIWRTYLIITRLETNTRGYLEPLHNRFITQYPDMNVSKQNVGDQRRAIVNNKLLPLSMLNDIRNDVAGFLQETQPPSSTIIQTQGRMRWSNDINETILRIYYEVTELETNLTAHRKKMRDKFIETYPDLHHISEQRISDQRRAIINNNMVSKNRINEIRREIELQLTNTRVNLHMVPSHNIDELSQADSQENNTSLEIPNTPHNSLVDEDNIITQTQQNTLTLIENTDTQTQIDVTETPTQPCVDFDKIELVFQEAFNDFKVTEPTSRPYLPKQKASKKLALIVEHINKNILPKYINEEQDFVTFQTILYSAAYTAILSNGAKINSNGTRPQRNFKPPWQKRLENKIHKLRSEIARLIQYIRGNRSRKIVAAVQEIKEKYETHAQYEDLNTEPEHFLDTLKQKLSAAARRLKRYLTCTTRKKQNTQFINNEKIFYRQLNSNNTVNTEDQTIPTPERLRQFWADIWENPCEHNTNAEWLNSINENTTHISEMQFNHITIETLTQVIKRTHNWKSPGTDNLHNYWYKKFTYIHAYLQNHLNTFIQSPYIMPDFITHGITYMVPKDCNTEDPAKYRPITCLQTIYKIFTACISDIIYKHLNEYDILAEEQKGCRKNSQGCKEQLTIDAVIINEASRKKRNIHNMFIDYRKAFDSVPHSWLLEVLQIYKIHPSIITFLNASMQNWKTTLRLKSGSNSLTTGPISIKRGIFQGDALSPLWFCLALNPLSFLLNKSNAGYKFTDDARFALSHLFYMDDIKLFANNKENLFLLTDITQKFSNDIHMLFGVDKCKIISVNKGEIEKNRYILDTGEQIESMDEYSLYKYLGFKQSRRIQQKQTKQELTKKFKYRLNLILKTQLNSKHTIKAINTYAIPILTYSFGIIRWSKSDIIKLQRLVNTCMTKHRKHHPKSCLERLILPRHEGGRGLIDLQNLHNKQIASLRTYFQTKSYNSLLHKNISELDNRHTPLNLHDINTQPNEKVTDPKEKIARWTEKSLHGRHRTDLNQSHVDKEMSNEWLKKGELFPETEGFMLAIQDQIITTRNYRKYIIKDTNLPTDLCRHCNSASETIQHITGACKSLAQTDYKHRHDQVAAVIHQHIAHQHRFIHKKTPYYKYKPESVLENKDTKIYWDRTIITDKTIYYNRPDITVHNKVNNTIYIIDIAIPNTHNIQQTISDKLAKYQDLAIELKTQWKADLIHIIPIVISSTGVVPKNLIQNLQILDAPAHTLQLIQKATILNTCRITRKFLSSSSLSSTYII

SEQ ID NO: 31032 - protein, 1361 aa, Furcula furcula
MSLATRGNTMITRSKSKRITQASLPLEEEPIQIHTQSQATELSNSLTSVTPHIHHVIPLSSSNNHSESESPSTSLTPVAVIQAANADIFGSTAGKSRARRKWTHDMNMFIWRTYLIITRLETNTRGYLEPLHNRFITQYPDMNVSKQNVGDQRRAIVNNKLLPLTMLNDIRNDVAGFLQEMQPPSSTIIQTQGRMRWSNDINETILRIYYEVTELETNLTAHRKKMRDKFIETYPDLHHISEQRISDQRRAIINNNMVSKNRINEIRREIELQLTNTRVNLHMVPSHNIDELSQAYSQENNTSLEIPNTPHNSLVDEDNIITQTQQNTLTLIENTDTQTQIDVTETPTQPCVDFDKIELVFQEVFNDFKVTEPTSRPYLPKQKATKKLALIVEHINKNILPKYINEEQDFVTFQTILYSAAYTAILSNGAKINSNGTRPQRNFKPPWQKRLENKIHKLRSEIARLIQYIRGNRSRKIVAAVQEIKEKYETHAQYEDLNTEPEHFLDTLKQKLSAAARRLKRYLTCTTRKKQNSQFINNEKIFYRQLNSNNTVNTEDQTIPTPERLRQFWADIWENPCEHNTNAEWLNSINENTTHISEMQFNHITIETLTQVIKRTHNWKSPGTDNLHNYWYKKFTYIHAYLQNHLNTFIQSPYIMPDFITHGITYMVPKDSNTEDPAKYRPITCLQTIYKIFTACISDIIYKHLNEYDILAEEQKGCRKNSQGCKEQLTIDAVTINEASRKKRNIHNMFIDYRKAFDSVPHSWLLEVLQIYKIHPSIITFLNASMQNWKTTLRLKSGSNSLTTEPISIKRGIFQGDALSPLWFCLALNPLSFLLNKSNAGYKFTDDARFALSHLFYMDDIKLFANNKENLFLLTDITQKFSNDIHMLFGVDKCKIISVNKGEIEKNRYILDTGEQIESMDEYSLYKYLGFKQSRRIQQKQTKQELTKKFKYRLNLILKTQLNSKHTMKAINTYAIPSLTYSFGIIRWSKSDIIKLQRLVNTCMTKHRKHHPKSCLERLILPRHEGGRGLIDLQNLHNKQIASLRKYFQTKSYNSLLHKNISELDNRHTPLNLHDINTQPNEKVTDPKEKIARWTEKSLHGRHRTDLNQSHVDKEMSNEWLKKGELFSETEGFMLAIQDQIITTRNYRKYIIKDTNLPTDLCRHCNSASETIQHITGACKSLAQTDYKHRHDQVAAVIHQHIAHQHRFIQKKTPYYKYKPESVLENKDTKIYWDRTIITDKTIYYNRPDITVHNKVNNTIYIIDIAIPNTHNIQQTISDKLAKYQDLAIELKTQWKADLIHIIPIVISSTGVVPKNLIQNLQILDAPAHTLQLIQKATILNTCRITRKFLSSSSLSSTYII

SEQ ID NO: 31033 - protein, 891 aa, Anthocharis cardamines
MRGNRINKVVSTVNQIKNKYQIHAQYENPNSELEHFLDTLKQKLNAAASRLKRYITCTERKNQNSQFINNEKCFYRNLTQQEATNTQNRILPTPEVLRQFWANIWENPVQHNISADWIQSLCETTASLPEMEFETIPIEIVIKTLTRSHNWKSPGTDNLHNYWYKKFTCTHPHIHRHLNKFIQSPNTMPEYITQGVTYMLPKDNDIQNPAKYRPITCLQTIFKILTACVSDVTYQHLSTYNILAEEQKGCKKNSQGCKEQLTIDAIILNEAYKKKKSIHNMFIDYRKAFDSVPHSWLLKVLKLYKINSKIISFFELTMPNWITVLKLKDYPSNNSITTEPIRIQRGIFQGDAFSPLWFCLALNPLSELLNNINTGYTLTSNDTQYKLSHLFYMDDIKLFATNKNDLFQLADITQRFSNDINMQFGIDKCKILSVNKGKILKNSYFLETGEEIEPMDNHNTYKYLGFKQSRKIHQKETKEELINKLKYRLHLILKSYLNSKNTVKAINTFAIPILTYSFGIINWSQTDLTKMQQMINKCMTKYRKHHPKSSIERLTLPRREGGRGLIDIKNLHNKQITKLRNYFHNKAQNSSLHKHASALDNKLTPLNLQDTCTQPSEKLIEMQQKITRWKEKSLHGRHRSDLNQQHVDKEKSNEWLKKGELFPETEGFMLAIQDQVIATRNYKKFIIKDQTLHTDSCRHCNSVSETIQHITSACKFLVQNDYKHRHDQVAAIIHQHLAHQHKLIDKKTPYYKYKPDTILENAACKIYWDRTIITDKTIHYNRPDITFHNKISNIIYIIDIAIPNTHNIQSTISEKLAKYRDLAIELKSQWRVQTVHIIPIVISTTGIVPKHLSQSLETLQIPDYIIYLLQKATILNTCRITRKFLTSSTIT

SEQ ID NO: 31034 - protein, 1209 aa, Anthocharis cardamines
MNVSKQRIGDQRRAIVNNKLLPTSTLNDIRNEVTSYLHNRELPVLTTTQTTRRMRWSNEINETIIRIYFEITELETNLTVYRRKLHDKFVEVYPHLSHLTEQRISDQRRVIIKNKLLPEAKINQIRSEVEAQIYALNIHNQNNINQTQTSNFTTNTPNLTNTPEIIHDTFQINLENNLNSSHIRENTYHEDQQIYEYPITNSIYENIDHQFQINLDIFKNTEPISRPYLPRQKTSKKLTKIVEYLNKNVLPKHLAADQDFNSFQTIIYSAAYTAVLCNGAKLSSDKTTTRKKSKPSWQRRLEIKIKKYRLEIAHLLEYMRGNRINKVVSTVNQIKNKYQIHAQYENPNSELEHFLDTLKQKLNAAASRLKRYITCTERKNQNSQFINNEKCFYRNLTQQEATNTQNRILPTPEVLRQFWANIWENPVQHNISADWIQSLCETTASLPEMEFETIPIEIVIKTLTRSHNWKSPGTDNLHNYWYKKFTCTHPHIHRHLNKFIQSPNTMPEYITQGVTYMLPKDNDIQNPAKYRPITCLQTIFKILTACVSDVTYQHLSTYNILAEEQKGCKKNSQGCKEQLTIDAIILNEAYKKKKSIHNMFIDYRKAFDSVPHSWLLKVLKLYKINSKIISFFELTMPNWITVLKLKDYPSNNSITTEPIRIQRGIFQGDAFSPLWFCLALNPLSELLNNINTGYTLTSNDTQYKLSHLFYMDDIKLFATNKNDLFQLADITQRFSNDINMQFSIDKCKILSVNKGKILKNSYFLETGEEIEPMDNHNTYKYLGFKQSRKIHQKETKEELINNLKYRLHLILKSYLNSKNTVKAINTFAIPILTYSFGIINWSQTDLTKMQQMINKCMTKYRKHHPKSSIERLTLPRREGGRGLIDIKNLHNKQITKLRNYFHNKAQNSSLHKHASALDNKLTPLNLQDTCTQPSEKLIEMQQKITRWKEKSLHGRHRSDLNQQHVDKEKSNEWLKKGELFPETEGFMLAIQDQVIATRNYKKFIIKDQTLHTDSCRHCNSASETIQHITSACKFLVQNDYKHRHDQVAAIIHQHLAHQHKLIDKKTPYYKYKPDTILENAACKIYWDRTIITDKTIHYNRPDITFHNKISNIIYIIDIAIPNTHNIQSTISEKLAKYRDLAIELKSQWRVQTVHIIPIVISTTGIVPKHLSQNLETLQIPDYIIYLLQKATILNTCRITRKFLTSSTIT

SEQ ID NO: 31035 - protein, 762 aa, Abisara bifasciata
MVYETIPFDTLIQVITRTHNWKSPGTDKIHNYWYKKLTCAHTHIHRHLNSFIQSPNTIPDYILQGVTYMLPKECDLDNPANYRPITCLQTIYKILTACLSDATYQHLSNNNILAEEQKGCRKFSQGCKEQLVIDSIILNEASKKKKNIHCLFIDYRKAFDSVPHSWLLKILDVYKINTKIISFFNYTMQNWKTYLKLKENSTNNTIITEPIRILRGIYQGDAFSPLWFCLALNPLSELLNKLSIGYSLSSSNTAYKLSHLFYMDDIKLFATNKKDLFKLADVTQNFSTDINMQFGVDKCKVLSISKGRYIKNNYILENGEEIESIDDSGFYKYLGFKQSQKILHRETKQLLTNKFKHRLNLITKTQLNSRNTIKAINTFAIPILTYSFAIIRWSQTDLAKLQRLINTIMTKHRKHHPKSSIERLTLPRHEGGRGLIDIKNLHNRQITKLRNYFHIKSQHSPLHKNAIILDIKLTPLNLQDVCPQLNENLTQLQQKITRWNEKSLHGRHRSDLIQHFIDKKKSNYWLTKGELFPETEGFMIAIQDQVIATRNYRKFIIKDPALASDNCRHCNSAPETIQHIIGACKSLVQTDYKHRHDQVASIIHQQLAHQYNFISKKDAYYKYKPNTILENTFHKIYWDRTIITDKTIHYNRPDITLHNKTLNTLYIIDIAVPNTHNIQSTISEKLAKYQDLATELKSQWKVQTVQIIPIVLSSTGVVPKSLSQSLETLNIPEHTISLLQKATILNTCRITRKFLTSSTTLF

SEQ ID NO: 31036 - protein, 1399 aa, Dendrolimus kikuchii
MMIGKTRYNLRPLPGGRRGTSGADAGCSSMRDIGDGGLSQRAPLEEYATADNYQSIFLNAPSSSNSYVPSIASPTQSTVTSVSHTQDVVQEVISTNAPVPTSGKPSTRKNWTSDMNEFILRTYLLLTNLETDCNSYLESLHIKFIERYPNMDVSRQRIGYQRRAINRRKLITAERINQIYIEVEEELKIMQSQIHSIHSQPSHSTRITNVSVNSQTTPIAITQSLQPHNSTIRMRWSNYINETILRIYYEITELETNHTAYRKLLHNRFIQIFPHLQHISEQRLSDQKRAIINNKMINNERIQEIKCEVEQKLRVKPIQTNENITQIDYTTPCITQNTQTQLDELTTNTLDFQLVNNTDENLHNNNSLLESTQITTYSEYVTNSIILDKEKIDTIFTNAIHRFKNTDPTSRPFLPKQKASCKLVSIVQYINTTVLPKYLSIELDFHNTHLYIYIAAYTAVISNGGKIQENTKLRKTKPAWQRRLEQKIENYRKDIGRLTQYISGNRSRKILASVDAIQIKYHTHAQYENINTEPSHFLDTLKQKLNAAAKRLKRYLTCTNRKIQNSKFNNNEKAFYRSLGTPSDSASTTSYTTLTPENLKEFWSKIWESPKEHWKEAEWIKETEEKHSNIPTMEFTHITVEIFKQVVNRIHNWKSPGTDNIHNYWYKKFTTVHPLIHNHLNAFIKEPNKMPPFLTHGITYMLPKDLNNLIDPSKYRPITCLQTIYKIFTACISEIIYNHLHKHNLLAEQQKGCRKSSQGCKEQLTIDSTILNHAYKTKSNIHTMFIDYRKAFDSVPHSWLLKVLHIYKLHPTLINFLESCMQNWVTKLKLRLTSSDITTEPIRISRGIYQGDALSPLWFCLALNPLSELLNKSDLGYKIIRTYPGFSLSHLLYMDDIKLYASSKDELFQLADITQQFSNDIDMEFGVDKCKILSVTRGEVNNFTYALSSGEKIEPMDAHTTYKYLGFEQSRKIKHKDTKSILIKKFNHRLNLLLKSELNSKNTIKAVNTFAIPILTYSFGIINWSKTDLNKLQRMINTTMTKHRKHHPKSAIERLVLPRQEGGRGIIDINNLHNKQITTLRNYFYGKAEHSSLHKSVVELDVKLTPLNLQNTQQQKNEILVDNKTKIKRWAEKSLHGRHQADLSLSHVDAEKSNQWLKRGELFPETEGFMIAIQDQVIATRNYKKYILKDKNQQTDLCRRCNSASETIQHITGACASLVQNDYKHRHDQVASILHQHLCHHYKFIKKKIPYYKYKPETIVENKNYKIYWDRTIITDKTVHFNRPDITLHDKNNSTVYIIDIAIPNTHNIQTTTSEKLNKYQELAIEIKNLWKVNAVYIIPIIISTTGVIPKVITQNLEILHAPPHTLTLIQKATILNTCRITRKFLTSARISNNSHIPY

SEQ ID NO: 31037 - protein, 767 aa, Dendrolimus kikuchii
MEFTHITVEIFKQIVNRIHNWKSPGTDNIHNFWYKKFTTVHPLIHNHLNAFIKEPNKMPPFLTHGITYMLPKDLNNLIDPSKYRPITCLQTIYKIFTACISEIIYNHLHKHNLLAEQQKGCRKSSQGCKEQLTIDSTILNHAYKTKSNIHTMFIDYRKAFDSVPHSWLLKVLHIYKLHPTLINFLESCMQNWVTKLKLRQTSSDITTEPIRILRGIYQGDALSPLWFCLALNPLSELLNKSDLGYKIIRTDPGFSLSHLLYMDDIKLYASSKDELFQLADITQQFSNDIDMEFGVDKCKILSVTRGEVNNFTYALSSGEKIEPMDAHTTYKYLGFEQSRKIKHKDTKSILIKKFNHRLNLLLKSELNSKNTIKAVNTFAIPILTYSFGIINWSKTDLNKLQRMINTTMTKHRKHHPKSAIERLVLPRQEGGRGIIDINNLHNKQITTLRNYFYGKAEHSSLHKGVVELDVKLTPLNLQNTQQQQNEILVDNKTKIKQWAEKSLHGRHQSDLSLSHVDAEKSNQWLKRGELFPETEGFMIAIQDQVIATRNYKKYILKDKNQQTDLCRRCNSASETIQHITGACASLVQNDYKHRHDQVASILHQHLCHHYKFIKKKIPYYKYKPETIVENKNYKIYWDRTIITDKTVHFNRPDITLHDKNNSTVYIIDIAIPNTHNIQTTTSEKLNKYQELAIEIKNLWKVNAVYIIPIIISTTGVIPKVITQNLEILHAPPHTLTLIQKATILNTCRITRKFLTSARISNNSHIPY

SEQ ID NO: 31038 - protein, 1355 aa, Hypena proboscidalis
MEENITNKERKIMNTRYNLRSRRHVSAVETTAADFITQCPLSSSRSSSISSLFPSLSSSPNPLNRRTPHSSPSSSSSYTSSITSISPTSSTSSTLMTVDVVHEANAVSSGPTTAQARARRKWTVDMNMFIWRTYLITSRLETQTRGYLDPLHTAFTGKYPAMNASKQSVGDQRRAIVNNKLLPRDTLDEIRNDVARYQEQNVQSTPSLTQATSRMRWSNDINETIVRIYYKITEIETNTTAYRKNLHSKFIEVYPHLSHLSEQRISDQLRAVINNKMIPEPRLQQIRNDVDEQIQISHTQSRLSQIDISQITAETNTEEQTVESFNTQEPIQIHRNNQSAITTSTHDDEILQQFQSSLDKFRNTEPTSRPYLPKQKPCRKLAAIVTHLNENIIPKFLSIDQDFNTLQTIIYASAYTAAVCNGSKIETNGNTRNTLNYKPFWQRRLERKIGKFRAEIGQLTQYIRGTRSRRIILAVETIKNKYKIHAQYENDNTELDHFLDTLKQKLNAAASRLKRYLTCSARKRQNAQFNNNERIFYRNIIQSNQNSNLQHQSTPTPENLRRFWAGIWETPLQHNEDAEWITSIKQDTNNITEMEFEHIPIDIFMQVIKRTHNWKSPGTDNLHNYWYKKFTCFHSHLHNHLNTFIQLPHTMPTFITHGVTYMIPKERATEDPSKYRPITCLQTIYKILTSCISELVYNHLNAYNILSEQQKGCRKKSQGCKEQLIIDSVTINEAYSKKRNVHTMFIDYRKAFDSVPHSWLIETLRIYRINPCIIAFLQSSMQNWQTKLKVQRSSIATEPIRISRGIYQGDALSPLWFCLALNPLSSLLNKSNTGYELRTTDTRFLLSHLFYMDDIKLYASTKNKLSHLADITQQFSKDICMEFGVEKCKVLSIHKGKIEDNAYRLETGQTIEPMDDISTYKYLGFKQSRRIEQKETKQELIRQFKHRLNSVLKSHLHSKNIVKAINTFAVPVLTYSFGIIHWSQSDLKSLQRIINIYLTKHRKHHPKSSIERLTLPRKDGGRGLIDIKNLHNKQITILRNYFHDKALHSSLHRHITDTDNKLTSLNLRDRQTQTNETIITNDQKFARWSEKALHGRHRADLAHNNVDRTKSNEWLKRGDLFPETEGFICAIQDQIIITRNYKKFIIKDPNQTSDLCRHCQSASETIQHITGACKSLVQSDYKHRHDQVAAIVHQHLAYHSKFIDKKVPYYKYKPDTVLDNGTCKIYWDRTIITDKTIHFNRPDITLHNKTDNSVYIIDIAIPNTHNVQTTISNKLAKYQDLAVELKTQWKANIVHIVPLVLSSTGVIPKSLTQSLNILNMPKHSLHLIQKATILNTCRITRKFLTSSSISSAYSI

SEQ ID NO: 31039 - protein, 1260 aa, Hypena proboscidalis
MTVDVVHEANAVSSGPTTAQARARRKWTVDMNMFIWRTYLITSRLETQTRGYLDPLHTAFTGKYPAMNASKQSVGDQRRAIVNNKLLPRDTLDEIRNNVARYLEQNVQSTPSLTQATSRMRWSNDINETIVRIYYKITELETNTTAYRKNLHSKFIEVYPHLSHLSEQRISDQLRAVINNKMIPEPRLQQIRNEVDEQIQISHTQSRLSQIDISQITAEINTEEQTVESFNTQEPIQIHRNNQSAITTSTHDDEILQQFQSSLDKFRNTEPTSRPYLPKQKPCRKLAAIVTHLNENIIPKFLSIDQDFNTLQTIIYASAYTAAVCNGSKIETNGNTRNTLNYKPFWQRRLERKIGKFRAEIGQLTQYIRGTRSRRIILAVETIKNKYKIHAQYENDNTELDHFLDTLKQKLNAAASRLKRYLTCSARKRQNAQFNNNERIFYRNIIQSNQNSNLQHQSTPTPENLRRFWAGIWETPLQHNEDAEWITSIKQDTNNITEMEFEHIPIDIFIQVIKRTHNWKSPGTDNLHNYWYKKFTCFHSHLHNHLNTFIQLPHTMPTFITHGVTYMIPKERATEDPSKYRPITCLQTIYKILTSCISELVYNHLNANNILSEQQKGCRKKSQGCKEQLIIDSVTINEAYSKKRNVHTMFIDYRKAFDSVPHSWLIETLRIYRINPCIIAFLQSSMQNWQTKLKVQRSSIATEPIRISRGIYQGDALSPLWFCLALNPLSSLLNKSNTGYELRTTDTRFLLSHLFYMDDIKLYASTKNKLFHLADITQQFSKDICMEFGVEKCKVLSIHKGKIEDNAYRLETGQTIEPMDDISTYKYLGFKQSRRIEQKETKQELIRQFKHRLNSVLKSHLHSKNIVKAINTFAVPVLTYSFGIIHWSQSDLKSLQRIINIYLTKHRKHHPKSSIERLTLPRKDGGRGLIDINNLHNKQITTLRNYFHDKALHSSLHRHITDTDNKLTSLNLRDRQTQTNETIITNDQKFARWSEKALHGRHRADLAHNNVDRTKSNEWLKRGDLFPETEGFICAIQDQIIITRNYKKFIIKDPNQTSDLCRHCQSASETIQHITGACKSLVQSDYKHRHDQVAAIVHQHLAYHSKFIDKKVPYYKYKPDTVLDNGTCKIYWDRTIITDKTIHFNRPDITLHNKTDNSVYIIDIAIPNTHNVQTTISNKLAKYQDLAVELKTQWKANIVHIVPLVLSSTGVIPKSLTQSLNILNMPKHSLHLIQKATILNTCRITRKFLTSSSISSTYSI

SEQ ID NO: 31040 - protein, 1266 aa, Noctua janthe
MNTRSKTKKQLQAKLPQIDDETSQPSSSSPSSLFPSIPSSSQSFRVTPTPSSSSISIQSVDVVQETNFVDDTVPTARTATSRRKWSTDMNKFILRTYLHLTHMETDKNAYLPSLHTKFLEKYPDMQVGRQRIGDQRRAIVQKKLLPQETIDQIYEEVRAELQIVHTQIQQHSKQSKTPINTQAGQRMKWTNEYNEAIIRIYYTSTELETNKTAYRKHLHEEFIKIYPELAHLTEQRLSDQVRAIINNKYIHTNRLEEIKNQVATELRNINTNTQNIEHINNDLQPPDENIHSLSTQYANIYTPTTSNSILLNNSSDTNIVSQTLINTVDESFLNHIDIGLFEPTQNNLNAAHEKNLEIEATFQQAQQLFSDTHPTSRPYIPKQKTSKKFSAIVTYINSVILPNNVNVDTDFIKMQTTIYCAAWTAATCNGAKISDTQNESRTYIKRKPKWQIRIEKKIQSLRSNIGRLTHFINGSRSPKLIAAVEEIKKKYQVHAQYEDSNTQLVHFLDTLKQKLNAASSRLKRYLKCTNRKVQNTKFINNEKIFYRNLATNNRDTSNQSLETPTSETLREFWANIWENPVNHNHQADWINEVTPEIPEMEFEFIPIGTFIDVIKRTHNWKSPGTDNIHNYWYKKLSSIHPFLHNHLNTFIHSPHLLPSYITHGVTYMIPKDINDTINPAKYRPITCLQTIYKILTACLSEVVYEHLTKNNILSEQQKGCRKNSQGCKEQLTIDAVTMNSTVKSKTDIHTMFIDYQKAFDSVPHSWLLNVLSLYKIHPTLKNFLQMSMQNWQTVLKINSSSSTVATEPIHIKRGIFQGDALSPLWFCMALNPLSHLLDKTATGFTLTNSNTQYTLTHLMYMDDIKLYAADKNALVVLADTTQQFSDDICMSFGVDKCKMLSVVKGQIQNNSYTLGSGQLIEPMDEQSTYKYLGFKQSRQIHQKMTKQELVNKYSHRLNLILKTNLNSKNTIKAINTFAIPILTYSFGIIRWSNTDIKKLQRTLNTSLTKYRKHHPKSSIHRLTLPRQEGGRGLIDIHNLHNKQIHSLRAYFHNKSESSALHKHVTENDTKLTPLNLHNRNTQINELVISTAEKIAAWSAKALHGRHRAYLSQPHVDKAKSNEWLKRGELFPETEGFILAIQDQIIATRNYRKYIIKDPHQPTDLCRHCNTASETIQHITGACKSLAQTDYKHRHDQVASIIHQHLAFKYQLISEMKPYYKYKPELILDNNNQKIYWDRTIITDKTIHFNRPDITLHDKANKTVYGT

SEQ ID NO: 31041 - protein, 1364 aa, Noctua janthe
MNTRSKTKKQLQAKLPQIDDETSQPSSSSPSSLFPSIPSSSQSFRVTPTPSSSSISIQSVDVVQETNFVDDTVPTARTATSRRKWSTDMNKFILRTYLHLTHMETDKNAYLPSLHTKFLEKYPDMQVGRQRIGDQRRAIVQKKLLPQETIDQIYEEVRAELQIVHTQIQQHSTQSKTPINTQAGQRMKWTNEYNEAIIRIYYTSTELETNKTAYRKHLHEEFIKIYPELAHLTEQRLSDQVRAIINNKYIHTNRLEEIKNQVATELRNINTNTQNIEHINNDLQPPDENIHSLSTQYANIYTPTTSNSILLNNSSDTNIVSQTLINTVDESFLNHIDIGLFEPTQNNLNAAHEKNLEIEATFQQAHQLFSDTHPTSRPYIPKQKTSKKFSAIVTYINSVILPNNVNVDTDFIKMQTTIYCAAWTAATCNGAKISDTQNESRTYIKRKPKWQIRIEKKIQSLRSNIGRLTHFINGSRSPKLIAAVEEIKKKYQVHAQYEDSNTQLVHFLDTLKQKLNAASSRLKRYLKCTNRKVQNTKFINNEKIFYRNLATNNRDTSNQSLETPTSETLREFWANIWENPVNHNHQADWINEVTPEIPEMEFEFIPIGTFIDVIKRTHNWKSPGTDNIHNYWYKKFSSIHPFLHNHLNTFIHSPHLLPSYITHGVTYMIPKDINDTINPAKYRPITCLQTIYKILTACLSEVVYEHLTKNNILSEQQKGCRKNSQGCKEQLTIDAVTMNSAVKSKTDIHTMFIDYQKAFDSVPHSWLLNVLSLYKIHPTLKNFLQMSMQNWQTVLKINSSSSTVATEPIHIKRGIFQGDALSPLWFCMALNPLSHLLDKTATGFTLTNSNTQYTLTHLMYMDDIKLYAADKNALVVLADTTQQFSDDICMSFGVDKCKMLSVVKGKIQNNSYTLGSGQLIEPMDEQSTYKYLGFKQSRQIHQKMTKQELVNKYSHRLNLILKTNLNSKNTIKAINTFAIPILTYSFGIIRWSNTDIKKLQRTLNTSLTKYRKHHPKSSIHRLTLPHQEGGRGLIDIHNLHNKQIHSLRAYFHNKSESSALHKHVTENDTKLTPLNLHNRNTQINELVISTAEKIAAWSAKALHGRHRAYLSQPHVDKAKSNEWLKRGELFPETEGFMLAIQDQIIATRNYRKYIIKDPHQPTDLCRHCNTASETIQHITGACKSLAQTDYKHRHDQVASIIHQHLAFKYQLISEMKPYYKYKPELILDNNNQKIYWDRTIITDKTIHFNRPDITLHDKANKTVYLIDIAIPNSHNIQTTISEKLSKYQDLAIEIKTQWKAQTVHIVPIVLSSTGIVPKSLMQSLNTLHMPSHTLQLLQKATILNTCRITRKFLTSSTISSTFSI

SEQ ID NO: 31042 - protein, 1360 aa, Mythimna ferrago
MNTRSKTKKLLASMPQIDDETMQPFSLSPSSLFPSITSSSQSFRVSSTPSSSSIQSADVVQETKFVDDTVPTARTPTSRRKWSIEMNKFILRTYLHLTNMDTDKNAYLPSLHTKFLEKYPDMQVSRQRIGDQRRAIIQKKLLPQDTIDQIYEEVRAELQMFCTQIQQHSTQSNTQFSQRMRWTNEHNEAIIRIYYTVTQLETNKTVYRKHLREEFINMYPELTHITEQRLSDQVRAIINNEYLDTKRLEEIRNQVAIELANINNAQNTEQTSGDLLNTQSQSESDLPDINANSPDILTNTITTNEALNNSSGGDIVLESLANIEVDNNLFNNINISQSEPINRNCILDNSTEIEATFQQAQLNFKDTDPTNRPFIPKQKTSRKFSAIVNYINTVILPKHINGDTEFIKLQTIIYCAAWTAAKCNGAKISDLTQSEHRTYKYRKPKWQIRLEKKIENLRVNIGRLTHFINGSRSQKLVAAVEQIKLKYQLHAQHENSNTEIEHFLDTLKQKLSAASSRLKRYITCTNRKVQNIKFKNNEKIFYRNLTSNNRNITNESLDPPSPESLREFWANIWENPVYHNEHADWVSDATIDIPDMEFEFIPIETFIEVVKRTHNWKSPSTDNIHNYWYKKFSSIHPFLYNHLNTFIQSPHLLPTYITHGVTYMIPKDINDTTNPAKYRPIICLQTLYKILTACVSEVVYEHLLKNNILAEQQKGCRKHSQGCKEQLTIDAIAMNNAVKCRKDIHTMFIDYQKAFDSVPHSWLLHVLNLYKIHPTLKQFLETSMQNWQTTLKINSSSTTVATEPIFIKRGIFQGDALSPLWFCMALNPLSYLLDKTDVGFTLANHNTQYKLTHLMYMDDIKLYAADKEALFQLADTTQLFSDDICMSFGVDKCKILSVVKGKIQNNSYTLGSGESIDPMDEQSTYKYLGFKQSRQIQQKLSKQELLKNFSHRLNLILKSNLNSRNTIKAINTFAIPILTYSFGIIKWSKADIKKIQRTVHILLTKHRKHHPKSCIQRLTLPRQEGGRGLIDIQNLHNKQIHSLRAYFHFKSENSLLHKQISDIDKKLTPLNLQNRNTQINEHITSTQQKIAAWSEKALHGRHRASLSQPHVYKLMSNEWLKRGELFPETEGFMLAIQDQIVATRNYRKYIMKDQNQPTDFCRHCNSASETIQHITGACKSLVQTDYKHRHDQVAAIIHQHLAYKYKLVTETMPYYKYKPQIILESKDIKIYWDRTIITDKTIHYNRPDITVHDKTNKSVYLIDIAIPNSHNVQTTISEKLSKYQDLAIEIKTQWKAQTVHIVPIVLSSTGIIPKSLAQSLNTLQMPAQTLYMLQKATILNTCRITRKFLTSSTLTSTFSI

SEQ ID NO: 31043 - protein, 1363 aa, Mythimna impura
MNTRSKTKKQLLASMPQIDNETSQIFSLSPSSLFSSIPSSSQSFRVTPTPSSSSIQSADVVQETNSVDDTVPTARTATSRRKWSIEMNKFILRTYLYLTNMDTDKNAYLPSLHTKFLEKYPDMQVSRQRIGDQRRAIVQKKLLPQDTIDQIYEEVRVELQMFHTRIQQHSTQSNTQYSQRMRWTYEHNEAIIRIYYTVTQLETNKTAYRKHLREEFINIYPELTHLTEQRLSDQVRAIINNAYIDTKKLEEIKNQVAIELENPNTNDQNTEQTSGDHLNTQSQTELDLLGTYANFSDTPTNTLTTNVFLNNSAGLDILESQVNTEEDNNFLNNINIVQSEPMQANLNFISESNTEIEATFQQAQLNFNDTHPTNRPYIPKQKTSKKFSAIVLYINTVILPKHVNGDTEFIKFQTIIYCAAWTAATCNGAKIAGSTQNEHRTYTFRKPKWQIRLEKRIQNLRANIGRLTHFINGSRSQKLVAAVEQIKLKYQLHAQHENSNTQIEHFLDTLKQKLSAASSRLKRYITCTNRKVQNTKFKSNEKIFYRNLTSNNRDTTNQTLDTPSSESLRQFWANIWENPVYHNDRADWVSDATTEIPEMEFEVIPIGTFIEVIKRTHNWKSPGTDNIHNYWYKKFSSIHPFLYNHLNTFIKSPHLLPIYITHGVTYMIPKDTNDTINPAKYRPITCLQTLYKILTACISEVVYEHLTKNNILAEQQTGCRKHSQGCKEQLTIDAIAMNSAVKSRKDIHTMFIDYQKAFDSVPHSWLLRVLDLYKIHPTLKQFIKMSMQNWQTVLKINSSSATVATEPIHINRGIFQGDALSPLWFCMALNPLSHLLDKTDVGFTLTNNNTQYKLTHLMYMDDIKLYAADREALFRLADTTQIFSDDICMSFGVDKCKILSVVKGRIQNNSYSLGSGELIEPMDEHSTYKYLGFKQSRQIQQKLSKQELLKKFSHRLNLILKSNLNSRNTIKAINTFAIPILTYSFGILHWSKTDIKKTQRTLHTLLTKHRKHHPKSCIQRLTLSRQEGGRGLIDIHNLHNKQIHSLRVYFHCKSENSLLHKHVSETDKKLTPLNLQNKNTQINEHIVSTQQKIAAWSDKALHGRHRTSLSQPHVDKIMSNEWLKRGELFPETEGFMLAIQDQIVATRNYRKYIMKDQNQQTDSCRRCNSASETIQHITGACKSLAQTDYKHRHDQVGAIIHQNLAYKHKFVTDKVPYYKYTPETILESQNIKIYWDRTIITDKTIHYNRPDITVHDKTNKTVYLIDIAIPNSHNIQTTISEKLGKYQDLAIEIKTQWKARTVHIVPIVLSSTGVIPKSLTQSLNTIQMPAQILYMLQKATILNTCRITRKFLTSSTLTSTFSI

SEQ ID NO: 31044 - protein, 1344 aa, Ephestia elutella
MESNNRRYNLRPLPGGRRGALGAGAECHSMRTIGDGGLSRRAPLEQTTTADIIPHSPSSSHSLFPSPSSSPYSFQTVRISRSSSLSSMSVDVVQEACAEEPVPTSDSKRVRKTWTDDMNKFILRNYLIITNLERNTRGYLNALHQRFTEKFPKMDVSKQRVGDQRRAIVNNLLLTQAAIDEIKEEVSILLNQQPVPSQQIEMSGSRMKWSNDINEAILRIYFQVTEIETNMTAHRKKLHYKFIEEYPNLAHISEQRLSDQRRVIVNNKMVPGHKIEQIRREVENQVQTHRNRIIHADISEHSQNIQTTNTDPLNEDTQLPLNQSETEVIDSVPIQRSYVLPQTSATNALHSEFQEIIKTRFHETRDLFIETDPVSRPFIPRQKSSKKLALIVSYINKNILPEYLNTELDFPQLQTLIYIAAYTAATCNGTKIKHTSVKLEKTKPSWQKRLERKIDKFRSDIAKLTQYINGNRNRSIIKTVEAIKVKYSIHAQYENPNIQLEHFLDTLKQKLNTASSRLRRYMTCTDRKNQNKLFGNNEKTFYRNISTTHTHNQNINTDIPSPDSLRQFWANIWENPIEHNDNAEWINKVSDQSSNISGMVFDIIPVETFIKVIEHTHNWKSPGTDNIHNYWYKKFTCTHPYIHNHLNSFIASPHTMPAYITQGITYMIPKDKDDTKNPAKYRPITCLQTIYKILTACISEMIYDHISNNNILAEQQKGCKKNSQGCKEQLIIDSAVMNKVAKNKTNLHVMFIDYQKAFDSVPHSWLKYVLQLYKIDSTIVHFLGTVMQKWETVLKISQNNASITSEPIRIQRGIFQGDALSPLLFCLAINPLSTLLNNNDTGFKLVYQDMQFILSHLLYMDDIKLYANSKTHLFNLADITQEFSQDIQMQFGIDKCKVLSITKGKIEKNNYMLQNGESIESIEEQSTYKYLGFKQSRQINQKETKAELINKFKFRLNLILKSHLNSKNIAKAINTFAIPVLTYSFGIIQWSQTDLKKLQRIINTNLTKHRNHHPKACIQRLTLPRREGGRGFIDIQNLHNKQIHSLRQYFHNKSEHSSLHKLITGIDHKLTPLNLHNPHSQPNEQLTNQEQKIATWAEKSLHGRHRSYLCQLHVDKDKSNEWLRKGELFPETEGFMIAIQDETIATRNYIKYIIKDIHQPTDLCRHCNSTSETIQHITGACSALVQTDYKHRHDQVAAIVHQHLASRYNFISKMEPYYKYKPKTVLENNHQKIYWDRTILTDKTVHYNRPDITVHDKETDTVYLIDIAIPNSHNTQKTVSEKLSKYQDLAIEIKTQWKAKKVHIIPIVLSSTGIIPKSLMQSLNTLQMPPYILHLMQKATILNT

SEQ ID NO: 31045 - protein, 984 aa, Tuta absoluta
MIVEYINTEILPAYLNNEQDFNTLHTTLYTAAYTAAICNGAKIDTEGQNGSNNYRRSKPSWQKRLENRVKNLRSHIGRLSQFMNGNRSARVLSCVEEIKNKYQIHAQYENPNTELNHFLDTLKQKLNTVSNRLRRYLACTARKSQNRKFINNEKAFYRNFSLTSQENQSKHVESQTPTPEILKDYWGNIWEQPVDHNHNAEWINETSKTAELTPEMNFEYIPVDTFIDILKRTHNWKCPGSDNLHAYWYKKFTRTHPYIHNHLNTFIQSPDTMPTFITQGITYMLPKDKYDTLNPAKYRPITCLQIIYKILSACISELIYQHVTEHNILSEQQKGCRKYSQGCKEQLTLDAIALNQAYKKKRNIHTMFIDYRKAFDSVPHTWLLKVLHIYKIHPLIITFLRSSMQNWQTKLKINRTTGPITTEPIYIKRGIFQGDSLSPLWFCLALNPLSELLNQSNIGYKLNNERYSTISHLMYMDDIKLFASNEPDLFALADITQQFSIDIRMQFGVDKCNTLSVEKGKLIHNPYILVTGELVEPMDESETYKYLGFLQARQIQQKQSKIDLTTKFKHRINIILKSELNSRNTIKAINTYAIPTLTYSFGIINWSQTDLKKLQRTIHTSLTKFRKHHPKSCIQRLTLPRQEGGRGLIDINNLHNKQITKLRKYFHTKSEYSALYRHATETDTKLTPLNLHDRQTQPNEQLTDKKQKITTWAGKSLHGRHRSHLCQTYVDKEKSNEWLRKGELFPETEGFMLAIQDEVIATRNYRKHILKDLTQTNDSCRHCNSAPETIQHITGSCRSIVQTDYKHRHDQVASIIHQELAHKYNFIQKKQPYYKYKPDVTLEDRKTKIYWDRTILTDRTVHYNRPDITLHDKQTNAVYLIDIAIPNTRNVQTTISEKLSKYQDLAIEVKTQWRANAVHIVPIVLSSTGIVPKTLQSSLKALNISTKFIYTMQKATILNTCRITRKFLTSSTVTSNTESSAILG

SEQ ID NO: 31046 - protein, 1374 aa, Tuta absoluta
MEESRKRYNLRPLPGGRRGTPGASAGCHSMRTTGGGGLNRRVPPEQNTTAEPQSPPSSPPNSLYSTPISSPYRIEMLSRSSTASPMPEDVVQEAFAASTVPTPGVTCARKRWNSEMNEFIWRNYLILTNNETNTRSYLGTLHQKFITAFPEMDVSRQRIGDQRRAIINKKLLSQSTLDEIRIEITALFENGSIPNSQTTLTRSTSGRMRWSNELNETVIRTYFEVTQNENDMTANRKKHHTKFIALHPHLCHISEQRLSDQRRAIVNNKMIPQERILQIRQEVEIQLMTPIQRLNQPENISEDLNYQLTHGTITTIPEINENDTEPTNTQQHNNDEITTNNNTCNDSYNLQTELMQKIKDTFLTTFEKFTNTDPLSRPFIPKQKTSKKLSMIVEYINTEILPAYLNNEQDFNTLHTTLYTAAYTAAICNGAKIDTEGQNRSNNYRRSKPSWQKRLENKVKNLRSHIGRLSQFMNGNRSARVLSCVEEIKNKYQIHAQYENRNTELNHFLDTLKQKLNTVSNRLRRYLACTARKSQNRKFINNEKAFYRNFSLTSQENQSKHVESQTPTPEILKDYWGNIWEQPVDHNHNAEWINETSKTAELTPEMNFEYIPVDTFIDILKRTHNWKCPGSDNLHAYWYKKFTRTHPFIHNHLNTFIQSPDTMPTFITQGITYMLPKDKHDTLNPAKYRPITCLQIIYKILSACISELIYQHVTEHNILSEQQKGCRKYSQGCKEQLTLDAIALNQAYKKKRNIHTMFIDYRKAFDSVPHTWLLKVLHIYKIHPLIITFLRSSMQNWQTKLKINRTTGPITTEPIYIKRGIFQGDSLSPLWFCLALNPLSELLNQSNIGYKLNNERYSTISHLMYMDDIKLFASNEPDLFALADITQQFSIDIQMQFGVDKCNTLSVEKGKLIHNPYILVTGELVEPMDESDTYKYLGFLQARQIQQKQSKIDLTTKFKHRINIILKSELNSRNTIKAINTYAIPTLTYSFGIINWSQTDLKKLQRTIHTSLTKFRKHHPKSCIQRLTLPRQEGGRGLIDINNLHNKQITKLRKYFHTKSEYSALYRHATETDTKLTPLNLHDRQTQPNEQLTDKKQKITTWAGKSLHGRHRSHLCQTYVDKEKSNEWLRKGELFPETEGFMLAIQDEVIATRNYRKHILKDLTQTNDSCRHCNSASETIQHITGSCRSIVQTDYKHRHDQVASIIHQELAHKYNFIQKKQPYYKYKPDVTLEDRKTKIYWDRTILTDRTVHYNRPDITLHDKQTNAVYLIDIAIPNTHNVQTTISEKLSKYQDLAIEVKTQWRANAVHIIPIVLSSTGIVPKTLQSSLKALNISTKFIYTMQKATILNTCRITRKFLTSSTVTSNTESSAILG

SEQ ID NO: 31047 - protein, 1259 aa, Tuta absoluta
MNEFIWRNYLILTNNETNNRSYLGTLHQKFITAFPEMDVSRQRIGDQRRAIINKKLLSQSTLDEIRIEITALFENGSIPNSQTTLTQSTSGRMRWSNELNETVIRTYFEVTQNENDMTANRKKHHTKFIALHPHLCHISEQRLSDQRRAIVNNKMIPQERILQIRQEVEIQLMTPIQRLNQPENISEDLNYQLTHGTITAIPEINENDTEPTNTQQHNNDEITTNNNTCNDSYNLQTELMQKIKDTFLSTFEKFTNTDPLSRPFIPKQKTSKKLAMIVEYINTEILPAYLNNEQDFNTLHTTLYTAAYTAAICNGAKIDTEGQNGSNNYRRSKPSWQKRLENRVKNLRSHIGRLSQFMNGNRSARVLSCVEEIKNKYQIHAQYENPNTELNHFLDTLKQKLNTVSNRLRRYLACTARKSQNRKFINNEKAFYRNFSLTSQENQSKHVESQTPTPEILKDYWGNIWEQPVDHNHNAEWINETSKTAELTPEMNFEYIPIDTFIDILKRTHNWKCPGSDNLHAYWYKKFTRTDPYIHNHLNTFIQSPDTMPTFITQGITYMLPKDKHDTLNPAKYRPITCLQIIYKILSACISELIYQHVTEHNILSEQQKGCRKYSQGCKEQLTLDAIALNQAYKKKRNIHTMFIDYRKAFDSVPHTWLLKVLHIYKIHPLIITFLRSSMQNWQTKLKINRTTGPITTEPIYIKRGIFQGDSLSPLWFCLALNPLSELLNQSNTGYKLNNERYSTISHLMYMDDIKLFASNEPDLFALADITQQFSIDIRMQFGVDKCNTLSVEKGKLIHNPYILVTGELVEPMDESETYKYLGFLQARQIQQKQSKIDLTTKFKHRINIILKSELNSRNTIKAINTYAIPTLTYSFGIINWSQTDLKKLQRTIHTSLTKFRKHHPKSCIQRLTLPRQEGGRGLIDINNLHNKQITKLRKYFHTKSEYSALHRHATETDTKLTPLNLHDRQAQPNEQLTDKKQKITTWAGKALHGRHRSHLCQTYVDKEKSNEWLRKGELFPETEGFMLAIQDEVIATRNYRKHILKDLTQTNDSCRHCNSAPETIQHITGSCRSIVQTDYKHRHDQVASIIHQELAHKYNFIQKKQPYYKYKPDVTLEERKTKIYWDRTILTDRTVHYNRPDITLHDKQTNAVYLIDIAIPNTHNVQTTISEKLSKYQDLAIEVKTQWRANAVHIVPIVLSSTGIVPKTLQSSLKALNISTKFIYTMQKATILNTCRITRKFLTSSTVTSNTESSAILG

SEQ ID NO: 31048 - protein, 1378 aa, Mellicta athalia
MEKSCNRRYNLRPLPGGRRGTPGAGAGCHSMRTTGGGGLNRRVPPEQSTTADPIRCPNSPISETSSANNSLNSTPTSSPYRIEMPSRSPTSSPMSEDVVQEAYATQPAPTPGITSARRRWTSQMNEFIWRNYLILTKNETNTRSYLDTLHKKFMAAFPEIDVSRQRIGDQRRAIINNKLLPQSTLDGIRNEISTLIQTGNIETSQTNLTQNTGTRMRWSNELNESILRTYFEVTHIETDMTANRKKLHTKFIEQHPHLSHISEQRLSDQRRAIVNNKMIPQERIEQIRYEVEAQLSRPQQRQDETENLTDYQMTQMMTTPLTETEAPDFSTNVQAPFDTQTHSEEDILPNRISNNNANTIQEDLAQKIKDQFISATEKFINTDPISRPFIPKQKTSKKLAVIVEYIDSKILPDYLNNEQDFHTLHTIIYIAAYTAAICNGAKINIDRQSGNSYRKTKPSWQKRLEDKIQTLRSQIAHLTQYINGNRSYKVVDSVEQIKSKYQTHAQYENPNTELSHFLDTLKQKLNIVSNRLKRYLACTARKSQNRKFINNEKAFYRNISTPPQERHSTRVETPTPETLKEFWSQIWEQPVEHNENAEWIDKVSRTVENIPEMRFEHISVDTFKNILKRMHNWKAPGSDNLHAYWYKKFTRTHPHIHNHLNTFIQSTDTMPTFITQGITYMLPKDNHDTQNPAKYRPITCLQIFYKILTGCISELIYQHVAEHNIFSEQQKGCRKFSQGCKEQLTLDAIALNHAYKKKKDIHSMFIDYRKAFDSVPHTWLLKVLQIYKIHPTIISFLQVSMQNWQTKLKINQSLTTEPIHIKRGIFQGDALSPLWFCLALNPLSDLINLSKLGFKLNNEQNSTISHLMYMDDIKLFATNASDLFKLADITQQFSTDINMQFGVDKCKILSVKKGKLVHNSYALNTGETIEPMNEVSTYKYLGFNQARHIQQKQTKIDLTTKFKHRLNLILKSELNSRNIVKAINTFAIPVLTYSFGIINWSQTDLQKLQRTIHTKLTKFRKHHPKSCIQRLTLPRQEGGRGLIDIHNLHNKQITTLRQYFHTKSEHSALHRHASKKDTKLTPLNLHDRQLQTNEKLKDPKQKIATWAGKSLHGRHRSYLCQTYVDKDKSNEWLRKGELFPETEGFMLAIQDEVIATRNYRKHILKDPNQTNDSCRHCNSAPETIQHIISSCRSIVQTDYKHRHDQVASIIHQELAHKYRFIAKKQPYYKYKPDVILEDRNYKIYWDRTVLTDRTVHYNRPDITLHDKRNKTVYLIDIAIPNTHNIQTTISDKLTKYQDLAIEIKTQWNADTVHIVPIVLSATGIIPKTLTNGLKILNMYTNLTYTLQKATVLNTCRITRKFLTSSTITSNAEPSAILG

SEQ ID NO: 31049 - protein, 1163 aa, Mellicta athalia
MRWSNELNESILRTYFEVTHTETDMTANRKKLHTKFIEQHPHLSHISEQRLSDQRRAIVNNKMIPQERIEQIRYEVEAQLSRPQQRQDETENLTDYQMTQMMTTPLTETEAPDFSTNVQAPFDTQTHSEEDILPNRISNNNANTIQEDLAQKIKDQFISATEKFINTDPISRPFIPKQKTSKKLAVIVEYIDSKILPDYLNNEQDFHTLHTIIYIAAYTAAICNGAKINIDRQSGNSYRKTKPSWQKRLEDKIQTLRFQIAHLTQYINGNRSYKVVDSVEQIKSKYETHAQYENPNTELSHFLDTLKQKLNIVCNRLKRYLACTARKSQNRKFINNEKAFYRNISTPPQERHSTRVETPTPEKLKEFWSQIWEQPVEHNENAEWIDKVSRTVENIPEMRFEHIPVDTFKNILKRMHNWKAPGSDNLHAYWYKKFTRTHPHIHNHLNTFIQSTDTMPTFITQGITYMLPKDNHDTQNPAKYRPITCLQIFYKILTGCISELIYQHVAEHNIFSEQQKGCRKFSQGCKEQLTLDAIALNHAYKKKKDIHSMFIDYRKAFDSVPHTWLLKVLQIYKIHPIIISFLQVSMQNWQTKLKINQSLTTEPIHIKRGIFQGDALSPLWFCLALNPLSDLINLSKLGFKLNNEQNSTISHLMYMDDIKLFATNASDLFKLADITQQFSTDINMQFGVDKCKILSVKKGKLVHNSYALNTGETIEPMNEVSTYKYLGFNQARQIQQKQTKIDLTTKFKHRLNLILKSELNSRNTVKAINTFAIPVLTYSFGIINWSQTDLQKLQRTIHTKLTKFRKHHPKSCIQRLTLPRQEGGRGLIDIHNLHNKQITTLRQYFHTKSEHSALHRHASKKDTKLTPLNLHDRQLQTNEKLKDPKQKIATWAGKSLHGRHRSHLCQTYVDKDKSNEWLRKGELFPETEGFMLAIQDEVIATRNYRKHILKDPNQTNDSCRHCNSAPETIQHITSSCRSIVQTDYKHRHDQVASIIHQELAHKYRFIAKKQPYYKYKPDVILEDRNYKIYWDRTILTDRTVHYNRPDITLHDKRNKTVYLIDIAIPNTHNIQTTISDKLTKYQDLAIEIKTQWNTDTVHIVPIVLSATGIIPKTLTNSLKILNMSTNLTYTLQKATVLNTCRITRKFLTSSTITSNAEPSAILG

SEQ ID NO: 31050 - protein, 1179 aa, Melitaea cinxia
MAKHTSSRYFWRILVEAYTCALYLCPAVDCIGCNDEFLHERGTNIHTSIHPYIQTFAFITLIIEQRLSDQRRAIVNNKMIPQERIEQIRYEVEAQLSRPQQRQDQTENLTDYQMTQIMTTPLTETEEPDFSTNVQAPFDTQTHSEKDILPNLNSNNNADKIQEDLAQKIKDQFISATEKFINTDPTSRPFIPKQKTSKKLAVIVEYIDSKILPDYLNNQQDFHTLHAIIYIAAYTAAICNGAKINIDRQRGNSYRKTKPSWQKRLEDKIQTLRSEIAHLTQYINGNRSYKVVDSIEQIKSKYQTHAQYENPNTELSHFLDTLKQKLNIVSNRLKRYLACTARKSQNRKFINNEKAFYRNISTPPQERHSTRVETPTPETLKEFWSQIWEQPVEHNENAEWIDEVSRTVENTPEMRFEHIPVDTFKNILKRMHNWKAPGSDNLHAYWYKKLTRTHSHIHSHLNTFIQSTDTMPTFITQGITYMLPKDNRDTQNPAKYRPITCLQIFYKILTGCISELIYQHVAEHNIFSEQQKGCRKFSQGCKEQLTLDAIALNHAYKKKKDIHSMFIDYRKAFDSVPHTWLLKVLQIYKINPIIISFLQVAMQNWQTKLKINQSLTTEPIHIKRGIFQGDALSPLWFCLALNPLSDLINHSKLGFKLNNEQNSTISHLMYMDDIKLFASNASDLFKLADITQQFSTDINMQFGVDKCKILSVKKGKLVHNSYALNTGETIEPMNEVSTYKYLGFNQSRQIQQKQTKIDLTTKFKHRLNLILKSELNSRNTVKAINTFAIPVLTYSFGIINWSQTDLQKLQRTIHTKLTKFRKHHPKSCIQRLTLPRQEGGRGLIDIHNLHNKQITTLRQYFHTKSEHSALHRHASEKDTKLTPLNLHDRQPQTNEKLTDPKQKIATWAGKPLHGRHRSHLCQTHVDKDKSNEWLRKGELFPETEGFMLAIQDEVIATRNYRKHILKDLNQTNDSCRHCNSAPETIQHITSSCRSIVQTDYKHRHDQVASIIHQELAHKYKFIAKKQPYYKYKPDVILEDRNYKIYWDRTILTDRTVHYNRPDITLHDKRNKTVYLIDIAIPNTHNIQTTISDKLTKYQDLAIEIKTQWNADTVHIVPIVLSATGIIPKTLTNSLKILNMSTNLTYTLQKATVLNTCRITRKFLTASTITSNAEPSAILG

SEQ ID NO: 31051 - protein, 1378 aa, Mellicta athalia
MEKSCNRRYNLRPLPGGRRGTPGAGAGCHSMRTTGGGGLNRRVPPKQSTTADPIRCPNSSISETSSANNSLNSTPTSSPYRIEMPSRSPTSSPMSEDVVQEAHATQPVPTPGITSARRRWTSQMNEFIWRNYLILTKNETNTRSYLDTLHKKFMAAFPEIDVSRQRIGDQRRAIINNKLLPQSTLDGIRNEISTLIQTGNIETSQTNLTQNTGTRMRWSNELNESILRTYFEVTHIETDMTANRKKLHTKFIEQHPHLSHISEQRLSDQRRAIVNNKMIPQERIEQIKYEVEAQLSRPQQRQDETENLTDYQMTQMMTTPLTETEAPDFPTNVQAPFDTQTHSEEDILPNRNSNNNANKIQEDLAQKIKDQFISATEKFINTDPISRPFIPKQKTSKKLAVIVEYIDSKILPDYLNNEQDFHTLHTIIYIAAYTAAICNGAKINIDRQSGNSYRKTKPSWQKRLEDKIQTLRSQIAHLTQYINGNRSYKVVDSVEQIKRKYQTHAQYENPNTELSHFLDTLKQKLNIVSNRLKRYLACTARKSQNRKFINNEKAFYRNISTPPQERHSTRVETPTPETLKEFWSQIWEQPVEHNENAEWIDKVSRTVENIPEMRFEHIPVDTFKNILKRMHNWKAPGSDNLHAYWYKKFTRTHPHIHNHLNIFIQSTDTMPTFITQGITYMLPKDNHDTQNPAKYRPITCLQIFYKILTGCISELIYQHVAEHNIFSEQQKGCRKFSQGCKEQLTLDAIALNHAYKKKKDIHSMFIDYRKAFDSVPHTWLLKVLQIYKIHPIIISFLQVSMQNWQTKLKINQSLTTEPIHIKRGIFQGDALSPLWFCLALNPLSDLINLSKLGFKLNNEQNSTISHLMYMDDIKLFATNASDLFKLADITQQFSTDINMQFGVDKCKILSVKKGKLVHNSYALNTGETIEPMDEVSTYKYLGFNQARQIQQKQTKIDLTTKFKHRLNLILKSELNSRNIVKAINTFAIPVLTYSFGIINWSQTDLQKLQRTIHTKLTKFRKHHPKSCIQRLTLPRQEGGRGLIDIHNLHNKQITTLRQYFHTKSEHSALHRHASEKDTKLTPLNLHDRQRQTNEKLKDPKQKIATWAGKSLHGRHRSHLCQTYVDKDKSNEWLRKGELFPETEGFMLAIQDEVIATRNYRKHILKDPNQTNDSCRHCNSAPETIQHITSSCRSIVQTDYKHRHDQVASIIHQELAHKYKFIAKKQPYYKYKPDVILEDRNYKIYWDRTILTDRTVHYNRPDITLHDKRNKTVYLIDIAIPNTHNIQTTISDKLTKYQDLAIEIKTQWNTDTVHIVPIVLSATGIIPKTLTNSLKILNMSTNLTYTLQKATVLNTCRITRKFLTSSTITSNAEPSAILG

SEQ ID NO: 31052 - protein, 1378 aa, Mellicta athalia
MEKSCNRRYNLRPLPGGRRGTPGAGAGCHSMRTTGGGGLNRRVPPKQSTTADPIRCPNSSISETSSANNSLNSTPTSSPYRIEMPSRSPTSSPMSEDVVQEAHATQPAPTPGITSARRRWTSQMNEFIWRNYLILTKNETNTRSYLDTLHKKFMAAFPEIDVSRQRIGDQRRAIINNKLLPQSTLDGIRNEISTLIQTGNIETSQTNLTQNTGTRMRWSNELNESILRTYFEVTHIETDMTANRKKLHTKFIEQHPHLSHISEQRLSDQRRAIVNNKMIPQERIEQIRYEVEAQLSRPQQRQDETENLTDYQMTQMMTTPQTETEAPDFPTNVQAPFDTQTHSEEDILPNRNSNNNANKIQEDLAQKIKDQFISATEKFINTDPISRPFIPKQKTSKKLAVIVEYIDSKILPDYLNNEQDFHTLHTIIYIAAYTAAICNGAKINIDRQSGNSYRKTKPSWQKRLEDKIQTLRSQIAHLTQYINGNRSYKVVDSVEQIKSKYQTHAQYENPNTELSHFLDTLKQKLNIVSNRLKRYLACTARKSQNRKFINNEKAFYRNISTPPQERHSTRVETPTPETLKEFWSQIWEQPVEHNENAEWIDKVSRTVENIPEMRFEHIPVDTFKNILKRMHNWKAPGSDNLHAYWYKKFTRTHPHIHNHLNIFIQSTDTMPTFITQGITYMLPKDNHDTQNPAKYRPITCLQIFYKILTGCISELIYQHVAEHNIFSEQQKGCRKFSQGCKEQLTLDAIALNHAYKKKKDIHSMFIDYRKAFDSVPHTWLLKVLQIYKIHPIIISFLQVSMQNWQTKLKINQSLTTEPIHIKRGIFQGDALSPLWFCLALNPLSDLINLSKLGFKLNNEQNSTISHLMYMDDIKLFATNASDLFKLADITQQFSTDINMQFGVDKCKILSVKKGKLIHNSYALNTGETIEPMDEVSTYKYLGFNQAREIQQKQTKIDLTTKFKHRLNLILKSELNSRNIVKAINTFAIPVLTYSFGIINWSQTDLQKLQRTIHTKLTKFRKHHPKSCIQRLTLPRQEGGRGLIDIHNLHNKLITTLRQYFHTKSEHSALHRHASEKDTKLTPLNLHDRQLQTNEKLKDPKQKIATWAGKSLHGRHRSHLCQTYVDKDKSNEWLRKGELFPETEGFMLAIQDEVIATRNYRKHILKDPNQTNDSCRHCNSAPETIQHITSSCRSIVQTDYKHRHDQVASIIHQELAHKYKFIAKKQPYYKYKPDVILEDRNYKIYWDRTILTDRTVHYNRPDITLHDKRNKTVYLIDIAIPNTHNIQTTISDKLTKYQDLAIEIKTQWNTDTVHIVPIVLSATGIIPKTLTNSLKILNMSTNLTYTLQKATVLNTCRITRKFLTSSTITSNAEPSAILG

SEQ ID NO: 31053 - protein, 1348 aa, Mellicta athalia
MRTTDGGGLNRRVPPKQSTTADPIRCPNSSISETSSANNSLNSTPTSSPYRIEMPSRSPTSSPMSEDVVQEAHATQPAPTPGITSARRRWTSQMNEFIWRNYLILTKNETNTRSYLDTLHKKFMAAFPEIDVSRQRIGDQRRAIINNKLLPQSTLDGIRNEISTLIQTGNIETSQTNLTQNTGTRMRWSNELNESILRAYFEVTHIETDMTANRKKLHTKFIEQHPHLSHISEQRLSDQRRAIVNNKMIPQERIEQIRYEVEAQLSRPQQRQDETENLTDYQMTQMMTTPLTETEAPDFPTNVQAPFDTQTHSEEDILPNRNSNNNANKIQEDLAQKIKDQFISATEKFINTDPISRPFIPKQKTSKKLAVIVEYIDSNILPDYLNNEQDFHTLHTIIYIAAYTAAICNGAKINIDRQSGNSYRKTKPSWQKRLEDKIQTLRSQIAHLTQYINGNRSYKVVDSVEQIKSKYQTHAQYENPNTELSHFLDTLKQKLNIVSNRLKRYLACTARKSQNRKFINNEKAFYRDISTPPQERHSTRVETPTPETLKEFWSQIWEQPVEHNENAEWIDKVSRTVENIPEMRFEHIPVDTFKNILKRMHNWKAPGSDNLHAYWYKKFTRTHPHIHNHLNIFIQSTDTMPTFITQGITYMLPKDNHDTQNPAKYRPITCLQIFYKILTGCISELIYQHVAEHNIFSEQQKGCRKFSQGCKEQLTLDAIALNHAYKKKKDIHSMFIDYRKAFDSVPHTWLLKVLQIYKIHPIIISFLQVSMQNWQTKLKINQSLTTEPIHIKRGIFQGDALSPLWFCLALNPLSDLINLSKLGFKLNNEQNSTISHLMYMDDIKLFATNASDLFKLADITQQFSTDINMQFGVDKCKILSVKKGKLVHNSYALNTGETIEPMDEVSTYKYLGFNQARQIQQKQTKIDLTTKFKHRLNLILKSELNSRNIVKAINTFAIPVLTYSFGIINWSQTDLQKLQRTIHTKLTKFRKHHPKSCIQRLTLPRQEGGRGLIDIHNLHNKQITTLRQYFHTKSEHSALHRHASEKDTKLTPLNLHDRQLQTNEKLKDPKQKIATWAGKSLHGRHRSHLCQTYVDKDKSNEWLRKGELFPETEGFMLAIQDEVIATRNYRKHILKDPNQTNDSCRHCNSAPETIQHITSSCRSIVQTDYKHRHDQVASIIHQELAHKYKFIAKKQPYYKYKPDVILEDRNYKIYWDRTILTDRTVHYNRPDITLHDKRNKTVYLIDIAIPNTNNIQTTISDKLTKYQDLAIEIKTQWNTDTVHIVPIVLSATGIIPKTLTNSLKILNMSTNLTYTLQKATVLNTCRITRKFLTSSTITSNAEPSAILG

SEQ ID NO: 31054 - protein, 894 aa, Lymantria monacha
MLKIKEKIYNKYKIFSEIDHDNTVEILSQKVKALAGRIKRYDDINKRKQQNKMFHENQHAFFRSINSNRKAPIEIPSKNDMQQYWTSILEQPISYNKEAGWIKEIEIEAEGIIETDFKEITIEEMKVALRKIHNWKTLGPDKIQNYYLKYLTSIHEPLVSLFNRLIHKTEAIDDWFTTGQVILIPKNYNTQEPNWRPIACLPTMYKLLASVLANELYMHCETNNILAPEQRRCRRHARDCKDHLMINKAILEDAHRTQKNLSMGWVDYRKAFDSISHEWLLKILDIYKCPSTILGFLNLIMPTWRVIMTARGTNSSVTTDPITIRHGIFQGDSLSPLLFCISINPLSLVLNKYINKGYNLKNNTTINHLLYMDDLKVYANNKNGLKVLLDSTEIFTRDIGMEFGLEKCNVLHLSAGRKTEQRGDGHMLLSGLNFEHLKGDENYKYLGINEAGKIDHNEIRDHVKREYFKRIKSITKSQLNARNFIKAINTYAVPVLLYTFGIINYKTSDLNKIDTKTRKLLTIYNAQKQKAEIERLYLPIDEGGIGLINIETLYKTQIIKYRQYLNREQDHILEAIVKHDKHKEKYSIYKEGRSNAISIGLTEDQNYTEEEINKAAIKAVINRWKVKPLHGQFYRSVIEKENVDKKYSFRWLKKQAISPTLESTIFAIQDQAIVTKQIERDIHKQPVSGRCRLCLTKDETIQHIVSGCEKLAGTYYVNRHNNIAKYIWWALGNKHKLETDKLWWKLNLTQPQMKENDEVKLMWEISVQTDLTVTHNRPDIIYVNKVENKTYLIDISIPSDYNIGPKEIEKLSKYHLLRTEISRLWNTQAETIPIVIGATGMVAKSLHRYIHKLEANIDIHITQKQAAIHTTTIISKVLRDTVFLNSRESENPLP

SEQ ID NO: 31055 - protein, 1202 aa, Antheraea pernyi
MPSSVDINDSRRKWSTEEIHELMFCYFKAKAEGVGFIKRLERYFKERNANNPKIHKFTGNTLSNQARSIIKRKWISTQLLQEIQIKAEQSNSETNSNLSDNNTTSITPPSLVNNTQSILTDIPEHTPTENINVSAHIHANQISDNEISEIHSNQHNLDRIETFTTDIHTQDTFAQNTHSLDEPEAIILQFLQVLSETKETDIADRPCLPKPKFNKMFISNLSKIKTYIPNLFDTHNTLRELNNIIYAAAKTLITANGQKPYIPRTTIKPRSDPPWKTRIKNKLEGIRKELGRLVEIKRGVNSRRMMKIKDKLYEKYNIFSDIDHDKTVEILSQRVKALAGRIKRYEDMNKRKEQNKLFHENQHAFYRSLSTNNKSPAEIPTKENIQHFWSSILSQPIPYNKEAIWITDIQNETEDIHKHDFQEITVEKVRAAIRKTHNWKTPGLDKIQNYYLKYLTNTHTHITHLYNKLLDKTETLEEWFTTGQVILIPKSDNTQDPRNWRPIACLPTMYKLLTSILANELYEHCETNDILAPEQRGCRRRARGCKDHLMINKAILEDAHHCQKHLSMGWVDYRKAFDSISHDWLLKVLELYKCSPTIIDFLKMVMTSWKVIMAARGTNASVTTDPITVRRGIFQGDSLSPLLFCLGINPISFLLNKYTEKGYTLKNNTAINHLLYMDDLKLYANNKNSLKVLLDSTEIFTTDIGMEFGLNKCNVLHLISGRRAEHRNEGHILLSGLTFEHLKEDDNYKYLGIDEAGKIDHNRIKDQVKREYYKRIKCITNTHLSARNLITAINTYATPVLLYTFGIINYTTSDLNKIDIKTRKLLTLNKAQQQKADIERLYLPIEEGGRGLTNIEMLHKTQIIKFRQYLNNEQDHIIKAIVKHDKHRDKYSIHKNSKDNAISLGLTEIRNYTDNEIKKAAIETSINKWKMKPLHGQFLRSVIGKSNIDREYSFRWLKKQIVSPTLESSVFAIQDQAVITRQIERDILKKSVDGRCRLCLAKDETIQHIISGCEKLAGTYYVNRHNNIVKYIWWALARKHNFEIDQLWWKVNLTQPQIKENSSAKLMWEIPVQTDVTITHNRPDIIYINKTVNKTYLIDITVPSDYNIGPKEIEKLSKYHPLKVELTRLWNTHAETIPIVIGTTGVVAKSIHRYTDKLEANINIHILQKQAAIHTCTIISKVLANSRPESFREEEVRFPLNL

SEQ ID NO: 31056 - protein, 1413 aa, Spilarctia lutea
MERNNKRKRLMPLPGGDRWGTSGADAGRDSIRTVSGSLLNRRAGAGELENATADLNRDADDTLQNRDVPIGSAGASESTTTSSQNTQDTRRKWSKDEIQELMFCYFKTRAQGVGFIKRLEKLFKERNPDNPKIHKFTGNTLSNQARSIITHNWLSTQQLDHIKQKAEQSNTPADIHIHSDAQHTEIQSTVPNQTDTNTQILVTSAQSVSSARAPETTTTSSQNTNDARRKWSKAEIHELMFCYYKAKSQGAGFIKRLEKLFKERNPDNSKIHKFTGNTLSNQARSIITHNWLSTEVLDLIKQKAEQSNTPADTHIHSDTQNREVQSVVPNQTDTNTQTSGIQHTDYTPHTLSHENFNSSSYSQPTGFETLHHPDLDDLTQDTMQQTHNPYTQNIEDLDPIIIQFLQTLAETKEVPLEHRKFLPKPRFNKTYINNLHKINNYLPIILNTHSTLRELNDTIYAAAKTLITINGQKAYTPPATIKPKREPPWKLRIKKKIEDIRKELGRLIEIKRGANSRKMLNIKNKLYDKYNIFTDLDHDNTVEILNQKVKALAGRIKRYEDMNNRKNQNKMFNENQHSFYRSLNGNLKAPTELPTKEAVQKFWTSILSQPITYNRDARWIADEENKGNTINTHTFEEINLDMVKEALSKTHNWKTPGIDKIQNYYLKYLTKTHSYITQIFNRILNETETIEDWFTTGQVILIPKNENTQDPQNWRPIACLPTLYKLLTSVIANELYIHCENNNIIAPEQRGCRRRARGCKDHLMINKAILEDAHQYQKNLSMGWVDYRKAFDSISHEWLLKVLNMYKCPHIIISFLQKVMPSWKVIMTARGENVSVTTDYIYIRRGIFQGDSLSPLLFCLGINPLSNVLNKYHTKGYTLKDSSVINHLLYMDDLKVYAKNKNSLNILLDSTEIFTRDIGMEFGLNKCNVLHLTAGRMNEYRGEGHILLSGLKFEHLKKDESYKYLGINEAGKIEHNDIREQVKREYFKRIKCITNTHLNARNLIKAINTYAVPVLLYTFGIINYKNTDLNKIDVKTRKLLAINKAHAQKADIERLYLPTEEGGRGLLNIEMLHKTQIIKYKTYLETQKDYILQTIVEHDSHKEKYSIFKETELNLTEIGLRQNTKYTDKELKQAVVKTRLNKIKSKPLHGQFYRSVLEKENIDRIQSFRWIKKQPVSPTLESSIFAIQDQAIVTRQHERDIFKRAVDGKCRLCSVKDETAQHIVSGCEKLAGTYYTKRHNNIVQYIFWSLCKKHKIPVAKLWWLEHLTQPQVKENESAKIMWEIPVQTDVTITHNRPDIVYVNKTENKTYLIDVTVPSDYNIGPKEIEKLSKYHSLKTEISRLWNTHTETIPIVIGTTGVVAKSLHRYINKLDSNINIPIIQKQAAIHSSTILIKVLGDTVFLNSRESEPPFL

SEQ ID NO: 31057 - protein, 878 aa, Bombyx mori
MDHDKTVEVLSQRVKALAGRIKRYEDINKRKEQNKQFRENQHAFYRSLSANKKSPTEIPTKENIQEFWSSILSQPIPYNKQAEWIADIQNETDDIYKHNFQEITVEREKTAIRKTHNWKSPGLDKIQNYYLKYLTNIHPHVTHLYNKLLDGRETLEEWFTTGQVILIPKNDNTQNPQNWRPIACLPTMYKLLTSIIANELYEHCETNDILAPEQRGCRRRARGCKDHLMINKAILEDAHQCQKNLSMGWVDYRKAFDSISHDWLLKVLELYKCSPTIIDFLKKVMPSWKVIMAARGVNASVTTDLIAVRRGIFQGDSLSPLLFCLGINPLSFLLNKYIQKEYKLKNNTAINHLLYMDDLKLYANNKNSLKVLLDSTEIFTRDIGMEFGLNKCNVLHLTSGKRAEHQSEGHILLSGLNFEHLKEDENYKYLGIDEAGKIDHKRIQDQVKREYFKRVKCITNTQLSARNLITAINTYATPVLLYTFGIINYKNSDLNKIDIKTRKILALNKAQQQKADIERLYLPIEEGGRGLINIEMLHKTQIIKFRQYLNNEQDQIIKAIVKHDKHRDKHSIHKDGKNNAVRIELTENRNYTDTEIKKAVIKTGISKWREKPLHGQFRRSVIEKGNIDREYSFRWLKKQIVSPTLESLVFAIQDQAVITRQIERDILKKSVDGKCRLCLAKDESIEHIISGCEKLAGTYYVNRHNNIVKYIWWAIGRKHNFELDSLWWKVNLTQPQIKENSSAKLMWEIPVQTDVTIKHNRPDIIYIDKTENKTYLIDVTIPSDYNIGPKELEKLSKYHPLKVELTRLWNTHTETIPIVIGATGVVAKSIHRYINKLEANINIHIIQKQAAIHTCTIISKVLGNTVFINSRESEPPLP

SEQ ID NO: 31058 - protein, 878 aa, Bombyx mandarina
MDHDKTVEVLSQRVKALAGRIKRYEDINKRKEQNKQFRENQHAFYRSLSANKKSPTEIPTKENIQQFWSSILSQPIPYNKQAEWIADIQNETDDIHKHNFQEITVERVKTAIRKTHNWKTPGLDKIQNYYLKYLTNIHPHITHLYNKLLDGRETLEEWFTTGQVILIPKNDNTQNPQNWRPIACLPTMYKLLTSIIANELYEHCETNDILAPEQRGCRRRARGCKDHLMINKAILEDAHQCQKNLSMGWVDYRKAFDSISHDWLLKVLELYKCSPTIIDFLKKVMPSWKVIMAARGVNSSVTTDLIAVRRGIFQGDSLSPLLFCLGINPLSFLLNKYIQKGYKLKNNTAINHLLYMDDLKLYANNKNSLKVLLDSTEIFTRDIGMEFGLNKCNVLHLTSGRRAEHQSEGHILLSGLNFEHLKEDENYKYLGIDEAGKIDHKRIQDQVKREYFKRVKCITNTQLSARNLITAINTYATPVLLYTFGIINYKNSDLNKIDIKTRKILTLNKAQQQKADIERLYLPIEEGGRGLINIEMLHKTQIIKFRQYLNNEQDQIIKAIVKHDKHRDKHSIHKDGKNNAVRIELTENRNYTDTEIKKAVIKTGISKWKEKPLHGQFRRSVIEKGNIDREYSFRWLKKQIVSPTLESSVFAIQDQAVITRQIERDILKKSVDGKCRLCLAKDESIEHIISGCEKLAGTYYVNRHNNIVKYIWWAIGRKHNFELDSLWWKVNLTQPQIKENSSAKLMWEIPVQTDVTIKHNRPDIIYIDKTENKTYLIDVTVPSDYNIGPKELEKLSKYHPLKVELTRLWNTHTETIPIVIGATGVVAKSIHRYINKLEANINIHIIQKQAAIHTCTIISKVLGNTVFINSRESEPPLP

SEQ ID NO: 31059 - protein, 1281 aa, Eilema depressum
MANPNKMEKRQNSKRIMPLPGGERRGTSGADAGRDSIRTVSGSLLNRRARVGEPEGTTAENDRDADDTLQNRESPASSAGTSDGTTTSSVDTNDARRKWSTEEIHELMFCYFKAKAQGVGFIKRLEKYFKDRNPNNPKIRKFTGNTLSNQARSIITRKWVSTQVLEEIKSKAEQSDELNSQVLSHNSEVTTPTTQSQHITATTQTSFIEYTTQHTSSSPLNTPYCSTNVEETQVTTQSSDMQDTQSTLEEEISNNSTTHPDIEDLDPIILRFLQTLSETKEVPITNRKFLPKPKFNKTFISNLNTINTYLPQLLHTHKSLRDLNDIIYATAKTLIIVNRQKPYTPPSTVKPKQDPPWKLRIKKKLEDIRKELGRLVEIKRGVASRRMMKIKEKLYNKYNIFSDLEHDNTVEILNQKVKALAGRIKRYEDMNNRKNQNRMFHENQHSFYRSLNSNQKSPTEIPTKEATEQFWSSIMSQPISYNKTAGWISDIEDETDNIIEHNFENITIEQVKEALRKVHNWKTPGIDKIQNYYLKYLTSTHQCIADIYNRIINGTETIEDWFTTGQVILIPKNESTQEPQNWRPIACLPTMYKLLTSVIANELYEHCESNTIIAPEQRGCRRRARGCKDHLMVNKAILEDAHHCQKNLCMGWVDYRKAFDSMSHEWLLKVLKLYKCPPLITSFLEIVMPTWKVIMTARGANTSVTTDPIYIRRGIFQGDSLSPLLFCLGINPLSHVLNKYISKGYTLKDSETINHLLYMDDLKVYGKNKNSLKVLLDSTEIFTRDIGMEFGLNKCNILHLTAGRKNEEQGEGHILLSGLKFEHLKKNESYKYLGINEAGQIDHNNIREQVQKEYFRRIKCISNTHLNARNLITAINVYAVPVLLYTFGVVNYKSKDLNRIDVKTRKMLAMNKAQKQKADIERLYLPIEEGGRGLTNIEMLYNTQMIKYRQYLNSGQDDIIKAIVTHDIHKDKYSICQEGRSNAVKIGLVQEENYTDGEIKKAATKTGISKWKAKPLHGQFYRSVMEKENIDRAYSFRWLKKQQVSPSLESTVFAIQDQAIITKQIERDILKKSVDGKCRLCLTKDETTQHIVSGCEKLAGTYYTARHNNIVKYVWWALAKKHKFEVADLWWKEILTQPQIKENDTAKLMWEIPVQTDVTIAHNRPDIIYTDKIENKTYLIDVTVPSDYNIGPKEIEKLSKYHALKVEITRLWNTHTETIPIVIGTTGVVAKSIHRYIDKLNANINIHILQKQAAIHTSTILSKVLGDTVFVNSGESEPPLP

SEQ ID NO: 31060 - protein, 1249 aa, Mamestra brassicae
MENYNDNLRLMPLPGGERRGTSGADAGRDSIRTVSGSSLNRRAGVGESEEITAEIIRDADDTLRDVDGNGPSSPAGASDATTTSSHNGDARRKWSQEELHELMFCYYRAKAGGSGYIKRFEKLFKDRNQHNPKVNRFTGNTLSNQARSIITRKVISTQLLDEIKLKAERSLVQTNTNTSLDDSEPIVTDFHQTPTLDTSTNIISNSNNPNTQISYDVHIIPDTIADLDTLSHNIEVDDNQDPIILQFLQTLAETKEIAITDRKFLPKPKFNKEFINNFNTVNIYIKRLLITNYTLRELNDIIYSVAKTLIIANGQKPYTPPSIIKPKKDPPWKLRIKNKIEEIRKELGRLIEIKRGVNTRRMIQIRDNTYYKYNIFTEQDHDNTVEILNQKIKALAGRIKRYDDINNRKIQNQKFSENQHSFYRSLNGYQQQAPTEIPNKDAIQDFWSSILSQPVSYNKDATWISEIQNEAHNIEEHRFKEIDIEMVKAALRKTHNWKTPGIDKIQNYYLKYLTSTHEHITKLFNRILNKTEPVENWFTTGQVILIPKSENTKEPQNWRPIACLPTMYKLLTSVLSNELYKHCDTNDIIAPEQRGCRRRARGCKDHLMINKAILEDAHQCQKNLSMGWVDYRKAYDSISHEWLLQVLRLYKCSSAIIGFLEMVMPTWNVIMTARGASASITTDPIVICRGIFQGDSLSPLLFCLGINPISTILNKYILKGYKLKSNLSVNHLIYMDDLKVYANNKNNLKILLDSTEIFTRDIGMQFGLNKCNVLHITAGRASEQHGEGHTLLSGLRFKHLKKDETYKYLGINEAGKIDHTRIREQLKKEYFGRIKSIANTQLNARNQIKAINTYAVPVLLYSFGIINYKNSDLKNIDVKTRKILAINKAQKQKADIIRLYLPIEEGGRGLTSIETLHKTQIIKYKQYLQNEQDDIIKIIVRHDRDKDKYSIHKDSRTNAVEIGLQQSNNYTDKEIKTATTQKAIEKWRAKPLHGQFCKAVLEKTNIDKKYSFNWLKKQPVSSSLESSIFAIQDQAVMTKQFERDILKRPVDGKCRICLTKDETTQHIISGCEKLAGTYYTKRHNNIVQYVFWALARKHKFEVASLWWQEALTQPQIKENETAKLMWEIPVQTDVTVTHNRPDIIYVNKTENKTYLIDITVPSDYNIGPKEIEKLSKYHLLKTEITRLWNTPTEVIPVVIGATGIVAKSIHRYCDKLDAGINTHVLQKQAAIHTVTILSKVLGDTVFVTS

SEQ ID NO: 31061 - protein, 895 aa, Spilarctia lutea
MLNIKNKLYDKYNIFTDLDHENTVEILNQKVKALAGRIKRYEDMNNRKNQNKMFNENQHSFYRSLNGNLKAPTELPTKETVQKFWTSILSQPITYNRDARWIADEENKANTINTHTFEDINIDMVKEALSKTHNWKTPGIDKIQNYYLKYLTKTHSYITQIFNRILNETETIEDWFTTGQVILIPKNENTQDPQNWRPIACLPTLYKLLTSVIANELYIHCENNNIIAPEQRGCRRRARGCKDHLMINKAILEDAHQYQKNLSMGWVDYRKAFDSISHEWLLKVLNMYKCPHIIISFLQKVMPSWKVIMTARGENVSVTTDYIYIRRGIFQGDSLSPLLFCLGINPLSNVLNKYHTKGYTLKDSSVINHLLYMDDLKVYAKNKNSLNILLHSTEIFTRDIGMEFGLNKCNVLHLTAGRMNEYRGEGHILLSGLKFEHLKKDESYKYLGINEAGKIEHNDIREQVKREYFRRIKCITNTHLNARNLIKAINTYAVPVLLYTFGIINYKNTDLNKIDVKTRKLLAINKAHAQKADIERLYLPTEEGGRGLLNIEMLHKTQIIKYKTYLETQKDYILQTIVEHDSHKEKYSIFKETELNLTEIGLRQNTKYTDKELKQAVVKTRLNKIKSKPLHGQFYRSVLEKENIDRIQSFRWIKKQPVSPTLESSIFAIQDQAIVTRQHERDIFKRAVDGKCRLCSVKDETAQHIVSGCEKLAGTYYTKRHNNIVQYIFWSLCKKHKIPVAKLWWLEHLTQPQVKENESAKIMWEIPVQTDVTITHNRPDIIYVNKTENKTYLIDVTVPSDYNIGPKEIEKLSKYHSLKTEISRLWNTHTETIPIVIGTTGVVAKSLHRYINKLDSNINIPIIQKQAAIHSSTILIKVLGDTVFLNSRESEPPLL

SEQ ID NO: 31062 - protein, 1279 aa, Bombyx mori
MATPKQMERRNKSKRLMSLPEGDRRGTSGADAGCDSIRTVSGFSLNRRARAGEPERTTADHNRDTDVTLQSGELPTSSAGPLVETMTSSVDTNDSRRKWSTEEIHELMFCYYKAKAEGVGFMKRLEMYFKERNPNNPKIHKFTGNTLSNQARSIINRKWVSTQLLQEIKMKAEQSNRETNSNLPDNNTILVIPSPLVNNTQPTLTTVLEHTPTDNVNVSPYTQANQLLDDEITDIRTDQYTLDKIGTFNIDMHTQQTQSLDEPEAIILQFLQVLSETKETCITDRPCLPKPKFNKTFIANLGKINTYIPNLLDTHNTLRELNNIIYAAAKTLIIANGQKTFTPRTTIKPRSDPPWKRRIKNKLEDIRKELGRLVEIKKGVNSRRLIKIKDKLYEKHKIFSDMDHDKTVEVLSQRVKALAGRIKRYEDINKRKEQNKQFRENQHAFYRSLSANKKSPTEIPTKENIQQFWSSILSQPIPYNKQAEWIADIQNETDDIHKHNFQEITVERVKTAIRKTHNWKTPGLDKIQNYYLKYLTNIHPHITHLYNKLLDGRETLEEWFTTGQVILIPKNDNTQNPQNWRPIACLPTMYKLLTSIIANELYEHCETNDILAPEQRGCRRRARGCKDHLMINKAILEDAHQCQKNLSMGWVDYRKAFDSISHDWLLKVLELYKCSPTIIDFLKKVMPSWKVIMAARGVNSSVTTDLIAVRRGIFQGDSLSPLLFCLGINPLSFLLNKYIQKGYKLKNNTAINHLLYMDDLKLYANNKNSLKVLLDSTEIFTRDIGMEFGLNKCNVLHLTSGRRAEHQSEGHILLSGLNFEHLKEDENYKYLGIDEAGKIDHKRIQDQVKREYFKRVKCITNTQLSARNLITAINTYATPVLLYTFGIINYKNSDLNKIDIKTRKILTLNKAQQQKADIERLYLPIEEGGRGLINIEMLHKTQIIKFRQYLNNEQDQIIKAIVKHDKHRDKHSIHKDGKNNAVRIELTENRNYTDTEIKKAVIKTGISKWKEKPLHGQFRRSVIEKGNIDREYSFRWLKKQIVSPTLESSVFAIQDQAVITRQIERDILKKSVDGKCRLCLAKDESIEHIISGCEKLAGTYYVNRHNNIVKYIWWAIGRKHNFELDSLWWKVNLTQPQIKENSSAKLMWEIPVQTDVTIKHNRPDIIYIDKTENKTYLIDVTVPSDYNIGPKELEKLSKYHPLKVELTRLWSTHTETIPIVIGATGVVAKSIHRYINKLEANINIHIIQKQAAIHTCTIISKVLGNTVFINSRESEPPLP

SEQ ID NO: 31063 - protein, 1365 aa, Spilarctia lutea
MERNNKRKRLMPLPGGDRWGTSGADAGRDSIRTVSGSLLNRRAGAGELENATADLNRDADDTLQNRDVPIGSAGASESTTTSSQNTQDTRRKWSKDEIQELMFCYFKTRAQGVGFIKRLEKLFKERNPDNPKIHKFTGNTLSNQARSIITHNWLSTQQLDHIKQKAEQSNTPADIHIHSDAQHTELQSTVPNQTDTNTQILVTSAQSVSSARAPETTTTSSQNTNDARRKWSKAEIHELMFCYYKAKSQGAGFIKRLEKLFKERNPDNSKIHKFTGNTLSNQARSIITHNWLSTEVLDLIKQKAEQSNTPADTHIHSDTQNREVQSVVPNQTDTNTQTSGTQHTDYTPHTLSHENFNSSSYSQPTGFETLHHPDLDDLTQDTMQQTHNPYTQNIEDLDPIIIQFLQTLAETKEVPLEHRKFLPKPRFNKTYINNLHKINNYLPIILNTHSTLRELNDTIYAAAKTLITINGQKAYTPPATIKPKREPPWKLRIKKKLEDIRKELGRLIEIKRGANSRRMLNIKNKLYDKYNIFTDLDHDNTVEILNQKVKALAGRIKRYEYMNNRKNQNKMFNENQHSFYRSLNGNLKAPTELPTKEAVQKFWTSILSQPITYNRDARWIADEENKANTINTHTFEEINIDMVKEALSKTHNWKTPGIDKIQNYYLKYFTKTHSYITQIFNRILNETETIEDWFTTGQVILIPKNENTQDPQNWRPIACLPTLYKLLTSVIANELYIHCENNNIIAPEQRGCRRRARGCKNHLMINKAILEDAHQYQKNLSMGWVDYRKAFDSISHEWLLKVLNMYKCPHIIISFLQKVMPSWKVIMTARGENVSVTTDYIYIRRGIFQGDSLSPLLFCLGINPLSNVLNKYHTKGYTLKDSSVINHLLYMDDLKVYAKNKNSLNILLDSTEIFTRDIGMEFGLNKCNVLHLTAGRMNEYRGEVHILLSGLKFEHLKKDESYKYLGINEAGKIEHNDIREQVKREYFRRIKCITNTHLNARNLIKAINTYAVPVLLYTFGIINYKNTDLNKIDVKTRKLLAINKAHVQKADIERLYLPTEEGGRGLLNIEMLHKTQIIKYKTYLETQKDYILQTIVEHDSHKEKYSIFKETELNLTEIGLRQNTKYTDKELKQAVVKTRLNKIKSKPLHGQFYRSVLEKENIDRIQSFRWIKKQPVSPTLESSIFAIQDQAIVTRQHERDIFKRAVDGKCRLCSVKDETAQHIVSGCEKLAGTYYTKRHNNIVQYIFWSLCKKHKIPVAKLWWLEHLTQPQVKENESAKIMWEIPVQTDVTITHNRPDIIYVNKTENKTYLIDVTVPSDYNIGPKEIEKLSKYHSLKTEISRLWNTYRNHPNSYRHNRCCSKKFT

SEQ ID NO: 31064 - protein, 1279 aa, Bombyx mori
MSTPKQMERRNKSKRLMSLPEGDRRGTSGADAGCDSIRTVSGFSLNRRARAREPERTTADHNRDTDVTLQSGELPTSSAGPLVETMTSSVDTNDSRRKWSTEEIHELMFCYYKAKAEGVGFMKRLEMYFKERNPNNPKIHKFTGNTLSNQARSIINRKWVSTQLLQEIKMRAEQSNRETNSNLPDNNTILVIPSPLVNNTQPTLTTVLEHTPTDNVNVSPYTQANQLLDDEITDIRTDQYTLDKIGTFNIDMHTQQTQSLDEPEAIILQFLQVLSETKETCITDRPCLPKPKFNKTFIANLGKINTYIPNLLDTHNTLRELNNIIYATAKTLIIANGQKPFTPRTTIKPRSDPPWKRRIKNKLEDIRKELGRLVEIKKGVNSRRLIKIKDKLYEKYKIFSDMDHDKTVEVLSQRVKALAGRIKRYEDINKRKEQNKQFRENQHAFYRSLSANKKSPTEIPTKENIQQFWSSILSQPIPYNKQAEWIADIQNETDDIHKHNFQEITVERVKTAIRKTHNWKTPGLDKIQNYYLKYLTNIHPHITHLYNKLLDGRETLEEWFTTGQVILIPKNDNTQYPQNWRPIACLPTMYKLLTSIIANELYEHCETNDILAPEQRGCRRRARGCKDHLMINKAILEDAHQCQKNLSMGWVDYRKAFDSISHDWLLKVLELYKCSPTIIDFLKKVMPSWKVIMAARGVNASVTTDLIAVRRGIFQGDSLSPLLFCLGINPLSFLLNKYIQKGYKLKNNTAINHLLYMDDLKLYANNKNSLKVLLDSTEIFTRDIGMEFGLNKCNVLHLTSGRRAEHQSEGHILLSGLNFEHLKEDENYKYLGIDEAGKIDHKRIQDQVKREYFKRVKCITNTQLSARNLITAINTYATPVLLYTFGIINYKNSDLNKIDIKTRKILTLNKAQQQKADIERLYLPIEEGGRGLINIEMLHKTQIIKFRQYLNNEQDQIIKAIVKHDKHRDKHSIHKDGKNNAVRIELTENRNYTDTEIKKAVIKTGISKWKEKPLHGQFRRSVIEKGNIDREYSFRWLKKQIVSPTLESSVFAIQDQAVITRQIERDILKKSVDDKCRLCLAKDESIEHIISGCEKLAGTYYVNRHNNIVKYIWWAIGRKHNFELDSLWWKVNLTQPQIKENSSAKLMWEIPVQTDVTIKHNRPDIIYIDKTENKTYLIDITVPSDYNIGPKELEKLSKYHPLKVELTRLWNTHTETIPIVIGATGVVAKSIHRYIDKLEANINIHIIQKQAAIHTCTIISKVLGNTVFINSRESEPPLP

SEQ ID NO: 31065 - protein, 1281 aa, Eilema depressum
MANPNKMEKRQNSKRIMPLPGGERRGTSGADAGRDSIRTVSGSLLNRRARVGEPEGTTAENDRDADDTLQNRESPASSAGTSDGTTTSSVDNNDARRKWSTEEIHELMFCYFKAKAQGVGFIKRLEKYFKDRNPNNPKIRKFTGNTLSNQARSIITRKWVSTQVLEEIKSRAEQSDQLNSQVLSHNSEVTTPTTQSQHITATTQTSFIEYTTQHTSSSSLNTPYCSTNVEETQVTTQSSDMQDTQSTLEEEISSNSTTHPDIEDLDLIILRFLQTLSETKEVPITNRKFLPKPKFNKTFISNLNTINTYLPQLLHTHKSLRDLNDIIYATAKTLIIVNRQKPYTPPSTVKPKQDPPWKLRIKKKLEDIRKELGRLVEIKRGVASRRMIKIKEKLYNKYNIFSDLEHDNTVEILNQKVKALAGRIKRYEDMNNRKNQNRMFHENQHSFYRSLNSNQKSPTEIPTKEATEQFWSSIMSQPISYNKTAGWISDIEDETDNIIEHNFENITIEQVKEALRKVHNWKTPGIDKIQNYYLKYLTSTHQCIADIYNRIINGTETIEDWFTTGQVILIPKSESTQEPQNWRPIACLPTMYKLLTSVIANELYEHCESNTIIAPEQRGCRRRARGCKDHLMVNKAILEDAHHCQKNLCMGWVDYRKAFDSMSHEWLLKVLKLYKCPPLITSFLEIVMPTWKVIMTARGANTSVTTDPIYIRRGIFQGDSLSPLLFCLGINPLSRVLNKYISKGYTLKDSETINHLLYMDDLKVYGKNKNSLKVLLDSTEIFTRDIGMEFGLNKCNILHLTAGRKNEEQGEGHILLSGLKFEHLKKNESYKYLGINEAGQIDHNNIREQVQKEYFRRIKCISNTHLNARNLITAINVYAVPVLLYTFGVVNYKSKDLNRIDVKTRKMLAMNKAQKQKADIERLYLPIEEGGRGLTNIEMLYNTQMIKYRQYLNSGQDDIIKAIVTHDIHKDKYSICQEGRSNAVKIGLVQEENYTDGEIKKAATKTGISKWKAKPLHGQFYRSVMEKENIDRAYSFRWLKKQQVSPSLESTVFAIQDQAIITKQIERDILKKSVDGKCRLCLTKDETTQHIVSGCEKLAGTYYTARHNNIVKYVWWALAKKHKFEVADLWWKEILTQPQIKENDTAKLMWEIPVQTDVTIAHNRPDIIYTDKIENKTYLIDVTVPSDYNIGPKEIEKLSKYHALKVEITRLWNTHTETIPIVIGTTGVVAKSIHRYIDKLNANINIHILQKQAAIHTSTILSKVLGDTVFVNSGESEPPLP

SEQ ID NO: 31066 - protein, 1249 aa, Mamestra brassicae
MENYNDNLRLMPLPGGERRGTSGADAGRDSIRTVSGSSLNRRAGVGESEEITAEIIRDADDTLRDVDGNGPSRPAGASDATTTSSHNGDARRKWSQEELHELMFCYYRAKAGGSGYIKRFEKLFKDRNQHNPKVNRFTGNTLSNQARSIITRKVISTQLLDEIKLKAERSLVQTNTNTSLDDSEPIVTDFHQTPTLDTSTNIISNSNNPNTQISYDVHIIPDTIADLDTLSHNIEVDDNQDPIILQFLQTLAETKEIAITDRKFLPKPKFNKEFINNFNTVNIYIKRLLITNYTLRELNDIIYSVAKTLIIANGQKPYTPPSIIKPKKDPPWKLRIKNKIEEIRKELGRLIEIKRGVNTRRMIQIRDNIYYKYNIFTEQDHDNTVEILNQKIKALAGRIKRYDDINNRKIQNQKFSENQHSFYRSLNGYQQQAPTEIPNKDAIQDFWSSILSQPVSYNKDATWISEIQNEAHNIEEHRFKEIDIEMVKAALRKTHNWKTPGIDKIQNYYLKYLTSTHEHITKLFNRILNKTDPVENWFTTGQVILIPKSENTKEPQNWRPIACLPTMYKLLTSVLSNELYKHCDTNDIIAPEQRGCRRRARGCKDHLMINKAILEDAHQCQKNLSMGWVDYRKAYDSISHEWLLQVLRLYKCSSAIIGFLEMVMPTWNVIMTARGASASVTTDPIVICRGIFQGDSLSPLLFCLGINPISTILNKYILKGYKLKSNLSVNHLIYMDDLKVYANNKNNLKILLDSTEIFTRDIGMQFGLNKCNVLHITAGRASEQHGEGHTLLSGLRFKHLKKDETYKYLGINEAGKIDHTRIREQLKKEYFGRIKSIANTQLNARNQIKAINTYAVPVLLYSFGIINYKNSDLKNIDVKTRKILAINKAQKQKADIIRLYLPIEEGGRGLTSIETLHKTQIIKYKQYLQNEQDDIIKIIVRHDRDKDKYSIHKDSRTNAVEIGLQQSNNYTDKEIKTATTQKAIEKWRAKPLHGQFCKAVLEKTNIDKKYSFNWLKKQPVSSSLESSIFAIQDQAVMTKQFERDILKRPVDGKCRICLTKDETTQHIISGCEKLAGTYYTKRHNNIVQYVFWALARKHKFEVASLWWQEALTQPQIKENETAKLMWEIPVQTDVTVTHNRPDIIYVNKTENKTYLIDITVPSDYNIGPKEIEKLSKYHLLKTEITRLWNTPTEVIPVVIGATGIVAKSIHRYCDKLDAGINIHVLQKQAAIHTVTILSKVLGDTVFVTS

SEQ ID NO: 31067 - protein, 1413 aa, Spilarctia lutea
MERNNKRKRLMPLPGGDRWGTSGADAGRDSIRTVSGSLLNRRAGAGELENATADLNRDADDTLQNRDVPIGSAGASESTTTSSQNTQDTRRKWSKDEIQELMFCYFKTRAQGVGFIKRLEKLFKERNPDNPKIHKFTGNTLSNQARSIITHNWLSTQQLDHIKQKAEQSNTPADIHIHSDAQHTEIQSTVPNQTDTNTQILVTSAQSVSSARAPETTTTSSQNTNDARRKWSKAEIHELMFCYYKAKSQGAGFIKRLEKLFKERNPDNSKIHKFTGNTLSNQARSIITHNWLSTEVLDLIKQKAEQSNTPADTHIHSDTQNREVQSVVPNQTDTNTQTSGTQHTDYTPHTLSHENFNSSSYSQPTGFETLHHPDLDDLTQDTMQQTHNPYTQNIEDLDPIIIQFLQTLAETKEVPLEHRKFLPKPRFNKTYINNLHKINNYLPIILNTHSTLRELNDTIYAAAKTLITINGQKAYTPPATIKPKREPPWKLRIKKKLEDIRKELGRLIEIKRGANSRRMLNIKNKLYDKYNIFTDLDHDNTVEILNQKVKALAGRIKRYEDMNNRKNQNKMFNENQHSFYRSLNGNLKAPTELPTKEAVQKFWTSILSQPITYNRDARWIADEENKANTINTHTFEEINIDMVKEALSKTHNWKTPGIDKIQNYYLKYLTKTHSYITQIFNRILNETETIEDWFTTGQVILIPKNENTQDPQNWRPIACLPTLYKLLTSVIANELYIHCENNNIIAPEQRGCRRRARGCKDHLMINKAILEDAHQYQKNLSMGWVDYRKAFDSISHEWLLKVLNMYKCPHIIISFLQKVMPSWKVIMTARGENVSVTTDYIYIRRGIFQGDSLSPLLFCLGINPLSNVLNKYHTKGYTLKDSSVINHLLYMDDLKVYAKNENSLNILLDSTEIFTRDIGMEFGLNKCNVLHLKAGRMNEYRGEGHILLSGLKFEHLKKDESYKYLGINEAGKIEHNDIREQVKREYFRRIKCITNTHLNARNLIKAINTYAVPVLLYTFGIINYKNIDLNKIDVKTRKLLAINKAHAQKADIERLYLPTEEGGRGLLNIEMLHKTQIIKYKTYLETQKDYILQTIVEHDSHKEKYSIFKETELNLTEIGLRQNTKYTDKELKQAVVKTRLNKIKSKPLHGQFYRSVLEKENIDRIQSFRWIKKQPVSPTLESSIFAIQDQAIVTRQHERDIFKRAVDGKCRLCSVKDETAQHIVSGCEKLAGTYYTKRHNNIVQYIFWSLCKKHKIPVAKLWWLEHLTQPQVKENESAKIMWEIPVQTDVTITHNRPDIIYVNKTENKTYLIDVTVPSDYNIGPKEIEKLSKYHSLKTEISRLWNTHTETIPIVIGTTGVVAKSLHRYINKLDSNINIPIIQKQAAIHSSTILIKVLGDTVFLNSRESEPPLL

SEQ ID NO: 31068 - protein, 1174 aa, Spilarctia lutea
MFCYYKAKSQGAGFIKRLEKLFKERNPDNSKIHKFTGNTLSNQARSIITHNWLSTEGLDLIKQKAEQSNTPADTHIHSDTQNREVQSVVPNQTDTNTQTSGTQHTDYTPHTLSHENFDSSSYSQPTGFETLHHPDLDDLTQDTMQQTHNPYTQNIEDLDPIIIQFLQTLAETKEVPLEHRKFLPKPRFNKTYINNLHKINNYLPIILNTHSTLRELNDTIYAAAKTLITINGQKAYTPPATIKPKREPPWKLRIKKKLEDIRKELGRLIEIKRGANSRRMLNIKNKLYDKYNIFTDLDHDNTVEILNQKVKALAGRIKRYEDMNNRKNQNKMFNENQHSFYRSLNGNLKAPTELPTKEAVQKFWTSILSQPITYNRDARWIADEENKANTINTHTFEEINIDMVKEALSKTHNWKTPGIDKIQNYYLKYLTKTHSYITQIFNRILNETETIEDWFTTGQVILIPKNENTQDPQNWRPIACLPTLYKLLTSVIANELYIHCENNNIIAPEQRGCRRRARGCKDHLMINKAILEDAHQYQKNLSMGWVDYRKAFDSISHEWLLKVLNMYKCPHIIISFLQKVMPNWKVIMTARGENVSVTTDYIYIRRGIFQGDSLSPLLFCLGINPLSNVLNKYHTKGYTLKDSSVINHLLYMDDLKVYAKNKNSLNILLDSTEIFTRDIGMEFGLNKCNVLHLTAGRMNEYRGEGHILLSGLKFEHLKKDESYKYLGINEAGKIEHNDIREQVKREYFKRIKCITNTHLNARNLIKAINTYAVPVLLYTFGIINYKNTDLNKIDVKTRKLLAINKAHAQKADIERLYLPTEEGGRGLLNIEMLHKTQIIKYKTYLETQKDYILQTIVEHDSHKEKYSIFKETELNLTEIGLRQNTKYTDKELKQAVVKTRLNKIKSKPLHGQFYRSVLEKENIDRIQSFRWIKKQPVSPTLESSIFAIQDQAIVTRQHERDIFKRAVDGKCRLCSVKDETAQHIVSGCEKLAGTYYTKRHNNIVQYIFWSLCKKHKIPVAKLWWLEHLTQPQVKENESAKIMWEIPVQTDVTITHNRPDIIYVNKTENKTYLIDVTVPSDYNIGPKEIEKLSKYHSLKTEISRLWNTHTETIPIVIGTTGVVAKSLHRYINKLDSNINIPIIQKQAAIHSSTILIKVLGDTVFLNSRESEPPLL

SEQ ID NO: 31069 - protein, 1279 aa, Bombyx mori
MATPKQMERRNKSKRLMSLPEGDRRGTSGADAGCDSIRTVSGFSLNRRARAGEPERTTADHNRDTDVTLQSGDLPTSSAGSLVETMTSSVDTNDSRRKWSTEEIHELMFCYYKAKAEGVGFMKRLEMYFKERNPNNPKIHKFTGNTLSNQARSIINRKWVSTQLLQEIKMRAEQSNRETNSNLPDNNTILVIPSPLVNNTQPTLTTVLEHTPTDNVNVSPYTQANQLLDDEITDIRTDQYTLDKIGTFNIDMHTQQTQSLDEPEAIILQFLQVLSETKETCITDRPCLPKPKFNKTFIANLGKINTYIPNLLDTHNTLRELNNIIYATAKTLIIANGQKPFTPRTTIKPRSDPPWKRRIKNKLEDIRKELGRLVEIKKGVNSRRLIKIKDKLYEKYKIFSDMDHDKTVEVLSQRVKALAGRIKRYEDINKRKEQNKQFRENQHAFYRSLSANKKSPTEIPTKENIQQFWSSILSQPIPYNKQAEWIADIQNETDDIHKHNFQEITVERVKTAIRKTHNWKTPGLDKIQNYYLKYLTNIHLHITHLYNKLLDGRETLEEWFTTGQVILIPKNDNTQYPQNWRPIACLPTMYKLLTSIIANELYEHCETNDILAPEQRGCRRRARGCKDHLMINKAILEDAHQCQKNLSMGWVDYRKAFDSISHDWLLKVLELYKCSPTIIDFLKKVMPSWKVIMAARGVNASVTTDLIAVRRGIFQGDSLSPLLFCLGINPLSFLLHKYIQKGYKLKNNTAINHLLYMDDLKLYANNKNSLKVLLDSTEIFTRDIGMEFGLNKCNVLHLTSGRRAEHQSEGHILLSGLNFEHLKEDESYKYLGIDEAGKIDHKRIQDQVKREYFKRVKCITNTQLSARNLITAINTYATPVLLYTFGIINYKNSDLNKIDIKTRKILTLNKAQQQKADIERLYLPIEEGGRGLINIEMLHKTQIIKFRQYLNNEQDQIIKAIVKHDKHRDKHSIHKDGKNNAVRIELTENRNYTDTEIKKAVIKTGISKWKEKPLHGQFRRSVIEKGNIDREYSFRWLKKQIVSPTLESSVFAIQDQAVITRQIERDILKKSVDGKCRLCLAKDESIEHIISGCEKLAGTYYVNRHNNIVKYIWWAIGRKHNFELDSLWWKVNLTQPQIKENSSARLMWEIPVQTDVTIKHNRPDIIYIDKTENKTYLIDITVPSDYNIGPKELEKLSKYHPLKVELTRLWNTHTETIPIVIGATGVVAKSIHRYIDKLEANINIHIIQKQAAIHTCTIISKVLGNTVFINSRESEPPLP

SEQ ID NO: 31070 - protein, 895 aa, Spilarctia lutea
MLNIKNKLYDKYNIFTDLDHDNTVEILNQKVKALAGRIKRYEDMNNRKNQNKMFNENQHSFYRSLNGNLKAPTELPTKEAVQKFWTSILSQPITYNRDARWIADEENKGNTINTHTFEEINLDMVKEALSKTHNWKTPGIDKIQNYYLKYLTKTHSYITQIFNRILNETETIEDWFTTGQVILIPKNENTQDPQNWRPIACLPTLYKLLTSVIANELYIHCENNNIIAPEQRGCRRRARGCKDHLMINKAILEDAHQYQKNLSMGWVDYRKAFDSISHEWLLKVLNMYKCPHIIISFLQKVMPSWKVIMTARGENVSVTTDYIYIRRGIFQGDSLSPLLFCLGINPLSNVLNKYHTKGYTLKDSSVINHLLYMDDLKVYAKNKNSLNILLDSTEIFTRDIGMEFGLNKCNVLHLTAGRMNEYRGEGHILLSGLKFEHLKKDESYKYLGINEAGKIEHNDIREQVKREYFKRIKCITNTHLNARNLIKAINTYAVPVLLYTFGIINYKNTDLNKIDVKTRKLLAINKAHAQKADIERLYLPTEEGGRGLLNIEMLHKTQIIKYKTYLETQKDYILQTIVEHDSHKEKYSIFKETELNLTEIGLRQNTKYTDKELKQAVVKTRLNKIKSKPLHGQFYRSVLEKENIDRIQSFRWIKKQPVSPTLESSIFAIQDQAIVTRQHERDIFKRAVDGKCRLCSVKDETAQHIVSGCEKLAGTYYTKRHNNIVQYIFWSLCKKHKIPVAKLWWLEHLTQPQVKENESAKIMWEIPVQTDVTITHNRPDIVYVNKTENKTYLIDVTVPSDYNIGPKEIEKLSKYHSLKTEISRLWNTHTETIPIVIGTTGVVAKSLHRYINKLDSNINIPIIQKQAAIHSSTILIKVLGDTVFLNSRESEPPFL

SEQ ID NO: 31071 - protein, 852 aa, Spilarctia lutea
MNNRKNQNKMFNENQHSFYRSLNGNLKAPTELPTKEAVQKFWTSILSQPITYNRDARWIADEENKANTINTHTFEEINIDMVKEALSKTHNWKTPGIDKIQNYYLKYLTKTHSYITQIFNRILNETETIEDWFTTGQVILIPKNENTQDPQNWRPIACLPTLYKLLTSVIANELYIHCENNNIIAPEQRGCRRRARGCKDHVMINKAILEDAHQYQKNLSMGWVDYRKAFDSISHEWLLKVLNMYKCPHIIISFLQKVMPSWKVIMTARGENVSVTTDYIYIRRGIFQGDSLSPLLFCLGINPLSNVLNKYHTKGYTLKDSSVINHLLYMDDLKVYAKNKNSLNILLDSTEIFTRDIGMEFGLNKCNVLHLTAGIMNEYQGEGHILLSGLKFEHLKKDESYKYLGINEAGKIEHNDIREQVKREYFRRIKCITNTHLNARNLIKAINTYAVPVLLYTFGIINYKNIDLNKIDVKTRKLLAINKAHAQKADIERLYLPTEEGGRGLLNIEMLHKTQIIKYKTYLETQKDYILQTIVEHDSHKEKYSIFKETELNLTEIGLRQNTKYTDKELKQAVVKTRLNKIKSKPLHGQFYRSVLEKENIDRIQSFRWIKKQPVSPTLESSIFAIQDQAIVTRQHERDIFKRAVDGKCRLCSVKDETAQHIVSGCEKLAGTYYTKRHNNIVQYIFWSLCKKHKIPVAKLWWLEHLTQPQVKENESAKIMWEIPVQTDVTITHNRPDIIYVNKTENKTYLIDVTVPSDYNIGPKEIEKLSKYHSLKTEISRLWNTHTETIPIVIGTTGVVAKSLHRYINKLDSNINIPIIQKQAAIHSSTILIKVLGDTVFLNSRESEPPLL

SEQ ID NO: 31072 - protein, 1249 aa, Mamestra brassicae
MENYNDNLRLMPLPGGERRGTSGADAGRDSIRTVSGSSLNRRAGVGESEEITAEIIRDADDTLRDVDGNGPSSPAGASDATTTSSHNGDARRKWSQEELHELMFCYYRAKAGGSGYIKRFEKLFKDRNQHNPKVNRFTGNTLSNQARSIITRKVISTQLLDEIKLKAERSLVQTNTNTSLDDSEPIVTDFHQTPTLDTSTNIISNSNNPNTQISYDVHIIPDTIADLDTLSHNIEVDDNQDPIILQFLQTLAETKEIAITDRKFLPKPKFNKEFINNFNTVNIYIKRLLITNYTLRELNDIIYSVAKTLIIANGQKPYTPPSIIKPKKDPPWKLRIKNKIEEIRKELGRLIEIKRGVNTRRMIQIRDNTYYKYNIFTEQDHDNTVEILNQKIKALAGRIKRYDDINNRKIQNQKFSENQHSFYRSLNGYQQQAPTEIPNKDAIQDFWSSILSQPVSYNKDATWISEIQNEAHNIEEHRFKEIDIEMVKAALRKTHNWKTPGIDKIQNYYLKYLTSTHEHITKLFNRILNKTEPVENWFTTGQVILIPKSENTKEPQNWRPIACLPTMYKLLTSVLSNELYKHCDTNDIIAPEQRGCRRRARGCKDHLMINKAILEDAHQCQKNLSMGWVDYRKAYDSISHEWLLQVLRLYKCSSAIIGFLEMVMPTWNVIMTARGASASVTTDPIVICRGIFQGDSLSPLLFCLGINPISTILNKYILKGYKLKSNLSVNHLIYMDDLKVYANNKNNLKILLDSTEIFTRDIGMQFGLNKCNVLHITAGRASEQHGEGHTLLSGLRFKHLKKDETYKYLGINEAGKIDHTRIREQLKKEYFGRIKSIANTQLNARNQIKAINTYAVPVLLYSFGIINYKNSDLKNIDVKTRKILAINKAQKQKADIIRLYLPIEEGGRGLTSIETLHKTQIIKYKQYLQNEQDDIIKIIVRHDRDKDKYSIHKDSRTNAVEIGLQQSNNYTDKEIKTATTQKAIEKWRAKPLHGQFCKAVLEKTNIDKKYSFNWLKKQPVSSSLESSIFAIQDQAVMTKQFERDILKRPVDGKCRICLTKDETTQHIISGCEKLAGTYYTKRHNNIVQYVFWALARKHKFEVASLWWQEALTQPQIKENETAKFMWEIPVQTDVTVTHNRPDIIYVNKTENKTYLIDITVPSDYNIGPKEIEKLSKYHLLKTEITRLWNTPTEVIPVVIGATGIVAKSIHRYCDKLDAGINTHVLQKQAAIHTVTILSKVLGDTVFVTS

SEQ ID NO: 31073 - protein, 1413 aa, Spilarctia lutea
MERNNKRKRLMPLPGGDRWGTSGADAGRDSIRTVSGSLLNRRAGAGELENATADLNRDADDTLQNRDVPIGSAGASESTTTSSQNTQDTRRKWSKDEIQELMFCYFKTRAQGVGFIKRLEKLFKERNPDNPKIHKFTGNTLSNQARSIITHNWLSTQQLDHIKQKAEQSNTPADIHIHSDAQHTEIQSTVPNQTDTNTQILVTSAQSVSSARAPETTTTSSQNTNDARRKWSKAEIHELMFCYYKAKSQGAGFIKRLEKLFKERNPDNSKIHKFTGNTLSNQARSIITHNWLSTEVLDLIKQKAEQSNTPADTHIHSDTQNREVQSVVPNQTDTNTQTSGIQHTDYTPHTLSHENFNSSSYSQPTGFETLHHPDLDDLTQDTMQQTHNPYTQNIEDLDPIIIQFLQTLAETKEVPLEHRKFLPKPRFNKTYINNLHKINNYLPIILNTHSTLRELNDTIYAAAKTLITINGQKAYTPPATIKPKREPPWKLRIKKKIEDIRKELGRLIEIKRGANSRRMLNIKNKLYDKYNIFTDLDHDNTVEILNQKVKALAGRIKRYEDMNNRKNQNKMFNENQHSFYRSLNGNLKAPTELPTKEAVQKFWTSILSQPITYNRDARWIADEENKGNTINTHTFEEINLDMVKEALSKTHNWKTPGIDKIQNYYLKYLTKTHSYITQIFNRILNETETIEDWFTTGQVILIPKNENTQDPQNWRPIACLPTLYKLLTSVIANELYIHCENNNIIAPEQRGCRRRARGCKDHLMINKAILEDAHQYQKNLSMGWVDYRKAFDSISHEWLLKVLNMYKCPHIIISFLQKVMPSWKVIMTARGENVSVTTDYIYIRRGIFQGDSLSPLLFCLGINPLSNVLNKYHTKGYTLKDSSVINHLLYMDDLKVYAKNKNSLNILLDSTEIFTRDIGMEFGLNKCNVLHLTAGRMNEYRGEGHILLSGLKFEHLKKDESYKYLGINEAGKIEHNDIREQVKREYFKRIKCITNTHLNARNLIKAINTYAVPVLLYTFGIINYKNTDLNKIDVKTRKLLAINKAHAQKADIERLYLPTEEGGRGLLNIEMLHKTQIIKYKTYLETQKDYILQTIVEHDSHKEKYSIFKETELNLTEIGLRQNTKYTDKELKQAVVKTRLNKIKSKPLHGQFYRSVLEKENIDRIQSFRWIKKQPVSPTLESSIFAIQDQAIVTRQHERDIFKRAVDGKCRLCSVKDETAQHIVSGCEKLAGTYYTKRHNNIVQYIFWSLCKKHKIPVAKLWWLEHLTQPQVKENESAKIMWEIPVQTDVTITHNRPDIVYVNKTENKTYLIDVTVPSDYNIGPKEIEKLSKYHSLKTEISRLWNTHTETIPIVIGTTGVVAKSLHRYINKLDSNINIPIIQKQAAIHSSTILIKVLGDTVFLNSRESEPPFL

SEQ ID NO: 31074 - protein, 1279 aa, Bombyx mori
MATPKQMERRNKSKRLMSLPEGDRRGTSGADAGCDSIRTVSGFSLNRRARAGEPERTTADHNRDTDVTLQSGELPTSSAGPLVETMTSSVDTNDSRRKWSTEEIHELMFCYYKAKAEGVGFMKRLEMYFKERNPNNPKIHKFTGNTLSNQARSIINRKWVSTQLLQEIKMRAEQSNRETNSNLPDNNTILVIPSPLVNNTQPTLTTVLEHTPTDNVNVSPYTQANQLLDDEITDIRTDQYTLDKIGTFNIDMHTQQTQSLDEPEAIILQFLQVLSETKETCITDRPCLPKPKFNKTFIANLGKINTYIPNLLDTHNTLRELNNIIYAAAKTLIIANGQKPFTPRTTIKPRSDPPWKRRIKNKLEDIRKELGRLVEIKKGVNSRRLIKIKDKLYEKHKIFSDMDHDKTVEVLSQRVKALAGRIKRYEDINKRKEQNKQFRENQHAFYRSLSANKKSPTEIPTKENIQQFWSSILSQPIPYNKQAEWIADIQNETDDIHKHNFQEITVERVKTAIRKTHNWKTPGLDKIQNYYLKYLTNIHPHITHLYNKLLDGRETLEEWFTTGQVILIPKNDNTQNPQNWRPIACLPTMYKLLTSIIANELYEHCETNDILAPEQRGCRRRARGCKDHLMINKAILEDAHQCQKNLSMGWVDYRKAFDSISHDWLLKVLELYKCSPTIIDFLKKVMPSWKVIMAARGVNSSVTTDLIAVRRGIFQGDSLSPLLFCLGINPLSFLLNKYIQKGYKLKNNTAINHLLYMDDLKLYANNKNSLKVLLDSTEIFTRDIGMEFGLNKCNVLHLTSGRRAEHQSEGHILLSGLNFEHLKEDENYKYLGIDEAGKIDHKRIQDQVKREYFKRVKCITNTQLSARNLITAINTYATPVLLYTFGIINYKNSDLNKIDIKTRKILTLNKAQQQKADIERLYLPIEEGGRGLINIEMLHKTQIIKFRQYLNNEQDQIIKAIVKHDKHRDKHSIHKDGKNNAVRIELTENRNYTDTEIKKAVIKTGISKWKEKPLHGQFRRSVIEKGNIDREYSFRWLKKQIVSPTLESSVFAIQDQAVITRQIERDILKKSVDGKCRLCLAKDESIEHIISGCEKLAGTYYVNRHNNIVKYIWWAIGRKHNFELDSLWWKVNLTQPQIKENSSAKLMWEIPVQTDVTIKHNRPDIIYIDKTENKTYLIDVTVPSDYNIGPKELEKLSKYHPLKVELTRLWNTHTETIPIVIGATGVVAKSIHRYINKLEANINIHIIQKQAAIHTCTIISKVLGNTVFINSRESEPPLP

SEQ ID NO: 31075 - protein, 1249 aa, Mamestra brassicae
MENYNDNLRLMPLPGGERRGTSGADAGRDSIRTVSGSSLNRRAGVGESEEITAEIIRDADDTLRDVDGNGPSSPAGASDATTTSSHNGDARRKWSQEELHELMFCYYRAKAGGSGYIKRFEKLFKDRNQHNPKVNRFTGNTLSNQARSIITRKVISTQLLDEIKLKAERSLVQTNTNTSLDDSEPIVTDFHQTPTLDTSTNIISNSNNPNTQISYDVHIIPDTIADLDTLSHNIEVDDNQDPIILQFLQTLAETKEIAITDRKFLPKPKFNKEFINNFNTVNIYIKRLLITNYTLRELNDIIYSVAKTLIIANGQKPYTPPSIIKPKKDPPWKLRIKNKIEEIRKELGRLIEIKRGVNTRRMIQIRDNTYYKYNIFTEQDHDNTVEILNQKIKALAGRIKRYDDINNRKIQNQKFSENQHSFYRSLNGYQQQAPTEIPNKDAIQDFWSSILSQPVSYNKDATWISEIQNEAHNIEEHRFKEIDIEMVKAALRKTHNWKTPGIDKIQNYYLKYLTSTHENITKLFNRILNKTEPVENWFTTGQVILIPKSENTKEPQNWRPIACLPTMYKLLTSVLSNELYKHCDTNDIIAPEQRGCRRRARGCKDHLMINKAILEDAHQCQKNLSMGWVDYRKAYDSISHEWLLQVLRLYKCSSAIIGFLEMVMPTWNVIMTARGASASVTTDPIVICRGIFQGDSLSPLLFCLGINPISTILNKYILKGYKLKSNLSVNHLIYMDDLKVYANNKNNLKILLDSTEIFTRDIGMQFGLNKCNVLHITAGRASEQHGEGHTLLSGLRFKHLKKDETYKYLGINEAGKIDHTRIREQLKKEYFGRIKSIANTQLNARNQIKAINTYAVPVLLYSFGIINYKNSDLKNIDVKTRKILAINKAQKQKADIIRLYLPIEEGGRGLTSIETLHKTQIIKYKQYLQNEQDDIIKIIVRHDRDKDKYSIHKDSRTNAVEIGLQQSNNYTDKEIKTATTQKAIEKWRAKPLHGQFCKAVLEKTNIDKKYSFNWLKKQPVSSSLESSIFAIQDQAVMTKQFERDILKRPVDGKCRICLTKDETTQHIISGCEKLAGTYYTKRHNNIVQYVFWALARKHKFEVASLWWQEALTQPQIKENETAKLMWEIPVQTDVTVTHNRPDIIYVNKTENKTYLIDITVPSDYNIGPKEIEKLSKYHLLKTEITRLWNTPTEVIPVVIGATGIVAKSIHRYCDKLDAGINTHVLQKQAAIHTVTILSKVLGDTVFVTS

SEQ ID NO: 31076 - protein, 1249 aa, Mamestra brassicae
MENYNDNLRLMPLPGGERRGTSGADAGRDSIRTVSGSSLNRRAGVGESEEITAEIIRDADDTLRDVDGNGPSSPAGASDATTTSSHNGDARRKWSQEELHELMFCYYRAKAGGSGYIKRFEKLFKDRNQHNPKVNRFTGNTLSNQARSIITRKVISTQLLDEIKLKAERSLVQTNTNTSLDDSEPIVTDFHQTPTLDTSTNIISNSNNPNTQISYDVHIIPDTIADLDTLSHNIEVDDNQDPIILQFLQTLAETKEIAITDRKFLPKPKFNKEFINNFNTVNIYIKRLLITNYTLRELNDIIYSVAKTLIIANGQKPYTPPSIIKPKKDPPWKLRIKNKIEEIRKELGRLIEIKRGVNTRRMIQIRDNIYYKYNIFTEQDHDNTVEILNQKIKALAGRIKRYDDINNRKIQNQKFSENQHSFYRSLNGYQQQAPTEIPNKDAIQDFWSSILSQPVSYNKDATWISEIQNEAHNIEEHRFKEIDIEMVKAALRKTHNWKTPGIDKIQNYYLKYLTSTHEHITKLFNRILNKTDPVENWFTTGQVILIPKSENTKEPQNWRPIACLPTMYKLLTSVLSNELYKHCDTNDIIAPEQRGCRRRARGCKDHLMINKAILEDAHQCQKNLSMGWVDYRKAYDSISHEWLLQVLRLYKCSSAIIGFLEMVMPTWNVIMTARGASASVTTDPIVICRGIFQGDSLSPLLFCLGINPISTILNKYILKGYKLKSNLSVNHLIYMDDLKVYANNKNNLKILLDSTEIFTRDIGMQFGLNKCNVLHITAGRASEQHGEGHTLLSGLRFKHLKKDETYKYLGINEAGKIDHTRIREQLKKEYFGRIKSIANTQLNARNQIKAINTYAVPVLLYSFGIINYKNSDLKNIDVKTRKILAINKAQKQKADIIRLYLPIEEGGRGLTSIETLHKTQIIKYKQYLQNEQDDIIKIIVRHDRDKDKYSIHKDSRTNAVEIGLQQSNNYTDKEIKTATTQKAIEKWRAKPLHGQFCKAVLEKTNIDKKYSFNWLKKQPVSSSLESSIFAIQDQAVMTKQFERDILKRPVDGKCRICLTKDETTQHIISGCEKLAGTYYTKRHNNIVQYVFWALARKHKFEVASLWWQEALTQPQIKENETAKLMWEIPVQTDVTVTHNRPDIIYVNKTENKTYLIDITVPSDYNIGPKEIEKLSKYHLLKTEITRLWNTPTEVIPVVIGATGIVAKSIHRYCDKLDAGINTHVLQKQAAIHTVTILSKVLGDTVFVTS

SEQ ID NO: 31077 - protein, 1079 aa, Mamestra configurata
MENYNDNLRLMPLPGGERRGTSGADAGRDSMRTVSGSSLNRRTGVGESEEITAEIIRDADDTLRDVDGNGPSSPAGASDATTTSSHNGDARRKWSEEELHELMFCYYRAKAGGSGYIKRFEKLFKDRNQHNPKVNRFTGNTLSNQARSIITRKVISTQLLDEIKLKAERSLVQTNTNTSLDDSEPIVTDFHQTPTLDTSTNIISNPNNPNTQISYDMHIIPDSIADLDTLYQNIEVDDNQDPIILQFLQNLAETKEIAITDRKFLPKPKFNKKIINNFNTVNIYIKRLLITNNTLRELNDIIYSLAKTLIIANGQKPYTPPRKTHNWKTPGIDKIQNYYLKYLTSTHEHITKLFNRILNKTDPVENWFTTGQVILIPKSENTKEPQNWRPIECLPTVFKLLTSVLSNELYKHCDTNDIIAPEQRGCRRRARGCKDHLMINKAILEDAHQCQKNLSMGWVDYRKAFDSISHEWLLQVLRLYKCSSAIIGFLEMVMPTWNVIMTARGASASVTTDPIVICRGIFQGDSLSPLLFCLGINPISTILNKYILKGYKLKSNLSVNHLIYMDDLKVYANNKNNLKILLDSTEIFTRDIGMQFGLNKCNVLHITAGRASEQHGEGHTLLSGLRFKHLKKDETYKYLGINEAGKIDHTRIREQLKKEYFGRIKSIANTQLNARNQIKAINTYAVPVLLYSFGIINYKNSDLKNIDVKTRKILAINKAQKQKADIIRLYLPIEEGGRGLTSIETLHKSQIIKYKQYLQNEQDDIIKIIVRHDRDKDKYSIHKDSRTNAVEIGLQQSNNYTDKEIKTATTQKAIEKWRAKPLHGQFCKAVLEKTNIDKKYSFNWLKKQPVSSSLESSIFAIQDQAVMTKQFERDILKRPVDGKCRLCLTKDETTQHIISVCEKLAGTYYTKRHNNIVQYVFWALARKHKFEVASLWWQEALTQPQIKENEIAKLMWEIPVQTDVTVTHNIPDIIYVDKTENKTYLIDITVPSDYNIGPKEIEKLSKYHLLKTEITRLWNTPTEVIPVVIGATGIVAKSIHRYCDKIDAGINIHVLQKQAAVHTVTILSKVLGDTVFVTN

SEQ ID NO: 31078 - protein, 1091 aa, Spilarctia lutea
MHKIGKYNQSYRIKQISVTQHTNSTPHTLSHENFNSFSYSQPTGFETLHHPDLDDLTQDTMQQTHNPYTQNTEDLDPIIIQFLQTLAETKEVPLEHRKFLPKPRFNKTYINNLHKINNYLPIILNTHSTLRELNDTIYAASKALITINGQKAFTPPATIKPKQEPPWKLRIKKKLEDIRKELGRLIEIKRGANSRRMLNIKDKLYDKYNIFTDLDHDNTVEILNQKVKALAGRIKRYEDMNNRKNQNKMFNENQHSFYRSLNGNLKAPTELPTKEAVQKFWTSILSQPITYNRDARWIADEENKANTINTHTFEEINIDMVKEALSKTHNWKTPGIDKIQNYYLKYLTKTHSYITQIFNRILNETETIEDWFTTGQVILIPKNENTQDPQNWRPIACLPTLYKLLTSVIANELYIHCENNNIIAPEQRGCRRRARGCKDHLMINKAILEDAHQYQKNLSMGWVDYRKAFDSISHEWLLKVLNMYKCPHIIISFLQKVMPSWKVIMTARGKNVSVTTDYIYIRRGIFQGDSLSPLLFCLGINPLSNVLNKYHTKGYTLKDSSVINHLLYMDDLKVYAKNKNSLNILLDSTEIFTRDIGMEFGLNKCNVLHLTAGRMNEYRGEGHILLSGLKFEHLKKDESYKYLGINEAGKIEHNDIREQVKREYFRRIKCITNTHLNARNLIKAINTYAVPVLLYTFGIINYKNIDLNKIDVKTRKLLAINKAHAQKADIERLYLPTEEGGRGLLNIEMLHKTQIIKYKTYLETQKDYILQTIVEHDSHKQKYSIFKETELNLTEIGLRQNTKYTDKELKQAVVKTRLNKIKSKPLHGQFYRSVLEKENIDRIQSFRWIKKQPVSPTLESSIFAIQDQAIVTRQHERDIFKRAVDGKCRLCSVKDETAQHIVSGCEKLAGTYYTKRHNNIVQYIFWSLCKKHKIPVAKLWWLEHLTQPQVKENESAKIMWEIPVQTDVTITHNRPDIIYVNKTENKTYLIDVTVPSDYNIGPKEIEKLSKYHSLKTEISRLWNTHTETIPIVIGTTGVVAKSLHRYINKLDSNINIPIIQKQAAIHSSTILIKVLGDTVFLNSRESEPPLL

SEQ ID NO: 31079 - protein, 1413 aa, Spilarctia lutea
MERNNKRKRLMPLPGGDRWGTSGADAGRDSIRTVSGSLLNRRAGAGELENATADLNRDADDTLQNRDVPIGSAGASESTTTSSQNTQDTRRKWSKDEIQELMFCYFKTRAQGVGFIKRLEKLFKERNPDNPKIHKFTGNTLSNQARSIITHNWLSTQQLDHIKQKAEQSNSPADIHIHSDAQHTEIQSTVPNQTDTNTQILVTSAQSVSSARAPETTTTSSQNTNDARRKWSKAEIHELMFCYYKAKSQGAGFIKRLEKLFKERNPDNSKIHKFTGNTLSNQARSIITHNWLSTEVLDLIKQKAEQSNTPADTHIHSDTQNREVQSVVPNQTDTNTQTSGTQHTDYTPHTLSHENFNSSSYSQPTGFETLHHPDLDDLMQDTMQQTHNPYTQNIEDLDPIIIQFLQTLAETKEVPLEHRKFLPKPRFNKTYINNLHKINNYLPIILNTHSTLRELNDTIYAAAKTLITINGQKAYTPPATIKPKREPPWKLRIKKKLEDIRKELGRLIEMKRGANSRRMLNIKNKLYDKYNIFTDLDHDNTVEILNQKVKALAGRIKRYEDMNNRKNQNKMFNENQHSFYRSLNGNLKAPTELPTKEAVQKFWTSILSQPITYNRDARWIADEENKANTINTHTFEEINIDMVKEALSKTHNWKTPGIDKIQNYYLKYLTKTHSYITQIFNRILNETETIEDWFTTGQVILIPKNENTQDPQNWRPIACLPTLYKLLTSVIANELYIHCENNNIIAPEQRGCRRRARGCKDHLMINKAILEDAHQYQKNLSMGWVDYRKAFDSISHEWLLKVLNMYKCPHIIISFLQKVMPSWKVIMTARGENVSVTTDYIYIRRGIFQGDSLSPLLFCLGINPLSNVLNKYHTKGYTLKDSSVINHLLYMDDLKVYAKNKNSLNILLDSTEIFTRDIGMEFGLNKCNVLHLTAGRMNEYRGEGHILLSGLKFEHLKKDESYKYLGINEAGKIEHNDIREQVKREYFRRIKCITNTHLNARNLIKAINTYAVPVLLYTFGIINYKNIDLNKIDVKTRKLLAINKAHAQKADIERLYLPTEEGGRGLLNIEMLHKTQIIKYKTYLETQKDYILQTIVEHDSHKEKYSIFKETELNLTEIGLRQNTKYTDKELKQAVVKTRLNKIKSKPLHGQFYRSVLEKENIDRIQSFRWIKKQPVSPTLESSIFAIQDQAIVTRQHERDIFKRAVDGKCRLCSVKDETAQHIVSGCEKLAGTYYTKRHNNIVQYIFWSLCKKHKIPVAKLWWLEHLTQPQVKENESAKIMWEIPVQTDVTITHNRPDIIYVNKTENKTYLIDVTVPSDYNIGPKEIEKLSKYHSLKTEISRLWNTHTETIPIVIGTTGVVAKSLHRYINKLDSNINIPIIQKQAAIHSSTILIKVLGDTVFLNSRESEPPFL

SEQ ID NO: 31080 - protein, 895 aa, Spilarctia lutea
MLNIKNKLYDKYNIFTDLDHDNTVEILNQKVKALAGRIKRYEDMNNRKNQNKMFNENQHSFYRSLNGNLKAPTELPTKEAVQKFWTSILSQPITYNRDARWIADEENKANTINTHTFEEINIDMVKEALSKTHNWKTPGIDKIQNYYLKYLTKTHSYITQIFNRILNETETIEDWFTTGQVILIPKNENTQDPQNWRPIACLPTLYKLLTSVIANELYIHCENNNIIAPEQRGCRRRARGCKDHLMINKAILEDAHQYQKNLSMGWVDYRKAFDSISHEWLLKVLNMYKCPHIIISFLQKVMPNWKVIMTARGENVSVTTDYIYIRRGIFQGDSLSPLLFCLGINPLSNVLNKYHTKGYTLKDSSVINHLLYMDDLKVYAKNKNSLNILLDSTEIFTRDIGMEFGLNKCNVLHLTAGRMNEYRGEGHILLSGLKFEHLKKDESYKYLGINEAGKIEHNDIREQVKREYFKRIKCITNTHLNARNLIKAINTYAVPVLLYTFGIINYKNTDLNKIDVKTRKLLAINKAHAQKADIERLYLPTEEGGRGLLNIEMLHKTQIIKYKTYLETQKDYILQTIVEHDSHKEKYSIFKETELNLTEIGLRQNTKYTDKELKQAVVKTRLNKIKSKPLHGQFYRSVLEKENIDRIQSFRWIKKQPVSPTLESSIFAIQDQAIVTRQHERDIFKRAVDGKCRLCSVKDETAQHIVSGCEKLAGTYYTKRHNNIVQYIFWSLCKKHKIPVAKLWWLEHLTQPQVKENESAKIMWEIPVQTDVTITHNRPDIIYVNKTENKTYLIDVTVPSDYNIGPKEIEKLSKYHSLKTEISRLWNTHTETIPIVIGTTGVVAKSLHRYINKLDSNINIPIIQKQAAIHSSTILIKVLGDTVFLNSRESEPPLL

SEQ ID NO: 31081 - protein, 1413 aa, Spilarctia lutea
MERNNKRKRLMPLPGGDRWGTSGADAGRDSIRTVSGSLLNRRAGAGELENATADLNRDADDTLQNRDVPIGSAGASESTTTSSQNTQDTRRKWSKDEIQELMFCYFKTRAQGVGFIKRLEKLFKERNPDNPKIHKFTGNTLSNQARSIITHNWLSTQQLDHIKQKAEQSNTPADIHIHSDAQHTEIQSTVPNQTDTNTQILVTSAQSVSSARAPETTTTSSQNTNDARRKWSKAEIHELMFCYYKAKSQGAGFIKRLEKLFKERNPDNSKIHKFTGNTLSNQARSIITHNWLSTEVLDLIKQKAEQSNTPADTHIHSDTQNREVQSVVPNQTDINTQTSGTQHTDYTPHTLSHENFNSSSYSQPTGFETLHHPDLDDLMQDTMQQTHNPYTQNIEDLDPIIIQFLQTLAEAKEVPLEHRKFLPKPRFNKTYINNLHKINNYLPIILNTHSTLRELNDTIYAAAKTLITINGQKAYTPPATIKPKREPPWKLRIKKKLEDIRKELGRLIEMKRGANSRRMLNIKNKLYDKYNIFTDLDHDNTVEILNQKVKALAGRIKRYEDMNNRKNQNKMFNENQHSFYRSLNGNLKAPTELPTKEAVQKFWTSILSQPITYNRDARWIADEENKANTINTHTLEEINIDMVKEALSKTHNWKTPGIDKIQNYYLKYLTKTHSYITQIFNRILNETETIEDWFTTGQVILIPKNENTQDPQNWRPIACLPTLYKLLTSVIANELYIHCENNNIIAPEQRGCRRRARGCKDHLMINKAILEDAHQYQKNLSMGWVDYRKAFDSISHEWLLKVLNMYKCPHIIISFLQKVMPSWKVIMTARGDNVSVTTDYIYIRRGIFQGDSLSPLLFCLGINPLSNVLNKYHTKGYTLKDSSVINHLLYMDDLKVYAKNKNSLNILLDSTEIFTRDIGMEFGLNKCNVLHLTAGRMNEYRGEGHILLSGLKFEHLKKDESYKYLGINEAGKIEHNDIREQVKREYFRRIKCITNTHLNARNLIKAINTYAVPVLLYTFGIINYKNIDLNKIDVKTRKLLAINKAHAQKADIERLYLPTEEGGRGLLNIEMLHKTQIIKYKTYLETQKDYILQTIVEHDSHKEKYSIFKETELNLTEIGLRQNTKYTDKELKQAVVKTRLNKIKSKPLHGQFYRSVLEKENIDRIQSFRWIKKQPVSPTLESSIFAIQDQAIVTRQHERDIFKRAVDGKCRLCSVKDETAQHIVSGCEKLAGTYYTKRHNNIVQYIFWSLCKKHKIPVAKLWWLEHLTQPQVKENESAKIMWEIPVQTDVTITHNRPDIIYVNKTENKTYLIDVTVPSDYNIGPKEIEKLSKYHSLKTEISRLWNTHTETIPIVIGTTGVVAKSLHRYINKLDSNINIPIIQKQAAIHSSTILIKVLGDTVFLNSRESEPPFL

SEQ ID NO: 31082 - protein, 1205 aa, Spilarctia lutea
MLWTNFYYFIRQKIDFPNFNINIIFEFELMFCYYKAKSQGAGFIKRLENLFKERNPDNPKIHKFTGDTLSNQARSIITHNWLSTEVLDLIKQKAEQSNTPADTHTRVHSDAQDREVQSIVPNQTDTNTQISVTQHTNSTPHTLSHENFNSFSYSQPTGFETLHHPDLDDLTQDTMQQTHNPYTQNTEDLDPIIIQFLQTLAETKEVPLEHRKFLPKPRFNKTYINNLHKINNYLPIILNTHSTLRELNDTIYAASKALITINGQKAFTPPATIKPKREPPWKLRIKKKLEDIRKELGRLIEIKRGANSRRMLNIKDKLYDIYNIFTDLDHDNTVEILNQKVKALAGRIKRYEDMNNRKNQNKMFNENQHSFYRSLNGNLKAPTELPTKEAVQKFWTSILSQPITYNRDARWIADEENKANTINTHTFEEINIDMVKEALSKTHNWKTPGIDKIQNYYLKYLTKTHSYITQIFNRILNETETIEDWFTTGQVILIPKNENTQDPQNWRPIACLPTLYKLLTSVIANELYIHCENNNIIAPEQRGCRRRARGCKDHLMINKAILEDAHQYQKNLSMGWVDYRKAFDCISHEWLLKVLNMYKCPHIIISFLQKVMPSWKVIMTARGENVSVTTDYIYIRRGIFQGDSLSPLLFCLGINPLSNVLNKYHTKGYTLKDSSVINHLLYMDDLKVYAKNKNSLNILLDSTEIFTRDIGMEFGLNKCNVLHLTAGRMNEYRGEGHILLSGLKFEHLKKDESYKYLGINEAGKIEHNDIREQVKREYFRRIKCITNTHLNARNLIKAINTYAVPVLLYTFGIINYKNIDLNKIDVKTRKLLAINKAHAQKADIERLYLPTEEDGRGLLNIEMLHKTQIIKYKTYLETQKDYILQTIVEHDSHKQKYSIFKETELNLTEIGLRQNTKYTDKELKQAVVKTRLNKIKSKPLHGQFYRSVLEKENIDRIQSFRWIKKQPVSPTLESSIFAIQDQAIVTRQHERDIFKRAVDGKCRLCSVKDETAQHIVSGCEKLAGTYYTKRHNNIVQYIFWSLCKKHKIPVAKLWWLEHLTQPQVKENESAKIMWEIPVQTDVTITHNRPDIIYVNKTENKTYLIDVTVPSDYNIGPKEIEKLSKYHSLKTEISRLWNTHTETIPIVIGTTGVVAKSLHRYINKLDSNINIPIIQKQAAIHSSTILIKVLGDTVFLNSRESEPPLL

SEQ ID NO: 31083 - protein, 925 aa, Spilarctia lutea
MWTRILFLKLEDIRKELGRLIEIKRGANSRRMLNIKNKLYDKYNIFTDLDHDNTVEILNQKVKALAGRIKRYEDLNNRKNQNKMFNENQHSFYRSLNGNLKAPTELPTKEAVQKFWTSILSQPITYNRDARWIADEENKANTINTHTFEEINIDMVKEALSKTHNWKTPGIDKIQNYYLKYLTKTHSYITQIFNRILNETETIEDWFTTGQVILIPKNENTQDPQNWRPIACLPTLYKLLTSVIANELYIHCENNNIIAPEQRGCRRRARGCKDHLMINKAILEDAHQYQKNLSMGWVDYRKAFDSISHEWLLKVLNMYKCPHIISFLQKVMPSWKVIMTARGENVSVTTDYIYIRRGIFQGDSLSPLLFCLGINPLSNVLNKYHTKGYTLKDSSVINHLLYMDDLKVYAKNKNSLNILLDSTEIFTRDIGMEFGLNKCNVLHLTAGRMNEYRGEGHILLSGLKFEHLKKDESYKYLGINEAGKIEHNDIREQVKREYFRRIKCITNTHLNARNLIKAINTYAVPVLLYTFGIINYKNIDLNKIDVKTRKLLAINKAHAQKADIERLYLPTEEGGRGLLNIEMLHKTQIIKYKTYLETQKDYILQTIVEHDSHKQKYSIFKETELNLTEIGLRQNTKYTDKELKQAVVKTRLNKIKSKPLHGQFYRSVLEKENIDRIQSFRWIKKQPVSPTLESSIFAIQDQAIVTRQHERDIFKRAVDGKCRLCSVKDETAQHIVSGCEKLAGTYYTKRHNNIVQYIFWSLCKKHKIPVAKLWWLEHLTQPQVKENESAKIMWEIPVQTDVTITHNRPDIIYVNKTENKTYLIDVTVPSDYNIGPKEIEKLSKYHSLKTEISRLWNTHTETIPIVIGTTGVVAKSLHRYINKLDSNINIPIIQKQAAIHSSTILIKVLGDTVFLNSRESEPPLL

SEQ ID NO: 31084 - protein, 1035 aa, Spilarctia lutea
MQDTMQQTHNPYTQNIEDLDPIIIQFLQTLAEAKEVPLEHRKFLPKPRFNKTYINNLHKINNYLPIILNTHSTLRELNDTIYAAAKTLITINGQKAYTPPATIKPKREPPWKLRIKKKLEDIRKELGRLIEMKRGANSRRMLNIKNKLYDKYNIFTDLDHDNTVEILNQKVKALAGRIKRYEDMNNRKNQNKIFNENQHSFYRSLNGNLKAPTELPTKEAVQKFWTSILSQPITYNRDARWIADEENKANTINTHTFEEINIDMVKEALSKTHNWKTPGIDKIQNYYLKYLTKTHSYITQIFNRILNETETIEDWFTTGQVILIPKNENTQDPQNWRPIACLPTLYKLLTSVIANELYIHCENNNIIAPEQRGCRRRARGCKDHLMINKAILEDAHQYQKNLSMGWVDYRKAFDSISHEWLLKVLNMYKCPHIIISFLQKVMPSWKVIMTARGENVSVTTDYIYIRRGIFQGDSLSPLLFCLGINPLSNVLNKYHTKGYTLKDSSVINHLLYMDDLKVYAKNKNSLNILLDSTEIFTRDIGMEFGLNKCNVLHLTAGRMNEYRGEGHILLSGLKFEHLKKDESYKYLGINEAGKIEHNDIREQVKREYFRRIKCITNTHLNARNLIKAINTYAVPVLLYTFGIINYKNIDLNKIDVKTRKLLAINKAHAQKADIERLYLPTEEGGRGLLNIEMLHKTQIIKYKTYLETQKDYILQTIVEHDSHKEKYSIFKETELNLTEIGLRQNTKYTDKELKQAVVKTRLNKIKSKPLHGQFYRSVLEKENIDRIQSFRWIKKQPVSPTLESSIFAIQDQAIVTRQHERDIFKRAVDGKCRLCSVKDETAQHIVSGCEKLAGTYYTKRHNNIVQYIFWSLCKKHKIPVAKLWWLEHLTQPQVKENESAKIMWEIPVQTDVTITHNRPDIIYVNKTENKTYLIDVTVPSDYNIGPKEIEKLSKYHSLKTEISRLWNTHTETIPIVIGTTGVVAKSLHRYINKLDSNINIPIIQKQAAIHSSTILIKVLGDTVFLNSRESEPPFL

SEQ ID NO: 31085 - protein, 895 aa, Spilosoma lubricipeda
MLKIKDKLYDKYNIFTDLDHDNTVEILNQKVKALAGRIKRYEDMNNRKTQNKMFNENQHSFYRSLNENLKAPTELPTKNAVQEFWTSILSQPISYNRDARWIADEENKASFINTHTFEEINIDMVKEALRKTHNWKTPGIDKIQNYYLKYLTKTHSHITQIFNRILNETETMEDWFTTGQVILIPKNENTQDPQNWRPIACLPTLYKLLTSVIANELYIHCENNNIIAPEQRGCRRRVRGCKDHLMINKAILEDAHQCQKNLSMGWVDYRKAFDSISHEWLLKVLNMYKCPHTITSFLERVMPNWKVIMTARGENASVSTEYIYIRRGIFQGDSLSPLLFCLAINPLSNILNKYHTKGYTLKDSTVINHLLYMDDLKVYAKNRNSLNVLLDSTEIFTRDIGMEFGLNKCNVLHLTAGRVNEYRGEEHILLSGLKFEHLKKGESYKYLGINEAGKIEHNEIREQVKREYFKRIKCITNTHLNARNLIKAINTYAVPVLLYTFGIINYKNTDLKKIDVKTRKLLTINKAQTQKADIERLYLPTEEGGRGLLNIETLHKTQIIKYKAYLETQTDYILQAIVEHDSHKEKYSIFKETELNLSEIGLRQNIKYTDKELKQAVLKTRINKIKSKPLHGQFYRTVLERENIDRVQSFRWIKKQPVSPSLESSIFAIQDQAIVTRQHERDIFKRAVDGKCRLCSVKDETAQHIVSGCEKLAGTYYTKRHNNIVQYIFWSLCKKHKIPVSNLWWLEHLTQPQVKENESAKVMWEIPIQTDITITHNRPDIIYVNKSENKTYLIDVTIPSDYNIGPKEIEKLSKYHPLKTEISRLWNTQTETIPIVIGTTGVVAKSIHRYINKLDTNINIHILQKQAAIHTCTILTKVLGDTVFINSRESEPPLL

SEQ ID NO: 31086 - protein, 1413 aa, Spilosoma lubricipeda
MERSNKRKRLMPLPGGDRRGTSGADAGRDSIRTVSGSLLNRRAGVGELENATADLNRDADDTLQNRDVPIGSAGTSESTTTSSQDTNDARRKWSKDEIHELIFCYYKARAQGVGFIKRLEKLFKERNPDNPKIHKFTGNTLSNQVRSIITHNWLSTEVLDQLKQKAEQSNTPADTQIHSGTQHTQIQTNVTNQADTNTLISVASVQSVSSAGTSETITTSSHDTNDARRKWSKAEIHELMFCYYKARAQGVGFIKRLEKLFKERNPDNPKIHKFTGNTLSNQARSIITHNWLSTEVLDLIKQKAEQSNTPADTQIHSDTQHTEIQPIVPNQTDTDAEISVTQQTDPTPHTLSREIFNGFPSEQSTNFETLHPSELNDLVQDTVQQTHNPYTQNTEDLDPIIIQFLQTLAETKEITLEHRKFLPKPKFNKTFIHNLDKINNYLPILLNTHSTLRELNDTIYAAAKTLITANGQKAYTPPATVKSKRDPPWKLRIKRKLEDVRKELGRLIEIKRGANSRRMLKIKDKLYDKYNIFTDLDHDNTVEILNQKVKALAGRIKRYEDMNNRKTQNKMFNENQHSFYRSLNENLKAPTELPTKNAVQEFWTSILSQPISYNRDARWIADEENKASFINTHTFEEINIDMVKEALRKTHNWKTPGIDKIQNYYLKYLTKTHSHITQIFNRILNETETMEDWFTTGQVILIPKNENTQDPQNWRPIACLPTLYKLLTSVIANELYIHCENNNIIAPEQRGCRRRVRGCKDHLMINKAILEDAHQCQKNLSMGWVDYRKAFDSISHEWLLKVLNMYKCPHTITSFLERVMPNWKVIMTARGENASVSTEYIYIRRGIFQGDSLSPLLFCLAINPLSNILNKYHTKGYTLKDSTVINHLLYMDDLKVYAKNRNSLNVLLDSTEIFTRDIGMEFGLNKCNVLHLTAGRVNEYRGEEHILLSGLKFEHLKKGESYKYLGINEAGKIEHNEIREQVKREYFKRIKCITNTHLNARNLIKAINTYAVPVLLYTFGIINYKNTDLNKIDVKTRKLLTINKAQTQKADIERLYLPTEEGGRGLLNIETLHKTQIIKYKAYLETQTDYILQAIVEHDSHKEKYSIFKETELNLSEIGLRQNIKYTDKELKQAVLKTRINKIKSKPLHGQFYRTVLERENIDRVQSFRWIKKQPVSPSLESSIFAIQDQAIVTRQHERDIFKRAVDGKCRLCSVKDETAQHIVSGCEKLAGTYYTKRHNNIVQYIFWSLCKKHKIPVSNLWWLEHLTQPQVKENESAKVMWEIPIQTDITITHNRPDIIYVNKSENKTYLIDVTIPSDYNIGPKEIEKLSKYHPLKTEISRLWNTQTETIPIVIGTTGVVAKSIHRYINKLDTNINIHILQKQAAIHTCTILTKVLGDTVFINSRESEPPLL

SEQ ID NO: 31087 - protein, 1413 aa, Spilosoma lubricipeda
MERSNKRKRLMPLPGGDRRGTSGADAGRDSIRTVSGSLLNRRAGVGELENATADLNRDADDTLQNRDVPIGSAGTSESTTTSSQDTNDARRKWSKDEIHELIFCYYKARAQGVGFIKRLEKLFKERNPDNPKIHKFTGNTLSNQVRSIITHNWLSTEVLDQLKQKAEQSNTPADTQIHSGTQHTQIQTNVTNQADTNTLISVASVQSVSSAGTSETITTSSHDTNDARRKWSKEEIHELMFCYYKARAQGVGFIKRLEKLFKERNPDNPKIHKFTGNTLSNQARSIITHNWLSTEVLDLIKQKAEQSNTPADTQIHSDTQHTEIQPIVPNQTDTDAEISVTQQTDPTPHTLSREIFNGFPSEQSTNFETLHPSELNDLVQDTVQQTHNPYTQNTEDLDPIIIQFLQTLAETKEITLEHRKFLPKPKFNKTFIHNLDKINNYLPILLNTHSTLRELNDTIYAAAKTLITANGQKAYTPPATVKSKRDPPWKLRIKRKLEDVRKELGRLIEIKRGANSRRMLKIKDKLYDKYNIFTDLDHDNTVEILNQKVKALAGRIKRYEDMNNRKTQNKMFNENQHSFYRSLNENLKAPTELPTKNAVQEFWTSILSQPISYNRDARWIADEENKASFINTHTFEEINIDMVKEALRKTHNWKTPGIDKIQNYYLKYLTKTHSHITQIFNRILNETETMEDWFTTGQVILIPKNENTQDPQNWRPIACLPTLYKLLTSVIANELYIHCENNNIIAPEQRGCRRRVRGCKDHLMINKAILEDAHQCQKNLSMGWVDYRKAFDSISHEWLLKVLNMYKCPHTITSFLERVMPNWKVIMTARGENASVSTEYIYIRRGIFQGDSLSPLLFCLAINPLSNILNKYHTKGYTLKDSTVINHLLYMDDLKVYAKNRNSLNVLLDSTEIFTRDIGMEFGLNKCNVLHLTAGRVNEYRGEEHILLSGLKFEHLKKGESYKYLGINEAGKIEHNEIREQVKREYFKRIKCITNTHLNARNLIKAINTYAVPVLLYTFGIINYKNTDLNKIDVKTRKLLTINKAQTQKADIERLYLPTEEGGRGLLNIETLHKTQIIKYKAYLETQTDYILQAIVEHDSHKEKYSIFKETELNLTEIGLRQNIKYTDKELKQAVLKTRINKIKSKPLHGQFYRTVLERENIDRVQSFRWIKKQPVSPSLESSIFAIQDQAIVTRQHERDIFKRAVDGKCRLCSVKDETAQHIVSGCEKLAGTYYTKRHNNIVQYIFWSLCKKHKIPISNLWWLEHLTQPQVKENESAKVMWEIPIQTDITITHNRPDIIYVNKSENKTYLIDVTIPSDYNIGPKEIEKLSKYHPLKTEISRLWNTQTETIPIVIGTTGVVAKSIHRYINKLDTNINIHILQKQAAIHTCTILTKVLGDTVFINSRESEPPLL

SEQ ID NO: 31088 - protein, 1413 aa, Spilosoma lubricipeda
MERSNKRKRLMPLPGGDRRGTSGADAGRDSIRTVSGSLLNRRAGVGELENATADLNRDADDTLQNRDVPIGSAGTSESTTTSSQDTNDARRKWSKDEIHELIFCYYKARAQGVGFIKRLEKLFKERNPDNPKIHKFTGNTLSNQVRSIITHNWLSTEVLDQLKQKAEQSNTPADTQIHSGTQHTQIQTNVTNQADTNTLISVASVQSVSSAGTSETITTSSHDTNDARRKWSKEEIHELMFCYYKARTQGVGFIKRLEKLFKERNPDNPKIHKFTGNTLSNQARSIITHNWLSTEVLDLIKQKAEQSNTPADTQIHSDTQHTEIQPIVPNQTDTDAEISVTQQTDPTPHTLSREIFNGFPSEQSTNFETLHPSELNDLVQDTVQQTHNPYTQNTEDLDPIIIQFLQTLAETKEITLEHRKFLPKPKFNKTFIHNLDKINNYLPILLNTHSTLRELNDTIYAAAKTLITANGQKAYTPPATVKSKRDPPWKLRIKRKLEDVRKELGRLIEIKRGANSRRMLKIKDKLYDKYNIFTDLDHDNTVEILNQKVKALAGRIKRYEDMNNRKTQNKMFNENQHSFYRSLNENLKAPTELPTKNAVQEFWTSILSQPISYNRDATWIADEENKTSFINTHTFEEINIDMVKEALRKTHNWKTPGIDKIQNYYLKYLTKTHSHITQIFNRILNETETMEDWFTTGQVILIPKNENTQDPQNWRPIACLPTLYKLLTSVIANELYIHCENNNIIAPEQRGCRRRVRGCKDHLMINKAILEDAHQCQKNLSMGWVDYRKAFDSISHEWLLKVLNMYKCPHTITSFLARVMPNWKVIMTARGENASVTTEYIYIRRGIFQGDSLSPLLFCLAINPLSNILNKYHTKGYTLKDSTVINHLLYMDDLKVYAKNRNSLNVLLDSTEIFTRDIGMEFGLNKCNVLQLTAGRVNEYRGEGHILLSGLKFEHLKKGESYKYLGINEAGKIEHNEIREQVKREYFKRIKCITNTHLNARNLIKAINTYAVPVLLYTFGIINYKNTDLNKIDVKTRKLLTINKAQTQKADIERLYLPTEEGGRGLLNIETLHKTQIIKYKAYLETQTDYILQAIVEHDSHKEKYSIFKETELNLTEIGLRQNIKYTDKELKQAVLKTRINKIKSKPLHGQFYRTVLERENIDRVQSFRWIKKQPVSPSLESSIFAIQDQAIVTRQHERDIFKRAVDGKCRLCSVKDETAQHIVSGCEKLAGTYYTKRHNNIVQYIFWSLCKKHKIPISNLWWLEHLTQPQVKENESAKVMWEIPIQTDITITHNRPDIIYVNKSENKTYLIDVTIPSDYNIGPKEIEKLSKYHPLKTEISRLWNTQTETIPIVIGTTGVVAKSIHRYINKLDTNINIHILQKQAAIHTCTILTKVLGDTVFINSRESEPPLL

SEQ ID NO: 31089 - protein, 1413 aa, Spilosoma lubricipeda
MERSNKRKRLMPLPGGDRRGTSGADAGRDSIRTVSGSLLNRRAGVGELENATADLNRDADDTLQNRDVPIGSAGTSESTTTSSQATNDARRKWSKDEIHELIFCYYKARAQGVGFIKRLEKLFKERNPDNPKIHKFTGNTLSNQVRSIITHNWLSTEVLDQLKQKAEQSNTPADTQIHSGTQHTEIQTIVANQTDTNTLISVASVQSVSSAGTSETITTSSHDTNDARRKWSKEEIHELMFCYYKARAQGVGFIKRLEKLFKERNPDNPKIHKFTGNTLSNQARSIITHNWLSTEVLDLIKQKAEQSNTPADTQIHSEPQHTEIQSIVPNQTDTDAEISVTQHTDPTPHTLSREIFNGFPSEQSTNFETLHPSELNDLMQDTVQQTHNPYTQNTEDLDPIIIQFLQTLAETKEITLEHRKFLPKPKFNKTFINNLDKINNYLPILLNTHSTLRELNDTIYAAAKTLITANGQKAYTPPATVKSKREPPWKLRIKRKLEDVRKELGRLIEIKRGANSRRMLKIKDKLYDKYNIFTDLDHDNTVEILNQKVKALAGRIKRYEDMNNRKNQNKMFNENQHSFYRSLNENLKAPTELPTKNAVQEFWTSILSQPISYNRDARWIADEENKASFINTHTFEEINIDMVKEALRKTHNWKTPGIDKIQNYYLKYLTKTHSHITQIFNRILNETETMEDWFTTGQVILTPKNENTQDPQNWRPIACLPTLYKLLTSVIANELYIHCENNNIIAPEQRGCRRRVRGCKDHLMINKAILEDAHQCQKNLSMGWVDYRKAFDSISHEWLLKVLNMYKCPHTITSFLERVMPNWKVIMTARGENASVTTEYIYIRRGIFQGDSLSPLLFCLAINPLSNILNKYHTKGYTLKDSTVINHLLYMDDLKVYAKNRNSLNVLLDSTEIFTRDIGMEFGLNKCNVLHLTAGRVNEYRGEGHILLSGLKFEHLKKGESYKYLGINEAGKIEHNEIREQVKREYFKRIKCITNTHLNARNLIKAINTYAVPVLLYTFGIINYKNTDLNKIDVKTRKLLTINKAQTQKADIERLYLPTEEGGRGLLNIETLHKTQIIKYKAYLENQTDYILQAIVEHDSHKEKYSIFKETELNLTEIGLRQNIKYTDKELKQAVLKTRINKIKSKPLHGQFYRTVLERENIDRVQSFRWIKKQPVSPSLESSIFAIQDQAIVTRQHERDIFKRAVDGKCRLCSVKDETAQHIVSGCEKLAGTYYTKRHNNIVQYIFWSLCKKHKIPVSNLWWLEHLTQPQVKENESAKVMWEIPIQTDITITHNRPDIIYVNKSENKTYLIDVTIPSDYNIGPKEIEKLSKYHPLKTEISRLWNTQTETIPIVIGTTGVVAKSIHRYINKLDTNINIHILQKQAAIHTCTILTKVLGDTVFINSRESEPPLL

SEQ ID NO: 31090 - protein, 1413 aa, Spilosoma lubricipeda
MERSNKRKRLMPLPGGDRRGTSGADAGRDSIRTVSGSLLNRRAGVGELENATADLNRDADDTLQNRDVPIGSAGTSESTTTSSQDTNDARRKWSKDEIHELIFCYYKARAQGVGFIKRLEKLFKERNPDNPKIHKFTGNTLSNQVRSIITHNWLSTEVLDQLKQKAEQSNTPADTQIHSGTQHTQIQTNVTNQADTNTLISVASVQSVSSAGTSETITTSSHDTNDARRKWSKEEIHELMFCYYKARTQGVGFIKRLEKLFKERNPDNPKIHKFTGNTLSNQARSIITHNWLSTEVLDLIKQKAEQSNTPADTQIHSDTQHTEIQPIVPNQTDTDAEISVTQQTDPTPHTLSREIFNGFPSEQSTNFETLHPSELNDLVQDTVQQTHNPYTQNTEDLDPIIIQFLQTLAETKEITLEHRKFLPKPKFNKTFIHNLDKINNYLPILLNTHSTLRELNDTIYAAAKTLITANGQKAYTPPATVKSKRDPPWKLRIKRKLEDVRKELGRLIEIKRGANSRRMLKIKDKLYDKYNIFTDLDHDNTVEILNQKVKALAGRIKRYEDMNNRKTQNKMFNENQHSFYRSLNENLKAPTELPTKNAVQEFWTSILSQPISYNRDATWIADEENKTSFINTHTFEEINIDMVKEALRKTHNWKTPGIDKIQNYYLKYLTKTHSHITQIFNRILNETETMEDWFTTGQVILIPKNENTQDPQNWRPIACLPTLYKLLTSVIANELYIHCENNNIIAPEQRGCRRRVRGCKDHLMINKAILEDAHQCQKNLSMGWVDYRKAFDSISHEWLLKVLNMYKCPHTITSFLARVMPNWKVIMTARGENASVTTEYIYIRRGIFQGDSLSPLLFCLAINPLSNILNKYHTKGYTLKDSTVINHLLYMDDLKVYAKNRNSLNVLLDSTEIFTRDIGMEFGLNKCNVLQLTAGRVNEYRGEGHILLSGLKFEHLKKGESYKYLGINEAGKIEHNEIREQVKREYFKRIKCITNTHLNARNLIKAINTYAVPVLLYTFGIINYKNTDLNKIDVKTRKLLTINKAQTQKADIERLYLPTEEGGRGLLNIETLHKTQIIKYKAYLETQTDYILQAIVEHDSHKEKYSIFKETELNLTEIGLRQNIKYTDKELKQAVLKTRINKIKSKPLHGQFYRTVLERENIDRVQSFRWIKKQPVSPSLESSIFAIQDQAIVTRQHERDIFKRAVDGKCRLCSVKDETAQHIVSGCEKLAGTYYTKRHNNIVQYIFWSLCKKHKIPISNLWWLEHLTQPQVKENESAKVMWEIPIQTDITITHNRPDIIYVNKSENKTYLIDVTIPSDYNIGPKEIEKLSKYHPLKTEISRLWNTQTETIPIVIGTTGVVAKSIHRYINKLDTNINIHILQKQAAIHTCTILTKVLGDSVFINSRESEPPLL

SEQ ID NO: 31091 - protein, 1413 aa, Spilosoma lubricipeda
MERSNKRKRLMPLPGGDRRGTSGADAGRDSIRTVSGSLLNRRAGVGELENATADLNRDADDTLQNRDVPIGSAGTSESTTTSSQDTNDARRKWSKDEIHELIFCYYKARAQGVGFIKRLEKLFKERNPDNPKIHKFTGNTLSNQVRSIITHNWLSTEVLDQLKQKAEQSNTPADTQIHSGTQHTEIQTIVANQTDTNTLISVASVQSVSSAGTSETITTSSHDTNDARRKWSKEEIHELMFCYYKARAQGVGFIKRLEKLFKERNPDNPKIHKFTGNTLSNQARSIITHNWLSTEVLDLIKQKAEQSNTPADTQIHSDTQHTEIQSIVPNQTDIDAEISVTQHTDPTPHTLSREIFNGFPSEQSTNFETLHPSELNDLMQDTVQQTHNPYTQNTEDLDPIIIQFLQTLAETKEITLEHRKFLPKPKFNKTFINNLDKINNYLPILLNTYSTLRELNDTIYAAAKTLITANGQKAYTPPATVKSKREPPWKLRIKRKLEDVRKELGRLIEIKRGANSRRMLKIKDKLYDKYNIFTDLDHDNTVEILNQKVKALAGRIKRYEDMNNRKNQNKMFNENQHSFYRSLNENLKAPTELPTKNAVQEFWTSILSQPISYNRDARWIADEENKASFINTHTFEEINIDMVKEALRKTHNWKTPGIDKIQNYYLKYLTKTHSHITQIFNRILNETETMEDWFTTGQVILIPKNENTQDPQNWRPIACLPTLYKLLTSVIANELYIHCENNNIIAPEQRGCRRRVRGCKDHLMINKAILEDAHQCQKNLSMGWVDYRKAFDSISHEWLLKVLNMYKCPHTITSFLERVMPNWKVIMTARGENASVTTEYIYIRRGIFQGDSLSPLLFCLAINPLSNILNKYHTKGYTLKDSTVINHLLYMDDLKVYAKNRNSLNVLLDSTEIFTRDIGMEFGLNKCNVLHLTAGRVNEYRGEGHILLSGLKFEHLKKGESYKYLGINEAGKIEHNEIREQVKREYFKRIKCITNTHLNARNLIKAINTYAVPVLLYTFGIINYKNTDLNKIDVKTRKLLTINKAQTQKADIERLYLPTEEGGRGLLNIETLHKTQIIKYKAYLETQTDYILQAIVEHDSHKEKYSIFKETELNLTEIGLRQNIKYTDKELKQAVLKTRINKIKSKPLHGQFYRTVLERENIDRVQSFRWIKKQPVSPSLESSIFAIQDQAIVTRQHERDIFKRAVDGKCRLCSVKDETAQHIVSGCEKLAGTYYTKRHNNIVQYIFWSLCKKHKIPVSNLWWLEHLTQPQVKENESAKVMWEIPIQTDITITHNRPDIIYVNKSENKTYLIDVTIPSDYNIGPKEIEKLSKYHPLKTEISRLWNTQTETIPIVIGTTGVVAKSIHRYINKLDTNINIHILQKQAAIHTCTILTKVLGDTVFINSRESEPPLL

SEQ ID NO: 31092 - protein, 1029 aa, Sinella curviseta
MDCKRRNTHNNGSTQVNETVISQRDKLLPESSDSEKLCPCGKDINEEQMILCDICLTWYHGKCVSLSDDELEFLGTKVDDEWICKKCCSNNNSADDNEMKTCPRCPPSKSQKKYKGLKGLRIHYGRAHRENIDDFTKQADESLTQRISKYKRQIKVLKRIPKGARMIVANRLSTLMDQCCSKNDMISWDNLLVFPYTVLRVPAAKTKNLTQAIKMNVKANEVIKTKPPCFPVKTDLSRRVESKISEGDRRGAVKLLSSSDTLAKESDETYNMLLEKHPAPSRVLNLPEPPQATESCLVVSEAEVQKAVFNFPNGSAGGVDGIRPQHLKDLISKSNGTAAKTLLSSLTRLVNFMLSGLVNNEIVNILYGASLCALNKKGGGIRPIAVGNTYRRLVAKLACTSVKEEMGHYFNPKQLGFGTKGGCEAIVHAARTYIKQNNGTDNLILKIDFQNAFNCIERDSLLAVVKEKVPFLYPFLNQCYSTSSTLFFGERQISSQVGAQQGDPAGCLVFSLVLQPIIEQLTSQLNMWYLDDGTLGGDSESVYHDFCLLIDKCKDFGLHVNPEKCELFFCGDIDPDVVRKFEDTSPGIKVLVDRKLTLLGAPITPEALEEILIAKFDELLLLFQRLKLLKSHIAYHLLRHCFYIPKLNYILRTTPTWTLKQKVEEMDMNLKECLEDIINVHLNEEQWAISSLPVLYGGIGIRKIMDISVPAFLASVNSVLDLVQSMLTPSPDLSQIASYSDAVEEWNSQHAELGVPPESSQSSQKVWDMYACKQLVNEISNKWDYSNLLLKASSKKESNGWLNALPSRSIGTLLDNNSFRIAISLRLGLDICIPHTCVCGAQVDEKGTHGLSCKKSAGRHSRHFGLNDIIRRALVAAQFPSVLEPTGISRDDNKRPDGMTLVPWRNGQALVWDATCTDTLAASNLSSSAKEAGTAAQNAASKKKSKYRNIMNDLYHFIPFAVETLGPWCEEAIELVDTLGRLIASNTGEGRSKAYLIQRISITIQKGNAACVMGTLPSSLSLAEIFYLL

SEQ ID NO: 31093 - protein, 918 aa, Tuta absoluta
MNGNSSEKVTKHVHNIFKQYKTHTLHEEPNQNLTQFLNTLRQKLSVASSRLKRYKTCTLRKTQNNKFETNEKQFYRSLKSTTTNHTNNNGEINSTNNSPPIEELHRFWSKIWQNPLSHKLGAEWIEEEKNKLINTEPMNFEHIPIEVFQNVIKKLHNWKTPGSDNIHNYWLKKLTYTHPFLHNYINKFIEDPTTMPKYITAGVTYMLPKNENDRTNPAAYRPITCLQTIYKVMTSCISAIIYNHIDNNAILTEQQKGCRKFSQGCKEQLLIDSVLLKHVQQKKKDLFTMYIDYKKAYDSVPHTWLIEVLKIYKIHPTITTFLENIMTHWTTRLRLNLLTETIETESIKIQRGIFQGDALSPLWFCLALNPLSNLLNSSNTGYPLQYCDNNLNTRTNQNEYLLNHLMYMDDIKLYSSDVEGLNKLADITDKFSRDICMEFGIDKCRINSVRAGQTFEHHYNLESGERIESLDEAGTYKYLGYIQSKLIHYKEVKNSLTLQYRHRINAIVRTFLNSKNTIKAINTYAVPVLTYSFGIINWTKSELTNLQRIINTTMTKHRKHHPRSCVQRLTLPRTNGGRGLIDITNLHNKQVTSLRKYFHNKTETSTLHKAIVQNDNKLTPLNLQNKTVQRNENQTDIQTKTDDWSRKSLHGRHYRDLSLPNVDKTASNDWLNRGQLFPETEGFIIAIQDQVIETRNYQKYIIKIPNAIDRCRRCNSASETIQHITGACKSIVQTDYKYRHDQVANIIHQRLASKYKLIPTPSTPYYKYTADAILENNSHKIYFDRAILTDKTTHFNRPDITLIDKQNKTALIIDIAIPNTHNLQQTIAEKLNKYIDLKNEIIRMWNLLKVSIVPIVLSSTGVIPKQLKQSLKSLDLPENTYILMQKAVILNTCRIVRKFLDTDETTITRTNETDAHLA

SEQ ID NO: 31094 - protein, 1427 aa, Tuta absoluta
MRLRNRHIPQVGPHPRVRESHPVPSGSGSPSVYEGGNISLSAQSPTVADTSNTKTTRSGPSSPRSSIDSLFPSPESSPNPFEYATYSRSSTVTPMSVDVEQEAQGLDLTPTTGNSGAQIRFNTDMNIFIWRTYLKLTQLEKRKKFIDSLHIEFINKFPIVKVSKQKIAAQRRDIVNKRLLTQSQLDEIRQEVEQLINPDVCNYTTQPNTSTNTSNTISNSFTEPNDMISSMRPATTKAGKSRQRMQWSDQINRDLLRCYYIVTNCETNLTSYRPLVHNKFIEMHPELQVIGEQRLADQIRVINHNNRILPQHREQIKSQVREELNSRQHRDSTNYQTYASVVRTQNHAELTYVSQSSEMTDSFNVLPSSDISETIANTRNHAPEVEDSNQAFEIETSFEETFNYFKNIGPIHRIFIPKQRPSKKLAMTVNYLNTKILPKYINIDTDFTTLQTAIYSAAWTAAKVNGSKITFSIPSSRHVRRKKKMPKWQARLEKRIEDLRAKIGRLTQYMNGNSSEKVTKHVHNIFKQYKTHTLHEEPNQNLTQFLDTLRQKLSVASSRLKRYKTCTLRKTQNNKFETNEKQFYRSLKSSTTNHTNNNGEINSTNVSPPIEELHRFWSKIWQNPLSHKLSAEWIEEEKNKLINTEPMNFEHIPIEVFQNVIKKLHNWKTPGSDNIHNYWLKKLTYTHPFLHNYINKFIEDPATMPKYITAGVTYMLPKNENDRTNPAAYRPITCLQTIYKVMTSCISAIIYNHIDNNAILTEQQKGCRKFSQGCKEQLLIDSVLLKHVQQKKKDLFTMYIDYKKAYDSVPHTWLIEVLKIYKIHPTITTFLENIMTHWTTRLRLNLLTETIETESIKIQRGIFQGDALSPLWFCLALNPLSNLLNSSNTGYPLQYCDNNLNTRTHQNEYLLNHLMYMDDIKLYSSDVEGLNKLADITDKFSRDICMEFGIDKCRINSVRAGQTFEHHYNLESGERIESLDEAGTYKYLGYVQSKLIHYKEVKNSLTLQYRHRINAIVRTFLNSKNTIKAINTYAVPVLTYSFGIINWTKSELTNLQRIINTTMTKHRKHHPRSCVQRLTLPRTNGGRGLIDIKNLHNKQVTSLRKYFHNKTETSTLHKAIVQNDTKLTPLNLHNKTVQRNETQTDIQTKTDDWSRKSLHGRHYRDLSLPNVDKTASNDWLNRGQLFPETEGFIIAIQDQVIETRNYQKYIIKIPNAIDRCRRCNSASETIQHITGACKSIVQTDYKYRHDQVANIIHQRLASKYKLIPTPSTPYYKYTADAILENNSHKIYFDRAILTDKTTHFNRPDITLIDKQNKTALIIDIAIPNTHNLQQTIAEKLNKYIDLKNEIIRMWNLLKVSIVPIVISSTGVIPKQLKQSLKSLDLPENTYILMQKAVILNTCRIVRKFLDTDETTNTRTNETDAHLA

SEQ ID NO: 31095 - protein, 788 aa, Tuta absoluta
MPFEFIPVEVFHDVIKNLHNWKAPGTDNIHNYWYKKFTYIHPFLHNHINDFIQNPQKMPHYITTGITYMLPKDQNDLKNPAKYRPITCLQTLYKIITSCIATMIYTYVDDNNIMSEQQKGCRKFSQGCKEQLLIDSVVLKQVQQKQNNLFTMYIDYKKAYDSVPHEWLVRVLEIYKIHPTIVAFLKNIMSTWSTRLRLNTTTKTLETSEIKIQRGIFQGDALSPLWFCLALNPLSTSLTDTKLGYPLTYSPNRTDSHTDTQNYRLNHLLYMDDIKIYADSQDDINTLADTIEQYSKDICMEFGIDKCRINSVKAGQNYEHWYELETGQKIEPLDENSVYKYLGFNQSKQIQHKEVKSTLTQQFKHRLNSIMKTHLDSKNIIKAVNAFAIPVLTYSFGVIKWSKSELQSLQRMINISMTKHRKHHPKSCVQRLTLARTEGGRGLIDIVNLHNRQITRLRSYFHSKTETSLLHNAIVQNDLKYTPLNLKNKATQKNEIQIDRNTKLNEWAKKSLHGRFYRDLNLPHVDKTASNEWLRRGEMFPETEGFMLAIQDQTVETRNYRKHVLKIPNTIDLCRRCNGASETIQHITGSCKSIVQTDYKHRHDQVAKIIHQNLALKYKLITSQPVPYYKYIPDTILENSNHKLYFDRAILTDKTTHYNRPDITLLDKVNKTVKLIDIAVPNTHNLQTTISEKLNKYTDLKDEITRMWNLQKVTIVPIVLSTTGVIPRQVHQSISSLELPKFTYINLQKAVILNTCRIVRKFLQTVTELPAVELQSHSQNNQNGGYLA

SEQ ID NO: 31096 - protein, 1452 aa, Tuta absoluta
MRLRNRVIPQVGPRPEVRESHPVPSGSGSPIVCEGGNISLSAQSPTVADAKENPAADILTLNPLSPISSSHSLFPSPCSSPNPFEYPILSRSSTVSLLSVDVEHEAECLDLAPTAGIKRTRTIFTDEMNKFIWRTYLIITKLEIHTKRFTNPLYEQFNAKFNTNISKQKITSQRRDIINKKLIPDKTLQEIREEVKQLLENSKSNTTEQPININKQIDKSVPPNSLDNSTSETLPINAATPNVISESQGSTLSAMRPATTKAGKERKRLQWHTINKELLELYYTITDNENNLTGYRPQLHSKFIEIHPDLSFISEQRLADQIRVIHRNNQITAEERELIKIRVGQTNNITLTEPMTYNIQQTDRSSTSTNPNLTQTQPEIENISEEHLTSETRSYKNKTSHNTTIAEDKGIALEKDFEHAFQYFSTLNPTERGYIPKQRPSKKLALIVDFINTKILPNHIQSETDFETLQTVLYCAAWSAAKANGTKLDIPPKSDTEINKQKKRKPKWQTRIESRIDDLRAKIGRLQQYIRGNRTDHINKHVQKIFEHYKIHTVHEEPNTNLTEFLDTLIQKLTVLCSRVKRYKICTLRKTQNNQFSSNEKQFYRTLKTSSTNQTEPNSNGEQSNNTVPHKDDLHAYWSKLWENPVNHRLDAQWIESEVGNVQNSQPMQFDFIPVEVFIDVIKKLHNWKAPGSDNIHNYWYKKFSHIHPFLHNYINQFIQNPETMPKYITSGITYMLPKDQNDTLNPAKYRPITCLQTIYKILTSCLTAIIYTHIETNHLLTEQQKGCRKFSQGCKEQLIIDSVVLGQVQQKKKDLYSIYIDYKKAYDSVPHTWLLKVLEIYKIHPTVVAFLQNTMTKWTTRLKINTPSESRLTDSIKIQRGIFQGDALSPLWFCLALNPLSNALNTTEIGYPLEYTNTDTGSPTDKHKYHLNHLLYMDDIKMYANTQDDLNKLVEITEKFSQDICMEFGIDKCKVNSVKEGQTYEHHYQLQTGQQIDPLDICGAYKYLGFKQSKQIHFKETKTGLTHQFQHRLNAIMKTQLHSKNIIKAVNTYAVPVLTYSFGVIPWSKSELVNIQRKINVTMTRNRKHHPKSCIQRLTLARAEGGRGLIDILNLHNKQISCLRSYFHNKADTTTLHSAIVKNDTNLTPLNLQSRLTQKNEVQTDRLTKLNEWSQKALHGRFYRDLNLPHVDKEASNEWLRRGEMFPETEGFMLAIQDQVVETKNYQKHIMKLPNIVDRCRRCHSVPETIQHITGACKTIVQTDYKHRHDQVANILHQKLALKYNLIKPPSEPYYKYKPEVILENSTHKLYFDRAILTDKTTHFNRPDITLIDKINKTASIIDIAVPNTHNIQSTIMEKLSKYTDLKDEITRMWQLQKVTIIPIVLSTTGVIPKQLHQSIRTLHLPKSLYISLQKAVILNSCRIVRKFLQLDTGTTPLNEAMNRNGDVHLA

SEQ ID NO: 31097 - protein, 1198 aa, Tuta absoluta
MRPATTKSGKERKRLQWHTINRELLELYYTITDNENNLTGYRPQLHSKFIEIHPDLSFISEQRLADQIRVIHRNNQITAEERELIKIRVGQTNNITLTEHVTFNIQQTDRTSTSTNPNLTQTQPEIENISEEHLNSETHSYKNKTSHNTTIAEDKGIALENDFEHAFQYFSTLNPTERCYIPKQRPSKKLALIVDFINTKILPNHIQSETDFETLQTVLYCAAWSAAKANGTKLNIPPKSDAEINKQKKKIPKWQTRIESRIDDLRAKIGRLQQYIRGNRTDHINKHVQKIFEHYKIHTMHEEPNTNLTEFLDTLRQKLTVLCSRVKRYKTCTLRKTQNNQFSSNEKQFYRTLKTSSTNQTERNSNGEQSINTVPHEDDLHAYWSKLWENPVNHRLDAQWIESEVVNVQNSQPMQFDFIPVEVFKNVIKKLHNWKAPGSDNIHNYWYKKFSHIHPFLHNYINQFVQNPETMPKYITSGITYMLPKDQNDTLNPAKYRPITCLQTIYKILTSCLTAIIYTHIETNHLLTEQQKGCRKFSQGCKEQLIIDSVVLGQVQQKKKDLYSIYIDYKKAYDSVPHTWLLKVLEIYKIHPTVVAFLQNTMTKWTTRLKINTPFESRLTDSIKIQRGIFQGDALSPLWFCLALNPLSNALNTTEIGYPLEYTTIDTGPLTDKHKYHLNHLLYMDDIKMYANTQDDLNKLVEITEKFSQDICMEFGIDKCKVNSVKEGQPYEHHYQLQTGQQIDPLDICGAYKYLGFKQSKQIHFKETKTGLSHQFQHRLNAIMKTQLHSKNIIKAVNTYAVPVLTYSFGVIPWSKSELVNIQRKINVTMTRNRKHHPKSCIQRLTLARAEGGRGLIDILNLHNKQISCLRSYFHNKADTSTLHSAIIKNDTNLTPLNLQSRLTQKNEVQTDRLTKLNDWSQKALHGRFYRDLNLPHVDKEASNEWLRRGEMFPETEGFMLAIQDQVVETKNYQKHIMKLPNIVDRCRRCHSAPETIQHITGACKTIVQTDYKHRHDQVANILHQKLALKYNLLKPPSEPYYKYKPEIILENSTHKLYFDRAILTDKTTHFNRPDITLIDKINKTASIIDIAVPNTHNIQTTIVEKLSKYTDLKDEITRMWQLQKVTIIPIVLSTTGVIPKQLHQSIRTLHLPKSLYISLQKAVILNSCRIVRKFLQLDTGTTPLNEANNQNGDVHLA

SEQ ID NO: 31098 - protein, 1297 aa, Tuta absoluta
MNNSMQSLTQIFQNKKITSQRRDIINKKLVPDKTLQEIREEVKQLLENPKSNTTEQPININKTIDKSVPPNSLHSSISETLPINATTPNNESQGSTLSTMRPATTKAGKERKRLQWHTINRELLELYYTITDNENNLTGYRPQLHSKFIEIHPDLSFISEQRLADQIRVIHRNNQITAEERELIKIRVGQTNNITLTEPMTYNIQQTDRSSTSTNPNLTQTQPEIENISEEHLTSETRSYKNKTSHNTTIAEDKGIALEKDFEHAFQYFSTLNPTERCYIPKQRPSKKLALIVDFINTKILPNHIQSETDFETLQTVLYCAAWSAAKANGTKLDIPPKSDTEINKQKKRKPKWQTRIESRIDDLRAKIGRLQQYIRGNRTDHINKHVQKIFEHYKIHTVHEEPNTNLTEFLDTLIQKLTVLCSRVKRYKICTLRKTQNNQFSSNEKQFYRTLKTSSTNQTEPNSNGEQSNNTVPHKDDLHAYWSKLWENPVNHRLDAQWIESEVGNVQNSQPMQFDFIPVEVFIDVIKKLHNWKAPGSDNIHNYWYKKFSHIHPFLHNYINQFIQNPETMPKYITSGITYMLPKDQNDTLNPAKYRPITCLQTIYKILTSCLTAIIYTHIETNHLLTEQQKGCRKFSQGCKEQLIIDSVVLGQVQQKKKDLYSIYIDYKKAYDSVPHTWLLKVLEIYKIHPTVVAFLQNTMTKWTTRLKINTPSESRLTDSIKIQRGIFQGDALSPLWFCLALNPLSNALNTTEIGYPLEYTNTDTGSPTDKHKYHLNHLLYMDDIKMYANTQDDLNKLVEITEKFSQDICMEFGIDKCKVNSVKEGQTYEHHYQLQTGQQIDPLDICGAYKYLGFKQSKQIHFKETKTGLTHQFQHRLNAIMKTQLHSKNIIKAVNTYAVPVLTYSFGVIPWSKSELVNIQRKINVTMTRNRKHHPKSCIQRLTLARAEGGRGLIDILNLHNKQISCLRSYFHNKADTTTLHSAIVKNDTNLTPLNLQSRLTQKNEVQTDRLTKLNEWSQKALHGRFYRDLNLPHVDKEASNEWLRRGEMFPETEGFMLAIQDQVVETKNYQKHIMKLPNIVDRCRRCHSVPETIQHITGACKTIVQTDYKHRHDQVANILHQKLALKYNLIKPPSEPYYKYKPEVILENSTHKLYFDRAILTDKTTHFNRPDITLIDKINKTASIIDIAVPNTHNIQSTIMEKLSKYTDLKDEITRMWQLQKVTIIPIVLSTTGVIPKQLHQSIRTLHLPKSLYISLQKAVILNSCRIVRKFLQLDTGTTPLNEAMNRNGDVHLA

SEQ ID NO: 31099 - protein, 1450 aa, Tuta absoluta
MRLRNRVIPQVGPRPEVRESHPVPSGSGSPIVCEGGNISLSAQSPTVADTKENPAADIPTLNPLSPISSSHSLFPSPWSSPNPFEYPILSRSSTVSPLSVDVEQEAECLDLAPTAGIKRTRTIFTDEMNKFIWRTYLIITKLEIHTKRFTNPLYEQFNAKFNTNISKQKITSQRRDIINKKLVPDKTLQEIREEVKQLLENPKSNTTEQPININKPIDKSVPPNSLHSSISETLPINATTPNNESQGSTLSTMRPATTKAGKERKRLQWHTINRELLELYYTITDNENNLTGYRPQLHSKFIEIHPDLSFISEQRLADQIRVIHRNNQITAEERELIKIRVGQTNNITLTEHLTYNIQQTDRTSTSTNPNLTQTQPEIENISEEHLNSETHSYKNKTSHNTTIAEDKGIALENDFEHAFQYFSTLNPTERCYIPKQRPSKKLALIVDFINTKILPNHIQSETDFETLQTVLYCAAWSAAKANGAKLNIPPKSDAEINKQKKKIPKWQTRIESRIDDLRAKIGRLQQYIRGNRTDHINKHVQKIFEHYKIHTMHEEPNTNLTEFLDTLRQKLTVLCSRVKRYKTCTLRKTQNNQFSSNEKQFYRTLKTSSTNQTEPNSNGEQSINTVPHEDDLHAYWSKLWENPVNHRLDAQWIESEVVNVQNSQPMQFDFIPVEVFKNVIKKLHNWKAPGSDNIHNYWYKKFSHIHPFLHNYINQFVQNPETMPKYITSGITYMLPKDQNDTLNPAKYRPITCLQTIYKILTSCLTAIIYTHIETNHLLTEQQKGCRKFSQGCKEQLIIDSVVLGQVQQKKKDLYSIYIDYKKAYDSVPHTWLLKVLEIYKIHPTVVAFLQNTMTKWTTRLKINTPFESRLTDSIKIQRGIFQGDALSPLWFCLALNPLSNALNTTEIGYPLEYTTIDTGPPTDKHKYHLNHLLYMDDIKMYANTQDDLNKLVEITEKFSQDICMEFGIDKCKVNSVKEGQPYEHHYQLQTGQQIDPLDICGAYKYLGFKQSKQIHFKETKTGLTHQFQHRLNAIMKTQLHSKNIIKAVNTYAVPVLTYSFGVIPWSKSELVNIQRKINVTMTRNRKHHPKSCIQRLTLARAEGGRGLIDILNLHNKQISCLRSYFHNKADTSTLHSAIIKNDTNLTPLNLQSRLTQKNEVQTDRLTKLNEWSQKALHGRFYRDLNLPHVDKDASNEWLRRGEMFPETEGFMLAIQDQVVETKNYQKHIMKLPNIVDRCRRCHSAPETIQHITGACKTIVQTDYKHRHDQVANILHQKLALKYNLIKPPSEPYYKYKPEIILENSTHKLYFDRAILTDKTTHFNRPDITLIDKINKTASIIDIAVPNTHNIQTTIVEKLSKYTDLKDEITRMWQLQKVTIIPIVLSTTGVIPKQLHQSIRTLHLPKSLYISLQKAVILNSCRIVRKFLQLDTGTTPLNEANNRNGDVHLA

SEQ ID NO: 31100 - protein, 1326 aa, Tuta absoluta
MNKFIWRTYLIITKLEIHTKRFTNPLYEQFNAKFNTNISKQKITSQRRDIINKKLVPDKTLQEIREEVKQLLENPKSNTTEQPININKTIDKSVPPNSLHSSISETLPINATTPNNAISESQGSTLSAMRPATTKAGKERKRLQWHTINRELLELYYTITDNENNLTGYRPQLHSKFIEIHPDLSFISEQRLADQIRVIHRNNQITAEERELIKIRVGQTNNITLTEHVTYNIQQTDRTSTSTNPNLTQTQPEIENISEEHLNSETHSYKNKTSHNTTIAEDKGIALENDFEHAFQYFSTLNPTERCYIPKQRPSKKLALIVDFINTKILPNHIQSKTDFETLQTVLYCAAWSAAKANGTKLDIPPKSDAEINKQKKKIPKWQTRIESRINDLRAKIGRLQQYIRGNRTDHINKHVQKIFEHYKIHTMHEEPNTNLTEFLDTLRQKLTVLCSRVKRYKTCTLRKTQNNQFSSNEKQFYRTLKTSSTNQTEPNSNGEQSINTVPHEDDLHAYWSKLWENPVNHRLDAQWIESEVVNVQNSQPMQFDFIPVEVFKNVIKKLHNWKASGSDNIHNYWYKKFSHIHPFLHNYINQFVQNPETMPKYITSGITYMLPKDQNDTLNPAKYRPITCLQTIYKILTSCLTAIIYTHIETNHLLTEQQKGCRKFSQGCKEQLIIDSVVLGQVQQKKKDLYSIYIDYKKAYDSVPHTWLLKVLEIYKIHPTVVAFLQNTMTKWTTRLKINTPFESRLTDSIKIQRGIFQGDALSPLWFCLALNPLSNALNTTEIGYPLEYTTIDTGSPTDKHKYHLNHLLYMDDIKMYANTQDDLNKLVEITEKFSQDICMEFGIDKCKVNSVKEGQTYEHHYQLQTGQQIDPLDICGAYKYLGFKQSKQIHFKETKTGLTHQFQHRLNAIMKTQLHSKNIIKAVNTYAVPVLTYSFGVIPWSKSELVNIQRKINVTMTRNRKHHPKSCIQRLTLARAEGGRGLIDILNLHNKQISCLRSYFHNKADTSTLHSAIIKNDTNLTPLNLQSRLTQKNEVQTDRLTKLNDWSQKALHGRFYRDLNLPHVDKEASNEWLRRGEMFPETEGFMLAIQDQVVETKNYQKHIMKLPNIVDRCRRCHSAPETIQHITGACKTIVQTDYKHRHDQVAHILHQKLALKYNLIKPPSEPYYKYKPEIILENSTHKLYFDRAILTDKTTHFNRPDITLIDKINKTASIIDIAVPNTHNIQTTIVEKLSKYTDLKDEITRMWQLQKVTIIPIVLSTTGVIPKQLHQSIRTLHLPKSLYISLQKAVILNSCRIVRKFLQLDTGTTPLNEANNRNGDVHLA

SEQ ID NO: 31101 - protein, 1453 aa, Tuta absoluta
MRLRNRVIPQVGPRPEVRESHPVPSGSGSPIVCEGGNISLSAQSPTVADTKENPAADIPTLNPLSPISSSHSLFPSPCSSPNPFEYPILSRSSTVSPLSVDVEQEAECLDLAPTAGIKRTRTIFTDEMNKFIWRTYLIITNLEIHTKRFTNPLYEQFNAKFITNISKQKITSQRRDIINKKLVPDKTLQEIREEVKQLLENPKSNTTEQPININKPIDKSVPPNSLHSSISETLEINATTPNNAISESQGSTLSAMRPATTKAGKERKRLQWHTINRELLELYYTITDNENNLTGYRPQLHSKFIEIHPDLSFISEQRLADQIRVIHRNNQITAEERELIKIRVGQTNNITLTEHVTYNIQQTDRNSTSTNPNLTQTQPEIENISEEHLNSETHSYKNKTSHNTTIVEDKGIALENDFEHAFQYFSTLNPTERCYIPKQRPSKKLALIVDFINTKILPNHIQSETDFETLQTVLYCAAWSAAKANGTKLNIPPKSDAEINKQKKKIPKWQTRIESRIDDLRAKIGRLQQYIRGNRTDHINKHVQKIFEHYKIHTMHEEPNTNLTEFLDTLRQKLTVLCSRVKRYKTCTLRKTQNNQFSSNEKQFYRTLKTSSTNQTEPNSNGEQSINTVPHEDDLHAYWSKLWENPVNHRLDAQWIESEVVNVQNSQPMQFDFIPVEVFKNVIKKLHNWKAPGSDNIHNYWYKKFSHIHPFLHNYINQFVQNPETMPKYITSGITYMLPKDQNDTLNPAKYRPITCLQTIYKILTSCLTAIIYTHIETNHLLTEQQKGCRKFSQGCKEQLIIDSVVLGQVQQKKKDLYSIYIDYKKAYDSVPHTWLLKVLEIYKIHPIVVAFLQNTMTKWTTRLKINTPFESRLTDSIKIQRGIFQGDALSPLWFCLALNPLSNALNTSEIGYPLEYTTIDTGPPTDKHKYHLNHLLYMDDIKMYANTQDNLNKIVEITEKFSQDICMEFGIDKCKVNSVKEGQTYEHHYQLQTGQQIDPLDICGAYKYLGFKQSKQIHFKETKTGLTHQFQHRLNAIMKTQLHSKNIIKAVNTYAVPVLTYSFGVIPWSKSELVNIQRKINVTMTRNRKHHPKSCIQRLTLARAEGGRGLIDILNLHNKQISCLRSYFHNKADTSTLHSAIIKNDTNLTPLNLQSRLTQKNEVQTDRLTKLNDWSQKALHGRFYRDLNLPHVDKEASNEWLRRGEMFPETEGFMLAIQDQVVETKNYQKHIMKLPNIVDRCRRCHSVPETIQHITGACKTIVQTDYKHRHDQVANILHQKLALKYNLIKPPSEPYYKYKPEIILENSTHKLYFDRAILTDKTTHFNRPDITLIDKINKTASIIDIAVPNTHNIQTTIVEKLSKYTDLKDEITRMWQLQKVTIIPIVLSTTGVIPKQLHQSIRTLHLPKSLYISLQKAVILNSCRIVRKFLQLDTGTTPLNEANNRNGDVHLA

SEQ ID NO: 31102 - protein, 899 aa, Tuta absoluta
MHEEPNTNLTEFLDTLRQKLTVLCSRVKRYKTCTLRKTQNNQFSSNEKQFYRTLKTSSTNQTEPNSNGEQSINTVPHEDDLHAYWSKLWENPVNHRLDAQWIESEVVNVQNSQPMQFDFIPVEVFKNVIKKLHNWKAPGSDNIHNYWYKKFSHIHPFLHNYINQFVQNPETMPKYITSGITYMLPKDQNDTLNPAKYRPITCLQTIYKILTSCLTAIIYTHIETNHLLTEQQKGCRKFSQGCKEQLIIDSVVLGQVQQKKKDLYSIYIDYKKAYDSVPHTWLLKVLEIYKIHPTVVAFLQNTMTKWTTRLKINTPFESRLTDSIKIQRGIFQGDALSPLWFCLALNPLSNALNTTEIGYPLEYTTIDTGPPTDKHKYHLNHLLYMDDIKMYANTQDDLNKLVEITEKFSQDICMEFGIDKCKVNSVKEGQPYEHHYQLQTGQQIDPLDICGAYKYLGFKQSKQTHFKETKTGLTHQFQHRLNAIMKTQLHSKNIIKAVNTYAVPVLTYSFGVIPWSKSELVNIQRKINVTMTRNRKHHPKSCIQRLTLARAEGGRGLIDILNLHNKQISCLRSYFHNKADTSTLHSAIIKNDTNLTPLNLQSRLTQKNEVQTDRLTKLNDWSQKALHGRFYRDLNLPHVDKEASNEWLRRGEMFPETEGFMLAIQDQVVETKNYQKHIMKLPNIVDRCRRCHSAPETIQHITGACKTIVQTDYKHRHDQVANILHQKLALKYNLIKPPSEPYYKYKPEIILENSTHKLYFDRAILTDKTTHFNRPDITLIDKINKTASIIDIAVPNTHNIQSTIVEKLSKYTDLKDEITRMWQLQKVTIIPIVLSTTGVIPKQLHQSIRTLHLPKSLYISLQKAVILNSCRIVRKFLQLDTGTTPLNEANNQNGDVHLA

SEQ ID NO: 31103 - protein, 1478 aa, Tuta absoluta
MRLRNRETPQVGPRERESHPGPLGSGYPIVSGGGNVSLSTQPKAVVDHTHKENLDQDILNLPTTSYPSSPTSSIHSLFLSPSSSPNPFEYHLPSRSSTVTPMSVDVEQEAECLGLAPTTSIKRTRTTFTGEMNKFIWRTYLKLTKLEKHTKRFLAPLHSQFTAKFPHTKVTIQKIGAQRRDIINKNILTDQIREEIREEVTQLLQLSNHTDIPNNAIPELESNNNSQTISHNHVNCSKSNNLTHTESTTFTPDNGALSNMRPATTKAGKDRKRMHWPDEINRELLKYYYIITDNENNLTSWRPQLHKKFIDSHPELSFISEQRLADQIRVIIRNNKISIEERDQIKIQTAQECNISQTYIPAHSQQTYNTDNHLTPNHTNLNNCNRRYSDVVRNTQIAIDTYQTQTIDDLNAETPLQECSNGDPEQDPVSELINCNSIDEEKLLEIEKIFKQALEYYSNIEPTERSYIPRQNPSKKLAIIVQSINMKILSKYVNKETDYNTLQTALYCAAWTAAKSNGAKISIPPKTTTPLKNKKKSRWQRRLESRIEDLRAKIARLTQYIKGNRSEHIKRHVQKIFDHYKIHSTHEEPNTQYLEFLDTLRQKLTVLSSRLKRYNTCTLRKTQNSQFISNEKQFYRTLKTSTTNQMQSSSQTTEHDLIPNTEEMHTFWAKLWENPVKHKSDAQWIKSEEANNLNCHEMEFEFIPAEIFQEVIRKLHNWKTPGSDNIHNYWIKKFTHLHPFLHNHINEFIKQPQTMPKYITAGITYMLPKDKNDLMNPAKYRPITCLQTIYKIITSCLTTVIYTHLETNKILTEQQKGCRKFSQGCKEQLIIDSVILSQVQQKKKNLYSMYVDYKKAYDSVPHSWLLKVLEIYKIHPSIVTFLQNSMENWTTQLRLNTPTITRNTCSIKIQRGIFQGDALSPLWFCLALNPLSNALNTTYLGYSLKFINNSAEKPTSTYNLNHLMYMDDIKLYAVNEEDLIKLADITETFSTDIKMEFGIDKCKINSVKLGQTYEHHYQLQSGQQIEPLDENSSYKYLGFHQSKQIHYKEIKNNLLHQFKHRLNSIMKTYLQSKNIIKAVNTYAIPVLTYSFGVIPWTKTELLNIQRLINVTMTRNRKHHPKSCVQRITLTRTDGGRGLIDVTNLHNKQITCLRSYFHQKSTSSTLHAAIVANDCKFTPLNLYDITTQKNESQLDRQTKLNEWAQKTLHGRFYRDLNMPQVDKNASNEWLKRGEMFPETEGFMLAIQDQVIETRNYQKHILKLPNIIDICRRCQSASETIQHITGACKTIAQTDYKHRHDQVANIIHQKLAIKYKLIQPPAIPYYKYHPESILENATHKLYFDRAILTDKTTHFNRPDITVIDKLNKTAKIIDIAVPNTHNLQSTVAEKLSKYIDLKDEITRMWRLQNVVIVPIVLSTTGVIPQQLHQSLKTLELPSQTYNKLQKAVILNTCRIVRKFLQTDISIPITTHNTQEDDHLA

SEQ ID NO: 31104 - protein, 1454 aa, Tuta absoluta
MRLRNRVIPQVGPRPEVRESHPVPSGSGSPIVCEGGNISLSAQSLTVADTKENQTPDIPITNPPSPVSSTRSLFLSPCSSPNPFEYPIPSRSSTVSPLSEDVEQEAECLELAPTTGTRRTRITFTDEMNRFIWRTYLTITKLERCTKRFTDQLHKQFLEKFTDIHISKQRVVTQRRDIINKKLLRIETLENIKEEVKKELYSTNTNITNSRTNSDIVGTLNIAHHSGTEKLSIDDTTSRVASESQGTALADMRPATTKAGKERKRLQWHTINKELLKLYYIVTENENNLTGYRPQLHKKFIEMHPDLSFISEQRLADQIRVIHRNNQISPEERESIKLQVAQINNSPLIHRITENTQQTKNYSLRPNQTQHSSAIIHPEPDTSTEGHINLETELQANTNTHSSTIGHSKGIEIEKSFDQALQFFSNLNPTKRSYIPKQRPSKKLALIVDYINNKILPQYMQNETSFENLQAVIYCAAWAAAKANGAKIEIPPKPERAVTKHEKKTPKWQKRLESRIDDLRAKIGRLTQFMNGNRSDHIKKHVQKIFEQYKIHTSHEEPNTNLSEFLDTLRQKLSLLCSRIKRYKTCTLRKSQNRQFTSNEKHFYRALKISTTNQTEPNTNSNNRQANNTVLKTEDFHAYWSKLWETPVDHKLDAEWIKNEEKSAESTEPMQFDFIPVEVLINVIKKLHNWKAPGSDNIHNFWYKKFTYIHPFLHNFINKFVQNPETMPKYITAGITYMLPKDQNDTLNPAKYRPITCLQTIYKIITSCLTSVIYTHIEANNLLTEQQKGCKKFSQGCKEQLVIDSVILGQVQQKKKDLFSTYIDYKKAYDSVPHTWLLKVLEIYKIHPTVITFLQNTMTQWTTRLKLPCNTYPETNLTDTIKIQRGIFQGDALSPLWFCLALNPLSNALNRTKLGYPLEYSSADEDLLTDKNKYHLNHLLYMDDIKLYADKQEDLNKLIQITEHFSQDINMEFGIDKSKVNSVKAGQTYKHHYHLESGQQIDPLDAMATYKYLGFHQSKQIHYKETKSSLIHQFKHRINAIMKTYLQSRNTIKAVNTYAVPVLTYSFGIIPWTKAELLKIQRMINVTMTKNRKHHPKSCVQRVTLTRNDGGRGVIDVANLHNKQISCLRSYFYSKTETSSLHAAIVFNDTRFTPLNLHNSLTQRNEVQTDRQTKLNDWSQKALHGRFYRDLSLPHVDKEASNEWLRRGEMFPETEGFMIAIQDQVIETRNYQKHILKLPNIIDRCRRCHSAPETIQHITGACKTIVQTDYKYRHDQVANIIHQKLAIKYNLIETPATPYYKYHPEVILENSTHKLYFDRAILTDKTTHYNRPDITLIDKIKKTANIIDIAIPNTHNLQSTISEKLSKYIDLKDEIKRMWHLQNVTIIPIVLSSVGVVPKQLHKSIKTLDLPKSIYFNLQKAVILNTCRIVRKFLQVDATFSNEPESVQNDVHLA

SEQ ID NO: 31105 - protein, 1448 aa, Heliothis virescens
MRLRNRVLPQAGTGANRDGESRTRPSGLVCPSYSGGGDVSQLTAQSQTVAAQQENSSSSSSPKSLFSSLPSSPPSYLLRSSRSSPISLESVDVVAEVAQTNDPSPTTASTTTRKKWSQEMNEFIWRTYLIITNLETDTNAYLTSLHEQFLNKFPNMNVSRQRIGDQRRAIVNKKLLPFNVLDRIRHEVRNSLTETSYIQIQDNTPQENLLPQTQTQSYSQSHSHSHSQSQSQSQSHSQSQSQSHSQSQSKRRMKWSNAVNETLMLCYYKVTKMETDMTAWRKKLRDSFIEHNPHLSHLSEQRISDQKRVIVNNNMISETRLQQLKTIVESELIELDTFNLTNDQTHTILINESLQQTIHTNTLNFHVDNMEGMQSHQTELEVQIDLINNISLGDNTQRTDNERIPEIDKIFEDTLQYYKDSQPTERSYIPKQKSSRKLANIISYIDNTILKEHLTADIDFNQLQTLIYCAAWTAAKANGSKISLVPAGNKNRRNTKYIPKWQKRLEHKIETLRAKIGRLTHFIRGHRSTKLTRQVDLILKQHRIHTSHEDPNTQLSHFLDTLKQKLTVAKSRLCRYKKCTLRKTQNNLFKHNEKQFYRTLKNATTNQTTSNTTTHLPAPTTEQLQQFWAGIWENPVGHNTEAMWIGEEEAIHSNAEDMQFDCVEVQTFHAVLDKLHNWKAPGSDHIHNFWYKKFTRIHSHLFNHINNFIKHPSLIPPYITEGITYMLPKDPNDPCNPAKYRPITCLQTIYKIMTACITHVIYEHLEANNILTEEQKGCRKFSQGCKEQLTIDAVILKQVQRKKKDLYTMYIDYKKAYDSVPHSWLLKVLHIYKIHPQIVTFLNSIIQKWKTRLHLNTPTGTVETELIQIQRGIFQGDSLSPLWFCLALNPLSNKLNALRPGYQLQFEDAINENQIFHQNCKINHLMYMDDIKLYASSPEDLAELARVTEEFSKDIAMEFGIDKCKINSIRAGNTYTHSYELQTGDIINSLDENGTYKYLGYIQAKQILDKEIKTTLTKQFKHRLNTIFNTQIYAKNTIKAINTYAIPILTYSFGIINWNKTDLKNLQRIINTTLTKHRRHHPRSCVQRLTLPRSEGGRGLIDITNLHNKQITILRTYFNNKATKSTLHKAIVSNDKKLTPLNLADNTPQPNEKQTNRQTKIAEWTQKSLHGRHRHDLNQPNVDKLASNEWLRRGELFPETEGFMVAIQDQVIETRNYQKHIIKSSIPTDICRRCNSSSETIQHITGACKAIVQTDYKHRHDQIANIIHQKLAIKYKLITTPPVPYYKYQPETVLENTTHKLYYDRAILTDRTTHYNRPDITLLDKINKTAQIIDIAVPNTHNLQNTIAEKLSKYTDLKIEISRMWQLQNVAIVPIVVSTTGVIPKQLHQSIKTLDLPPYTYQTLQKAAILNTCRIVRKFLQTENEIALLPSHTRPTNTHIITQPQEHA

SEQ ID NO: 31106 - protein, 1387 aa, Craniophora ligustri
MITRSKTKKAVQANNAAVDCGTSPGSSSASPRSIYSSIISSPPSYSRSLRSSSTSSPVSLDVVLEANSAEHPSPATDLTITRRKWSVEMNKFIWRTYLIVTKLETDTKAYLTSLHQQFIEIFPNMNVSKQRIGDQRRAIINKNLLPPSTIESIRIEVQNIIGTQATESHTNNLTPAQIPTSQAETQSQGQPNRRMKWSNELNETLMRCYFRATKMETDLTVWRKTLREKFIECYPHLSHLSEQRISDQKRVIMNNGMISELRLQVIKLMVEEELLETHTREQYLNSSNIHLQLFTNNNTPTEEGETEFNLFQDIDLDHLTQSETQHTITNPNISLERDDKIDELFSEALFHYTNTCPTQRPYIPKQKSSKHLAKIVSYINKIILPVHITNNTDFDNFQTVIYSAAWTAAKANGSKISLSCNENNYSYQKDQKPKWQKRLEHKIKIIRAKIGRLTHYMNGHRSRKLIRQVNLILDNCRTHTLHEEPNTQLQHFLDTLKQKLSVANSRLIRYKKCTLRKTQNYQFNNNERQFYRTLKKTTTNHTTPNNCRNNTHPTAPPEGELHRFWAGIWENPIYHNSEADWIKTEMSTNTEPMNFDKIEIEIFQDVLLRLHNWKAPGTDHIHNFWYKKFTYIHLHLFNHINNFITNPSTLPSYITEGITYMLPKDQNDTINPAKYRPITCLQTIYKIITSCVTRSIYSHLDTNCILAEEQKGCRKFSQGCKEQLTIDSVILKQVQRKKKDLCTMYIDYKKAYDSVPHSWLLEVLNIYKIHPLIKNFLKSIIDKWNTRLHLNTSTGSIETNPIKIKRGIFQGDSLSPLWFCLALNPLSKILNSLKPGYLLQYNDTAIDGLTNKQFCKINHLLYMDDIKLYASSPGELSELANMTEKFSNDIAMEFGIEKCKINSMIAGKTFRHSYEVETGETIDSLDESGTYKYLGYIQSKQILHKEIKSTLFKQFKHRLKTICNTQIYSRNTVKAINSYAIPILTYSFGIINWNKSELKNLQRIINTTLTKHRKHHPRSCVQRLTLPRKEGGRGIIDIRNLHNKQITTLRTYFNSKCTTSTLHKAIAYNDQKLTPLNMFDKTTQNNEALTDRQTKIFEWAQKSLHGRHHHDLNQTNVDKLASNEWLRRGELFPETEGFMTAIQDQVIETRNYQKYIIRAPLPTDSCRRCNSSSETIQHITGACKAIVQTDYKHRHDQIANIIHQKLAIKYKLISTPPTPYYKYTAETVLENNTHKLYYDRAILTDRTTHYNRPDITLLDKTNKTAHIIDIAVPNTHNLQNTIAEKLAKYTDLKIEIARMWRLSSVTIVPIVLSTTGVIPNQLHQSLKILDLPPYTYYNLQKAAILNTCRIVRKFLQNDTETEITITNTRTHHNTPITSSQHNIILSS

SEQ ID NO: 31107 - protein, 1433 aa, Heliothis virescens
MRLRNRVLPQAGTGANRDGESRTRSSGLVCPSYSGGGDVSQLTAQSQTVAVQQENSSSSSSPKSLFSSLPSSPPSYLLRSSRSSPISLQSVDVVAEVAQTNDPPPTMAASTTTRKKWSQEMNEFIWRTYLIITKLETDTNAYLASLHQQFTDKFPNMIVSRQRIGDQRRAIVNKKLVPSNVLDKIRDEVRNILESESNSEILEHVRTENLTYQTQTQTHTQSEPKRRMKWSNILNETLMLCYFRVTKMETDMTAWRKNLKDSFVEHNPHLSHLSEQRISDQKRVIVNNNMISETRLQQLKTIVESELIETNTLRNNEHRTHTDLLNDNSEQPINIPTPNLDRDNIEVLQSHQTELEAEINIINNINLEHITQETGSERNPEIDTIFKEALEYYKDTQPTDRSYIPKQRSSTKLAKIISYIDNTILSEHLTTEVEFNQLQTLIYCAAWTAAKVNGSKISLAPVENANRHKTKYTPKWQKRLEYKIEVLRAKIGRLTHFIRGQRSTKLTRQVDLILKQHRIHTSHEEPNTQLTHFLDTLKQKLTVVTSRLSRYKKCTLRKTQNHQFQHNEKQFYRTLKTSTTNQTTSNSITSTTSPTAEQLQQFWAGIWENPVGYNTEAQWIGEEEAIHANTDEMQFDCIEVQTFHEVLNRLHNWKAPGSDHIHNFWYKKFTRIHSHLFNHINNFIKHPSSIPSYITEGITYMLPKDPNDATNPAKYRPITCLQTIYKIMTACITLIIYRHLETHNILTEEQKGCRKFSQGCKEQLIIDSVILKQIQRKKKDLYTMYIDYKKAYDSVPHSWLLRVLQIHKIHPQIITCLGSLIETWKTRLHLNTPTGKVETELIKIQRGIFQGDSLSPLWFCLALNPLSNKLNALRPGYQLQFEDAINDAQIFHQNCKINHLLYMDDIKLYASSPEDLTELARITEEFSKDISMEFGVDKCKINSIRAGETFTHSYELQTGDTIDSLDENGTYKYLGYLQAKQVLDKQTKITLIKQFKHRLKTIFSTQIYARNTIKAVNTYAIPILTYSFGIINWNKTDLKNLQRIINTTLTKFRRHHPRSCVQRLTLPRTEGGRGLIDITNLHNKQITILRSYFNAKATTSTLHRAIVSNDTKLTPLNLADTNPQPNEKQTDRQTKIAEWTQKSLHGRHRHDLNQPNVDKKASNEWLRRGELFPETEGFMMAIQDQVIETRNYQKHIMKASIPTDICRRCNSSSETIQHITGACKSIVQTDYKHRHDQIANIIHQKLAIKYRLITTPPVPYYKYQPETILENTTHKLYYDRAILTDRTTHYNRPDITLLDKTNRTAQIIDIAVPNTHNLQNTIAEKLSKYTDLKIEISRMWKLQNATIVPIVLSTTGVIPKQLHQSIRTLDLPPYIYQSLQKAAILNTCRIVRKFLQTDNETTVVPSHTRPTHTPRTQPQEQTQNTNILSYFLG

SEQ ID NO: 31108 - protein, 1276 aa, Anisynta dominula
MNEFIWRTYLIITKLETDTNSYLTSLHQQFICRFPQMNVSKQRVGDQRRAIVLRKLLPASTLDTIKLEVSNSLQTKHIQIHNQSQCELSTLQANTHLESQPKLRMKWSNELNETLIKCYFIITKMETDMTIWRKKLRTQFIEIYPHLSHLSEQRISDQKRVIINNNRISETRIQEIKIYAEKEINHMNSLAQIQSSTNTDIGIVNIEHPHSLEISEENEPNYLTSINVEAIQHSNISTEISHEINKKLEDTFSQTFEYFTNTQPTNRTYIPKQKTSRKFANIVNYINHIILPKYTYTDIDFETLQTMIYSAAWTAAKINGSKLSYVPTDNIPKNHQEAYKPKWQKRLNNKIKDLRVKIGRLTHFMQGNRGRKLVKEVNKILTHNRIHTIHEEPNTQLTHFLDTLKQKLTLLSSRLNRYTKCTHRKTQNNQFKNNEKLFYRTLKNTTTNQNKQNNTENNSISIEALKQYWTRIWENPLSHNRDADWIKQEIENQSNTEHMQFEHIPIGIFQDILKKLHNWKAPGSDYIQNFWYKKFTHIHPHLYYHINNFIKNPSKIPSYISEGITYMLPKDHSDINNPAKYRPITCLQTVYKILTSCITQLIYEHLENNKILCEEQKGSRKLSQGCKEQLTIDSVILKHAQKTKNDLYTMYVDYKKAYDSVPHTWLLEILKIYKIHPEIITFLSHVIEEWTTRLHLKTPSGIVETEPIRIQRGIFQGDSLSPLWFCLALNPLSNKLNSLRPGYVLKLNNTRSDTLTDQQECKVNHLLYMDDIKLYASTSDHLDELASTTEQFSGDIRMEFGIDKCKINSVKAGHTHHHSYTIQTGEIIESLDENDAYKYLGYIQSKQIKHQEIKATLKQQFKHRLKSILNSQLQAKNTIKAINTFAIPVLTYSFGIISWTKAELKSLQCVINTTMSKHRKHHPRSCVQRLTLPRKEGGRGIIDILNLHNKQISILRAYFHNKSTTSNLHNAIVSNDCKFTPLNMHNKTEQNNEKQTDIQTKIALWTQKSMHGRHRHDLGQPNVDKLASNEWLSRGELFPETEGFMVAIQDQIIETRNYKKHIMRVSQITDICRRCNSSSETIQHITGACKSLAQNDYKHRHDQLAKIIHQKLATKYNLISTPATPYYKYNPEIVLENKTYKLYYDRAILTDKTIHYNRPDITLIDKINKTAQIIDIAVPNTHNLQNTIAEKLTKYTDLKIEITRMWGLHKVFIIPIVLSTTGVIPKQLHQSLKNLGLSPYIYQSLQKAAILNTCRIVRKFLQNDIETHTTTSIRPP

SEQ ID NO: 31109 - protein, 1396 aa, Signeta flammeata
MRLRSRNIVPQAGTSNGESRPEPAGLGSPTYSGEGAVLLPLVHQDTNVTTINPSTSSPSSSTYSNFPSPSSSPYSFQNYSNSRSSTVTPMPVNVVQEANAKQPSPATGRKITRKKWSVEMNEFIWRTYLIITKLETDTNSYLTSLHQQFLHRFPQMDVSKQRVGDQRRAILYRRLLPASTLDAIKLEVSNNLQINHTQVHSQSLTQLSTLPVNTHHETQPKPRMKWSNELNETLMKCYFITTKMETDMTIWRKKLRTKFIEIYPHLSNLSEQRISDQKRVIINNNRISETRLQEIKIYAENKISQTDSLEPKDHPNSQKVIEHIQDVTNTNTRIVDTAHPHSIEIREENESNYLTPINGEDMQHDNTSTEISHEINEKLEETFSETFEYFKNTHPTNRIYIPKQKTSRKFANIVSYINHIILPKYIYTDIDFETLQTIIYSAAWTAAKTNGSKLAYAPTDNSPITHQKAHKPKWQERLNSKIKDLRVKIGRLTHFIQGNRSRKLVKEVDKILSHNRLHTIHEEPNTQLTHFLDTLKQKLTLLSSRLSRYIKCTHRKTQNNQFRNNEKQFYRTLKNATTNQNNQNNTENNSLPIAALKQYWTGIWENPLIHNHDAGWIKQEIENQANTVNMQFENVPLGIFQDTIKKLHNWKAPGSDYIHNFWYKKFTHLHPHLYNHINNFLKNPSQIPPYISQGITYMLPKDHSDTNNPAKYRPITCLQTVYKILTSCITQLIYEHLENNKILCEEQKGCRKHSQGCKEQLTIDSVILKHAQKNKSDLYTMYIDYKKAYDSVPHTWLLEVLNIYKIHPEIITFLHHVIKEWTTRLHLKTPSGIIETEPIRIQRGIFQGDSLSPLWFCLALNPLSNKLNSLGPGYLLKQNNTLHDTLTDQQEFKINHLLYMDDIKLYASTSDHLDQLACITEQFSGDVRMEFGIDKCKINSVKAGQTHHHSYTIQTGEIIDSLEENDVYKYLGYIQSKQIKHQEIKATLKLQFKHRLKSIFDSQLQAKNTTKAINTFAIPVLTYSFGILNWTKTELKTLQCVINTIMTKHRKHHPRSCVQRLTLPRKEGGRGIIDITNLHNKQISILRAYFHDKSATSNLHNVIVANDRKFTPLNLHDKTEQKNEKQIDIQTKLLQWTQKSMHGRHHHDLGQPNVDKLASNEWLSRGELFPETEGFMIAIQDQIIETRNYQKHIMRLPRITDICRRCNSPSETIQHITGACKALVQNDYKHRHDQLAKIIHQKLAIKYNLIPTPSTPYYKYNPEIVLENKTHKLYYDRAILTDKTIHYNRPDITLIDKINKTAQIIDIAVPNTHNLQNTIAEKLTKYTDLKIEINRMWRMNKVVIIPIVVSTTGVIPKQLQQSLKILGLSPYTYQSLQKASILNTCRLVRKFLQNDI

SEQ ID NO: 31110 - protein, 1393 aa, Dalla eburones
MRLRSRQIVPQAGTSNGESRPEPAGSGSPTYSGEGAVLLPLVHSNGQDTNETVNINLSSPISSSYSIFQSPSSSPHSFQNSSNSRSSTVTPMPADVVEEANANKPLPAVDKNCTRKKWNEEMNKFIWRTYLTITNLETETNSYLTLLHQQFIDRYPQMDVSKQRIGDQRRAIVHKKLLPSTTLDAIRLEVSNSLQMHLHSPQVDTHLISQGKSRMRWSNELNETIIKCYFITTKMETDMTVWRKKLRDMLIQIYPQLSHLSEQRISDQKRVIINNKRIAETRLQELKAYAEIEIETNHTEYSNQNGHRILQTVTRNLQIQPITNNSIDIVNTYQQSTASDTRLENEHNFIGCTDAEAIQNNNTNKEISHVPNQELEETFDQTLKFYTKTHPTNRIYIPKQKTSRKFANIVHYINNIILPKYIHSDTDFETLQTIIYCSAWTAAKTNGSKLSFTAAENVNINRQNNYKPKWQKRLEGKIKDLRAKIGRLTHYINGFRSPKLVKEVNAIMNNYRIHTIHEEPNTQLTHYLDTLKQKLSLVNSRLIRYTKCTLRKTQNNKFTNNESQFYRTLKNATTNQTPPTDQTSSENSLPPIGELQQFWAGIWENPVSHNLQADWIKTEVENQSSTEHMQFDHVPIDIFKDTIKSLHNWKAPGSDYIHNFWYKKLTYIHPYLYNHINNLIQNPAKIPPYISQGITHMLPKDDTDTNNPAKYRPITCLQTIYKIISSCISNLIYEHLQKNEILTEEQKGCRKFSQGCKEQLIIDSVVHKHAQRNKKDLHTMYVDYKKAYDSVPHTWLIGVLNIYKIHPQITSYLTQVMKQWTTRLHLKTAAGIVQTEPIKIQRGIFQGDSLSPLWFCLAINPLSNKLNSLRPGYTLQLTDIRNDTLTDRQDYKINHLLYMDDIKLYASTPDNLDELASTTEQFSTDIRMEFGIEKCKINSVIAGETHQHSYTLQTGENIDSLDENDTYKYLGYIQSKQIKHKEIKTKLKQQFKHRLRSIFNTELQARNTIKAINTFAIPVLTYSFGIISWTKAELKNLQRVINTSLTQHRKHHPRSCVQRLTLPRKEGGRGIVDITNLHNKQISTLRTYFNYRSTTSNLHKSIVYNDRKFTPLNMLDKTNQTNEKQTDTQTKILEWTQKSLHGRHRHDLSQPNVDKLASNEWLSRGDLFPETEGFMIAIQDQVIETRNYRKHIMRVPQTMDICRRCNSCPETIQHVTGACKALVQGDYKHRHDQLAKIIHQKIALKYNLISPPIIAYYNYNPETVLENNTYKLYYDRAILTDKTTHYNRPDITLIDKIRKTAQIIDIAVPNTHNLQNTIAEKLAKYTDLKIEISRMWRLSNVTIIPVVVSSTGVIPKQLHQSLKSLDLAPFTYRSLQKAAILNTCRIVRKFLQN

SEQ ID NO: 31111 - protein, 1390 aa, Odontoptilum angulatum
MRLRSRYIVPQAGTSNGESRPQPPGSGCPTYSGEGTVLLQSVHSSIQDKGEITVHHSSPDSSIFSTFPSPSSSPHSYQNSLTSRSSTVTPIPTDNAQQAKTKKTVPTSGKTTRKKWSIEMNEFIWRSYLLITKLETESNSYLTTLHQQFIHRFPQMEVSKQRVGDQRRAIVQKKLLSTQALHNIRLEVMTILQTKSTESHNQPVTQIVNTLQNNMQSQPLVKGRMKWSNELNETLIKFYLIATKMETDMTMWRKKLRNMFIEFFPQLSHLSEQRISDQKRVIINNNRIPRERFEELRILAEKEISKSTEPDNIKKTHSQTSKGNKQIQTGGDGNIETGTINSHLPPDTHVVDELNYLNSIDVEALQHDNTSTELYPKQNVELEETFTQTLIYFTNTHPTNRTYIPKQKTSRKFANIVSYINTKILPKYVNRDTDFKTLQTIVYCAAWTAAKTNGSKISYALNENTTTTLQKVNSQKPKWQRRLEDKIDDLRRNIGRLTHYIQGYRSRKLTKHVHKILKHYRIHTIHEEPNTQLTHFLDTLKQKLTLLNSRLNRYTKCTLRKTQNTQFKNNEKQFYRSLKSSPTNRIKENNSKDKLPPTDALQQFWSRIWENPLTHNAGSEWIKQEIENQTHTEHMQFKHVPVTIFQEILNKLHNWKAPGTDFIHNFWYKKLTHIHPYLYHYVNEFIKNPLIIPSYISEGITYMIPKDNNDFNDPSKYRPITCLQTVYKIITSCITHLIYEHLENNKILCEEQKGCRKLSQGCKEQLTIDSVILKHAQRNKKDLHTMYIDYKKAYDSVPHTWLIEVLKIYKIHPELITFLKHVIQQWTTCLHLKTDSAIVKTDPIKIQRGIFQGDSLSPLWFCLALNPLSNKLNSLGLGYPLQLNMTTSDTLTDQQKCKINHLLYMDDIKLYASTSDHLDELASTTEKFSRDIKMEFGIDKCKINSIKAGQSYSHSYTLQTGETIQSLDEHDTYKYLGYVQSKQIKHKEIKTTLTQQFNHRLKSILSSQLQAKNTIKAINTFAIPVLTYSFGILKWSKTELKKLQRLINTTLTKHRKHHPKSCIQRLTLPRQEGGRGIIDTINLHNKQISTLRNYFNNKSSTSILHRAIANNDHKFTPLNMSDKTTQKTEKQTDIQTKIADWAQKSLHGRHRHDLSQPNVDKLASNEWLCRGELFPETEGFMMAIQDQVIETRNYQKHIMRIPQIIDTCRRCNSSSETIQHITGACKSLVQNDYKYRHDQLAKIVHQKLALKYNLIPPPIIPYYKYNPQIVLENDTYKLYFDRAILTDKTTHYNRPDITLIDKVNKTAQIIDIAVPNTHNLQNTISEKLAKYSDLKYEISRMWRLNKVSIIPVVLSTTGVIPKQLHQSLKSLQLSPHTYLSFEKVAILNTC

SEQ ID NO: 31112 - protein, 1398 aa, Zygaena filipendulae
METRSKSKGKGPLPGGDRRGTSGADAGCFSIRTVSGEELSRRAPTGDSQPEIATADNFALDIQTDSEPYSPANTASYNPSVQSSPSSVGNRDTLTPALDVAREVNSFLPASTKAGKPRVRMRWNNDVNLFIMRTYYYITKLETDMTIYRKKLHTAFRLHYPEVNVSEQRIADQRRAIERKKLISEEDLRRLKEEVKKQLQENATLTDTHTNTQTGKKTKRMKWTEDINETIVRAYYKITKLETDKTSYRQRLFEMVTSIYPNLLHVSEQRIADQRRFIINKNKISEVRLQQLKEEVRAELELSHDNSIQYAGSEMISVNESPTIVSENVNMDTENIINQIMETPTTPKNTRAADSNNQVTTDHLTDSISYRNQNSVLPEIIDHDIDQTFRSALQTYSETDPTTRTFIPKQKTSKRLSEVISYLNNKLLPKYVSENSDFNTIQTILYCAAWTAAKINGSRISLTQENQQGQKYLKQKPKWQVRLEKKIDELRRKIGRLTQHMNGNPSRILTKQVEKIKNQYKTHSLHECQNKSNSHFLDTLKQKLAVTSSRLKRYKQCTLRKTQNAQFTRNEKQFYRSLKNSSNNVQQTNTENGKVPPPEDLKQFWAAIWDNSVIHNRQADWIADEENKNFQVSQMEFDHIPIETFKEVILKLHNWKTPGSDHIHNFWYKKFTYLHPFIYNHINNFIKNPETMPSYITAGTTYMIPKDLTDLSNPAKYRPITCLQTIYKIITSCLTHLIYTHVETNEILAEQQKGCRKFSQGCKEQLTIDSVILKQAQRKKRQLHTMYIDYKKAFDSVPHSWLLKILEIYKIHPTLIHFLQKTSKTWRTVLKLNTNDGSIETEPIQIRRGIFQGDALSPLWFCLALNPLSNILNSAKIGYPLKYFNAENNEPTDEKLNHLLYMDDIKLYATTKADLHHLTELTETFSNDISMEFGIDKCKINSVSKGKMSHNITFQMQTGQQITSLNENETYKYLGYNQSNQILIKETKAALTKQFKHRLNSIFKTQLYSRNMVKAINTFAIPILTYSFGIINWTKTELESLQRTINTTLTRYRKHHPKSCLQRLTLPRTEGGRGIVDIINLHHKQIASLRKYFHNKIHTSTIHASIVENDDRLTPLNLKDYRTQPNEVITERQTKIDEWTQKSMHGRHRQELCKSNVDKDASNAWLTQGELFPETEGFMVAIQDQVVETRNYQKHIIKVYDLPSDSCRRCNSAPETIQHITSACKSIVQTDYKHRHDQVAKIIHQKLASKYKLISNEPVPYYKYTPESVLENLTHKLYFDRAILTDRTTHYNRPDITLVDKSNKTAQLIDIAIPNTHNLQSTISEKLTKYIDLKNEIVKMWKLQSVTIVPVVLSSTGVIPHQLHQSLTTLQLPKYTYITMQKAVILNTCRTVRKFLND

SEQ ID NO: 31113 - protein, 1407 aa, Zygaena filipendulae
METRSKSKGKGPLPGGDRRGTSGADAGCFSMRTVSGEELSRRAPTGDSQPEIATADNFDNFALDIQTDSEPYSPENTASYNPSVQSTPSSVGNRDTLTPALDVAREVNSFLPASTKAGKPRVRMRWNSDVNLFIMRTYYYITKLETDMTIYRKKLHTAFRLHYPEVNVSEQRIADQRRAIERKKLISEEDLRRLKEEVKKQLQENATLTDTHTNTQTGTKTKRMKWTEDINETIVRAYYKITKLETDKTSYRQRLFEMVTSIYPNLLHVSEQRIADQRRFIFNKNKISEVRLQQIKEEVRAELELSHDNSIQYSGSEMISVNESPIIVSENVNMDTENIINQVTETPTKPKSTRAADSNNQVTTDHLTDSISYRNQNSALPEIIDHDIDQTFRSALQTYSETDPTTRTFIPKQKTSKKLSEVIYYLNNKLLPKYVNENSDFNTIQTILYCAAWTAAKINGSRISLTQENQQGQKYLKQKPKWQVRLEKKIDELRRKIGRLTQYMNGNPSRILTKQVEKIKNQYKTHSLHECQNKSNSHFLDTLKQKLAVTSSRLKRYKQCTLRKTQNAQFTRNEKQFYRSLKNSSNNVQQTNTENGKVPPPEELKQFWAAIWDNSVIHNRQADWIANEENKNFQVSQMEFDHIPIETFKEVILKLHNWKAPGSDHIHNFWYKKFTYLHPFIYNHINNFIKNPENMPSYITAGTTYMIPKDLTDLSNPAKYRPITCLQTIYKIITSCLTHLIYTHVETNKILAEQQKGCRKFSQGCKEQLTIDSVILKQAQRKKRQLHTMYIDYKKAFDSVPHSWLLKILEIYKIHPTLIHFLQKTSTTWRTVLKLNTKDGSIETEPIQIRRGIFQGDALSPLWFCLALNPLSNILNSAKIGYPLKYYNAENNEPTDEKLNHLLYMDDIKLYATTKADLHHLTELTETFSNDISMEFGIDKCKINSVSKGKMSHNITFQMQTGQQIPSLNENETYKYLGYNQSNQILTKETKTALTKQFKHRLNSIFKTQLYSRNMVKAINTFAIPILTYSFGIINWTKTELESLQRTINTTLTRYRKHHPKSCVQRLTLPRTEGGRGIVDIINLHHKQIASLRKYFHNKIHTSTLHASIVENDDRLTPLNLKDYRTQPNEVTMERQTKIDEWTQKSMHGRHRQELCKSNVDKDASNAWLTQGELFPETEGFMVAIQDQVVETRNYQKHIIKVCDLPSDSCRRCNSAPETIQHITGACKSIVQTDYKHRHDQVAKIIHQKLASKYQLISNEPVPYYKYTPESVLENLTHKLYFDRAILTDRTTHYNRPDITLVDKNNKTAQLIDIAIPNTHNLQSTISEKLTKYIDLKNEITKMWKLQSVTIIPVVLSSTGVIPHQLHQSLTTLQLPKYTYITMQKAVILNTCRTVRKFLNDDQINLN

SEQ ID NO: 31114 - protein, 1248 aa, Xestia xanthographa
MKWSNELNETLMKCYFRVTKMETDMTVWRKNLKEKFIECCPHLSYLSEQRISDQKRVIVNNSMIPESRLQILKSFVENELCETESFQRQVDNIMSNIDVGNIHIDTNTETLNIDIENIGPSETENIGVGIDDGNTNNLGQEHPIHLNTQHTSPIRNPEIDEIFSQTLQYYKDTHPTERSYIPKQKSSKKLANIVSYINKVILPEQVTSDTDFNHLQTVIYCAAWTAAKANGSKITLAPPVDSSSRPQQAHKPKWQKRLENKIESIRAKIGRLTQYIQGVRSRKLIKAVEIILKDYRIHTLHEQPNTQLEHFLDTLKQKLTVVKSRLNRYTKCTLRKTQNNQFRNNEKQFYRSLRKSTTNETTSNNSTHTAFPTTEELQQFWAGIWENPVCHNTEADWIKAEQVIHTNTGAMIFDQVEVATFHDVLTKIHNWKAPGSDYIHNYWYKKFTHTHPHIFNHINNFIKDPATIPTYITEGKTYMLPKDHSDSANPAKYRPITCLQTIYKIMTSCISHIIYKHLETQKILSEEQKGCKKLSQGCKEQLTIDAVIHRHVQRTKKDLHTMYIDYRKAYDSVPHSWLLEVLKIYKIHPQLIKFLGTIVEQWKTRLQLNTSTGTVETELIKIQRGIFQGDSLSPLWFCLALNPLSNKLNALIPGYQLQFSDTMTDILTDQQYCKVNHLLYMDDIKLYASSPDDLYELADVTEQFSKDIAMEFGIDKCKINSISAGKTYTHSYQMQTGATIDSLDETGTYKYLGYIQAKQIQHKEIKTTLTKQFKHRLKTIFNTQINAKNTIKAINTYAIPILTYSFGIIKWNKTDLKNLQRIINTTLTKHRRHHPRSCVQRLTLPRNDGGRGIIDITNLHNKQITTLRTYFDNKSSTSTLHKAIAYNDKKLTPLNMYDRTTQSNEQQTDRQTKIAEWTQKSLHGRHRHDLNLPNVDKLASNEWLKRGELFPETEGFMIAIQDQVIETRNYQKHIMRVPQTVDICRRCNSSSETIQHITGACKAIVQTDYKHRHDQIANIIHQKLAIKYNFISTPPVPYYKYQPETVLENATHKLYFDRGIFTDKTIHYNRPDITLLDKRNKTAQIIDIAVPNTHNLQNTIAEKLSKYIDLKIEISRMWCLSNVAIVPIVVSTTGVIPKQLHQSLRTLDLPPYTYQSLQKAAILNTCRIVRKFLQNENKSVVTTTNTEPRVTAHTQFTRHHIIIPLSRGSTWLRPVLFYKSGNKAEICKNIKNNNNNNNNKFICENIVT

SEQ ID NO: 31115 - protein, 1385 aa, Piruna pirus
MRLRSSSRIPQAGTSNGESRPKPIDLGSPTYSGEGTGLLQLVKSNDENVTTNDANPSSPSSTSTYSIFQSPSSSPHSFQNSSISRSSTVTPMPVDVVEEANAINSSPATDKKRTRRKWSVQMNEFIWRTYLTITNLETEVNSYLTLLHQQFIDKFPHMNVSKQRVGDQRRAIVRKELLPSTTLNAIRLEVSNTLQKVPQLSQSNTHLASQPKYRMKWSNELNETLIKCYFITTKIETDMTIWRKKLREAFIEFYPQLSHLSEQRISDQKRVIFNNKRLTATRIQELKLDAEHQLNLSKQTEHQNLQTDSYNEQTQSNTNHNVDNIESHPTTTDARVENEPNCLAFTNTEVHQHNEVIFHELNQEIDKTFAQTFEYYTNTHPTKRTFIPKQKSSRKFANIVSYINNVILPKNIHSDTDFQTLQTIIYSAAWTAAKTNGSKLTHASMENIVINCDKNHKPKWQKRLESKVKDLRAKIGRLTHYIQGNRSTKLNKEVNLIMKHYRIHTIHEEPNTQLTHYLDTLKQKLSLVNSRLTRYRKCSLRKSQNKQFLNNERLFYRKLKNATTNQTTQINNENDTPPMAELQQFWARIWENPVCHNPEADWITTEKENHSTTEQMQFEQVPVHIFQTVIKKLHNWKAPGSDYIHNFWYKKFTQIHPYLYNHINNFIKTPDNVPSYISEGITYMLPKDYSDTNNPAKYRPITCLQTVYKIMSACISHLIYDHVQKNKILTEEQKGCRKLSQGCKEQLIIDSIVHKHVQRNKKDLYTMYIDYKKAYDSVPHTWLLEVLNIYKIHPQIITFLSKVVTQWTTRLHLRTPSGNMETEAIKIQRGIFQGDSLSPLWFCLALNPLSNKLNSLKSGYTLQLTETPNDLLTGHQEYKINHLLYMDDIKLYASTSDSLCELANTTEKFSSDIEMEFGIDKCKINSVKAGQTYQHSHTLQTGETIDSLDENDTYKYLGYIQSKQLKHKEIKTALKQKFKHRLNSIFNSELQAKNTVKAVNTFAIPILTYSFGIISWTKMELTNLQRVINTFMTKHRKHHPKSCVQRLTLPRQEGGRGIIDIANLHNKQISNLRTYFTAKSTTSNLHKSIVHNDRKFTPLNMFDKAPQRNEKQTDMQTKIADWAQKSLHGRHRHDLGQPNVDKLASNEWLSRGDLFPETEGFMIAIQDQVIETRNYKKHIMRVPQATDICRRCNSSSETIQHVTGACKALVQGDYKHRHDQIAKIIHQKLAVKYNLISSPTPPYYNYNPEIVLENNTHKLYFDRAILTDKTIHYNRPDITLIDKINKTAQIIDIAVPNTHNLQNTIAEKLAKYTDLKIEISRMWRLSEVTIIPVVLSTTGVIPKQLHQSLKSLGLAPFTYQSLQKAAILNTCRIVRKFLQNDSNTN

SEQ ID NO: 31116 - protein, 1321 aa, Helicoverpa armigera
MRLRNRVIIPQAGTGANCNGESRPMASSLGCPSYSGGGTVSQPPAQSQTIAVSHDDESSCSSSVSLFPSLPSSPPSYLLRSSRSSSMSVDVVEEVTSTKHPSPTTVTTTTRKKWSEDMNQFIWRTYLIITKLETETNSYLTSLHQQFIDKFPQMNVSKQRVGDQRRAIVRQKLLPSDTLETIRSEVRKNLEKHESDTHISTQTQHITTPSSYTLTPKQTKSRMKWTNELNETLMKWYYITTNMETDMTIWRKKLREKFIGEPYPELSHLSEQRISDQKRVIINNRMITDTKLQEIKDYARKQIEACRPSEHQNTHTNTENRLNQITLMNNTDTTYQPHTQPSNIEIETHILNNIDLEEHTQNNTNTEINRELEDTFTSALEYFTNIHPTKRNHIPKQKTSRRLAQIVTCINSNILPKYINSETDFDKLQTIIYSAAWAAAKTNGSKIFLIPAENSTNTRQKIHKPKWQKRLQKRIRDLRAKIGRLTAYINGNRSRKLVKTVNTIIENYKIHSTHEEPNTELIHFLDTLKQKLTLVNSRLSRYTKCTLRKTQNVKFRNNEKQFYRCLKSSTTNQVENHTNFSSPSVAELQQFWAGIWERPISHNTEAEWIKEEEENHKNIEDMTFEHIPIDTFQDVLDKLHNWKAPGSDNIHNFWYKKFTCTHPYLHNYINIFIKKPEDMPTYIAEGLTYMISKDSTDSNNPAKYRPITCLQTIYKIITSCITQIIYKHLETNTILSEEQKGCRKLSQGCKEQLTIDAVILQQVKRYKKDLYTMYIDYRKAYDSVPHTWLLKVLEIYKVNPQIIKFLSSISTHWATRLHLKTPTELIETPPIKIQRGIFQGDSLSPLWFCLALNPLSNKLNTNTPGYKLQIDDPLNEIPTNRLEFKINHLLYMDDIKLYATSQEDLFELANITEQFSCDIGMEFGIDKCKINSVKGGQTYEHSYTTQTGDIINSLDENETYKYLGYIQDKQIKHKEIKQKLTLQFKHRLKSILNTQLNAKHTIKAINTYAIPILTYSFGIINWSKTELKNLQRVINTTLTKHRKHHPRSCIQRLTLPRKDGGRGIIDITNLHNKQISILRKYFDSKSTNSILHKAIAHNDRKLTPLNMHDKAPQNKERVIDRQTKLTEWARKSLHGRHLFDLNQQNVDKIASNEWLRRGDLFPETEGFMLAIQDQVIETRNYQKHIMRAVIPTDICRKCSSASENIQHITGACKAIVQTDYKHRHDQIANIIHQKLAIKYKLIPPPSVPYYKYNPQIVLENNTHKLYFDRAILTDRTVHYNRPDITLLDKINKTAQIIDRTHTTCNTPYQKNSQNTPTLKLK

SEQ ID NO: 31117 - protein, 1444 aa, Amphipyra berbera
MPTLENRGPPVLFTLATVNAGLCCGRLCKSLATRGIIMITRSKKRKAIQTNMLSTDDETTQVSASSSPRSIFSSIASSPPSYILASSRSSSSSPLSVDVVSEATSARNPSPATVSTITRKKWSEEMNTFIWRTYLIITNLETDTSSYLTSLHQQFINRFPQMNVSKQRVGDQRRAIVYKKLLPTTTLDIIRLEVSNSLKTHNTVLHPQTQTLQSSMSQINTNSPSQPNRRMKWSTELNENLIKCYYICTKMETDMTVWRKKLKEMFIEIYPQLSHLSEQRISDQKRVVINNRMISETRLQELKTDVQNTLNQTNSYEQHQNSHVISDGIQTQPPFNNNIAQLHTQETELELRNEPNYLNRIDVEALTQHNSTNMETNQERNQELEETFLQTLQYFTNTHPTQRNYIPKQKSSKKFAKIVSYINNTILPNYLNSDIDFDTLQTIIYSAAWTAAKANGSKLLHVSAENMVNTRQKNHKPKWQRRLEYKIKDLRAKIGRLTQYIYGNRSRKLTQEVNTILEHYKIHSTHEEPNTQLTHFLDTLKQKLTLVNSRLKRYTKCTNRKTQNNQFRNNERQFYRTLKNSTTNQTTPTNNVNNVNSILPPIDEIKQFWSQIWERPIGHNTEADWIKVETENYIKIEQMEFEHIKRDTFLDVLKKLHNWKAPGSDYIHNFWYKNFTHTHPYLYNHINNFISNPTTMPCYISEGITYMLPKDSNDRTNPAKYRPITCLQTIYKIITSCISHVIYKHLDRNKILAEEQKGCKKFSQGCKEQLTIDSVILNQVQRKKADIYTMYIDYKKAYDSVPHTWLLEVLNIYKIHPQITTFLSNIIKQWSTRLHLTSPTGIVETETIKIQRGIFQGDSLSPLWFCLALNPLSNKLNSLRPGYQLQFNDTLNDILTDDQNCKINHLLYMDDIKLYASSPDDLYELANTTEHFSKGIGMEFGIDKCKINSIRAGKTYEHSHTIQTGETIDSLDENGTYKYLGYIQNKQLKHKEIKTTLTQQFKHRLKSIFNTQLHSKNTVKAINTYAIPVLTYSFGIINWTKTELKNLQRVINTTLTKHRKHHPRSCVQRLTLPRKEGGRGIIDISNLHNKQITTLRKYFNSKSTTSSLHKAIVYNDQKLTPLNMFDKTTQNNEKQTTRQTKILEWTQKSLHGRHRKDLEQLNVDKLASNEWLCRGDLFPETEGFMVAIQDQVIETRNYQKYIMRVPHVNDICRRCSSSSETIQHITGACKAIVQTDYKHRHDQIANIIHQRLAIKYDLITTPPTPYYKYNPEIVLENNTHKLYYDRAILTDKTTHYNRPDVTLLDKINKTAQIIDIAVPNTHNLQSTIAEKLSKYTDLKIEISRMWRLSNATIIPIVISTTGVIPKQLHQSLRTLDLPPYLYTSLQKAAILNTCRIVRKFLQNDNETQMITPHSQASNTTRTQSLNQTNSSQSHIMSSHHITNQ

SEQ ID NO: 31118 - protein, 779 aa, Eilema sororculum
MHFECVPIEIFQTTIQKSHNWKAPGSDYLHNYWYKKFTKSHPYLHNYINSFIIDSSKMPAYITDGVTYMLPKDPKDTANPAKYRPITCLQTIYKIITSCLTHMIYKHLETNNILTEEQKGCRKFSQGCKEQLTIDSVIHRQVQRSKKDLCTMYIDYKKAYDSVPHTWLKEVLQIYKVNPQIITFLSNVMERWTTHIHLNTRTGTVTTDSIKIKRGIFQGDSLSPLWFCMALNPLSKHLNSLDSGYLLDYLENPTDRLTEKRTCKINHLLYMDDIKLYATTPDDLDILAQFTETFSNDISMEFGLDKCKINSVILGKIHKHSYEVQTGETIDSLDENDTYKYLGYNQSKQIHHKETKYKLTHQFKHRLNSILNTQLNSRNLIKAVNAYAIPILTYSFGIINWTKTELKNLQRIINTTMTKHRKHHPRSCLQRLTLPREEGGRGIIDVINLHNKQITILKSYFSSKTTTSTLHKAIAYNDQKHTPLNMHDWTTQNNETIKSIQTKIAEWTQKSLHGRHRQDLCQPHVDKKASNEWLRGGYLFPETEGFMMAIQDQVIETRNYQKHIIRNHLVSDVCRRCNSSSETIQHITGACKAIVQTDYKHRHDQVANIIHQKIALKYNLITSTPLPYYKYVAETVLENQTHKLYFDRAILTDKTIHYNRPDITLIDKQNNTAQLIDIAVPNTHNLQTTISEKLSKYVELKMEVTRMWRLNNATIIPIVLSTTGVIPAQLHQSIKTIDLPCSIYKILQKAVILNTCRIVRKFLNNDNTSNTHSPTQTHQ

SEQ ID NO: 31119 - protein, 1406 aa, Hydraecia micacea
MITRSKTKKLIQANKPSADDEISPVSSSSSPRSIFSSIVSSPPSYLSRSLRSSSSSSMSVDAVSEATIAINPSPATVTKNTRKKWSKDMNQFIWRTYLILTNLDTETNSYLTSLHQQFINKFPQMNVSKQRVGDQRRAIVQKKLLSATTLEKIRLEVSRELQLDTTTHIRTPSQLNTDQNNTHLQSGSKSRMRWSNEMNETLIKCYFITTKMETDMTVWRKKLREMFIEFYPQLSHLSEQRISDQKRVVLNNKMITEARLKDLKTYAESTLNQENPYRQTEYYNSLIAPDITPTQASTNNNTESAYINNQTHTQDTEVGSEPNFLNSIDVGSLTSTIINTERNIINVEISQELKETFSHTLQHFTNVQPTKRNYIPKQKPSKKFAQIVSYINNEILPKYVNADTDFETLQTVIYSAAWSAAKTNGSKLSHITSENTANINQKNKKPRWRKRLELRVKDLRTKIGRLTAYMQGNRGWRLVREVHTILENYRIHSIHEEPNTQLTQFLDTLKQKLTLVKSRLDRYNKCTLRKIQNNKFGNNEKQFYRSLKNSTTNQALPNNNENNSNHSLPSVDELQHFWSRIWERPICHNADAEWIKIESENYRHTEQMEFEHVPIDTFHDVLQKLHNWKAPGSDYIHNFWYKKFTHIHPYLYNYINNFIQNPTSMPTYIAEGITYMIPKDCNDSTNPAKYRPITCLQTIYKIITACITQIIYKHLDKNTILSEEQKGCRKFSQGCKEQLTIDSVILKQVQQKKKDLYTMYIDYKKAYDSVPHTWLLEVLKIYKINPQIITFLNNTMTQWTTRLHLTSSTGTVETEPIKIQRGIFQGDSLSPLWFCLALNPLSNKLNSLVSGYNLQYKDTVGDIQTDRQNYKINHLLYMDDIKLYASTSNDLYQLAESTEQISSDIGMEFGIDKCKINSVKAGRTYEHTYTLQTGETIDSLDENGTYKYLGYIQAKQIKQREIKNKLTQQFKHRLKSILNTQLYSRHITKAINTYAIPVLTYSFGIISWTKTELKSLQRIINTSLTKYRKHHPRSCVQRLTLPRKEGGRGIIDITNLHNKQISTLRKYFHTKSTTSILHKAIVYNDRKLTPLNMADQTTQINEKQTDRQTKILEWTQKSLHGRHRQDLCQPNVDKLASNEWLRRGDLFPETEGFMTAIQDQVIETRNYQKHIMRVPLSTDICRRCHSSSETIQHITGACKAIVQTDYKHRHDQVANIIHQKLAIKYKLITTPQVPYYKYNPETVLENATHKLYFDRAILTDRTTHYNRPDITLLDKINKTAQIIDIAVPNTHNLQNTIAEKLSKYTDLKIEITRMWHLGDVAIIPVVLSTTGVIPKQLHLSLKTLDLAPSTYQTLQKAAILNTCRIVRKFLQNDNDTEMPHAQTSSTSATQSHNIPSSRHTLSSTIT

SEQ ID NO: 31120 - protein, 901 aa, Spodoptera frugiperda
MQGHRSRKLEKEVNRILRDYRTHTTHEEPNTQLTHFLDTLKQKLVVIKSRLCRYTKCTLRKTQNNQFKTNEKQFYRTLKNLTTNNTLSNNTTHTSFPTQESLRQFWAGIWENSVCHNNEAEWIKAEITKHNNIQQMPFEQIDIQTFHNALNKAHNWKAPGSDHIHNYWYKKFTTIHPHLYNHINDFIKDPSNIPSYITEGITYMLPKDPNDTVNPAKYRPITCLQTIYKIMTSCLTQIIYKHIDSQKILTEEQKGCRKFSQGCKEQLIIDSVILKDVQQHKKDLYTMYIDYKKAYDSVPHSWLLQILNIYKIHPHIIYFLENIIRTWQTRLHLNTPTGTIATESIKIQRGIFQGDSLSPLWFCLALNPLSNKLSSLESGMQLQYRESMPSIQTDQENCKINHLLYMDDIKLYATTPEDLHLLADTTERFSTDIKMDFGIDKCKINSVKAGKTYTHSYQLQSGENIESLDENGTYKYLGYIQSKQILHKQIKSQITKQFKHRLKVICNTQLNSRNTIKAINTYAIPILTYSFGIINWSKTELQNLQRNINTTLTKHRRHHPRSCVQRLTLPRNDGGRGIIDITNLHNKQITTLRSYFFNRSTVSNLHRAIVQSDKKLTPLNMADQATQNNEKQTDRQTKISEWIQKSLHGRHYHDLSQPNVDKVASNEWLRRGELFPETEGFMIAIQDQVIETRNYQKHIMRIPIATDTCRRCNSAPETIQHITGACKSIVQTDYKHRHDQVANIIHQKIALKYNLISTPPVPYYKYQPETVLENSSHKLYFDRAILTDKTTHYNRPDITLIDKTNKTAQIIDIAIPNTHNLQNTIAEKLSKYTDLKIEITRMWRLNSVTIVPIVLSTTGVIPKQLHQSIKTLDLPSYTYQNLQKAAILNTCHIVRKFLSET

SEQ ID NO: 31121 - protein, 1398 aa, Ochropleura plecta
MLTRSKTKKSIQANMPSVDDETSSVSSSSSPKSIFSSIVSSPPSYLSRSSRSSSILSSMAADVVSEANSANNPSPTAVSTTTRKKWSKEMNEFIWRNYLIITNLEADTKAYLTSLHHQFTEKFPNMKVSKQRIGDQRRAIVSKNLLPSTTLDAIRREVSNCLPTHSSDSQLESPPEILLFQTDTHHHSQSEPKRRMKWSNELNETLMKCYFRVTKMETDLTVWRKNLKEKFIECYPHLSHLSEQRISDQKRVIVNNNMIPEARLQILKSIVENELIETGSFQRQADSRGSNTEVGNLHTITNTDTLNIEIENREEPSQREHSGERTNVNNLGTDHPIHLNTQHTCQDRNPDIDEIFSQTLQYYKDTHPTERSYIPKQKTSKRLAKIVSYINTIILPEHVTSDTDFNALQTIIYCAAWTAAKANGSKISLTPVEDRSRLHQVYMPKWQKRLEHKIEVFRAKIGRLTHYMRGHRSRKLNKAVEAILKDYKTHTTHEQPNTQLEHFLDTLKQKLTVIKSRLNRYTKCTLRKTQNKQFRNNERQFYRSLKNSTTNQTTSNNNTHISFPTTKELRQFWAGIWENPVCHNAEAEWIKEEEAIHSNTEAMFFDQIEVGTFHDVLNRIHNWKAPGSDHIHNYWYKKFTHTHPHIFNHINNFIKDPTTLPSYITEGKTYMLPKDPSDSENPAKYRPITCLQTIYKIMTSCITNIIYKHLETQKILTEEQKGCKKLSQGCKEQLTIDAVIHKQVQRTKKDLHTMYIDYKKAYDSVPHSWLLEVLKIYKIHPQLIQFLGNIVEKWKTRLQLNTSTEIVQTEPIKIQRGIFQGDSLSPLWFCLALNPLSNKLNALIPGFQLQYNDIMTDTLTDQHNCKINHLLYMDDIKLYAASPDDLYELADVTEKFSNDIAMEFGIDKCKINSIKAGETYTHSYQMQTGVLIDSLDETGTYKYLGYIQGKQIMHKEIKTTLTKQFRHRLKTIFSTQINAKNTIKAINTYAIPILTYSFGIIKWNKTDLKNLQRIVNTTLTKHRRHHPRSCVQRLTLPRNEGGRGIIDITNLHNKQITTLRTYFDNKSSTSTLHKAIAYNDRKLTPLNLYDKTAQINEKQTDRQTKIAEWTQKSLHGRHRHDLNLPNVDKLASNEWLRRGELFPETEGFMIAIQDQVIETRNYRKHIMRVPQTIDVCRRCNSSSETIQHITGACKAVVQTDYKHRHDQIANIIHQKLAIKYNLISTPPVPYYKYQPEIVLENATHKLYFDRAIFTDRTIHYNRPDITLLDKHNKTAQIIDIAVPNTHNLQNTIAEKLSKYTDLKIEISRMWCLSNVTIVPIVVSTTGVIPKQLHQSLKTLDLPPYTYQNLQKAAILNTCRIVRKFLQNENESIVTTTHTQPPVTTHTLSSSHPITTFTG

SEQ ID NO: 31122 - protein, 946 aa, Phlogophora meticulosa
MQGHRSKKLTKEVNTILRDYKTHTSHEVPNTHLTHFLDTLKQKLTVVKSRLDRYTKCTLRKTQNNQFRNNEKLFYRKLKASTTNHTTPSNNTNTVWPATDELQQFWAGIWENPVSHNTEAEWIKEEEAYQTNVEAMDFDQVDVETFHDVLQKIHNWKAPGSDHIHNYWYKKFTHIHPYLYNCINNFIKDPNIIPSYITEGKTYMLPKDPNDTANPAKYRPITCLQTIYKILTSCITQIIYKHLETQHILTEEQKGCRKFSQGCKEQLTIDAVILKHVQRTKKDLCSMYIDYRKAYDSVPHSWLLKVLSLYKIHSQLINFLGNILDKWQTRLHLNTSIGIVETEHIKIQRGIFQGDSLSPLWFCLALNPLSNKLNALKPGYQLQYIDTTTDILTDQQTCKLNHLLYMDDIKLYASSPDDLYELANATEQFSNDIAMEFGIDKCKINSIRAGKTYSHSYYMQTGDTIESLDENGTYKYLGYIQAKQILHKEIKATLTKQFKHRLKTICHSQINARNTIKAINTYAIPVLTYSFAIINWNKTELKHLQRVINTTLTKHRRHHPRSCVQRLTLPRNEGGRGIIDITNLHNKQITILRTYFYTKSPISTLHKAIAFNDKKLTPLNMFEKTTQSNEQQTDRQTKIAEWTKKSLHGRHRHDLNQPNVDKLASNEWLRRGELFPETEGFMIAIQDQVIETRNYQKHIMRVPQTIDRCRRCNSSSETIQHITGACKAIVQTDNKHRHDQLANIIHQKLAIKYKLIPTPPVAYYKYQPETVLENSTHKLYFDRAILTDKTTHYNRPDITLLDKINKTAQIIDIAVPNTHNLQNTIAEKLSKYIDLKIEISRMWRLSNVTIVPIVLSTTGVIPKQLHQSLKTLDLPPYTYQTLQKAAILNTCRIVRKFLQNDNDTSIVSSHTRAAANARTQSHELTQSPSQNPNTPSSHHNIINSQG

SEQ ID NO: 31123 - protein, 1416 aa, Acronicta aceris
MSLATRGTNMITRSKTRKAIQANAATMDVEPSQSSRPSSPRSIFSSIASSPPSYLLSSSRSSSLSPRTVDVAMEATSARNPLPATVSTITRKKWSEEMNRFIWRTYLIITNLETDTNSYLTSLHQQFIDKFPQMNVSKQRVGDQRRAIVQKKLLPRTTLETIRLEVSDRLQIYNSDLHSHNSTSQQFIASHTGPTQQSQLKTRMKWSKEHNETLIKCYFIITKMETDMTVWRKKLKEKFVEFYPQLLHLSEQRISDQKRVIINNRMISEARLTELKLYAESVLNKTDSYMESIDHISQSTTEDVQEILLTNNNTQLTNIEQSHTHETELENNPNYLNSIDIEALTNSTANTYHTDTNIEIRDQANPELEEIFANTLLHFTDTNPTKRNYIPKQKSSKKLGKIVKYIDNCILPKYVSNETDFKTLQTIIYSAAWTAAKANGSKLSYKTPENVANIHQRINKPKWQRRLEYKIKDLRAKIGRLTHYIHGNRSRKLDREIHKILEHYKIHSTHEEPNTQLTHFLDTLKQKLTLLSSRLNRYTKCTLRKSQNNQFNKNEKQFYRSIKKSTTNRTMPSNSENNTTNTLPPTSEIHKFWSNIWERPMLHNTEAEWIRTETENLVNTEQMDFEHIPIDTFHDVLKKLHNWKAPGSDYIHNFWFKKFTHIHPYLFNYINEFIKNPNTMPAYLTEGITYMLPKDFNDTNNPAKYRPITCLQTIYKIITSCITHIIYKHLDTNSILTEEQKGCRKYSQGCKEQLTIDAVILKQVQQKKKDLYTMYIDYKKAYDSVPHTWLIEVLNIYKIHPQIIAFLNNVIKQWTTRLYLPSPTGEAETEPIKIQRGIFQGDSLSPLWFCLALNPLSHKLKSVAPGYLLQYNDMSSDRLSDKQDCKINHLLYMDDIKLYASSPDDLYQLANITEQFSNDIGMEFGIDKCKINSVKGGQTFEHTHTIQTGETIESLDEHGTYKYLGYIQAKQIKHKQIKNQLTQQFKHRLKSIFNTELYARNTIKAINTFAIPVLTYSFGIINWTKAELRKLQRIINTTLTKHRKHHPRSCVQRLTLPRKKGGRGIIDITNLHNKQISTLRTYFNYKSTTSNLHKAIVFNDRKLTPLNMSDKNKQSNETQTDGPTKILQWTQKSLHGRHRQDLCQPNVDKLASNEWLRRGDLFPETEGFMTAIQDQVIETRNYQKHIMRIPQIHDICRRCNSSPETIQHITGACKSIVQTDYKHRHDQIAKIIHQKLALKYNLISTPPVPYYKYNPEIILENNNHKLYYDRAILTDRTTHYNRPDITLLDKINKTAQIIDIAIPNTHNLQSTIAEKLTKYTDLKIEISRMWRLSHVSIIPIVLSTTGVIPKQLHQSLKSLDLAPYTYQSLQKAAILNTCRIVRKFLQNDNETLIPASHPQVTATVSTRTQSRNHTQT

SEQ ID NO: 31124 - protein, 1413 aa, Noctua pronuba
MLTRSKTKKSIQANMPTADDETSPVSSSSSPKSIFSSIASSPPSYLSRSSRSSSILSPMTVDVVSEANLANNPSPTAVSTTTRKKWSKEMNEFIWRNYLIITNLESDTKAYLTSLHHQFIVKFPNMEVSKQRIGDQRRAIVSKKLLPSTTLDTIRTEVSNHLRTHNNDLEFQSPPEFPSSQTDSQPHSQSEPKRRMKWSNELNETLMKCYFRATKMETDMTVWRKNLKEKFIECYPHLSHLSEQRISDQKRVIVNNSMIPVARLQVLKSIVENELFETESFQRQVDSRMTNTDVGNEHLNTNTETINIDIEIIVPPQTENIGVGIDDGNTSNLGPEHPIHLNTQHTSLVRNPEIDEIFTQTLQYYKDTQPTERSYIPKQKSSKKLANIVSYINKVILPEKITSDTNFNHLQTVIYCAAWTAAKANGSKISLAPPVDSSSRLQQAHKPKWQKRLENKIESIRAKIGRLTQYIQGVRSRKLIKAVEIILKDYRIHTSHEQPNTQLEHFLDTLKQKLTVVKSRLNRYTKCTLRKTQNNQFRNNEKQFYRSLKKSTTNETTSNNNTHTAFPTTEELQQFWAGIWENPVYHNTEAEWIKVEQLLHTNTEAMIFDQVEVATFHDVLTKIHNWKAPGSDYIHNYWYKKFTHTHPHIFNHINNFIKDPATIPTYITEGKTYMLPKDHSDSANPAKYRPITCLQTIYKIMTSCISHIIYKHLETQKILTEEQKGCKKLSQGCKEQLTIDAVIHRHVQRTKKDLHTMYIDYRKAYDSVPHSWLLEVLKIYKIHPQLINCLGTIVEKWKTRLQLNTSTGTVETELIKIQRGIFQGDSLSPLWFCLALNPLSNKLNALSPGYQLQYSDTMTDILPDQQCCKVNHLLYMDDIKLYASSPDDLYELAYVTEQFSKDIAMEFGIDKCKINSVTAGKTYTHSYQMQTGATIDSLDETGTYKYLGYIQAKQILHKEIKTTLTKQFKHRLKTIFNTQINAKNTIKAINTYAIPILTYSFGIIKWNKTDLKNLQRIINTTLTKHRRHHPRSCVQRLTLPRNDGGRGIIDITNLHNKQITTLRKYFDNKSSTSTLHKAIAYNDKKLTPLNMNDRTTQSNEQQTDRQTKIVEWTQKSLHGRHRHDLNLPNVDKLASNEWLKRGELFPETEGFMIAIQDQVIETRNYQKHIMRVPQTVDICRRCNSSSETIQHITGACKAIVQTDYKHKHDQVANIIHQKLAIKYNFISTPPVPYYKYQPETVLENATHKLYFDRGIFTDKTIHYNRPDITLLDKCNKTALIIDIAVPNTHNLQNTIAEKLAKYIDLKIEISRMWRLNNVAIVPIVVSTTGVIPKQLHQSLKTLDLPPYTYQSLQKAAILNTCRIVRKFLQNENETVISTSHTRRSITAQTQLNGHLSSHNLTISSSHHITTLPG

SEQ ID NO: 31125 - protein, 1209 aa, Xestia xanthographa
MNEFIWRNYLIITNLESDTKAYLTSLHHQFIEKFPNMKVSKQRIGDQRRAIVSKKLLPSTTLDTIKLEVSNHLRTHNNDLELHFPPEIPSSQTDSQPHSQSEPKRRMKWSNELNETLMKCYFRVTKMETDMTVWRKNLKEKFIECCPHLSHLSEQRISDQKRVIVNNSMIPKSRLQILKSFVENELCETESFQRQVDNIMSNIDVGNIHIDTNTETLNIDIENIGPSETENIGIGIDDSNTNNLGQEHPIHLNTQHTSPIRNPEIDEIFSQTLQYYKDTHPTERSYIPKQKSSKKLANIVSYINKVILPEQVTSDTDFNHLQTVIYCAAWTAAKANGSKITLAPPVDSSSRPQQAHKPKWQKRLENKIESIRAKIGRLTQYIQGVRSRKLIKAVEIILKDYRIHTLHEQPNTQLEHFLDTLKQKLTVVKSRLNRYTKCTLRKTQNNQFRNNEKQFYRFLRKSTTNETTSNNSTHTAFPTTEELQQFWAGIWENPVCHNTEAEWIKAEQVIHTNTEAMIFDQVEVATFHDVLTKIHNWKAPGSDYIHNYWYKKFTHTHPHIFNHINNFIKDPATIPTYITEGKTYMLPKDHSDSANPAKYRPITCLQTIYKIMTSCISHIIYKHLETQKILSEEQKGCKKLSQGCKEQLTIDAVIHRHVQRTKKDLHTMYIDYRKAYDSVPHSWLLEVLKIYKIHPQLIKMLGTIVEQWKTRLQLNTSTGTVETELIKIQRGIFQGDSLSPLWFCLALNPLSNKLNALIPGYQLQFSDTMTDILTDQQYCKVNHLLYMDDIKLYASSPDDLYELADVTEQFSKDIAMEFGIDKCKINSISAGKTYTHSYQMQTGATIDSLDETGTYKYLGYIQAKQIQHKEIKTTLTKQFKHRLKTIFNTQINAKNTIKAINTYAIPILTYSFGIIKWNKTDLKNLQRIINTTLTKHRRHHPRSCVQRLTLPRNDGGRGIIDITNLHNKQITTLRTYFDNKSSTSTLHKAIAYNDKKLTPLNMYDRTTQSNEQQTDRQTKIAEWTQKSLHGRHRHDLNLPNVDKLASNEWLKRGELFPETEGFMIAIQDQVIETRNYQKHIMRVPQTVDICRRCNSSSETIQHITGSCKAIVQTDYKHRHDQIANIIHQKLAIKYNFISTPPVPYYKYQPETVLENATHKLYFDRGIFTDKTIHYNRPDITLLDKRNKTAQIIDIAVPNTHNLQNTIYRS

SEQ ID NO: 31126 - protein, 1464 aa, Amphipyra tragopoginis
MRLRNRIIPQAGTGANRDGESRPGPSSSGCPTYSGEGTVSHQTNQYRTVAVQPSPTSSLFSSIPSSPPSYLDKIHESSSPTSSPSSSYLLASPRTSPSSALSVDVVSEATSAKNPSPATVITTTRKKWSTEMNEFIWRTYLIITNLEADTSSYLTSLHQQFIDRFPQMNVSKQRVGDQKRAIVQKKLLPTTTLDTIRLEVSNSLQTYNTESHSHYQTLPQLNTAQNNTLPPSQPKRRMKWSNEVNETLIKCYFMATKMETDMTVWRKKLREMFIEFYPQLSHLSEQRLSDQKRVILNNRRIPETRLQELKTQVEIMLNQTDSYGQLHYQDSHTITETLQTQPTSTNNNAETANIEQSHTQEAESENEPNYLNSIDVEALTHSIINTQHNSTNIEISQERNQELEETFSHTLEYFTNTHPTKRSYIPKQKSSRKFAKIVSYINNIILPEYVNGDTDFETLQTIVYSAAWTAAKMNGSKLSYAPAENMANIREKNHKPKWQKRLESKIKDLRAKIGRLTHYMLGNRSRKLNKEVNTILEHYKIHSTHEEPNTQLTHFLDTLKQKLTLLNSRLSRYTKCTHRKTQNYQFKNNERQFYRTLKKSTTNQTTPSSNTNNTNNSESPPIHELQQFWAGIWERPICHNTEAEWIKIETESHINTEQMHFEHVEIDTFHEVLKKLHNWKAPGSDFIHNFWYKKLTHIHPYLHNYINEFIKNPTTMPTCITEGITYMLPKDSNDRTNPAKYRPITCLQTIYKIITSCITHIIYKYLETNKILTEEQKGCRRFSQGCKEQLTIDSVILKQVQRKKHDLYTMYIDYKKAYDSVPHTWLLEVLNIYKIHPQITTFLSNIIKHWTTRLHLTTPTGIVETEPIKIQRGIFQGDSLSPLWFCLALNPLSNMLNSVRPGYFLQLNDTANDILTDKQDCKINHLLYMDDIKLYASSQDDLDELANITDHFSSDIGMEFGIDKCKINSVRAGKSYEHSYTIQTGETIDSLDENGTYKYLGYIQSRQIKHKEIKTTLTQQFKHRLKSIFNTQLHSKNTIKAVNTYAIPILTYSFGIISWTKTELKTLQRVINTTLTKHRKHHPRSCVQRLTLPRKEGGRGIIDITNLHNKQISTLRKYFHTKSTCSTLHKAIVYNDQKMTPLNMFDKTNQNNEKQIDKQTKILEWTQKSLHGRHRKDLGQPNVDKLASNEWLSCGDLFPETEGFMMAIQDQVIETRNYQKYIMRAPLATDICRRCNSSSETIQHITGACKAIVQTDYKHRHDQIANIIHQKLAIKYNLISTPPTPYYKYNPETVLENNTHKLYYDRAILTDRTTHYNRPDITLLDKINKTAQIIDIAVPNTHNLQNTIAEKLSKYTDLKIEISRMWRLSNVSIIPIVLSTTGVIPKQLHQSLKTLDLAPYTYQSLQKAAILNTCRIVRKFLQNDNETQTITPHSQASITTRPQSYDQTHTLQSHNISSHHITNL

SEQ ID NO: 31127 - protein, 1465 aa, Amphipyra tragopoginis
MRLRNRIIPQAGTGANHDGESRPGPSSPGCPTYSGEGTVSHQSNQSRTAAVQPSPTSSLFSSMPSSPPSYLDKIHESSSSISSPSPSYSLASPRTSPSSPLSVDVVSEATSAKNPSPATVTTITRKKWSREMNEFIWRTYLIITNLETDTKSYLSSLHQQFIDRFPQMNVSKQRVGDQKRAIILKKLLPTTTLDKIRVEVSNRLQTHNTELHPHNQTLPQSNTVPNNSHPSSQPKRRMKWSNELNETLIKCYFISTKMETDMTVWRKKLREMFIEFYPQLSHLSEQRLSDQKRVILNNRMIPETRLQELKTHVENVLNQTNSYEQLQHHQEPHTTTEHVQTQPTSTNNNVETTNITQSHTPETELENEPNFLNSIDVEALAHSTINTQHSSTNAEISQERNQELEETFSHTLEYFTNTHPTKRSYIPKQKSSRKFAKIVSYINNIILPEYVNSDTDFETLQTIVYSAAWTAAKTNGSKLSYVPAENMDNIRQKNHKPKWQKRLEFKIKDLRAKIGRLTHYMHGNRSRKLNKEVNTILEHYRIHSTHEEPNTQLTHFLDTLKQKLTLLNSRLNRYTKCTHRKTQNNQFKNNERQFYRTLKNSTTNQTTPSNNTNNLNNSSPPIDELQQFWSRIWERPISHNTEADWIKIETENHKNIEQMDFEHVQIDTFHEVLMKLHNWKAPGSDFIHNFWYKKLTHIHPYLHNFINDFIKNPITMPTYISEGITYMLPKDSDDRINPAKYRPITCLQTIYKIITSCITHIIYKHLETNKILTEEQKGCRKFSQGCKEQLTIDSVILKQVQRKKHDLYTMYIDYKKAYDSVPHTWLLEVLNIYKIHPQIVTFLTNIIKQWTTRLHLTTPTGIAETEPIKIQRGIFQGDSLSPLWFCLALNPLSNKLNSLNPGYILQLNDTTNDILTDKQDCKINHLLYMDDIKLYASSSDDLYELANTTDQFSNDIGMEFGIDKCKINSVRAGKSYEHSYTIHTGETIDSLDENGTYKYLGYIQSKQIKHKEIKTTLTQKFKHRLKSIFNTQLHSKNTIKAVNTYAIPVLTYSFGIINWTKTELKTLQRVINTTLTKHRKHHPRSCVQRLTLPRKEGGRGIIDITNLHNKQISILRKYFHAKSTSSTLHKAIVYNDQKMTPLNMFDKAHQNNEKLIDKQTKILEWTQKSLHGRHRKDLGQPNVDKLASNEWLSRGELFPETEGFMMAIQDQVIETRNYQKYIMRAPLATDICRRCNSASETIQHITGACKAIVQTDYKHRHDQIANIIHQKLAIKYNLISTPLTPYYKYNPETVLENNTHKLYYDRAILTDRTTHYNRPDITLLDKINKTAQIIDIAVPNTHNLQNTIAEKLSKYTDLKIEISRMWRLSNVAIIPIVLSTTGVIPKQLHQSLKTLELAPYTYQSLQKAAILNTCRIVRKFLQNDNEPQIITSHSQASITPRTQSHDHTHTLQNRSISSHHIITNR

SEQ ID NO: 31128 - protein, 1413 aa, Noctua pronuba
MLTRSKTKKNIQANMPAADDETSPVSSSSSPKSIFSSIASSPPSYLSRSSRSSSILSPMTVEVVLEANLANNPSPTAVSTTTRKKWSKEMNEFIWRNYLIITNLESDTKAYLTSLHHQFIEKFPNMKVSKQRIGDQRRAIVSKKLLPITTLDTIRIEVSNHLRTHNNDLEFQSPPEFPSSQTDSQPHSQSEPKRRMKWSNELNETLMKCYFRATKMETDMTVWRKNLKEKFIECYPHLSHLSEQRISDQKRVIVNNSMIPVARLQVLKSIVENELFETESFQRQIDSRMTNTDVGNGYLHTNTETLNIDMEIIEPPQTEIIGVGIDDGNISNLGPEHPIHLNTQHTGLVRNPEIDEIFTQTLQYYKDTQPTERSYIPKQKSSKKLANIVSYINKVILPEQVTSDTNFNHLQTVIYCAAWTAAKANGSKISLAPPVDSSSRLQQAHKPKWQKRLENKIESIRAKIGRLTQYIQGVRSRKLIKAVEIILKDYRIHTSHEQPNTQLEHFLDTLKQKLTVVKSRLNRYTKCTLRKKQNNQFRNNEKQFYRSLKKSTTNETISNNNTHTAFPTTEELQQFWAGIWENPVNHNTEAEWIKVEQVLHTNTEAMIFDQVEIATFHDVLTKIHNWKAPGSDYIHNYWYKKFTHTHPHIFNHINNFIKDPATIPTYITEGKTYMLPKDPSDLANPAKYRPITCLQTIYKIMTSCISHIIYKHLETQKILTEEQKGCKKLSQGCKEQLTIDAVIHRHVQRTKKDLHTMYIDYRKAYDSVPHSWLLEVLKIYKIHPQLINCLSSIVEKWKTRLQLNTSTGTVETELIKIQRGIFQGDSLSPLWFCLALNPLSNKLNALSSGYQLQYSDTMTDILTDQQCCKVNHLLYMDDIKLYASSPDDLYELADVTEQFSKDIAMEFGIDKCKINSVTAGKTYTHSYQMQTGATIDSLDETGSYKYLGYIQAKQIMHKEIKTTLTKQFKNRLKTIFNTQINAKNTIKAINTYAIPILTYSFGIIKWNKTDLKNLQRIINTTLTKHRRHHPRSCVQRLTLPRNDGGRGIIDITNLHNKQITTLRKYFDNKSSTSTLHKAIAYNDKKLTPLNMYDRTTQSNEQQTDRQTKIAEWTQKSLHGRHRHDLNLPNVDKLASNEWLKRGELFPETEGFMIAIQDQVIETRNYQKHIMRVPQTVDICRRCNSSSETIQHITGACKAIVQTDYKYRHDQVANIIHQKLAIKYNFISTPPVPYYKYQPETVLENATHKLYFDRGIFTDKTIHYNRPDITLLDKCNKTALIIDIAVPNTHNLQNTIAEKLAKYIDLKIEISRMWRLNNVAIVPIVLSTTGVIPKQLHQSLKTLDLPPYTYQSLQKAAILNTCRIVRKFLQNENETVISTSHTRSSITAQTQVNGHSSSHNLTISSSHHITTLPG

SEQ ID NO: 31129 - protein, 1409 aa, Apamea monoglypha
MITRSKTKHLIQANKPSADDETSPVTSSSSPRSIFSSIVSSPPSYLSRSLRSSSSSPMSVDVVSEASTAINPSPATVTTNTRKKWSKDMNQFIWRTYLILTNLDTETNSYLTSLHQQFIIRFPQMNVSKQRVGDQRRAIVHKKLLSATTLEKIRLEVSRELQTDTTNLDTHQLNTDQSNIHLQSGSKSRMRWSNEMNETLIKCYFITTKMETDMTVWRKKLREMFIEFYPQLSYLSEQRISDQKRVVLNNKMITEARLQDLKMYAENTLNEANPYRQTEYHNSLIVRNNTPTQVSTNNNTETAYFNNNQTHTQETEVGNEPNFLNCIDLGALTSTIINTEHNTTNDDISQERNQELEETFSHTLHHFTNVHPTKRSYIPKQKPSKKFAQIVSYINNVILPKYVNADTDYETLQTVIYTAAWTAAKTNGSKLSHITPESTTYIYQKNKKPKWQKRLELRIKDLRIKIGRLTAYIQGNRGWRLVREVQTILENYRIHSTHEEPNTQLTHFLDTLKQKLTLVNSRLNRYNNCTLRKIQNNKFRNNEKQFYRTLKNSTTNQTATSSNENNTNHSLTSVDALQQFWSRIWERPICHNTEAEWVKIETENHIHTEQMEFDQVPIETFHDVLQKLHNWKAPGSDYIHNFWYKKLTYTHPYLYNYINTFITNPTTMPTYIAEGITYMIPKDSNDSANPAKYRPITCLQTIYKIITSCITQIIYKHLESNSILSEEQKGCRKFSQGCKEQLTIDSVILKQVQRKKKDLYTMYIDYKKAYDSVPHTWLIEILHIYKINPQIITFLNNTITQWTTRLHLTTSTGIVESESIKIQRGIFQGDSLSPLWFCLALNPLSNKLNSLMPGYKLNYNDTIDDIRTHRQDCKINHLLYMDDIKLYAASPEDLNELANTTDKFSNDIGMDFGIDKCKINSVRTGQTYEHSYTTQSGETIDSLDENGTYKYLGYIQAKQIKHKTIKNKLTQQFKHRLKSILNTQLHSKNTIKAINTYAIPVLTYSFGIISWTKTELKNLQRVINTSLTKYRKHHPRSCVQRLTLPRKEGGRGIIDITNLHNKQISILRKYFNTKSTMSTLHKAIVYNDRKLTPLNMSDKTTQMNEKQTDRQTKISEWTQKSLHGRHRHDLCQPNVDKLASNEWLRRGDLFPETEGFMTAIQDQIIETRNYQKHIMRIPISTDICRRCHSSSETIQHITGACKAIVQTDYKHRHDQIANIIHQKLAIKFKLITTPPVPYYKYTPETVLENTTHKLYFDRAILTDKTTHYNRPDITLLDKINKTAQIIDIAVPNTHNLQNTIAEKLSKYIDLKIEISRMWRLGSVAIIPVVLSTTGVIPKQLHQSLKTLDVAPSTYQTLQKAAILNTCRIVRKFLQNDNDAQIAHPQTSFTTATQSEHIISPRHISSSIIT

SEQ ID NO: 31130 - protein, 1380 aa, Spodoptera frugiperda
MITRSKNKTKSTMQANVPPTDVDTSTVSLSSSPRSIFSSITPSSLSITSRSLRSSTSSTRSVDVVAEATSAKNPSPAAGSKNTRKKWSKEMNEFIWRTYLIITNLETETNAYLNALHIQFTQQFPDMVVSRQRIGDQRRAIINNKLLPTTTLDAIRLEVRNYLQTQNRTMHQDQNQSQQLTITQVDPLTHTHSHSKTRMKWSNELNETLIKCYFEVTKMETDMTVWRKNLKEKFIEYYPHLSHLSEQRISDQKRVIINNKMISDTRMQILKLTVEQKLRESGMVAPDRLNNSSSHTSTSNIHSASQIHIENTYTQPMTSGPVEFSILRETNDIIEPRTTNQEPTNTTENYERNPEIDQQFLEALQYFTDIHPTNRCYLPKQKTSKKLAKIVDYINKVILPEHVSTNTDFNQLQTIIYSAAWTAAKANGSRVTLSYAQDQINLRKDYKPKWQKRLERKLDTIRAKVGRLTYYMQGHRSRKLEKEVNRILRDYRTHTTHEEPNTQLTHFLDTLKQKLIVIKSRLCRYTKCTLRKTQNNQFKTNEKQFYRTLKNLTTNNTLSNNTAHTSFPTQESLRQFWAGIWENSVCHNNEAEWIEAEITKHNNIQQMQFEQIDIQTFHNALNKAHNWKAPGSDHIHNYWYKKFTTIHPHLYNHINDFIKDPSNIPSYITEGITYMLPKDPNDTVNPAKYRPITCLQTIYKIMTSCLTQIIYKHIDSQKILTEEQKGCRKFSQGCKEQLIIDSVILKDVQRHKKDLYTMYIDYKKAYDSVPHSWLLQVLNIYKIHPHIIYFLENIIRTWQTRLHLNTPTGTIATESIRIQRGIFQGDSLSPLWFCLALNPLSNKLSSLESGMQLQYRESMPSIQTDQENCKINHLLYMDDIKLYATTPEDLHLLADTTERFSTDIKMDFGIDKCKINSVKAGKTYTHSYQLQSGENIESLDENGTYKYLGYIQSKQILHKQIKSQLTKQFKHRLKVICNTQLNSRNTIKAINTYAIPILTYSFGIINWSKTELQNLQRNINTTLTKHRRHHPRSCVQRLTLPRNDGGRGIIDITNLHNKQITTLRSYFFNRSTVSNLHRAIVQSDKKLTPLNMADQATQSNEKQTDRQTKISEWIQKSLHGRHYHDLSQPNVDKAASNEWLRRGELFPETEGFMIAIQDQVIETRNYQKHIIRIPIATDTCRRCNSAPETIQHITGACKSIVQTDYKHRHDQVANIIHQKIALKYNLISTPPVPYYKYQPETVLENSSHKLYFDRAILTDKTTHYNRPDITLIDKTNKTAQIIDIAIPNTHNLQNTIAEKLSKYTDLKIEITRMWRLNSVTIVPIVLSTTGVIPKQLHQSIKTLDLPSYTYQNLQKAAILNTCHIVRKFLSETDNVSFTRT

SEQ ID NO: 31131 - protein, 783 aa, Spodoptera frugiperda
MEENKYENIPQMQFEQVDIETFHDVINKLHNWKAPGSDCIHNYWYKKFTTIHPHLFNHINNFIKDPNNILSYITEGITYMLPKDLNDTSNPAKYRPITCLQTIYKIMTSCITHIIYKHIDTQNILTEEQKGCRKFSQGCKEQLVIDSVILKDVQKHKKDLYTMYIDYKKAYDSVPHSWLLHVLNIYKIHPHITHFLEIIISKWQTRLHLNTPTGTIATEFIKIQRGIFQGDSLSPLWFCLAINPLSNKLNSLHSGFQLQYRDTTSNIETTRQLCKINHLLYMDDIKLYASSPEGLYDLADTTEIFSNDIAMEFGIDKCKINSVKAGKTYTHSYQLHTGDTIHSLDETETYKYLGYIQAKQILHKDIKNQLIKQFKHRLKVICNSELNSRNTIKAINTFAIPILTYSFSIINWSKTELQNLQRNINTTLTKLRRHHPRSCTQRLTLSRNDGGRGIIDITNLHNKQITTLRSYFFSKSLTSTLHYAIAQNDKKLTPLNMFDRETQNNEKQIDRQTKIAQWAQKSLHGRHYHDLSQPNVDKLASNEWLRRGELFPETEGFMIAIQDQVIETRNYQKHIMHITLPTDTCRRCNSASETIQHITGACKSIVQTDYKHRHDQVANIIHQKLALKYNLISAPPVPYYKYQPQTVLENSLYKLYFDRAILTDKTTHYNRPDITLIDKANKTAQIIDIAIPNTHNLQNTIAEKLSKYTDLKIEISRMWRLNNVAIIPIVLSTTGVIPKQLHQSIKTLDLPPYIYQSLQKAAILNTCRIVRKFLNESDNSSYT

SEQ ID NO: 31132 - protein, 1444 aa, Amphipyra berbera
MPTLENRGPPVLFTLATVNAGLCCGRLCKSLATRGIIMITRSKKRKAIQTNMLSTDDETTQVSASSSPRSIFSSIASSPPSYILASSRSSSSSPLSVDVVSEATSARNPSPATVSTITRKKWSEEMNTFIWRTYLITTNLETDTSSYLTSLHQQFINRFPQMNVSKQRVGDQRRAIVYKKLLPTTTLDIIRLEVSNSLKTHNTVLHPQTQTLQSNMSQINTNSPSQPNRRMKWSTELNENLIKCYYICTKMETDMTVWRKKLKEMFIEIYPQLSHLSEQRISDQKRVVINNRMISETRLQALKTDVQNTLNQTNSYEQHQNSHVISDSIQTQPPFYNNIAQLHTQETELELRNEPNYLNRIDVEALTQHNSINVETNQERNQELDETFLQTLQYFTNTHPTQRNYIPKQKSSKKFAKIVSYINNIILPNYLNSDIDFDTLQTIIYSAAWTAAKANGSKLLHVSAENMVNTRQKDHKPKWQRRLEYKIKDLRAKIGRLTQYIYGNRSRKLTHEVNTILEHYKIHSTHEEPNTQLTHFLDTLKQKLTLVNSRLKRYTKCTHRKTQNNQFRNNERQFYRTLKNSTTNQTTPTNNVNNVNSILPPIDEIKQFWSQIWERPIGHNTEADWIKVETENYINIEQMEFEHIKRDTFLDVLKKLHNWKAPGSDYIHNFWYKNFTHTHPYLYNHINNFISNPTTMPCYISEGITYMLPKDSNDRTNPAKYRPITCLQTIYKIITSCISHVIYKHLDRNKILAEEQKGCKKFSQGCKEQLTIDSVILNQVQRKKADIYTMYIDYKKAYDSVPHTWLLEVLNIYKIHPQITTFLSNIIKLWSTRLHLTSPTGIVETETIKIQRGIFQGDSLSPLWFCLALNPLSNKLNSLRPGYQLQFNDTLNDILTDDQNCKINHLLYMDDIKLYASSPDDLYELANTTEHFSKDIGMEFGIDKCKINSIRAGKTYEHSHTIQTGETIDSLDENGTYKYLGYIQNKQLKHKEIKTTLTQQFKHRLKSIFNTQLHSKNTVKAINTYAIPVLTYSFGIINWTKTELKNLQRVINTTLTKHRKHHPRSCVQRLTLPRKEGGRGIIDISNLHNKQITTLRKYFNSKSTTSSLHKAIVYNDQKLTPLNMFDKTTQNNEKQTTRQTKILEWTQKSLHGRHRKDLEQLNVDKLASNEWLCRGDLFPETEGFMVAIQDQVIETRNYQKYIMRVPHANDICRRCSSSSETIQHITGACKAIVQTDYKHRHDQIANIIHQRLAIKYDLITTPPTPYYKYNPEIVLENNTHKLYYDRAILTDKTTHYNRPDITLLDKINKTAQIIDIAVPNTHNLQSTIAEKLSKYTDLKIEISRMWRLSNATIIPIVISTTGVIPKQLHQSLRTLDLPPYLYTSLQKAAILNTCRIVRKFLQNDNETQMITPHSQASNTTRTQSLNQTNSSQSHIMSSHHITNQ

SEQ ID NO: 31133 - protein, 1416 aa, Acronicta aceris
MSLATRGTNMITRSKTRKAIQANAATMDVEPSQSSRSSSPRSIFSSIASSPPSYLLSSSRSSSLSPRTVDVVMEATSARNPLPATVSTITRKKWSEEMNRFIWRTYLIITNLETDTNSYLTSLHQQFIDKFPQMNVSKQRVGDQRRAIVQKKLLPRTTLETIRLEVSNSLQIYNSDLHPHNNTSQQFIASHTGPTQQSQLKTRMKWSKEHNETLIKCYFIITKMETDMTVWRKKLKEKFVEFYPQLLHLSEQRISDQKRVIINNRMISEARLTELKLYAEGVLNQTDSYMESIGHISQSTTEDVQEILLTNNNTQLTNIEQSHTHETELENDPNYLNSIDIEALTNSTANTYHTDTNIEIRDQANPELEEIFANTLLHFTDTNPTKRNYIPKQKSSKKLAKIVTYIDNCILPKYVSNETDFKTLQTIIYSAAWTAAKANGSKLSYKTPENLANIHQRINKPKWQRRLEYKIKDLRAKIGRLTHYIHGNRSRKLDREVHKILEHYKIHSTHEEPNTQLTHFLDTLKQKLTLLSSRLNRYTKCTLRKSQNNQFNKNEKQFYRSIKKSTTNRTMASNSENNTTDTLPPTSEIHKFWSNIWERPMLHNTEAEWIRTETENLVNTEQMDFEHIPIDTFHDVLKKLHNWKAPGSDYIHNFWFKKFTHIHPYLFNYINEFIKNPNTMPAYLTEGITYMLPKDFNDTNNPAKYRPITCLQTIYKIITSCITHIIYKHLDTNSILTEEQKGCRKYSQGCKEQLTIDAVILKQVQQKKKDLYTMYIDYKKAYDSVPHTWLIEVLNIYKIHPQIIAFLNNVIKQWTTRLYLPTPTGEAETEPIKIQRGIFQGDSLSPLWFCLALNPLSHKLKSVAPGYLLQYNDMSSDRLSDKQDCKINHLLYMDDIKLYASSPDDLYQLANITEQFSNDIGMEFGIDKCKINSVKGGQTFEHTHTIQTGETIESLDEHGTYKYLGYIQAKQIKHKQIKNQLTQQFKHRLKSIFNTQLYARNTIKAINTFAIPVLTYSFGIINWTKTELRKLQRIINTTLTKHRKHHPRSCVQRLTLPRKEGGRGIIDITNLHNKQISTLRTYFNYKSTTSNLHKAIVFNDRKLTPLNMSDKNKQSNETQTDGPTKILQWTQKSLHGRHRQDLCQPNVDKLASNEWLRRGDLFPETEGFMTAIQDQVIETRNYQKHIMRIPQIHDICRRCNSSPETIQHITGACKSIVQTDYKHRHDQIAKIIHQKLALKYNLISTPPVPYYKYNPEIILENNNHKLYYDRAILTDRTTHYNRPDITLLDKINKTAQIIDIAIPNTHNLQSTIAEKLTKYTDLKIEISRMWRLSHVSIIPIVLSTTGVIPKQLHQSLKSLDLAPYTYQSLQKAAILNTCRIVRKFLQNDNETLIPTSHPQVTTTINTRTQSRNHTQT

SEQ ID NO: 31134 - protein, 1417 aa, Agrochola circellaris
MITRSKTKKSIQANMPSVDDETSPDSSSASPRSIFSSIASSPPSYLSHSSHSSRSSSTSSPTSVDVVSEANLANKPAPTAVLKNTRKKWSKEMNEFIWRTYLIVTNLESDINAYLSSLHQQFIEKFPNMKVSKQRIGDQRRAIVSKKLLPSTALDSIRLEVRNSLQTPNNDLQLQLQTPQELLSFQTNTQPHSQSEPKRRMKWSNELNETLMKCYFRATKMETDMTVWRKNLKEKFIECYPHLSHLSEQRISDQKRVIINNSMISEPRLQILKTIVEKELLETGSFHWQSDSIRSNTENLHSQPPTNTLNFNIENIETSQGTQIGQETVVDNLNDIGSEHPVHLNTQTTHERNLEIDEIFFETLHYYRDTNPTERSYIPMQKSSKRLAKIVSYINRVILPEQVTRDTEFNHLQTVIYCAAWTAAKANGSKISLSPPEHRSRLQQGRKPKWQKRLEHKIEVIRAKIGRLTHYMQGHRSRKLIKEVNIILRDYKTHTSHEEPNTHLTHFLDTLKQKLTVVKSRLDRYTKCTLRKTQNNQFRNNEKLFYRKLKASTTNHTTPSNNTNTTWPATDELQQFWAGIWENPVCHNNEAQWVKEEEAYQENVEAMNFDQVEVETFHDVLKKIHNWKAPGSDHIHNYWYKKFTHVHPHLYNYINDFIKNPTIIPSYITEGKTYMLPKDPNDTSNPAKYRPITCLQTLYKILTSCITHLIYKHLETQQILTEEQKGCRKFSQGCKEQLTIDAVILKHVQRTKNDLYSMYIDYKKAYDSVPHSWLLKVLNLYKIHPQLINFLGNVIDKWQTRLHLNTSTGIVETEHIKIQRGIFQGDSLSPLWFCLALNPLSNKLNALKTGYQLQYSDTMTDILTDQQSCKINHLLYMDDIKLYASSPEDLNELADATEQFSNDIAMEFGIDKCKINSIRAGKTYSHSYHMQTGDTIESLDENDTYKYLGYIQAKQILHKEIKATLTKQFKHRLKTICHTQINARNTIKAINTYAIPILTYSFGIINWNKTELKHLQRIINTTLTKHRRHHPRSCVQRLTLPRNEGGRGIIDITNLHNKQITILRTYFNAKSTTSTLHKAITFNDKKLTPLNMFEKIAQSNEQQTDRQTKIAEWTQKSLHGRHRHDLNQPNVDKLASNEWLRRGELFPETEGFMIAIQDQVIETRNYQKHIMRVPQTIDRCRRCNSSTETIQHITGACKAIVQTDYKHRHDQIANIIHQKLAIKYKLIPTPPVAYYKYQPETVLENSTHKLYFDRAILTDKTTHYNRPDITLLDKNNKTAQIIDIAVPNTHNLQNTIAEKLSKYIDLKIEISRMWRLSNVTIVPIVLSTTGVIPKQLHQSLKTLDLPPYTYQTLQKASILNTCRIVRKFLQNDNHTSTVTSHTSAATTAQTQSPGQTHSPSQNPNTPTSHHNLTNFQG

SEQ ID NO: 31135 - protein, 1325 aa, Agrochola circellaris
MNEFIWRTYLIVTNLESDLNAYLSSLHQQFIEKFPNMKVSKQRIGDQRRAIVSKKLLPSTTLDSIRLEVRNSLQTPNNDLQLHLQTPQELLSFQTNTQPHSQSEPKRRMKWSNELNETLMKCYFRATKIETDMTVWRKNLKEKFIECYPHLSHLSEQRISDQKRVIINNSMISETRLQILKTIVEKELLETGSFYWQSDSIRSNTENLHSQPPTNTLNLNIENIETSQGTQIGQETVVDNLNDIGSEHPVHLNTQTTHERNLEIDEIFFETLHYYRDTNPTERSYIPMQKSSKRLAKIVSYINRVILPEQVTRDTEFNDLQTVIYCAAWTAAKANGSKISLSPPEHRSRLQQGRKPKWQKRLEHKIEVIRAKIGRLTHYMQGHRSRKLIKEVNIILRDYKTHTSHEEPNTHLTHFLDTLKQKLTVVKSRLDRYTKCTLRKTQNNQFRNNEKLFYRKLKASTTNHTTPSNNTHTTWPATDELQQFWAGIWENPVCHNNEAEWVKEEEAYQENVEAMNFDQVEVETFHDVLKKIHNWKAPGSDHIHNYWYKKFTHVHPHLYNYINDFIKNPTIIPSYITEGKTYMLPKDPNDTSNPAKYRPITCLQTLYKILTSCITHLIYKHLETQQILTEEQKGCRKFSQGCKEQLTIDAVILKHVQRTKNDLYSMYIDYKKAYDSVPHSWLLKVLNLYKIHPQLINFLGNIIDKWQTRLHLNTSTGIVETEHIKIQRGIFQGDSLSPLWFCLALNPLSNKLNALKTGYQLQYSDTMTDILTDQQSCKINHLLYMDDIKLYASSPEDLNKLADATEQFSNDIAMEFGIDKCKINSIRAGKTYSHSYHMQTGDTIESLDENGTYKYLGYIQAKQILHKEIKATLTKQFKHRLKTICHTQINARNTIKAINTYAIPILTYSFGIINWNKTELKHLQRIINTTLTKHRRHHPRSCVQRLTLPRNEGGRGIIDITNLHNKQITILRTYFNAKSTTSTLHKAITFNDKKLTPLNMFEKIAQSNEQQTDRQTKIAEWTQKSLHGRHRHDLNQPNVDKLASNEWLRRGELFPETEGFMIAIQDQVIETRNYQKHIMRVPQTIDRCRRCNSSTETIQHITGACKAIVQTDYKHRHDQIANIIHQKLAIKYKLIPTPPVAYYKYQPETVLENSTHKLYFDRAILTDKTTHYNRPDITLLDKNNKTAQIIDIAVPNTHNLQNTIAEKLSKYIDLKIEISRMWRLSNVTIVPIVLSTTGVIPKQLHQSLKTLDLPPYTYQTLQKASILNTCRIVRKFLQNDNHTSIVTSHTSAATTAQTQSHGQTCSPSQNPNTSTSHHNLTNFQG

SEQ ID NO: 31136 - protein, 1406 aa, Ochropleura plecta
MLTRSKTKKSIQANMPSADDETSSVSSSSSPKSIFSSIASSPPSYLSRSSRSSSILSPMAADVVSEASLANNPSPIAVSTTTRKKWSKEMNEFIWRNYLIITNLETDTKAYLTSLHHQFIEKFPNMKVSKQRIGDQRRAIVSKNLLPSTILDTIRLEVGNHLKTQNNDPALQSPPEFRSSQPESQAEPKRRMKWSNELNETLMKCYFRVTKMETDMTVWRKNLKENFIEFYPQLSHLSEQRISDQKRVIVNNDMISEARLQILKTTVENELFETESFQRQADNITSNTDAVNVHLHTNTETLNIDIRNIEPSQTDNVGIGIDDDNFNNVEQIIHLNTQQTDLVRNPEIDEIFSQTLQYYKDTLPTERSYIPKLKSSKKLANIVSYINKVILPEQVTSETNFNHLQTVIYCAAWTAAKANGSKIYLSSSVESSRLQQVYKPKWQKRLEKKKEALRAKIGRLTQYIQGHRSRKLIKAVETILKDYRTHTLHEQPNTQLEHFLDTLKQKLTVVKSRLNRYTKCTLRKTQNNQFRNNEKQFYRSLKQSTTNETTPNSNTHTAFPTTEELQQFWAGIWENAVCHNTEAEWIKAEQAFHINTETMITDHIEIATFHDVLTKIHNWKAPGSDYIHNYWYKKFTHIHPHIFNHINNFIKDPATIPTYIMEGKTFMLPKDPNDPANPAKYRPITCLQTIYKIMTSCISHIIYNHLETHKILTEEQKGCKKLSQGCKEQLTIDAVIHKHVQRNRNDLHTMYIDYKKAYDSVPHSWLLEVLKIYKIHPQLINCLGNIIEKWKTRLQLNTSTGIVQTELIKIQRGIFQGDSLSPLWFCLALNPLSNKLNSLLPGYQLQYNDTMTDILTDQQYCKVNHLLYMDDIKLYASSPDDLYELADVTEQFSNDIAMEFGIDKCKINSIRAGKTYTHSYQMQTGATIDSLDETGTYKYLGYIQAKQIMHKEIKTKLTKKFKHRLKTIFNTQINAKNTIKAINTYAIPILTYSFGIIKWNKTDLQNLQRIINTTLTKHRRHHPRSCVQRLTLPRNDGGRGIIDITNLHNKQITTLRTYFKNKSSISTLHKAIAFNDKKLTPLNMYDNTTQSNEQQTDRQTKIAEWTQKSLHGRHRHDLNLPNVDKLASNEWLRRGELFPETEGFMIAIQDQVIETRNYQKHIMKVHQTVDICRRCNSSSETIQHITGACKAIVQTDYKHRHDQIANIIHQKLAIKYNLISTPPVPYYKYQPETVLENATHKLYFDRGIFTDKTIHYNRPDITLLDKSKKTAQIIDIAVPNTHNLQNTIAEKLAKYTDLKMEISRMWHLNNVSIIPIVLSTTGIIPKQLHQSLKTLDLPPYTYQSLQKAAILNTCRIVRKFLQIQNETVTSTSRTRRPITAQSQLNGQSSSHNPIISSSHRITTLSG

SEQ ID NO: 31137 - protein, 1317 aa, Noctua fimbriata
MLTRSKTKKSIQANMPAVDDETSPVSSSSSPKSIFSSIASSPPSYLSRSSRSSSLLSPMTVEVVSEASLASNPSPTAVSTTTRKKWSKEMNEFIWRNYLIITNLEYDTKAYLTSLHHQFIEKFPNMKVSKQRIGDQRRAIVSKKLLPSTTLDTIRLEVSNHLRTHNNELELQSPPEFPTSQTDSQPHSQSEPKRRMKWSNELNETLMKCYFRATKMETDMTVWRKNLKEKIIECYPNLSHLSEQRISDQKRVIVNNSMIPVARLQVLKSIVEKELFETESFQRQVDSRMSNTDVENVHLHTNTETINIDIENIEPPQTENIGVGIDDGNINNLGPEHPIHLNTQHTSLVRNPEIDEIFSQTLQYYKDTQPTERSYIPKQKSSKKLANIVSYINKVILPEQVTSDTNFNHLQTVIYCAAWTAAKANGSKISLAPPVDRSSRLQQAHKPKWQKRLENKIESIRAKIGRLTQYIQGVRSRKLIKAVEIILKDYRIHTSHEQPNTQLEHFLDTLKQKLTVVKSRLNRYTKCTQRKTQNNQFRNNEKQFYRSLKKSTTNETISENNTNTAFPTTEELQQFWAGIWESPVYHNTEAEWIKGEQVIQTNTEAMIFDHVEVATFHDVLTKIHNWKAPGSDYIHNYWYKKFTHIHPHIFNHINNFIKDPTTIPTYITEGKTYMLPKDPSDSANPAKYRPITCLQTIYKIMTSCISHIIYKHLETQKILTEEQKGCKKLSQGCKEQLTIDAVIHRHVQSTKKDLHTMYIDYRKAYDSVPHSWLLEVLNIYKIHPQLINCLGTIVEKWKTRLQLNTSTGTVETEFIKIQRGIFQGDSLSPLWFCLALNPLSNKLNALLPGYQLQYSDTMTDILTDQHCCKVNHLLYMDDIKLYASSPDDLYELADVTEQFSKDIAMEFGIDKCKINSIRAGKTYTHSYQMQTGATIDSLDETGTYKYLGYIQAKQILHKEIKTKLTKQFKHRLKTIFNTQINAKNTIKAINTYAIPILTYSFGIIKWNKTDLKNLQRIINTTLTKHRRHHPRSCVQRLTLPRNDGGRGIIDITNLHNKQITTLRKYFENKSSTSTLHKAIAYNDKKLTPLNMYDRTTQSNEQQTDRQTKIAEWTQKSLHGRHRHDLNLPNVDKLASNEWLKRGELFPETEGFMIAIQDQVIETRNYQKHIMRVPQTVDICRRCNSSSETIQHITGACKAIVQTDYKHRHDQIANIIHQKLAIKYNFISTPPVPYYKYQPETVLENATHKLYFDRGIFTDKTIHYNRPDITLLDKCNKTALIIDIAVPNTHNLQNTIAEKLSKYIDLKIEIAECGVLTM

SEQ ID NO: 31138 - protein, 1409 aa, Apamea monoglypha
MITRSKTKHLIQANKPSADDETSPVTSSSSPRSIFSSIVSSPPSYLSRSLRSSSSSPMSVDVVSEASTAINPSPATVTTNTRKKWSKDMNQFIWRTYLILTNLDTETNSYLTSLHQQFIIRFPQMNVSKQRVGDQRRAIVHKKLLSATTLEKIRLEVSRELQTDTTNLDTHQLNTDQSNIHLQSGSKSRMRWSNEMNETLIKCYFITTKMETDMTVWRKKLREMFIEFYPQLSYLSEQRISDQKRVVLNNKMITEARLQDLKMYAENTLNEANPYRQTEYHNSLIVRNNTPTQVSTNNNTETAYFNNNQTHTQETEVGNEPNFLNCIDLGALTSTIINTEHNTTNGDISQERNQELEETFSHTLHHFTNVHPTKRSYIPKQKPSKKFAQIVSYINNVILPKYVNADTDYETLQTVIYTAAWTAAKTNGSKLSHITPDSTTYIYQKNKKPKWQKRLELRIKDLRIKIGRLTAYIQGNRGWRLVREVQTILENYRIHSTHEEPNTQLTHFLDTLKQKLTLVNSRLNRYNNCTLRKIQNNKFRNNEKQFYRTLKNSTTNQTATSSNENNTNHSLTSVDALQQFWSRIWERPICHNTEAEWVKIETENHIHTEQMEFDQVPIETFHDVLQKLHNWKAPGSDYIHNFWYKKLTYTHPYLYNYINTFITNPTTMPTYIAEGITYMIPKDSNDSANPAKYRPITCLQTIYKIITSCITQIIYKHLESNSILSEEQKGCRKFSQGCKEQLTIDSVILKQVQRKKKDLYTMYIDYKKAYDSVPHTWLIEILHIYKINPQIITFLNNTITQWTTRLHLTTSTGIVESESIKIQRGIFQGDSLSPLWFCLALNPLSNKLNSLMPGYKLNYNDTIDDIRTDRHDCKINHLLYMDDIKLYAASPEDLNELANATDKFSNDIGMDFGIDKCKINSVRTGQTYEHSYTTQSGETIDSLDENGTYKYLGYIQAKQIKHKTIKNKLTQQFKHRLKSILNTQLHSKNTIKAINTYAIPVLTYSFGIISWTKTELKNLQRVINTSLTKYRKHHPRSCVQRLTLPRKEGGRGIIDITNLHNKQISILRKYFNTKSTMSTLHKAIVYNDRKLTPLNMSDKTTQMNEKQTDRQTKISEWTQKSLHGRHRHDLCQPNVDKLASNEWLRRGDLFPETEGFMTAIQDQIIETRNYQKHIMRIPISTDICRRCHSSSETIQHITGACKAIVQTDYKHRHDQIANIIHQKLAIKFKLITTPSVPYYKYTPETVLENTTHKLYFDRAILTDKTTHYNRPDITLLDKINKTAQIIDIAVPNTHNLQNTIAEKLSKYIDLKIEISRMWRLGSVAIIPVVLSTTGVIPKQLHQSLKTLDVAPSTYQTLQKAAILNTCRIVRKFLQNDNDAQIAHPQTSFTTATQSEHIISPRHISSSIIT

SEQ ID NO: 31139 - protein, 1444 aa, Amphipyra berbera
MPTLENRGPPVLFTLATVNAGLCCGRLCKSLATRGIIMITRSKKRKAIQTNMLSTDDETRQVSASSSPRSIFSSIASSPPSYILASSRSSSSSPLSVDVVSEATSARNPSPATVSTITRKKWSEEMNTFIWRTYLITTNLETDTSSYLTSLHQQFINRFPQMNVSKQRVGDQRRAIVYKKLLPTTTLDIIRLEVSNSLKTHNTVLHPQTQTLQSNMSQINTNSPSQPNRRMKWSTELNENLIKCYYICTKMETDMTVWRKKLKEMFIEIYPQLSHLSEQRISDQKRVVINNRMISETRLQALKTDVQNTLNQTNSYEQHQNSHVISDSIQTQPPFYNNIAQLHTQETELELRNEPNYLNRIDVEALTQHNSINVETNQERNQELDETFLQTLQYFTNTHPTQRNYIPKQKSSKKFAKIVSYINNIILPNYLNSDIDFDTLQTIIYSAAWTAAKANGSKLLHVSAENMVNTRQKDHKPKWQRRLEYKIKDLRAKIGRLTQYIYGNRSRKLTHEVNTILEHYKIHSTHEEPNTQLTHFLDTLKQKLTLVNSRLKRYTKCTHRKTQNNQFRNNERQFYRTLKNSTTNQTTPTNNVNNVNSILPPIDEIKQFWSQIWERPIGHNTEADWIKVETENYINIEQMEFEHIKRDTFLDVLKKLHNWKAPGSDYIHNFWYKNFTHTHPYLYNHINNFISNPTTMPCYISEGITYMLPKDSNDRTNPAKYRPITCLQTIYKIITSCISHVIYKHLDRNKILAEEQKGCKKFSQGCKEQLTIDSVILNQVQRKKADIYTMYIDYKKAYDSVPHTWLLEVLNIYKIHPQITTFLSNIIKLWSTRLHLTSPTGIVETETIKIQRGIFQGDSLSPLWFCLALNPLSNKLNSLRPGYQLQFNDTLNDILTDDQNCKINHLLYMDDIKLYASSPDDLYELANTTEHFSKDIGMEFGIDKCKINSIRAGKTYEHSHTIQTGETIDSLDENGTYKYLGYIQNKQLKHKEIKTTLTQQFKHRLKSIFNTQLHSKNTVKAINTYAIPVLTYSFGIINWTKTELKNLQRVINTTLTKHRKHHPRSCVQRLTLPRKEGGRGIIDISNLHNKQITTLRKYFNSKSTTSSLHKAIVYNDQKLTPLNMFDKTTQNNEKQTTRQTKILEWTQKSLHGRHRKDLEQLNVDKLASNEWLCRGDLFPETEGFMVAIQDQVIETRNYQKYIMRVPHANDICRRCSSSSETIQHITGACKAIVQTDYKHRHDQIANIIHQRLAIKYDLITTPPTPYYKYNPEIVLENNTHKLYYDRAILTDKTTHYNRPDITLLDKINKTAQIIDIAVPNTHNLQSTIAEKLSKYTDLKIEISRMWRLSNATIIPIVISTTGVIPKQLHQSLRTLDLPPYLYTSLQKAAILNTCRIVRKFLQNDNETQMITPHSQASNTTRTQSLNQTNSSQSHIMSSHHITNQ

SEQ ID NO: 31140 - protein, 1444 aa, Amphipyra berbera
MPTLENRGPPVLFTLATVNAGLCCGRLCKSLATRGIIMITRSKKRKAIQTNMLSTDDETTQVSASSSPRSIFSSIASSPPSYILASSRSSSSSPLSVDVVSEATSARNPSPATVSTITRKKWSEEMNTFIWRTYLIITNLETDISSYLTSLHQQFINRFPQMNVSKQRVGDQRRAIVYKKLLPTTTLDIIRLEVSNSLKTHNTVLHPQTQTLQSNMSQINTNSPSQPNRRMKWSTELNENLIKCYYICTKMETDMTVWRKKLKEMFIEIYPQLSHLSEQRISDQKRVVINNRMISETRLQALKTDVQNTLNQTNSYEQHQNSHVISDSIQTQPPFNNNIAQLHTQETELELRNEPNYLNRIDVEALTQHNSTNVETNQERNQELDETFLQTLQYFTNTHPTQRNYIPKQKSSKKFAKIVSYINNIILPNYLNSDIDFDTLQTIIYSAAWTAAKANGSKLLHVSAENMVNTRQKDHKPKWQRRLEYKIKDLRAKIGRLTQYIYGNRSRKLTHEVNTILEHYKIHSTHEEPNTQLTHFLDTLKQKLTLVNSRLKRYTKCTHRKTQNNQFRNNERQFYRTLKNSTTNQTTPTNNVNNVNSILPPIDEIKQFWSQIWERPIGHNTEADWIKVETENYINIEQMEFEHIKRDTFLDVLKKLHNWKAPGSDYIHNFWYKNFTHTHPYLYNHINNFISNPTTMPCYISEGITYMLPKDSNDRTNPAKYRPITCLQTIYKIITSCISHVIYKHLDRNKILAEEQKGCKKFSQGCKEQLTIDSVILNQVQRKKADIYTMYIDYKKAYDSVPHTWLLEVLNIYKIHPQITTFLSNIIKLWSTRLHLTSPTGIVETETIKIQRGIFQGDSLSPLWFCLALNPLSNKLNSLRPGYQLQFNDTLNDILTDDQNCKINHLLYMDDIKLYASSPDDLYELANTTEHFSKDIGMEFGIDKCKINSIRAGKTYEHSHTIQTGETIDSLDENGTYKYLGYIQNKQLKHKEIKTILTQQFKHRLKSIFNTQLHSKNTVKAINTYAIPVLTYSFGIINWTKTELKNLQRVINTTLTKHRKHHPRSCVQRLTLPRKEGGRGIIDISNLHNKQITTLRKYFNSKSTTSSLHKAIVYNDQKLTPLNMFDKTTQNNEKQTTRQTKILEWTQKSLHGRHRKDLEQLNVDKLASNEWLCRGDLFPETEGFMVAIQDQVIETRNYQKYIMRVPHANDICRRCSSSSETIQHITGACKAIVQTDYKHRHDQIANIIHQRLAIKYDLITTPPTPYYKYNPEIVLENNTHKLYYDRAILTDKTTHYNRPDITLLDKINKTAQIIDIAVPNTHNLQSTIAEKLSKYTDLKIEISRMWRLSNATIIPIVISTTGVIPKQLHQSLRTLDLPPYLYTSLQKAAILNTCRIVRKFLQNDNETQMITPHSQASNTTRTQSLNQTNSSQSHIMSSHHITNQ

SEQ ID NO: 31141 - protein, 1444 aa, Amphipyra berbera
MPTLENRGPPVLFTLATVNAGLCCGRLCKSLATRGIIMITRSKKRKAIQTIMLSTDDETTQVSASSSPRSIFSSIASSPPSYILASSRSSSSSPLSVDVVSEATSARNPSPATVSTITRKKWSEEMNTFIWRTYLIITNLETDTRSYVTSLHQQFINRFPQMNVSKQRVGDQRRAIVYKKLLPTTTLDIIRLEVSNSLKTHNTVLHPQTQTLQSNMSQINTNSPSQPNRRMKWSTELNENLIKCYYICTKMETDMTVWRKKLKEMFIEIYPQLSHLSEQRISDQKRVVINNRMISETRLQELKTDVQNTLNQTNSYEQHQNSHVISDNIQTQPPFNNNIAQLHTQETELELRNEPNYLNRIDVEALTQHNSTNMETNQERNQELEEIFLQTLQYFTNTHPTQRNYIPKQKSSKKFAKIVSYINNIILPNYLNSDIDFDTLQTIIYSAAWTAAKANGSKLLHVSAENMVNTRQKNHKPKWQRRLEYKIKDLRAKIGRLTQYIYGNRSRKLTQEVNTILEHYKIHSTHEEPNTQLTHFLDTLKQKLTLVNSRLKRYTKCTHRKTQNNQFRNNERQFYRTLKNSTTNQTTPTNNVNNVNSILPPIDEIKQFWSQIWERPIGHNTEADWIKVETENYINIEQMEFEHIKRDTFLDVLKKLHNWKAPGSDYIHNFWYKNFTHTHPYLYNHINNFISNPTTMPCYISEGITYMLPKDSNDRTNPAKYRPITCLQTIYKIITSCISHVIYKHLDRNKILAEEQKGCKKFSQGCKEQLTIDSVILNQVQRKKADIYTMYIDYKKAYDSVPHTWLLEVLNIYKIHPQITTFLSNIIKQWSTRLHLTSPTGIVETETIKIQRGIFQGDSLSPLWFCLALNPLSNKLNSLRPGYQLQFNDTLNDILTDDQNCKINHLLYMDDIKLYASSPDDLYELANTTEHFSKDIGMEFGIDKCKINSIRAGKTYEHSHTIQTGETIDSLDENGTYKYLGYIQNKQLKHKEIKTTLTQQFKHRLKSIFNTQLHSKNTVKAINTYAIPVLTYSFGIINWTKTELKNLQRVINTTLTKHRKHHPRSCVQRLTLPRKEGGRGIIDISNLHNKQITTLRKYFNSKSTTSSLHKAIVYNDQKLTPLNMFDKTTQNNEKQTTRQTKILEWTQKSLHGRYRKDLEQLNVDKLASNEWLCRGYLFPETEGFMMAIQDQVIETRNYQKYIMRVPHANDICRRCSSSSETIQHITGACKAIVQTDYKHRHDQIANIIHQRLAIKYDLITTPPTPYYKYNPEIVLENNTHKLYYDRAILTDKTTHYNRPDITLLDKINKTAQIIDIAVPNTHNLQSTIAEKLSKYTDLKIEISRMWRLSNATIIPIVISTTGVIPKQLHQSLRTLDLPPYLYTSLQKAAILNTCRIVRKFLQNDNETQMITPHSQASNTTRTQSLNQTNSSQSHIMSSHHITNQ

SEQ ID NO: 31142 - protein, 1157 aa, Hydraecia micacea
MISDSRLQELKTYAENTLNQANSYRQLEHQNCFITTDNTPTQTPTNSNTETAYVDNNQTHTQETEVGHEPNFLNCIDLGALTSTIIDTEHNTTNGEISQERSQELEETFSHTLQYYTNIHPTKRNYIPKQKPSKKLAQIVSYINNVILPKYVNADTDFETLQTVIYTSAWTAAKTNGSKLSHITPESTSYINQKNKKPKWRKRLECRVKDLRTKIGRLTAYMQGNRGWRLVREVHTILENYRIHSTHEEPNTQLTHFLDTLKQKLTLVNSRLNRYNNCTLRKVQNNKFRNNEKQFYRTLKNATTNQTAPNSNENNTNLSLPSVDELQQFWSRIWERPICHNTEAEWVKIETENHMHTDQMEFEQVPINTFHDVLQKLHNWKAPGSDYIHNFWYKKLTYIHPYLYNYINAFIKNPTTMPTYIAEGITYMIPKDSNDSANPAKYRPITCLQTIYKIITSCITQIIYKHLESNSILSEEQKGCRKFSQGCKEQLTIDSVILKQVQRKKKDLYTMYIDYKKAYDSVPHTWLIEILHIYKINPQIITFLNNTITQWTTRLHLTTSTGIVESESIKIQRGIFQGDSLSPLWFCLALNPLSNKLNSLMPGYKLNYNDTIDDIRTDRHDCKINHLLYMDDIKLYASSPEDLNELANATDKFSSDIGMDFGIDKCKINSVRAGQTYEHSYTTQSGETIDSLDEHGTYKYLGYIQAKQIKHKAIKNKLTQQFKHRLKSILNTQLHSKNTIKAINTYAIPVLTYSFGIISWTKTELKNLQRVINTSLTKYRKHHPRSCVQRLTLPRKEGGRGIIDITNLHNKQISTLRKYFNTKSTTSTLHKAIVYNDRKLTPLNMSDQTTQINEKQTDRQTKISEWSQKSLHGRHRHDLCQPNVDKLASNEWLRRGDLFPETEGFMTAIQDQIIETRNYQKYIMRIPISTDICRRCHSSSETIQHITGACKAIVQTDYKHRHDQIANIIHQKLAIKYKLITTPPVPYYKYIPETVLENTTHKLYFDRAILTDRTTHYNRPDITLLDKINKTAQIIDIAVPNTHNLQNTIAEKLSKYTDLKIEISRMWRLCSVAIIPIVLSTTGVIPNQLHQSLKTLDVAPSTYQTLQKAAILNTCRIVRKFLQNDNDAQITHPQTSFTTATHSQNIISPRHISSTIT

SEQ ID NO: 31143 - protein, 1317 aa, Noctua fimbriata
MLTRSKTKKSIQANMPAVDDETSPVSSSSSPKSIFSSIASSPPSYLSRSSRSSSLLSPMTVEVVSEASLASNPSPTAVSTTTRKKWSKEMNEFIWRNYLIITNLEYDTKAYLTSLHHQFIEKFPNMKVSKQRIGDQRRAIVSKKLLPSTTLDTIRLEVSNHLRTHNNELELQSPPEFPTSQTDSQPHSQSEPKRRMKWSNELNETLMKCYFRATKMETDMTVWRKNLKEKIIECYPNLSHLSEQRISDQKRVIVNNSMIPVARLQVLKSIVEKELFETESFQRQVDSRMSNTDVENVHLHTNTETINIDIENIEPPQTENIGVGIDDGNINNLGPEHPIHLNTQHTSLVRNPEIDEIFSQTLQYYKDTQPTERSYIPKQKSSKKLANIVSYINKVILPEQVTSDTNFNHLQTVIYCAAWTAAKANGSKISLAPPVDRSSRLQQAHKPKWQKRLENKIESIRAKIGRLTQYIQGVRSRKLIKAVEIILKDYRIHTSHEQPNTQLEHFLDTLKQKLTVVKSRLNRYTKCTQRKTQNNQFRNNEKQFYRSLKKSTTNETISDNNTNTAFPTTEELQQFWAGIWESPVYHNTEAEWIKGEQVIQTNTEAMIFDHVEVATFHDVLTKIHNWKAPGSDYIHNYWYKKFTHIHPHIFNHINNFIKDPTTIPTYITEGKTYMLPKDPSDSANPAKYRPITCLQTIYKIMTSCISHIIYKHLETQKILTEEQKGCKKLSQGCKEQLTIDAVIHRHVQSTKKDLHTMYIDYRKAYDSVPHSWLLEVLNIYKIHPQLINCLGTIVEKWKTRLQLNTSTGTVETEFIKIQRGIFQGDSLSPLWFCLALNPLSNKLNALLPGYQLQYSDTMTDILTDQHCCKVNHLLYMDDIKLYASSPDDLYELADVTEQFSKDIAMEFGIDKCKINSIRAGKTYTHSYQMQTGATIDSLDETGTYKYLGYIQAKQILHKEIKTKLTKQFKHRLKTIFNTQINAKNTIKAINTYAIPILTYSFGIIKWNKTDLKNLQRIINTTLTKHRRHHPRSCVQRLTLPRNDGGRGIIDITNLHNKQITTLRKYFENKSSTSTLHKAIAYNDKKLTPLNMYDRTTQSNEQQTDRQTKIAEWTQKSLHGRHRHDLNLPNVDKLASNEWLKRGELFPETEGFMIAIQDQVIETRNYQKHIMRVPQTVDICRRCNSSSETIQHITGACKAIVQTDYKHRHDQIANIIHQKLAIKYNFISTPPVPYYKYQPETVLENATHKLYFDRGIFTDKTIHYNRPDITLLDKCNKTALIIDIAVPNTHNLQNTIAEKLSKYIDLKIEIAECGVLTM

SEQ ID NO: 31144 - protein, 1444 aa, Amphipyra berbera
MPTLENRGPPVLFTLATVNAGLCCGRLCKSLATRGIIMITRSKKRKAIQTNMLSTDDETTQVSASSSPRSIFSSIASSPPSYILASSRSSSSSPLSVDVVSEATSARNPSPATVSTITRKKWSEEMNTFIWRTYLIITNLETDTSSYLTSLHQQFINRFPQMNVSKQRVGDQRRAIVYKKLLPTTTLDIIRLEVSNSLKTHNTVLHPQTQTLQSNMSQINTNSPSQPNRRMKWSTELNENLIKCYYICTKMETDMTVWRKKLKEMFIEIYPQLSHLSEQRISDQKRVVINNRMISETRLQALKTDVQNTLNQTYSYEQHQNSHVISDSIQTQPPFNNNIAQLHTQETELELRNEPNYLNRIDVEALTQHNSTNVETNQERNQELDETFLQTLQYFTNTHPTQRNYIPKQKSSKKFAKIVSYINNIILPNYLNSDIDFDTLQTIIYSAAWTAAKANGSKLLHVSAENMVNTRQKDHKPKWQRRLEYKIKDLRAKIGRLTQYIYGNRSRKLTHEVNTILEHYKIHSTHEEPNTQLTHFLDTLKQKLTLVNSRLKRYTKCTHRKTQNNQFRNNERQFYRTLKNSTTNQTTPTNNVNNVNSILPPIDEIKQFWSQIWERPIGHNTEADWIKVETENYINIEQMEFEHIKRDTFLDVLKKLHNWKAPGSDYIHNFWYKNFTHTHPYLYNHINNFISNPTTMPCYISEGITYMLPKDSNDRTNPAKYRPITCLQTIYKIITSCISHVIYKHLDRNTILAEEQKGCKKFSQGCKEQLTIDSVILNQVQRKKADIYTMYIDYKKAYDSVPHTWLLEVLNIYKIHPQITTFLSNIIKLWSTRLHLTSPTGIVETETIKIQRGIFQGDSLSPLWFCLALNPLSNKLNSLRPGYQLQFNDTLNDILTDDQNCKINHLLYMDDIKLYASSPDDLYELANTTEHFSKDIGMEFGIDKCKINSIRAGKTYEHSHTIQTGETIDSLDENGTYKYLGYIQNKQLKHKEIKTTLTQQFKHRLKSIFNTQLHSKNTVKAINTYAIPVLTYSFGIINWTKTELKNLQRVINTTLTKHRKHHPRSCVQRLTLPRKEGGRGIIDISNLHNKQITTLRKYFNSKSTTSSLHKAIVYNDQKLTPLNMFDKTTQNNEKQTTRQTKILEWTQKSLHGRHRKDLEQLNVDKLASNEWLCRGDLFPETEGFMVAIQDQVIETRNYQKYIMRVPHANDICRRCSSSSETIQHITGACKAIVQTDYKHRHDQIANIIHQRLAIKYDLITTPPTPYYKYNPEIVLENNTHKLYYDRAILTDKTTHYNRPDITLLDKINKTAQIIDIAVPNTHNLQSTIAEKLSKYTDLKIEISRMWRLSNATIIPIVISTTGVIPKQLHQSLRTLDLPPYLYTSLQKAAILNTCRIVRKFLQNDNETQMITPHSQASNTTRTQSLNQTNSSQSHIMSSHHITNQ

SEQ ID NO: 31145 - protein, 1416 aa, Acronicta aceris
MSLATRGTNMITRSKTRKAIQANAATMDVEPSQSSRSSSPRSIFSSIASSPPSYLLSSSRSSSLSPRTVDVAMEATSARNPLPATVSTITRKKWSEEMNRFIWRTYLIITNLETDTNSYLTSLHQQFIDKFPQMNVSKQRVGDQRRAIVKKKLLPRTTLETIRLEVSDRLQIYNSDLHSHNSTSQQFIAFHTGPTQQSQLKTRMKWSKEHNETLIKCYFIITKMETDMTVWRKKLKEKFLEFYPQLLHLSEQRISDQKRVIINNRMISEARLTELKLYAESVLNQTDSYMESIDHISQSTTEDVQEILLTNNNTQLTNIEQSHTHETELENNPNYLNSIDIEALTNSTANTYHTDTNIEIRDQANPELEEIFANTLLHFTDTNPTKRNYIPKQKSSKKLGKIVTYIDNCILPKYVSNETDFKTLQTIIYSAAWTAAKANGSKLSYKTPENVANIHQRINKPKWQRRLEYKIKDLRAKIGRLTHYIHGNRSRKLDREIHKILEHYKIHSTHEEPNTQLTHFLDTLKQKLTLLSSRLNRYTKCTLRKSQNNQFNKNEKQFYRSIKKSTTNRTMPSNSENNTTNTLPPTSEIHKFWSNIWERPMLHNTEAEWIRTETENLVNTEQMDFEHIPIDTFHDVLKKLHNWKAPGSDYIHNFWFKKFTHIHPYLFNYINEFIKNPNTMPAYLTEGITYMLPKDFNDTNNPAKYRPITCLQTIYKIITSCITHIIYKHLDTNSILTEEQKGCRKYSQGCKEQLTIDAVILKQVQQKKKDLYTMYIDYKKAYDSVPHTWLIEVLNIYKIHPQIIAFLNNVIKQWTTRLYLPSPTGEAETEPIKIQRGIFQGDSLSPLWFCLALNPLSHKLKSVAPGYLLQYNDMSSDRLSDKQDCKINHLLYMDDIKLYASSPDDLYQLANITEQFSNDIGMVFGIDKCKINSVKGGQTFEHTHTIQTGETIESLDEHGTYKYLGYIQAKQIKHKQIKNQLTQQFKHRLKSIFNTELYARNTIKAINTFAIPVLTYSFGIINWTKTELRKLQRIINTTLTKHRKHHPRSCVQRLTLPRKEGGRGIIDITNLHNKQISTLRTYFNYKSTTSNLHKAIVFNDRKLTPLNMSDKNKQSNETQTDGPTKILQWTQKSLHGRHRQDLGQPNVDKLASNEWLRRGDLFPETEGFMTAIQDQVIETRNYQKHIMRIPQIHDICRRCNSSPETIQHITGACKSIVQTDYKHRHDQIAKIIHQKLALKYNLISTPPVPYYKYNPEIILENNNHKLYYDRAILTDRTTHYNRPDITLLDKINKTAQIIDIAIPNTHNLQSTIAEKLTKYTDLKIEISRMWRLSHVSIIPIVLSTTGVIPKQLHQSLKSLDLAPYTYQSLQKAAILNTCRIVRKFLQNDNETLIPTSHPQVTTTINTRTQSRNHTQT

SEQ ID NO: 31146 - protein, 779 aa, Eilema sororculum
MHFECVPIEIFQTTIQKSHNWKAPGSDYLHNYWYKKFTKSHPYLHNYINSFIIDSSKMPAYITDGVTYMLPKDPKDTANPAKYRPITCLQTIYKIITSCLTHMIYKHLETNNILTEEQKGCRKFSQGCKEQLTIDSVIHRQVQRSKKDLCTMYIDYKKAYDSVPHTWLKEVLQIYKVNPQIITFLSHVMERWTTRIHLNTRTGTVTTDSIKIKRGIFQGDSLSPLWFCMALNPLSKHLNSLDSGYLLDYLENPTDRLTEKRTCKINHLLYMDDIKLYATTPDDLDILAQFTETFSNDISMEFGLDKCKINSVILGKIHKHSYEVQTGETIDSLDENDTYKYLGYNQSKQIHHKETKYKLTHQFKHRLNSILNTQLNSRNLIKAVNAYAIPILTYSFGIINWTKTELKNLQRIINTTMTKHRKHHPRSCLQRLTLPREEAGRGIIDVINLHNKQITILKSYFSSKTTTSTLHKAIAYNDQKHTPLNMHDWTTQNNETIKSIQTKIAEWTQKSLHGRHRQDLCQPHVDKKASNEWLRGGYLFPETEGFMMAIQDQVIETRNYQKHIIRNHLVSNVCRRCNSSSETIQHITGACKAIVQTDYKHRHDQVANIIHQKIALKYNLITSTPLPYYKYVAETVLENQTHKLYFDRAILTDKTIHYNRPDITLIDKQNKTAQLIDIAVPNTHNLQTTISEKLSKYVELKMEVTRMWRLNNATIIPIVLSTTGVIPAQLHQSIKTIDLPCSIYKILQKAVILNTCRIVRKFLNNDNTSNTHSPTQTHQ

SEQ ID NO: 31147 - protein, 1409 aa, Apamea monoglypha
MITRSKTKHLIQANKPSADDETSPVTSSSSPRSIFSSIVSSPPSYLSRSLRSSSSSPMSVDVVSEASTAINPSPATVTTNTRKKWSKDMNQFIWRTYLILTNLDTETNSYLTSLHQQFIIRFPQMNVSKQRVGDQRRAIVHKKLLSATTLEKIRLEVSRKLQTDTTNLDTHQLNTDQSNIHLQSGSKSRMRWSNEMNETLIKCYFITTKMETDMTVWRKKLREMFIEFYPQLSYLSEQRISDQKRVVLNNKMITEARLQDLKMYAENTLNEANPYRQTEYHNSLIVRNNTPTQVSTNNNTETAYFNNNQTHTQETEVGNEPNFLNCIDLGALTSTIINTEHNTTNGDISQERNQELEETFSHTLHHFTNVHPTKRSYIPKQKPSKKFAQIVSYINNVILPKYVNADTDYETLQTVIYTAAWTAAKTNGSKLSHITPESTTYIYQKNKKLKWQKRLELRIKDLRIKIGRLTAYIQGNRGWRLVREVQTILENYRIHSTHEEPNTQLTHFLDTLKQKLTLVNSRLNRYNNCTLRKIQNNKFRNNERQFYRTLKNSTTNQTATSSNENNTNHSLTSVDALQQFWSRIWERPICHNTEAEWVKIETENHIHTEQMEFDQVPIETFHDVLQKLHNWKAPGSDYIHNFWYKKLTYTHPYLYNYINTFITNPTTMPTYIAEGITYMIPKDSNDSANPAKYRPITCLQTIYKIITSCITQIIYKHLESNSILSEEQKGCRKFSQGCKEQLTIDSVILKQVQRKKKDLYTMYIDYKKAYDSVPHTWLIEILHIYKINPQIITFLNNTITQWTTRLHLTTSTGIVESESIKIQRGIFQGDSLSPLWFCLALNPLSNKLNSLMPGYKLNYNDTIDDIRTDRHDCKINHLLYMDDIKLYAASPEDLNELANATDKFSNDIGMDFGIDKCKINSVRTGQTYEHSYTTQSGETIDSLDENGTYKYLGYIQAKQIKHKTIKNKLTQQFKHRLKSILNTQLHSKNTIKAINTYAIPVLTYSFGIISWTKTELKNLQRVINTSLTKYRKHHPRSCVQRLTLPRKEGGRGIIDITNLHNKQISILRKYFNTKSTMSTLHKAIVYNDRKLTPLNMSDKTTQMNEKQTDRQTKISEWTQKSLHGRHRHDLCQPNVDKLASNEWLRRGDLFPETEGFMTAIQDQIIETRNYQKHIMRIPISTDICRRCHSSSETIQHITGACKAIVQTDYKHRHDQIANIIHQKLAIKFKLITTPSVPYYKYTPETVLENTTHKLYFDRAILTDKTTHYNRPDITLLDKINKTAQIIDIAVPNTHNLQNTIAEKLSKYIDLKIEISRMWRLGSVAIIPVVLSTTGVIPKQLHQSLKTLDVAPSTYQTLQKAAILNTCRIVRKFLQNDNDAQIAHPQTSFTTATQSEHIISPRHISSSIIT

SEQ ID NO: 31148 - protein, 1374 aa, Spodoptera frugiperda
MITRSKVKNTMQAKVPPADEEASAVSLSSSPRSIFSSLTPSPLSFTTRSLRSSISSTLSTDVVSEATVANNPSPAVGTKSTRKKWSSEMNEFIWRTYLIITNLETETNAYLSTLHSKFIQQFPEMAVSRQRVGDQRRAIVNNKLLSDTTLDAIRLEARNYLRNQNNTTQQIHNQTQPELITTQINPTHTQPNTRMKWSNDLNETLIKCYFIVTKMETDMTVWRKNLRDKFIQHYPHLSHLSEQRISDQKRVIINNRMISEMRLQSIKLAAQQELDEVGSVTFERLNSPNPHLNTSIRLELQTNINTINRENMTSELQNTNITEEQNDNRQQPSVTNTHTNSERNLEIDELFSQALQHYTETHPTNRCYIPKQKTSKKLAEIVDYINKVILPDYVISDIEFSQLQTILYVAAWTAAKANGSKVTLASAQDRNNHQRDYKPKWQKRLERKIDVIRAKIGRLTYYIQGHRSRKLKKEVNRILRDYRIHTTHEEPNTYLAHYLDTLKQKLAVFKSRLNRYTKCTLRKTQNNQFRNNEKQFYRTLKKSTTNHTTPSNTTTNTPFPSEDNLRHFWAGIWQNPVSHNAEAEWIKAEETKYDNIPQMQFDQVDIETFHDVLSRVHNWKAPGSDHIHNYWYKKFTTIHPHLFNHINTFIRDPNKIPSYITEGITYMLPKDPNDTANPAKYRPITCLQTIYKIMTACITHIIYKHIDTQNILTEEQKGCRKFSQGCKEQLIIDSVILKDVEKHKKDLYTMYIDYKKAYDSVPHSWLLHILRIYKIHPHIAHFLETIISKWQTRLHLNTPTGTIATEFIKIQRGIFQGDSLSPLWFCLAINPLSNTLNSLQAGLQLQYRDTINSLESNQQHCKINHLLYMDDIKLYASSPEDLYQLADTTEIFSSDIAMEFGIDKCKINSVKAGKIYTHSYQLQTGDTIHSLDESGTYKYLGYIQGKQILHKEIKTELTKQFKHRIKVICNTELNARNTIKAINTYAIPILTYSFGIINWSKTELLTLQRNINTTLTKHRRHHPRSCTQRLTLSRNDGGRGIIDVTNLHNKQITTLRSYFYSKSTTSILHHAIAQNDKKLTPLNMSDRETQNNEKQVDRQTKIAEWAQKSLHGRHYHDLNQPNVDKSASNDWLRRGELFPETEGFMLAIQDQVIETRNYQKHIMHTPIPTDICRRCNSASETIQHITGACKAIVQTDYKHRHDQIANIIHQKLAAKYNLISTPTVSYYKYQPETVLENSSHKLYFDRAILTDKTIHYNRPDITLIDKINKTAQIIDIAVPNTHNLQNTIAEKLSKYTDLKNEITRMWRLNSVTIIPIVLSTTGVIPRQLHQSIQSLALPSYTYHSLQKAAILNTCRIVRKFLNDTDQDMYTQSQN

SEQ ID NO: 31149 - protein, 1406 aa, Ochropleura plecta
MLTRSKTKKSIQANMPSADDETSSVSSSSSPKSIFSSIASSPPSYLSRSSRSSSILSPMAADVVSEASLANNPSPIAVSTTTRKKWSKEMNEFIWRNYLIITNLETDTKAYLTSLHHQFIEKFPNMKVSKQRIGDQRRAIVSKNLLPSTILDTIRLEVGNHLKTQNNDPALQSPPEFRSSQPESQAEPKRRMKWSNELNETLMKCYFRVTKMETDMTVWRKNLKENFIEFYPQLSHLSEQRISDQKRVIVNNDMISEARLQILKTTVENELFETESFQRQADNITSNTDAVNVHLHTNTETLNIDIRNIEPSQTDNVGIGIDDDNFNNVEQIIHLNTQQTDLVRNPEIDEIFSQTLQYYKDTLPTERSYIPKLKSSKKLANIVSYINKVILPEQVTSETNFNHLQTVIYCAAWTAAKANGSKIYLSSSVESSRLQQVYKPKWQKRLEKKKEALRAKIGRLTQYIQGHRSRKLIKAVETILKDYRTHTLHEQPNTQLEHFLDTLKQKLTVVKSRLNRYTKCTLRKTQNNQFRNNEKQFYRSLKQSTTNETTPNSNTHTTFPTTEELQQFWAGIWENAVCHNTEAEWIKAEQAFHINTETMITDHIEIATFHDVLTKIHNWKAPGSDYIHNYWYKKFTHIHPHIFNHINNFIKDPATIPTYIMEGKTFMLPKDPNDPANPAKYRPITCLQTIYKIMTSCISHIIYNHLETHKILTEEQKGCKKLSQGCKEQLTIDAVIHKHVQRNRNDLHTMYIDYKKAYDSVPHSWLLEVLKIYKIHPQLINCLGNIIEKWKTRLQLNTSTGIVQTELIKIQRGIFQGDSLSPLWFCLALNPLSNKLNSLLPGYQLQYNDTMTDILTDQQYCKVNHLLYMDDIKLYASSPDDLYELADVTEQFSNDIAMEFGIDKCKINSIRAGKTYTHSYQMQTGATIDSLDETGTYKYLGYIQAKQIMHKEIKTKLTKQFKHRLKTIFNTQINAKNTIKAINTYAIPILTYSFGIIKWNKTDLQNLQRIINTTLTKHRRHHPRSCVQRLTLPRNDGGRGIIDITNLHNKQITILRTYFKNKSSISTLHKAIAFNDKKLNPLNMYNNTTQSNEQQTDRQTKIAEWTQKSLHGRHRHDLNLPNVDKLASNEWLRRGELFPETEGFMIAIQDQVIETRNYQKHIMKVHQTVDICRRCNSSSETIQHITGACKAIVQTDYKHRHDQIANIIHQKLAIKYNLISTPPVSYYKYQPETVLENATHKLYFDRGIFTDKTIHYNRPDITLLDKSKKTAQIIDIAVPNTHNLQNTIAEKLAKYTDLKMEISRMWHLNNVSIIPIVLSTTGIIPKQLHQSLKTLDLPPYTYQSLQKAAILNTCRIVRKFLQIQNETVTSTSRTRRPITAQSQLNGQSSSHNPIISSSHRITTLSG

SEQ ID NO: 31150 - protein, 913 aa, Mamestra brassicae
MQGHRGWKLVREVNTIIENYKTHSTHEEPNTQLTHFLDTLKQKLTLVNSRLNRYNKCTLRKIQNNNFNNNEKQFYRTLKQATTNQSVPSESQGNSIHRLPPIDNLRQFWSGIWERPTCHNAAAEWITKETNNYSHTVQMESAHIPIETFHDVLQKLHNWKAPGSDYIHNFWYKKLTHIHPYLYNYINTFIQNPTTMPAYIADGITYMIPKDISDTSNPAKYRPITCLQTIYKIVTSCITHIIYKHLETNEILSEEQNGCRKYSQGCKEQLTIDSVILKQVQRKKRDLYTMYIDYKKAYDSVPHTWLLEVLQIYKINPIIVTFLSNAMSNWMTRLHVTSPTGIVETEPIKIQRGIFQGDSLSPLWFCLALNPLSNRLNTVTPGYNLPFNDTTADIETDRQNFKINHLLYMDDIKLYASTTDDLFELAETADQFSTDIRMEFGIDKCKINSVKAGKPYHHSYTIQTGETIDSLNVNETYKYLGYIQDRQIKHKDIKNKLIQQFKHRLRSIFTTQLYSKYTVKAINTFAIPVLTYSFGIISWTKTDLKNLQRVINTTMTKHRKHHPRSCVQRLTLPRKEGGRGIIDITNLHNKQISTLRKYFNTKSATSTLHKAIVYNDRKLTPLNMHEKTTQINEKQNDTPTKILEWTQKSLHGRHRHDLCQPNVDKLASNEWLRHGDLFPETEGFMTAIQDQVIETRNYQKHIMRVPLSTDTCRRCHSSPETIQHITGACKAIVQTDYKHRHDQIVNIIHQKLVIKYKFITTPPVPYYKYVPETVLENATHKLYFDRAILTDKTTHYNRPDITLLDKINKTAQIIDIAVPNTHNLQSTIAGKLSKYTDLKIELSRMWRLGNVSIIPVVISTTGVVPKQLHQSLKMLDIASSTYQTLQKAAILNTCRIVRKFLQNDNNADTFSIT

SEQ ID NO: 31151 - protein, 1345 aa, Xestia c-nigrum
MLCRRLMWPIILHPLLSTRKKWSKEMNEFIWRNYLIITNLESDTKAYLTSLHHRFTDKFPNMNISKQRIGDQRRAIVSKKLLSSTVLNTIRLEVSNHLRTPIDDIELHSPPKYPSSQRDSQLNSQSEPKRRMKWSNEINETLMKCYFRVTKMETDMTVWRKNLKEKFIECYPHLSHLSEQRISDQKRVIVNNSMISEARLQELKSIVENELCEIESFQRQYDSRMSNTDVGNLHLDTNTETLNTDIENIEHSETENVRVGIDDGNNNLGPEHPIHLNIQHTNLVRNPEIDEIFSQTLQYFKDTQPTERSYIPKQKSSKKLANIVSYINKVILPEQVTNETNFNHLQTVIYCAAWTAAKANGSKISLAPPVDSSSRPQQAHKPKWQKRLENKIESLRAKIGRLTQYIQGVRSRKLIKAVEIILKDYRIHTLHEQPNTQLEHFLDTLKQKLTVVKSRLNRYTKCTLRKTQNNQFRNNEKQFYRTLRKSTTNETTSNSNSHTAFPTTEELQQFWAGIWENPVCHNTEAEWIKTEQVIHTNTEAMIFDQIEVATFHDVLTKIHNWKAPGSDYIHNYWYKKFTHTHPHIFNHINNFIKDPATIPTYITEGKTYMLPKDPSDPTNPAKYRPITCLQTIYKIMTSCISHVIYKHLETQKILTEEQKGCKKLSQGCKEQLTIDAVIHRHVQRTKKDLHTMYIDYRKAYDSVPHSWLLEVLKIYKIHPQLINCLGTIVEKWKTRLQLNISTGTVETELIKIQRGIFQGDSLSPLWFCLALNPLSNKLNALLPGYRLQFSDTVTDTPTDQQYCKVNHLLYMDDIKLYASSPNDLYELADVTEQFSKDIAMEFGIDKCKINSIKTGKTFTHSYQMQTGATIDSLDETGTYKYLGYIQAKQILHKEIKTTLTKQFKHRLNTIFNTQINAKNTIKAINTYAIPILTYSFGIIKWNKTDLKNLQRIINTTLTKHRRHHPRSCVQRLTLPRNDGGRGIIDITNLHNKQITTLRTYFDNKSSTSTLHKAIVYNDKKLTPLNMYDRTTQSNEQQTDRQTKIAEWTQKSLHGRHRHDLNLPNVDKLASNEWLRRGELFPETEGFMIAIQDQVIETRNYQKHIMRVPHTIDICRRCNSSSETIQHVTGACKAIVQTDYKHRHDQIANIIHQKLAIKYKFISTPPVPYYKYHPETVLENATHKLYFDRGIFTDKTIHYNRPDITLLDKCNKTALIIDIAVPNTHNLQNTIAEKLAKYIDLKLEITRMWNLKNVAIVPIVLSTTGVIPKQLHQSLKSLDLPPYTYQSLQKAAILNTCRIVRKFLQNDNEAIITTSHTQPSQTQFNEHSSSHNLTRSSSHYITTLLG

SEQ ID NO: 31152 - protein, 1218 aa, Agrochola circellaris
MRWSNEMNETLIKSYFIATKMETDMTVWRKKLREMFIDFYPQLSHLSEQRISDQKRVILNNKMISDERLQDLKTYAVNTINQPNPYRQLEHHNLLIAADNTSTQAPTNNNTESALGNNQTHTQETEVGSEPNFLNNIDIGALTTTINTEHITTYVEISQERCQELEETFSHTLQHFRSIHPTKRNYIPKQNTSKKLAQIVSNINNAILPKYVNADTDFETLQTVIYSAAWTAAKTNGSKLSYITSDSTTYTNQKNKKPKWQKRLELKVKNLRTKIGRLTAYTQGNRGWRLVREVHTILENYRIHSTHEEPNTQLTHFLDTLKQKLTLVNSRLNRYNNCTLRKIQNNKFRNNEKQFYRTLKNSTTNQTAPSNNENNTNHSLPPVQELQQFWSGIWERPICHNNEAEWVKTETGNHLHTEQMEFEQIPIDTFHDVLQKLHNWKAPGSDYIHNFWYKKFTHIHPFLYNYINTFIKNPTTMPTYIAEGITYMVPKDSNDSANPAKYRPITCLQTIYKIITSCITQIISKHLESNSILSEEQKGCRKFCQGCKEQLTIDAVILKQVQRNKKDLYTMYIDYKKAYDSIPHTWLLEILNIYKINPQIIAFLNNTITQWTTRLHLTTSTGFVETEPIKIQRGIFQGDSLSPLWFCLALNPLSNKLNSLMPGYNLNYNDTIDGIRTDRHNCKINHLLYMDDIKLYASSPEDLNELANATDKFSSDIGMEFGIDKCKINSVRAGQTYEQSYITQSGETIDSIDENGTYKYLGYIQAKQIKHKTIKNKLTQQFKHRLKSILNTQLYSKNTIKAINTYAIPVLTYSFGIISWTKTELKSLQRVINTNLTKYRKHHPRSCVQRLTLPRKEGGRGIIDITNLHNKQISTLRKYFNTKSTTSTLHKAIVYNDRKLTPLNMSDKTTQINEKQTDRQTKISEWTQKSLHGRHRQDLCQPHVDKVASNEWLRRGDLFPETEGFMTAIQDQVIVTRNYQKHIMRVPLSTDICRRCHSSSETIQHITGACKAIVQTDYKHRHDQIANIIHQKLAIKYKLITTPPVPYYKYTPETVLENTTHKLYFDRAILTDRTTHYNRPDITLLDKINKTAQIIDIAVPNTHNLQNTIAEKLSKYTDLKIEISRMWRLGSVTIIPVVLSTTDVIPKQLHQSLKTLDVAPSTYQTLQKAAILNTCRIVRKFMQNDNDAQISHAQTSLTTATQNQNIIAPRHILSPIIT

SEQ ID NO: 31153 - protein, 1398 aa, Ochropleura plecta
MLTRSKTKKSIQANMPYVDDETSSVSSSSSPKSIFSSIVSSPPSYLSRSSRSSSILSSMAADVVSEANSANNPSPTAVSTTTRKKWSKEMNEFIWRNYLIITNLEADTKAYLTSLHHQFTEKFPNMKVSKQRIGDQRRAIVSKNLLPSTTLDAIRREVSNCLPTHSSDSQLESPPEILLSQTDTHHHSQSEPKRRMKWSNELNETLMKCYFRVTKMETDLTVWRKNLKEKFIECYPHLSHLSEQRISDQKRVIVNNNMIPEARLQILKSIVENELIETGSFQRQADSRGSNTEVGNLHTITNTDTLNIEIENREEPSQREHSGERTNVNNLGTDHPIHLNTQHTCQDRNPDIDEIFSQTLQYYKDTHPTERSYIPKQKTSKRLAKIVSYINTIILPEHVTSDTDFNALQTIIYCAAWTAAKANGSKISLTPLEDRSRLHQVYMPKWQKRLEHKIEVFRAKIGRLTHYMRGHRSRKLNKAVEAILKDYKTHTTHEQPNTQLEHFLDTLKQKLTVIKSRLNRYTKCTLRKTQNKQFRNNERQFYRSLKNSTTNQTTSNNNTHISFPTTEELQQFWAGIWENPVCHNAEAEWIKEEEAIHSNTEAMFFDQIEVGTFHDVLNRIHNWKAPGSDHIHNYWYKKFTHTHPHIFNHINNFIKDPTTLPSYITEGKTYMLPKDPSDSENPAKYRPITCLQTIYKIMTSCITNIIYKHLETQKILTEEQKGCKKLSQGCKEQLTIDAVIHKQVQRTKKDLHTMYIDYKKAYDSVPHSWLLEVLKIYKIHPQLIQFLGNIVEKWKTRLQLNTSTEIVQTEPIKIQRGIFQGDSLSPLWFCLALNPLSNKLNALIPGFQLQYNDIMTDTLTDQHNCKINHLLYMDDIKLYAASPDDLYELADVTEKFSNDIAMEFGIDKCKINSIKAGETYTHSYQMQTGVLIDSLDETGTYKYLGYIQGKQIMHKEIKTTLTKQFRHRLKTIFSTQINAKNTIKAINTYAIPILTYSFGIIKWNKTDLKNLQRIVNTTLTKHRRHHPRSCVQRLTLPRNEGGRGIIDITNLHNKQITTLRTYFDNKSSTSTLHKAIAYNDRKLTPLNLYDKTAQINEKQTDRQTKIAEWTQKSLHGRHRHDLNLPNVDKLASNEWLRRGELFPETEGFMIAIQDQVIETRNYRKHIMRVPQTIDVCRRCNSSSETIQHITGACKAVVQTDYKHRHDQIANIIHQKLAIKYNLISTPPVPYYKYQPEIVLENATHKLYFDRAIFTDRTIHYNRPDITLLDKHNKTAQIIDIAVPNTHNLQNTIAEKLSKYTDLKIEISRMWCLSNVTIVPIVVSTTGVIPKQLHQSLKTLDLPPYTYQNLQKAAILNTCRIVRKFLQNENESIVTTTHTQPPVTTHTLSSSHPITTFTG

SEQ ID NO: 31154 - protein, 808 aa, Ochropleura plecta
MITDHIEIATFHDVLTKIHNWKAPGSDYIHNYWYKKFTHIHPHIFNHINNFIKDPATIPTYIMEGKTFMLPKDPNDPANPAKYRPITCLQTIYKIMTSCISHIIYNHLETHKILTEEQKGCKKLSQGCKEQLTIDAVIHKHVQRNNNDLHTMYIDYKKAYDSVPHSWLLEVLKIYKIHPQLINCLGNIIEKWKTRLQLNTSTGIVQTELIKIQRGIFQGDSLSPLWFCLALNPLSNKLNSLLPGYQLQYNDTMTDILTDQQYCKVNHLLYMDDIKLYASSPDDLYELADVTEQFSNDIAMEFGIDKCKINSIRAGKTYTHSYQMQTGATIDSLDETGTYKYLGYIQAKQIMHKEIKTKLTKQFKHRLKTIFNTQINAKNTIKAINTYAIPILTYSFGIIKWNKTDLQNLQRIINTTLTKHRRHHPRSCVQRLTLPRNYGGRGIIDITNLHNKQITTLRTYFKNKSSISTLHKAIAFNDKKLTPLNMYDNTTQSNEQQTDRQTKIAEWTQKSLHGRHRHDLNLPNVDKLASNEWLRRGELFPETEGFMIAIQDQVIETRNYQKHIMKVHQTVDICRRCNSSSETIQHITGACKAIVQTDYKHRHDQIANIIHQKLAIKYNLISTPPVPYYKYQPETVLENATHKLYFDRGIFTDKTIHYNRPDITLLDKSKKTAQIIDIAVPNTHNLQNTIAEKLAKYTDLKMEISRMWHLNNVSIIPIVLSTTGIIPKQLHQSLKTLDLPPYTYQSLQKAAILNTCRIVRKFLQIQNETVTSTSRTRRPITAQSQLNGQSSSHNPIISSSHRITTLSG

SEQ ID NO: 31155 - protein, 1414 aa, Phlogophora meticulosa
MITRSKTKKDIQANMPSVDDETSTTSSSASPRSIFSSIASSPPSYLSRSSRSSSTSSPTSVDVVSEAILANKPSPTADIKNTRKKWSIEMNEFIWRTYLIITNLESDKNAYLTSLHQQFIEKFPNMKVSKQRIGDQRRAIVSKKLLPSITLDSIRLEVINNLQTPNNDLQLQPQTPQEILTFQTNTQPYSQSEPKRRMKWSNELNETLMKCYFRATKLETDMTIWRKNLKEKFIECYPHLSHLSEQRISDQKRVIVNNSMISETRLQILKSIVENELLETASFNWQSDSIRRTTENVHSQPPQNTLNIDIENIEMSQTQQIGVETEGDNLNAIELEHPVHSNTQTSQERNLQIDEIFSETLQYYRDTYPTERSYIPVQKSSKRLANIVSYINKVILPEQVTQDTEFNHLQTIIYCAAWTAAKANGSKISLSPPEYRNRLQQDRKPKWQKRLDHKIEVIRAKIGRLTHYMQGHRSKKLTKEVNTILRDYKTHTSHEEPNTHLTHFLDTLKQKLTVVKSRLDRYTKCTLRKTQNNQFRNNEKLFYRKLKASTTNHTTPSNNTNTVWPATDELQQFWAGIWENPVSHNTEAEWIKEEEAYQTNVEAMDFDQVDVETFHDVLQKIHNWKAPGSDHIHNYWYKKFTHIHPYLYNCINNFIKDPNIIPSYITEGKTYMLPKDPNDTANPAKYRPITCLQTIYKILTSCITQIIYKHLETQHILTEEQKGCRKFSQGCKEQLTIDAVILKHVQRTKKDLCSMYIDYRKAYDSVPHSWLLKVLSLYKIHSQLINFLGNILDKWQTRLHLNTSIGIVETEHIKIQRGIFQGDSLSPLWFCLALNPLSNKLNALKPGYQLQYIDTTTDILTDQQTCKLNHLLYMDDIKLYASSPDDLYELANATEQFSNDIAMEFGIDKCKINSIRAGKTYSHSYYMQTGDTIESLDENGTYKYLGYIQAKQILHKEIKATLTKQFKHRLKTICHSQINARNTIKAINTYAIPVLTYSFAIINWNKTELKHLQRVINTTLTKHRRHHPRSCVQRLTLPRNEGGRGIIDITNLHNKQITILRTYFYTKSPISTLHKAIAFNDKKLTPLNMFEKTTQSNEQQTDRQTKIAEWTKKSLHGRHRHDLNQPNVDKLASNEWLRRGELFPETEGFMIAIQDQVIETRNYQKHIMRVPQTIDRCRRCNSSSETIQHITGACKAIVQTDYKHRHDQLANIIHQKLAIKYKLIPTPPVAYYKYQPETVLENSTHKLYFDRAILTDKTTHYNRPDITLLDKINKTAQIIDIAVPNTHNLQNTIAEKLSKYIDLKIEISRMWRLSNVTIVPIVLSTTGVIPKQLHQSLKTLDLPPYTYQTLQKAAILNTCRIVRKFLQNDNDTSIVSSHTRAAANARTQSHELTQSPSQNPNTPSSHHNITNSQG

SEQ ID NO: 31156 - protein, 1161 aa, Xestia c-nigrum
MKWSNELNETLMKCYFRVTKMETDMTVWRKNLKEKFIEYYPHLANLSEQRISDQKRVIVNNSMISEERIQILKSIVENELVETGSFQRQADSSSSNSEVENVHLHTISNTNTINIEIENVEPSQTEPIGERSDGDNFINLGTDHHLNTQHTCLERNPDIDEIFSQTLQYYKDIHPTERNYIPKQKTSKRLANIVNYINKIILPEHVTSDTDFNTLQTVIYCAAWTAAKANGSKISLIPPEGTSRFHQVNKPKWQKRLEHKIEVIRAKIGRLTHYMQGHRSRKLTKAVETILKNYRTHTTHEQPNTQLEHFLDTLKQKLAVIKSRLKRYTKCTLRKTQNNQFRNNEKLFYRSLKKSTTNQTTSNNNTHTVFPTTNELHQFWAGIWENPVYHNAEAEWIKEEEVIHSNIESMSYDQVDIGTFHDVLKRIHNWKAPGSDYIHNYWYKKFTHTHPHLFNYINDFIKDPTTLPSYITEGKTYMLPKDPSDLSNPAKYRPITCLQTFYKIITSCITNIIYKHLETQKILTEEQKGCKKLSQGCKEQLTIDAVVHRQVQRTKKDLHTMYIDYRKAYDSVPHSWLLEVLKMYKIHPQLITFLSNIVEKWNTRLQLNTSTEIVETEPIKIQRGIFQGDSLSPLWFCLALNPLSNKLNALKPGYQLQYNETMTDVLTDQQCCKINHLLYMDDIKLYATSPEDLYELADVTEKFSNDIAMEFGIDKCKINSIKAGKSFTHSYQMQTGATIDSLDETGTYKYLGYIQAKQIMHKEVKTTLTKQFKHRLKTIFNTQINAKNTTKAINTYAIPILTYSFGIIKWNKTDLKNLQRIVNTTLTKHRRHHPRSCVQRLTLPRNEGGRGIIDITNLHNKQITTLRTYFDYKSSTSTLHKAIAYNDKKLTPLNMYDRTTQNNEQQTNRQTKIAEWTQKSLHGRHRHDLNLPNVDKLASNEWLRRGELFPETEGFMIAIQDQVIETRNYQKHIMRIPQTIDICRRCNSSSETIQHITGACKAVVQTDYKHRHDQIANIIHQKLAIKYNLISTPPVPYYKYQPEIILENATHKLYFDRGIFTDKTIHFNRPDITLLDKRNKTAQIIDIAVPNTHNLQKTIAEKLSKYTDLKIEISRMWCLSNVAIVPIVLSTTGVIPKQLHQSLKHLTYQHTLIKVFRKPQS

SEQ ID NO: 31157 - protein, 1395 aa, Dalla costala
MRLRSRNIVPQAGTSSGESRPEPAGSGSPTYSGEGAVLLPFVHSNDQDINDTGINTNLSSPISSTYSIFQSPNSSPHSFQNSSASRSSTVTPMPVDVVEEANAKKPSPATDKKSTRKKWSVEMNKFIWRTYLTITNLETDTNSYLTLLHQQFIDRFPEMNVSKQRVGDQRRVIVHKKLLPSTTLDAIRSEVSNSQQRQHTDIHSLQAFTHLTSQSKSRMRWSNELNETLIKCYFITTKLETDMTVWRRKLRNMFIELYPDLANLSEQRISDQKRVIINNKRISETRIQELKRSAENEINQTDYLQTEHLISQNAANAQTQSVTNNNIDIINIEQQPTAPHTRLENELNRLSSIDIEPLQHDRTSFEISQEPNQELEETFDQTLKFYTNTHHTNRIYIPKQKTSRKFANTVSYINNIILPKYIDTDTDFGTLQTIIYSAAWTAAKTNGSKLSLATAENVATHFQNNHKPKWQKRLECKVKDLRAKIGKLTHYIHGFRSIKLVKEINIILKNYRIHTIHEEPNTQLADYLDTLKQKLSLVSSRLNRYTKCTHRKTQNNQFTNNERQFYRTLKSSTTNQTPPTEQTGNENSLPPIDELQQFWAGIWENPVCHNPESDWIKKEVENQSNTDHMQFDHVPIDVFKDTIKNLHNWKAPGSDYIHNFWYKKFTHIHPYLYNHINSFIQNPTKIPSYIAEGITYMLPKDYTDTNNPAKYRPITCLQTVYKIISSCITYLIYEHIKKNEILTEEQKGCRKFSQGCKEQLIIDSVIHKHAQRNKKDLYTMYVDYKKAYDSVPHTWLLDVLNIYKIHPQIISFLSQVIKQWTTRLHLKTPLGIIQTEPIKIQRGIFQGDSLSPLWFCLAINPLSNKLNSLKPGYTLQLPDTRIDILTDQHKCKINHLLYMDDIKLYASTSDNLNELASATEQFSSDIRMEFGIEKCKINSVKAGQTYQHSYTLQTGETIDSLDENDTYKYLGYIQSKQIKHKEIKTKLTQQFKHRLRSIFNSELHARNTVKAINTFAIPVLTYSFGIISWTKTELTNLQRVINTSMTQHRKHHPKSCVQRLTLPRKEGGRGIVDITNLHNKQISTLRTYFNYRSTTSNLHKSIVYNDSKFTPLNMLDKTLQTNEKQTDTQTKIVEWTQKSLHGRHRHDLGQPNVDKLASNEWLSRGDLFPETEGFMIAIQDQVIATRNYRKHIMRIPQTTDTCRRCNSSSETIQHVTGACKALAQSDYKHRHDQLAKIIHQQIAMKYRLISPPTIPYYKYNPETVLENNTHKLYYDRAILTDKTTHYNRPDITLIDKIRKTAQIIDIAVPNTHNLQNTIAEKLSKYIDLKIEISRMWKLSEVTIIPVVLSTTGVIPTQLHQSLKSLELAPFIYRTLQKAAILNTCRIVRKFLQNDT

SEQ ID NO: 31158 - protein, 1444 aa, Amphipyra berbera
MPTLENRGPPVLFTLATVNAGLCCGRLCKSLATRGIIMITRSKKRKAIQTNMLSTDDETTQVSASSSPRSIFSSIASSPPSYILASSRSSSSSPLSVDVVSEATSARNPSPATVSTITRKKWSEEMNTFIWRTYLIITNLETDTSSYLTSLHQQFINRFPQMNVSKQRVGDQRRAIVYKKLLPTTTLDIIRLEVSNSLKTHNTVLHPQTQTLQSNMSQINTNSPSQPNRRMKWSTELNENLIKCYYICTKMETDMTVWRKKLKEMFIEIYPQLSHLSEQRISDQKRVVINNRMISETRLQALKTDVQNTLNQTNSYEQHQNSHVISDSIQTQPPFNNNIAQLHTQETELELRNEPNYLNRIDVEALTQHNSTNVETNQERNQELDEKFLQTLQYFTNTHPTQRNYIPKQKSSKKFAKIVSYINNIILPNYLNSDIDFDTLQTIIYSAAWTAAKANGSKLLHVSAENMVNTRQKDHKPKWQRRLEYKIKDLRAKIGRLTQYIYGNRSRKLTHEVNTILEHYKIHSTHEEPNTQLTHFLDTLKQKLTLLNSRLKRYTKCTHRKTQNNQFRNNERQFYRTLKNSTTNQTTPTNNVNNVNSILPPIDEIKQFWSQIWERPIGHNTEADWIKVETENYINIEQMEFEHIKRDTFLDVLKKLHNWKAPGSDYIHNFWYKNFTHTHPYLYNHINNFISNPTTMPCYISEGITYMLPKDSNDRTNPAKYRPITCLQTIYKIITSCISHVIYKHLDRNKILAEEQKGCKKFSQGCKEQLTIDSVILNQVQRKKADIYTMYIDYKKAYDSVPHTWLLEVLNIYKIHPQITTFLSNIIKLWSTRLHLTSPTGIVETETIKIQRGIFQGDSLSPLWFCLALNPLSNKLNSLRPGYQLQFNDTLNDILTDDQNCKINHLLYMDDIKLYASSPDDLYELANTTEHFSKDIGMEFGIDKCKINSIRAGKTYEHSHTIQTGETIDSLDENGTYKYLGYIQNKQLKHKEIKTILTQQFKHRLKFIFNTQLHSKNTVKAINTYAIPVLTYSFGIINWTKTELKNLQRVINTTLTKHRKHHPRSCVQRLTLPRKEGGRGIIDISNLHNKQITTLRKYFNSKSTTSSLHKAIVYNDQKLTPLNMFDKTTQNNEKQTTRQTKILEWTQKSLHGRHRKDLEQLNVDKLASNEWLCRGDLFPETEGFMVAIQDQVIETRNYQKYIMRVPHANDICRRCSSSSETIQHITGACKAIVQTDYKHRHDQIANIIHQRLAIKYDLITTPPTPYYKYNPEIVLENNTHKLYYDRAILTDKTTHYNRPDITLLDKINKTAQIIDIAVPNTHNLQSTIAEKLSKYTDLKIEISRMWRLSNATIIPIVISTTGVIPKQLHQSLRTLDLPPYLYTSLQKAAILNTCRIVRKFLQNDNETQMITPHSQASNTTRTQSLNQTNSSQSHIMSSHHITNQ

SEQ ID NO: 31159 - protein, 1406 aa, Ochropleura plecta
MLTRSKTKKSIQANMPSADDETSSVSLSSSPKSIFSSIASSPPSYLSRSSRSSSILSPMAADVVSEASLANNPSPTAVSTTTRKKWSKEMNEFIWRNYLIITNLETDTKAYLTSLHHQFTENFPNMKVSKQRIGDQRRAIVSKNLLPSTILDTIRLEVGNHLKTQNNDPALQSPPEFRSSQPESQAEPKRRMKWSNELNETLMKCYFRVTKMETDMTVWRKNLKENFIEFYPQLSHLSEQRISDQKRVIVNNNMISEARLQILKTTVENELFETESFQRQADNITSNTDAVNVHLHTNTETLNIDIRNIEPSQTDNVGIGIDDDNFNNVEQIIHLNTQQTDLVRNPEIDEIFSQTLQYYKDTLPTERSYIPKLKSSKKLANIVSYINKVILPEQVTSETNFNHLQTVIYCAAWTAAKANGSKIYLSSPVESSRLQQVYKPKWQKRLEKKKEALRAKIGRLTQYIQGHRSRKLIKAVETILKDYRTHTLHEQPNTQLEHFLDTLKQKLTVVKSRLNRYTKCTLRKTQNNQFRNNEKQFYRSLKQSTTNETTPNSNTHTAFPTTEELQQFWAGIWENAVCHNTEAEWIKAEQAFHINTETMITDHIEIATFHDVLTKIHNWKAPGSDYIHNYWYKKFTHIHPHIFNHINNFIKDPATIPTYIMEGKTFMLPKDPNDPANPAKYRPITCLQTIYKIMTSCISHIIYNHLETHKILTEEQKGCKKLSQGCKEQLTIDAVIHKHVQRNNNDLHTMYIDYKKAYDSVPHSWLLEVLKIYKIHPQLINCLGNIIEKWKTRLQLNTSTGIVQTELIKIQRGIFQGDSLSPLWFCLALNPLSNKLNSLLPGYQLQYNDTMTDILTDQQYCKVNHLLYMDDIKLYASSPDDLYELADVTEQFSNDIAMEFGIDKCKINSIRAGKTYTHSYQMQTGATIDSLDETGTYKYLGYIQAKQIMHKEIKTKLTKQFKHRLKTIFNTQINAKNTIKAINTYAIPILTYSFGIIKWNKTDLQNLQRIINTTLTKHRRHHPRSCVQRLTLPRNDGGRGIIDITNLHNKQITTLRTYFKNKSSISTLHKAIAFNDKKLTPLNMYDNTTQSNEQQTDRQTKIAEWTQKSLHGRHRHDLNLPNVDKLASNEWLRRGELFPETEGFMIAIQDQVIETRNYQKHIMKVHQTVDICRRCNSSSETIQHITGACKAIVQTDYKHRHDQIANIIHQKLAIKYNLISTPPVPYYKYQPETVLENATHKLYFDRGIFTDKTIHYNRPDITLLDKSKKTAQIIDIAVPNTHNLQNTIAEKLAKYTDLKMEISRMWHLNNVSIIPIVLSTTGIIPKQLHQSLKTLDLPPYTYQSLQKAAILNTCRIVRKFLQIQNETVTSTSRTRRPITAQSQLNGQSSSHNPIISSSHRITTLSG

SEQ ID NO: 31160 - protein, 1414 aa, Phlogophora meticulosa
MITRSKTKKDIQANMPSVDDETSTTSSSASPRSIFSSIASSPPSYLSRSSRSSSTSSPTSVDVVSEAILANKPSPTADIKNTRKKWSIEMNEFIWRTYLIITNLESDKNAYLTSLHQQFIEKFPNMKVSKQRIGDQRRAIVSKKLLPSITLDSIRLEVINNLQTPNNDLQVQPQTPQEILTFQTNTQPYSQSEPKRRMKWSNELNETLMKCYFRATKLETDMTIWRKNLKEKFIECYPHLSHLSEQRISDQKRVIVNNSMISETRLQILKSIVENELLETASFNWQSDSIRRTTENVHSQPPQNTLNIDIENIEMSQTQQIGVETEGDNLNAIELEHPVHSNTQTSQERNLQIDEIFSETLHYYRDTYPTERSYIPVQKSSKRLANIVSYINKVILPEQVTQDTEFNHLQTIIYCAAWTAAKANGSKISLSPPEYRNRLQQDRKPKWQKRLDHKIEVIRAKIGRLTHYMQGHRSKKLTKEVNTILRDYKTHTSHEEPNTHLTHFLDTLKQKLTVVKSRLDRYTKCTLRKTQNNQFRNNEKLFYRKLKASTTNHTTPSNNTNTVWPATDELQQFWAGIWENPVSHNTEAEWIKEEEAYQTNVEAMDFDQVDVETFHDVLQKIHNWKAPGSDHIHNYWYKKFTHIHPYLYNCINNFIKDPNIIPSYITEGKTYMLPKDPNDTANPAKYRPITCLQTIYKILTSCITHIIYKHLETQHILTEEQKGCRKFSQGCKEQLTIDAVILKHVQRTKKDLCSMYIDYMKAYDSVPHSWLLKVLSLYKIHSQLINFLGNILDKWQTRLHLNTSIGIVETEHIKIQRGIFQGDSLSPLWFCLALNPLSNKLNALKPGYQLQYIDTTTDILTDQQTCKLNHLLYMDDIKLYASSPDDLYELANATEQFSNDIAMEFGIDKCKINSIRAGKTYSHSYHMQTGDTIESLDENGTYKYLGYKQAKQILHKEIKATLTKQFKHRLKTICHSQINARNTIKAINTYAIPVLTYSFAIINWNKTELKHLQRVINTTLTKHRRHHPRSCVQRLTLPRNEGGRGIIDITNLHNKQITILRTYFYTKSPISTLHKAIAFNDKKLTPLNMFEKTTQSNEQQTDRQTKIAEWTKKSLHGRHRHDLNQPNVDKLASNEWLRRGELFPETEGFMIAIQDQVIETRNYQKHIMRVPQTIDRCRRCNSSSETIQHITGACKAIVQTDYKHRHDQLANIIHQKLAIKYKLIPTPPVAYYKYQPETVLENSTHKLYFDRAILTDKTTHYNRPDITLLDKINKTAQIIDIAVPNTHNLQNTIAEKLSKYIDLKIEISRMWRLSNVTIVPIVLSTTGVIPKQLHQSLKTLDLPPYTYQTLQKAAILNTCRIVRKFLQNDNDTSIVSSHTRAAANARTQSHELTQSPSQNPNTPSSHHNITNSQG

SEQ ID NO: 31161 - protein, 742 aa, Xestia xanthographa
MIFDQVEVATFHDVLTKIHNWKAPGSDYIHNYWYKKFTHTHPHIFNHINNFIKDPATIPTYITEGKTYMLPKDHSDSANPAKYRPITCLQTIYKIMTSCISHIIYKHLETQKILSEEQKGCKKLSQGCKEQLTIDAVIHRHVQRTKKDLHTMYIDYRKAYDSVPHSWLLEVLKIYKIHPQLIKFLGTIVEQWKTRLQLNTSTGTVETELIKIQRGIFQGDSVSPLWFCLALNPLSNKLNALIPGYQLQFSDTMTDILTDQQYCKVNHLLYMDDIKLYASSPDDLYELADVTEQFSKDIAMEFGIDKCKINSISAGKTYTHSYQMQTGATIDSLDETGTYKYLGYIQAKQTQHKGIKTTLTKQFKHRLKTIFNTQINAKNTIKAINTYAIPILTYSFGIIKWNKTDLKNLQRIINTTLTKHRRHHPRSCVQRLTLPRNEGGRGIIDITNLHNKQITTLRTYFDNKSSTSTLHKAIAYNDKKLTPLNMYDRTTQSNEQQTDRQTKIAEWTQKSLHGRHRHDLNLPNVDKLASNEWLKRGELFPETEGFMIAIQDQVIETRNYQKHIMRVPQTVDICRRCNSSSETIQHITGACKAIVQTDYKHRHDQIANIIHQKLAIKYNFISTPPVPYYKYQPETVLENATHKLYFDRGIFTDKTIHYNRPDITLLDKRNKTAQIIDIAVPNTHNLQNTIAEKLSKYIDLKIEISRMWCLSNVAIVPIVVSTTGVIPKQVTLVVTPSVFKNS

SEQ ID NO: 31162 - protein, 1444 aa, Amphipyra berbera
MPTLENRGPPVLFTLATVNAGLCCGRLCKSLATRGIIMITRSKKRKAIQTNMLSTDDETTQVSASSSPRSIFSSIASSPPSYILASSRSSSSSPLSVDVVSEATSARNPSPATVSTITRKKWSEEMNTFIWRTYLIITNLETDTSSYLTSLHQQFINRFPQMNVSKQRVGDQRRAIVYKKLLPTTTLDIIRLEVSNSLKTHNTVLHPQTQTLQSNMSQINTNSPSQPNRRMKWSTELNENLIKCYYICTKMETDMTVWRKKLKEMFIEIYPQLSHLSEQRISDQKRVVINNRMISETRLQALKTDVQNTLNQTNSYEQHQSSHVISDSIQTQPPFNNNIAQLHTQETELELRNEPNYLNRIDVEALTQHNSTNVETNQERNQELDETFLQTLQYFTNTHPTQRNYIPKQKSSKKFAKIVSYINNIILPNYLNSDIDFDTLQTIIYSAAWTAAKANGSKLLHVSAENMVNTRQKDHKPKWQRRLEYKIKDLRAKIGRLTQYIYGNRSRKLTHEVNTILEHYKIHSTHEEPNTQLTHFLDTLKQKLTLVNSRLKRYTKCTHRKTQNNQFRNNERQFYRTLKNSTTNQTTPTNNVNNVNSILPPIDEIKQFWSQIWERPIGHNTEADWIKVETENYINIEQMEFEHIKRDTFLDVLKKLHNWKAPGSDYIHNFWYKNFTHTHPYLYNHINNFISNPTTMPCYISEGITYMLPKDSNDRTNPAKYRPITCLQTIYKIITSCISHVIYKHLDRNKILAEEQKGCKKFSQGCKEQLTIDSVILNQVQRKKADIYTMYIDYKKAYDSVPHTWLLEVLNIYKIHPQITTFLSNIIKLWSTRLHLTSPTGIVETETIKIQRGIFQGDSLSPLWFCLALNPLSNKLNSLRPGYQLQFNDTLNDILTDDQNCKINHLLYMDDIKLYASSPDDLYELANTTEHFSKDIGMEFGIDKCKINSIRAGKTYEHSHTIQTGETIDSLDENGTYKYLGYIQNKQLKHKEIKTILTQQFKHRLKSIFNTQLHSKNTVKAINTYAIPVLTYSFGIINWTKTELKNLQRVINTTLTKHRKHHPRSCVQRLTLPRKEGGRGIIDISNLHNKQITTLRKYFNSKSTTSSLHKAIVYNDQKLTPLNMFDKTTQNNEKQTTRQTKILEWTQKSLHGRHRKDLEQLNVDKLASNEWLCRGDLFPETEGFMVAIQDQVIETRNYQKYIMRVPHANDICRRCSSSSETIQHITRACKAIVQTDYKHRHDQIANIIHQRLAIKYDLITTPPTPYYKYNPEIVLENNTHKLYYDRAILTDKTTHYNRPDITLLDKINKTAQIIDIAVPNTHNLQSTIAEKLSKYTDLKIEISRMWRLSNATIIPIVISTTGVIPKQLHQSLRTLDLPPYLYTSLQKAAILNTCRIVRKFLQNDNETQMITPHSQASNTTRTQSLNQTNSSQSHIMSSHHITNQ

SEQ ID NO: 31163 - protein, 1417 aa, Agrochola circellaris
MITRSKTKKSIQANMPSVDDETSPDSSSASPRSIFSSIASSPPSYLSHSSHSSRSSSTSSPTSVDVVSEANLANKPAPTAVLKNTRKKWSKEMNEFIWRTYLIVTNLESDINAYLSSLHQQFIEKFPNMKVSKQRIGDQRRAIVSKKLLPSTALDSIRLEVRNSLQTPNNDLQLQLQTPQELLSFQTNTQPHSQSEPKRRMKWSNELNETLMKCYFRATKMETDMTVWRKNLKEKFIECYPHLSHLSEQRISDQKRVIINNSMISEPRLQILKTIVEKELLETGSFHWQSDSIRSNTENLHSQPPTNTLNFNKENIETSQGTQIGQETVVDNLNDIGSEHPVHLNTQTTHERNLEIDEIFFETLHYYRDTNPTERSYIPMQKSSKRLAKIVSYINRVILPEQVTRDTEFNHLQTVIYCAAWTAAKANGSKISLSPPEHRSRLQQGRKPKWQKRLEHKIEVIRAKIGRLTHYMQGHRSRKLIKEVNIILRDYKTHTSHEEPNTHLTHFLDTLKQKLTVVKSRLDRYTKCTLRKTQNNQFRNNEKLFYRKLKASTTNHTTPSNNTHTTWPATDELQQFWAGIWENPVCHNNEAQWVKEEEAYQENVEAMNFDQVEVETFHDVLKKIHNWKAPGSDHIHNYWYKKFTHVHPHLYNYINDFIKNPTIIPSYITEGKTYMLPKDPNDTSNPAKYRPITCLQTLYKILTSCITHLIYKHLETQQILTEEQKGCRKFSQGCKEQLTIDAVILKHVQRTKNDLYSMYIDYKKAYDSVPHSWLLKVLNLYKIHPQLINFLGNVIDRWQTRLHLNTSTGIVETEHIKIQRGIFQGDSLSPLWFCLALNPLSNKLNALKTGYQLQYSDTMTDILTDQQSCKINHLLYMDDIKLYASSPEDLNELADATEQFSNDIAMEFGIDKCKINSIRAGKTYSHSYHMQTGDTIESLDENDTYKYLGYIQAKQILHKEIKATLTKQFKHRLKTICHTQINARNTIKAINTYAIPILTYSFGIINWNKTELKHLQRIINTTLTKHRRHHPRSCVQRLTLPRNEGGRGIIDITNLHNKQITILRTYFNAKSTTSTLHKAITFNDKKLTPLNMFEKIAQSNEQQTDRQTKIAEWTQKSLHGRHRHDLNQPNVDKLASNEWLRRGELFPETEGFMIAIQDQVIETRNYQKHIMRVPQTIDRCRRCNSSTETIQHITGACKAIVQTDYKHRHDQIANIIHQKLAIKYKLIPTPPVAYYKYQPETVLENSTHKLYFDRAILTDKTTHYNRPDITLLDKNNKTAQIIDIAVPNTHNLQNTIAEKLSKYIDLKIEISRMWRLSNVTIVPIVLSTTGVIPKQLHQSLKTLDLPPYTYQTLQKASILNTCRIVRKFLQNDNHTSTVTSHTSAATTAQTQSPGQTHSPSQNPNTPTSHHNLTNFQG

SEQ ID NO: 31164 - protein, 937 aa, Agrochola circellaris
MQGNRGWRLVREVHTILENYRIHSTHEEPNTQLTHFLDTLKQKLTLVNSRLNRYNNCTLRKIQNNKFRNKEKQFYRTLKNSTTNQTAPSNNENNTNHSLPPVQELQQFWSGIWERPICHNNEAEWVKTETGNHLHTEQMEFEQIPIDTFHDVLQKLHNWKAPGSDYIHNFWYKKFTHIHPFLYNYINTFIKNPTTMPTYIAEGITYMVPKDSNDSANPAKYRPITCLQTIYKIITSCITQIISKHLESNSILSEEQKGCRKFSQGCKEQLTIDAVILKQVQRNKKDLYTMYIDYKKAYDSIPHTWLLEILNIYKINPQIIAFLNNTITQWTTRLHLTTSTGFVETEPIKIQRGIFQGDSLSPLWFCLALNPLSNKLNSLMPGYNLNYNDTIDGIRTDRHNCKINHLLYMDDIKLYASSPEDLNELANATDKFSSDIGMEFGIDKCKINSVRAGQTYEQSYITQSGETIDSLDENGTYKYLGYIQAKQIKHKTIKNKLTQQFKHRLKSILNTQLYSKNTIKAINTYAIPVLTYSFGIISWTKTELKSLQRVINTNLTKYRKHHPRSCVQRLTLPRKEGGRGIIDITNLHNKQISTLRKYFNTKSTTSTLHKAIVYNDRKLTPLNMSDKTTQINEKQTDRQTKISEWTQKSLHGRHRHDLCQPNVDKVASNEWLRRGDLFPETEGFMTAIQDQVIVTRNYQKHIMRVPLSTDICRRCHSSSETIQHITGACKAIVQTDYKHRHDQIANIIHQKLAIKYKLITTPPVPYYKYTPETVLENTTHKLYFDRAILTDRTTHYNRPDITLLDKINKTAQIIDIAVPNTHNLQNTIAEKLSKYTDLKIEISRMWRLGSVTIIPVVLSTTGVIPKQLHQSLKTLDVAPSTYQTLQKAAILNTCRIVRKFMQNDNDAQISHAQTSLTTATQNQNIIAPRHILSPIIT

SEQ ID NO: 31165 - protein, 1412 aa, Hydraecia micacea
MITRSKTKKLIQANTPSADDEISTASSSSSPRSIFSSVVSSPPSYLSRPSRSSSSSSPISVDVVLEATTAMNPSPATVKSNTRKKWSEEMNQFIWRTYLIITNLDTETNSYLTSLHQQFINRFPQMNVSKQRVGDQRRAIVHKKLLSATTLEKIRLEASRELQTDTTNLDTHIRTPSQLNTDQSNTHLQSEPKSRMRWSNEMNETLIKCYYIATKMETDMTIWRKKLREMFIEFYPQLSHLSEQRISDQKRVILNNRMISDARLKDLKTYAENTLNQTNPYRQPEYHYSHIAAENTPTQTFISNNIETAYVSLQSHTQEAEVENESNFLNSIDFEALTNNIINTEHNISNIEISQERSQEIEETFSNTLQHFTNIHPTKRNYIPKQKPSKKLAQIVSCINNVILPKYANADTDFETLQTVIYSAAWTAAKTNGSKLSHFTSDNPANINLPQIKKPKWQRRLELRVKDLRTKIGRLTAYMQGNRGWKLVREVHIILDKYKIHSTHEEPNTQLTHFLDTLKQKLTLVNSRLNRYNKCTLRKTQNNKFRNNEKQFYRTLKQSTTNQTVPSESENNTNHSLPPIDELRQFWSKIWERPICHNTEADWIKVETENHRHTEQMEFEHVPIETFHDVLQKLHNWKAPGSDNIHNFWYKKFTHIHPYLYNYINTFIKNPIMMPSYIAEGITYMIPKDSSDSTNPAKYRPITCLQTIYKIITSCITHIIYQHLETNTVLSEEQKGCRKFSQGCKEQLTIDSVILKQVQRKKRDLYTMYIDYKKAYDSVPHTWLLEVLKIYKINPLIVTFLNNTMTQWSTRLHLKSPSGIVETEPIKIQRGIFQGDSLSPLWFCLALNPLSNKLNTLKPGYNLPFIDTTDDLQTDRQNCKINHLLYMDDIKLYASTQVDLNKLVETTDQFSSDIRMEFGIDKCKINSVRAGQTYEHSYTIQTGEIIDSLNENETYKYLGYIQAQQIKHKEIKNKLTQQFKHRLKSIFNTQLHSRHTVKAINTFAIPVLTYSFGILSWTKTELKNLQRLINTTLTKNRKHHPRSCVQRLTLPRKEGGRGIIDITNLHNKQISTLRTYFNTKSTTSTLHKAIVHNDKKLTPLNMFDKTSQSNEKQTDRQTKILEWTQKSLHGRHRQDLCQPNVDKLASNEWLRRGDLFPETEGFMTAIQDQVIETRNYQKHIMRIPISTDICRRCHSSSETIQHITGACRAIVQTDYKHRHDQIANIIHQKLAIKYKLITTPPVPYYKYNPEIVLENTTHKLYFDRAILTDRTTHYNRPDITLLDKINKTAQIIDIAVPNTHNLQNTIAEKLSKYTDLKIEISRMWRLGSVAIIPVVVSTTGVIPKQLHQSLKTLDLSPSTYQTLQKAAILNTCRIVRKFLQNDNDAQISHPQTSPTTQSINISSHHNILSSIA

SEQ ID NO: 31166 - protein, 1414 aa, Xestia xanthographa
MLTRSKTKKNIQANMPAADDETSPVSSSSSPKSIFSSIASSPPSYLSRSSRSSSILSPMTVEVVSEANLANNPSPTAVTTTRKKWSKEMNEFIWRNYLIITNLESDTKAYLTSLHHQFIEKFPNMKVSKQRIGDQRRAIVSKKLLPSTTLDTIKLEVSNHLRTHNNDLELHFPPEIPSSQTDSQPHSQSEPKRRMKWSKELNETLMKCYFRVTKMETDMTVWRKNLKEKFIEGCPHLSHLSERRISDQKRVIVNNSMISESRLQILKSFVENELCETESFQRQVDNIMSNIDVGNIHIDTNTETLNIDIENIGPSETENIGVGIDDGNTNNLGQEHPIHLNTQHTSPIRNPEIDEIFSQTLQYYKDTHPTERSYIPKQKSSKKLANIVSYINKVILPEQVTSDTDFNHLQTVIYCAAWTAAKANGSKITLAPPVDSSSRPHQAHKPKWQKRLENKIESIRAKIGRLTQYIQGVRSRKLIKAVEIILKDYRIHTLHEQPNTQLEHFLDTLKQKLTVVKSRLNRYTKCTLRKTQNNQFRNNEKQFYRSLRNSTTNETASNNSTHTAIPTTEELQQFWAGIWENPVCHNTEAEWIKAEQVIHTNTEAMIFDQVEVATFQDVLTKIHNWKAPGSDYIHNYWYKKFTHTHPHIFNHINNFIKDPATIPTYITEGKTYMLPKDHSDSANPAKYRPITCLQTIYKIMTSCISHIIYKHLETQKILSEEQKGCKKLSQGCKEQLTIDAVIHRHVQRTKKDLHTMYIDYRKAYDSVPHSWLLEVLKIYKIHPQLIKFLGTIVEQWKTRLQLNTSTGTVETELIKIQRGIFQGDSLSPLWFCLALNPLSNKLNALIPGYQLQFSDTMTDILTDQQYCKVNHLLYMDDIKLYASSPDDLYELADVTEQFSKDIAMEFGIDKCKINSISAGKTYTHSYQMQTGATIDSLDETGTYKYLGYIQAKQIQHKEIKNTLTKQFKHRLKTIFNTQINAKNTIKAINTYAIPILTYSFGIIKWNKTDLKNLQRIINTTLTKHRRHHPRSCVQRLTLPRNDGGRGIIDITNLHNKQITTLRTYFDNKSSTSTLHKAIAYNDKKLTPLNMYDRTTQSNEQQTDRQTKIAEWTQKSLHGRHRHDLNLPNVDKLASNEWLKRGELFPETEGFMIAIQDQVVETRNYQKHIMRVPQTVDICRRCNSSSETIQHITGACKAIVQTDYKHRHDQIANIIHQKLAIKYNFISTPPVPYYKYQPETVLENATHKLYFDRGIFTDKTIHYNRPDITLLDKRNKTAQIIDIAVPNTHNLQNTIAEKLSKYIDLKIEISRMWCLSNIAIVPIVVSTTGVIPKQLHQSLRTLDLPPYTYQSLQKAAILNTCRIVRKFLQNENKSVVTTTNTEPRVTAHTQFTRHRHSSSQNSVISSSHHNTTFPG

SEQ ID NO: 31167 - protein, 799 aa, Apamea monoglypha
MEFDQVPIETFHDVLQKLHNWKAPGSDYIHNFWYKKLTYTHPYLYNYINTFITNPTTMPTYIAEGITYMIPKDSNDSANPAKYRPITCLQTIYKIITSCITQIIYKHLESNSILSEEQKGCRKFSQGCKEQLTIDSVILKQVQRKKKDLYTMYIDYKKAYDSVPHTWLIEILHIYKINPQTITFLNNTITQWTTRLHLTTSTGIVESESIKIQRGIFQGDSLSPLWFCLALNPLSNKLNSLMPGYKLNYNDTIDDIRTDRHDCKINHLLYMDDIKLYAASPEDLNELANATDKFSNDIGMDFGIDKCKINSVRTGQTYEHSYTTQSGETIDSLDENGTYKYLGYIQAKQIKHKIIKNKLTQQFKHRLKSILNTQLHSKNTIKAINTYAIPVLTYSFGIISWTKTELKNLQRVINTSLTKYRKHHPRSCVQRLTLPRKEGGRGIIDITNLHNKQISILRKYFNTKSTISTLHKAIVYNDRKLTPLNMSDKTTQMNEKQTDRQTKISEWTQKSLHGRHRHDLCQPNVDKLASNEWLRRGDLFPETEGFMTAIQDQIIETRNYQKHIMRIPISTDICRRCHSSSETIQHITGACKAIVQTDYKHRHDQIANIIHQKLAIKFKLITTPPVPYYKYTPETVLENTTHKLYFDRAILTDKTTHYNRPDVTLLDKINKTAQIIDIAVPNTHNLQNTIAEKLSKYIDLKIEISRMWRLGSVAIIPVVLSTTGVIPKQLHQSLKMLDVAPSTYQTLQKADILNTCRIVRKFLQNDNDAQIAHPQTSFTTATQSEHIISPRHISSSIIT

SEQ ID NO: 31168 - protein, 1374 aa, Spodoptera frugiperda
MITRSKVKNTMQANVPPADDEASAESLSSSPRSIFSSLTPSPLSFTTRSLRSSISSTLSTDVVSEATVANNPLPAVGTKSTRKKWSSEMNEFIWRTYLIITNLETETNAYLSTLHSKFIQQFPEMAVSRQRVGDQRRAIVNNKLLSDTTLDAIRLEARNYLRNQNNTTQQIHNQTQPELITTQINPTHTQSNTRMKWSNELNETLIKCYFIVTKMETDMTVWRKNLRDKFIQHYPHLSHLSEQRISDQKRVIINNRMISEMRLQSIKLAAQQELDEIGSVTFERLNSPNPHLNTSIRLELQTNINTINREHMTSELQNTNITQEQNDNRQQLAVTNTHTNSERNLEIDELFSQALQHYTETHPTNRCYIPKQKTSKKLAEIVDYINKVILPDYVISDIEFSQLQTILYVAAWTAAKANGSRVTLASAQERNNPQRDYKPKWQKRLERKIDVIRAKIGRLTYYIQGHRSRKLKKEVNRILRDYRIHTTHEEPNTHLAHYLDTLKQKLAVFKSRLNRYTKCTLRKTQNNQFRNNEKQFYRTLKKTTANYTIPSNTTTNTPFPSEDNLRHFWAGIWQNPVSHNAEAEWIKAEETKYDNIPQMQFDQVDIETFHDVLSRVHNWKAPGSDHIHNYWYKKFTTIHPHLFNHINTFIRDPNKIPSYITEGITYMLPKDPNDTANPAKYRPITCLQTIYKIMTACITHIIYKHIDTQNILTEEQKGCRKFSQGCKEQLIIDSVILKDVEKHKKDLYTMYIDYKKAYDSVPHSWLLHILRIYKIHPHIAHFLETIISKWQTRLHLNTPTGTIATEFIKIQRGIFQGDSLSPLWFCLAINPLSNTLNSLQSGLQLQYRDTINSLESNQQHCKINHLLYMDDIKLYASSPEDLYQLADTTEIFSSDIAMEFGIDKCKINSVKAGKIYTHSYQLQTGDTIHSLDESGTYKYLGYIQGKQILHKEIKTELTKQFKHRIKVICNTELNARNTIKAINTYAIPILTYSFGIINWSKTELLTLQRNINTTLTKHRRHHPRSCTQRLTLSRNDGGRGIIDVTNLHNKQITTLRSYFYSKSTTSILHHAIAQNDKKLTPLNMSDRETQNNEKQVDRQTKIAEWAQKSLHGRHYHDLNQPNVDKSASNDWLRRGELFPETEGFMLAIQDQVIETRNYQKHIMHTPIPTDICRRCNSASETIQHITGACKAIVQTDYKHRHDQIANIIHQKLAAKYNLISTPTVPYYKYQPETVLENSSHKLYFDRAILTDKTIHYNRPDITLIDKINKTAQIIDIAVPNTHNLQNTIAEKLSKYTDLKNEITRMWRLNSVTIIPIVLSTTGVIPRQLHQSIQSLALPSYIYHSLQKAAILNTCRIVRKFLNDTDHDMYTQSQN

SEQ ID NO: 31169 - protein, 1061 aa, Spodoptera frugiperda
MTLESAEFSILQETNDNNIIEPQPTHTTENDERNPEIDQQFLEALQYFTDVHPTNRCYLPKQKTSKKLAQIVDYINKVILPEHVSTYTDFNQLQTIIYSAAWTAAKANGSRVTLSYAQDQINLRKDYKPKWQKRLERKLDTIRAKIGRLTYYMQGHRSRKLEKEVNRILTDYRTHTIHEEPNTQLTHFLDTLKQKLVVIKSRLCRYTKCTLRKTQNNQFKTNEKQFYRTLKNLTTNNTLSNNTTHTTFPTQESLRQFWAGIWENSVCHNNEAEWIKAEITEHNNIQQMPFEQIDIQTFHNALNKAHNWKAPGSDHIHNYWYKKFTTIHPHLYNHINDFIKDPINMPSYISEGITYMLPKDPNDTVNPAKYRPITCLQTIYKIMTSCLTQIIYKHIDSQKILTEEQKGCRKFSQGCKEQLIIDSVILKDVQRHKKDLYTMYIDYKKAYDSVPHSWLLQILNIYKIHPHIIYFLENIIRTWQTRLYLNTPTGTIATESIKIQRGIFQGDSLSPLWFCLALNPLSNKLRSLESGIQFQYRESMSTVQTNNENCKINHLLYMDDIKLYATTPEDLDLLADTTERFSTDIKMDFGIDKCKINSVKAGKTYTHSYQLQSGENIESLDENGTYKYLGYIQSKQILHKQIKSQLTKQFKHRLKVICNTQLNSRNTIKAINTYAIPSLTYSFGIINWSKTELQNLQRNINTTLTKHRRHHPRSCVQRLTLPRNDGGRGIIDITNLHNKQITTLRTYFFNRSTVSNLHRAIVQSDKKLTPLNMADQATQNNEKQTDRQTKISEWIQKSLHGRHYHDLSQPNVDKVASNEWLRRGELFPETEGFMIAIQDQVIETRNYQKHIMRIPIATDTCRRCNSAPETIQHITGACKSIVQTDYKHRHDQVANIIHQKIALKYNLISTPPVPYYKYQPETVLENSSHKLYFDRAILTDKTTHYNRPDITLIDKTNKTAQIIDIAIPNTHNLQNTIAEKLSKYTDLKIEITRMWRLNSVTIVPIVLSTTGVIPKQLHQSIKTLDLPSYTYQNLQKAAILNTCHIVRKFLSETDNVSFTRT

SEQ ID NO: 31170 - protein, 1444 aa, Amphipyra berbera
MPTLENRGPPVLFTLATVNAGLCCGRLCKSLATRGIIMITRSKKRKAIQTNMLSTDDETTQVSASSSPRSIFSSIASSPPSYILASSRSSSSSPLSVDVVSEVTSARNPSPATVSTITRKKWSEEMNTFIWRTYLIITNLETDTSSYLTSLHQQFINRFPQMNVSKQRVGDQRRAIVYKKLLPTTTLDIIRLEVSNSLKTHNTVLHPQTQTLQSNMSQINTNSPSQPNRRMKWSTELNENLIKCYYICTKMETDMTVWRKKLKEMFIEIYPQLSHLSEQRISDQKRVVINNRMISETRLQELKTDVQNTLNQTNSYEQHQNSHVISDSIQTQPPFNNNIAQLHTQETELELRNEPNYLNRIDVEALTQHNSTNMETNQERNQELEETFLQTLQYFTNTHPTQRNYIPKQKSSKKFAKIVSYINNIILPNYLNSDIDFDTLQTTIYSAAWTAAKANGSKLLHVSAENMVNTRQKNHKPKWQRRLEYKIKDLRAKIGRLTQYIYGNRSRKLTQEVNTILEHYKIHSTHEEPNTQLTHFLDTLKQKLTLVNSRLKRYTKCTHRKTQNNQFRNNERQFYRTLKNSTTNQTTPTNNVNNVNSILPPIDEIKQFWSQIWERPIGHNTEADWIKVETENYINIEQMEFEHIKRDTFLDVLKKLHNWKAPGSDYIHNFWYKNFTHTHPYLYNHINNFISNPTTMPCYISEGITYMLPKDSNDCTNPAKYRPITCLQTIYKIITSCISHVIYKHLDRNKILAEEQKGCKKFSQGCKEQLTIDSVILNQVQRKKADIYTMYIDYKKAYDSVPHTWLLEVLNIYKIHPQITTFLSNIIKLWSTRLHLTSPTGIVETETIKIQRGIFQGDSLSPLWFCLALNPLSNKLNSLRPGYQLQFNDTLNDILTDDQNCKINHLLYMDDIKLYASSPDDLYELANTTEHFSKDIGMEFGIDKCKINSIRAGKTYEHSHTIQTGETIDSLDENGTYKYLGYIQNKQLKHKEIKTTLTQQFKHRLKSIFNTQLHSKNTVKAINTYAIPVLTYSFGIINWTKTELKNLQRVINTTLTKHRKHHPRSCVQRLTLPRKEGGRGIIDISNLHNKQITTLRKYFNSKSTTSSLHKAIVHNDQKLTPLNMFDKTTQNNEQQTTRQTKILEWTQKSLHGRHRKDLEQLNVDKLASNEWLCRGDLFPETEGFMVAIQDQVIETRNYQKYIMRVPHANDICRRCSSSSETIQHITGACKAIVQTDYKHRHDQIANIIHQRLAIKYDLITTPPTPYYKYIPEIVLENNTHKLYYDRAILTDKTTHYNRPDITLLDKTNKTAQIIDIAVPNTHNLQSTIAEKLSKYTDLKIEISRMWRLSNATIIPIVISTTGVIPKQLHQSLRTLDLPPYLYTSLQKAAILNTCRIVRKFLQNDNETQMITPHSQASNTTRTQSLNQTNSSQSHIMSSHHITNQ

SEQ ID NO: 31171 - protein, 1416 aa, Acronicta aceris
MSLATRGTNMITRSKTRKAIQANAATMDVEPSQSSRSSSPRSIFSSIASSPPSYLLSSSRSSSLSPRTVDVVMEATSARNPLPATVSTITRKKWSEEMNRFIWRTYLIITNLETDTNSYLTSLHQQFIDKFPQMNVSKQRVGDQRRAIVQKKLLPRTTLETIRLEVSNSLQIYNSDLHPHNNTSQQFIASHTGPTQQSQLKTRMKWSKEHNETLIKCYFIITKMETDMTVWRKKLKEKFVEFYPQLLHLSEQRISDQKRVIINNRMISEARLTELKLYAEGVLNQTDSYMESIGHISQSTTEDVQEILLTNNNTQLTNIEQSHTHETELENDPNYLNSIDIEALTNSTANTYHTDTNIEIRDQANPELEEIFANTLLHFTDTNPTKRNYIPKQKSSKKLAKIVTYIDNCILPKYVSNETDFKTLQTIIYSAAWTAAKANGSKLSYKTPENLANIHQRINKPKWQRRLEYKIKDLRAKIGRLTHYIHGNRSRKLDREVHKILEHYKIHSTHEEPNTQLTHFLDTLKQKLTLLSSRLNRYTKCTLRKSQNNQFNKNEKQFYRSIKKSTTNRTMASNSENNTTDTLPPTSEIHKFWSNIWERPMLHNTEAEWIRTETENLVNTEQMDFEHIPIDTFHDVLKKLHNWKAPGSDYIHNFWFKKFTHIHPYLFNYINEFIKNPNTMPAYLTEGITYMLPKDFNDTNNPAKYRPITCLQTIYKIITSCITHIIYKHLDTNSILTEEQKGCRKYSQGCKEQLTIDAVILKQVQQKKKDLYTMYIDYKKAYDSVPHTWLIEVLNIYKIHPQIIAFLNNVIKQWTTRLYLPTPTGEAETEPIKIQRGIFQGDSLSPLWFCLALNPLSHKLKSVAPGYLLQYNDMSSDRLSDKQDCKINHLLYMDDIKLYASSPDDLYQLANITEQFSNDIGMEFGIDKCKINSVKGGQTFEHTHTIQTGETIESLDEHGTYKYLGYIQAKQIKHKQIKNQLTQQFKHRLKSIFNTQLYARNTIKAINTFAIPVLTYSFGIINWTKTELRKLQRITNTTLTKHRKHHPRSCVQRLTLPRKEGGRGIIDITNLHNKQISTLRTYFNYKSTTSNLHKAIVFNDRKLTPLNMSDKNKQSNETQTDGPTKILQWTQKSLHGRHRQDLCQPNVDKLASNEWLRRGDLFPETEGFMTAIQDQVIETRNYQKHIMRIPQIHDICRRCNSSPETIQHITGACKSIVQTDYKHKHDQIAKIIHQKLALKYNLISTPPVPYYKYNPEIILENNNHKLYYDRAILTDRTTHYNRPDITLLDKINKTAQIIDIAIPNTHNLQSTIAEKLTKYTDLKIEISRMWRLSHVSIIPIVLSTTGVIPKQLHQSLKSLDLAPYTYQSLQKAAILNTCRIVRKFLQNDNETLIPTSHPQVTTTINTRTQSRNHTQT

SEQ ID NO: 31172 - protein, 1416 aa, Acronicta aceris
MSLATRGTNMITRSKTRKAIQANAATMDVEPSQSSRSSSPRSIFSSIASSPPSYLLSSSRSSSLSPRTVDVAMEATSARNPLPATVSTITRKKWSEEMNRFIWRTYLIITNLETDTNSYLTSLHQQFIDKFPQMNVSKQRVGDQRRAIVQKKLLPRTTLETIRLEVSDRLQIYNSDLHSHNSTSQQFIASHTGPTQQSQLKTRMKWSKEHNETLIKCYFIITKMETDMTVWRKKLKEKFVEFYPQLLHLSEQRISDQKRVIINNRMISEARLTELKLYAESVLNQTDSYMESIDHISQSTTEDVQEILLTNNNTQLTNIEQSHTHETELENNPNYLNSIDIEALTNSTANTYHTDTNIEIRDQANPELEEIFANTLLHFTDTNPTKRNYIPKQKSSKKLGKIVTYIDNCILPKYVSNMTDFKTLQTIIYSAAWTAAKANGSKLSYKTPENVANIHQRINKPKWQRRLEYKIKDLRAKIGRLTHYIHGNRSRKLDREIHKILEHYKIHSTHEEPNTQLTHFLDTLKQKLTLLSSRLNRYTKCTLRKSQNNQFNKNEKQFYRSIKKSTTNRTMPSNSENNTTNTLPPTGEIHKFWSNIWERPMLHNTEAEWIRTETENLVNTEQMDFEHIPIDTFHDVLKKLHNWKAPGSDYIHNFWFKKFTHIHPYLFNYINEFIKNPNTMPAYLTEGITYMLPKDFNDTNNPAKYRPITCLQTIYKIITSCITHIIYKHLDTNSILTEEQKGCRKYSQGCKEQLTIDAVILKQVQQKKKDLYTMYIDYKKAYDSVPHTWLIEVLNIYKIHPQIIAFLNNVIKQWTTRLYLPSPTGEAETEPIKIQRGIFQGDSLSPLWFCLALNPLSHKLKSVAPGYLLQYNDMSSDRLSDKQDCKINHLLYMDDIKLYASSPDDLYQLANITEQFSNDIGMEFGIDKCKINSVKGGQTFEHTHTIQTGETIESLDEHGTYKYLGYIQAKQIKHKQIKNQLTQQFKHRLKSIFNTELYARNTIKAINTFAIPVLTYSFGIINWTKTELRKLQRIINTTLTKHRKHHPRSCVQRLTLPRKEGGRGIIDITNLHNKQISTLRTYFNYKSTTSNLHKAIVFNDRKLTPLNMSDKNKQSNETQTDGPTKILQWTQKSLHGRHRQDLGQPNVDKLASNEWLRRGDLFPETEGFMTAIQDQVIETRNYQKHIMRIPQIHDICRRCNSSPETIQHITGACKSIVQTDYKHRHDQIAKIIHQKLALKYNLISTPPVPYYKYNPEIILENNNHKLYYDRAILTDRTTHYNRPDITLLDKINKTAEIIDIAIPNTHNLQSTIAEKLTKYTDLKIEISRMWRLSHVSIIPIVLSTTGVIPKQLHQSLKSLDLAPYTYQSLQKAAILNTCRIVRKFLQNDNETLIPTSHPQVTTTINTRTQSRNHTQT

SEQ ID NO: 31173 - protein, 937 aa, Eupsilia transversa
MQGNRGWRLVREVHTILENNRIHSTHEEPNTQLTHFLDTLKQKLTLVNSRLNRYNNCTLRKFQNNKFRNNEKQFYRTLKNSTTNHTEPSNNENNTNHSLPSVRELQRFWSGIWERPICHNTEAEWIKIETEKHMHTEQMEFEQVPIDTFHDVLQKLHNWKAPGSDYIHNFWYKKFTYTHPFLYNYINTFIKNPTTMPAYIAEGITYMIPKDSNDSANPAKYRPITCLQTIYKIITSCITQIIYKHLDSNSILSEEQKGCRKFSQGCKEQLTIDSVILKQVQRKKKDLYTMYIDYKKAYDSVPHTWLLEILNIYKINPQIIAFLNNTITQWTTRLHLTTPTGIAETEHIKIQRGIFQGDSLSPLWFCLALNPLSNKLNSLMPGYNLKYNDTTDGIRTDRHDCKINHLLYMDDIKLYASSPEDLEELANATDTFSSDIGMEFGIDKCKINSVRAGQTYEHSYTTQSGETIDSLDEHGTYKYLGYIQAKQIKHKAIKNKLTQQFKHRLKSILNTQLHSKNTIKAINTYAIPVLTYSFGIISWTKTELKSLQRVINTSLTKYRKHHPRSCVQRLTLPRKEGGRGIIDITNLHNKQISTLRKYFNTKSTTSTLHKAIEYNDQKLTPLNMSDKTTQINEKQTDSQTKISEWSQKSLHGRHRQDLCQPNVDKLASNEWLRRGDLFPETEGFMTAIQDQVIETRNYQKHIMRVPLPTDICRRCHSSSETIQHITGACKAIVQTDYKHRHDQIANIIHQKLAIKYKLITTAPVPYYKYTPETVLENTTHKLYFDRAILTDRTTHYNRPDITLLDKINKTAQIIDIAVPNTHNLQKTIAEKLSKYTDLKIEISRMWRLGSVAIIPVVLSTTGVIPKQLHQSLRTLDVAPSTYLTLQKAAILNTCRIVRKFLQNDNDAQISHAQTSFTTTTQNQNIISPSHIISSLIT

SEQ ID NO: 31174 - protein, 1414 aa, Phlogophora meticulosa
MITRSKTKKDIQANMPSVDDETSTTSSSASPRSIFSSIASSPPSYLSRSSRSSSTSSPTSVDVVSEAILANKPSPTADIKNTRKKWSIEMNEFIWRTYLIITNLESDKNAYLTSLHQQFIDKFPNMKVSKQRIGDQRRAIVSKKLLPSITLDSIRLEVINNLQTPNNDLQLQPQTPQEILTFQTNTQPYSQSEPKRRMKWSNELNETLMKCYFRATKLETDMTIWRKNLKEKFIECYPHLSHLSEQRISDQKRVIVNNSMISETRLQILKSIVENELLETAPFNWQSDSIRRTTENVHSQPPQNTLNIDIENIEMSQTQQIGVETEGDNLNAIELEHPVHSNTQTSQERNLQIDEIFSETLQYYRDTYPTERSYIPVQKSSKRLANIVSYINKVILPEQVTQDTEFNHLQTIIYCAAWTAAKANGSKISLSPPEYRNRLQQDRKPKWQKRLDHKIEVIRAKIGRLTHYMQGHRSKKLTKEVNTILRDYKTHTSHEEPNTHLTHFLDTLKQKLTVVKSRLDRYTKCTLRKTQNNQFRNNEKLFYRKLKASTTNHTTPSNNTNTVWPATDELQQFWAGIWENPVSHNTEAEWIKEEEAYQTNVEAMDFDQVDVETFHDVLQKIHNWKAPGSDHIHNYWYKKFTHIHPYLYNCINNFIKDPNIIPSYITEGKTYMLPKDPNDTANPAKYRPITCLQTIYKILTSCITQIIYKHLETQHILTEEQKGCRKFSQGCKEQLTIDAVILKHVQRTKKDLCSMYIDYRKAYDSVPHSWLLKVLSLYKIHSQLINFLGNILDKWQTRLHLNTSIGIVETEHIKIQRGIFQGDSLSPLWFCLALNPLSNKLNALKPGYQLQYIDTTTDILTDQQTCKLNHLLYMDDIKLYASSPDDLYELANATEQFSNDIAMEFGIDKCKINSIRAGKTYSHSYYMQTGDTIESLDENGTYKYLGYIQAKQILHKEIKATLTKQFKHRLKTICHSQINARNTIKAINTYAIPVLTYSFAIINWNKTELKHLQRVINTTLTKHRRHHPRSCVQRLTLPRNEGGRGIIDITNLHNKQITILRTYFYTKSPISTLHKAIAFNDKKLTPLNMFEKTTQSNEQQTDRQTKIAEWTKKSLHGRHRHDLNQPNVDKLASNEWLRRGELFPETEGFMIAIQDQVIETRNYQKHIMRVPQTIDRCRRCNSSSETIQHITGACKAIVQTDYKHRHDQLANIIHQKLAIKYKLIPTPPVAYYKYQPETVLENSTHKLYFDRAILTDKTTHYNRPDITLLDKINKTAQIIDIAVPNTHNLQNTIAEKLSKYIDLKIEISRMWRLSNVTIVPIVLSTTGVIPKQLHQSLKTLDLPPYTYQTLQKAAILNTCRIVRKFLQNDNDTSIVSSHTRAAANARTQSHELTQSPSQNPNTPSSHHNITNSQG

SEQ ID NO: 31175 - protein, 1409 aa, Xestia c-nigrum
MLTRSKTKKNIQASMPATDDETSPVSSSSSPKSIFSSIASSPPSYSSRSSRSSSILSPMTVDVVSEANVANNPSPAAVSTTTRKKWSKEMNEFIWRNYLIITNLESDTKAYLTSLHHRFTDIFPNMNISKQRIGDQRRAIVSKKLLSSTVLNTIRLEVSNHLRTPIDDLELHSPPEYPSSQRDSQLNSQSEPKRRMKWSNELNETLMKCYFRVTKMETDMTVWRKNLKEKFIECYPHLSHLSEQRISDQKRVIVNNSMISEARLQVLKSIVENELCEIESFQRQHDSRMSNTDVGNLHLDTNTETLNTDIENIEHSETENIGVEIDDGNNNLGPEHPIHLNIQHTNLVRNPEIDEIFSQTLQYFKDTQPTERSYIPKQKSSKKLANIVSYINKVILPEQVTNETNFNHLQTVIYCAAWTAAKANGSKISVAPPVDRSSRPQQAHKPKWQKRLENKMESLRAKIGRLTQYIQGVRSRKLIKAVEIILKDYRIHTLHEQPNTQLEHFLDTLKQKLTVVKSRLNRYTKCTLRKTQNNQFRNNEKQFYRTLRKSTTNETTSNSNAHTAFPTTEELQQFWAGIWENPVCHNTEAEWIKTEQVIHTNTEAMIFDQIEVATFHDVLTKIHNWKAPGSDYIHNYWYKKFTHTHPHIFNHINNFIKDPATIPTYITEGKTYMLPKDPSDPTNPAKYRPITCLQTIYKIMTSCISHVIYKHLETQKILTEEQKGCKKLSQGCKEQLTIDAVIHRHVQRTKKDLHTMYIDYRKAYDSVPHSWLLEVLKIYKIHPQLINCLGTIVEKWKTRLQLNISTGTVETELIKIQRGIFQGDSLSPLWFCLALNPLSNKLNALLPGYQLQFSDTMTDTPTDQQYCKVNHLLYMDDIKLYASSPDDLYELADVTEQFSKDIAMEFGIDKCKINSIKAGKTFTHSYQMQTGATIDSLDETGTYKYLGYIQAKQILHKEIKTTLTKQFKHRLNTIFNTQINAKNTIKAINTYAIPILTYSFGIIKWNKTDLKNLQRIINTTLTKHRRHHPRSCVQRLTLPRNDGGRGIIDITNLHNKQISTLRTYFDNKSSTSTLHKAIVYNDKKLTPLNMYDRTTQSNEQQTDRQTKIAEWTQKSLHGRHRHDLNLPNVDKLASNEWLRRGELFPETEGFMIAIQDQVIETRNYQKHIMRVPHTVDICRRCNSSSETIQHVTGACKAIVQTDYKHRHDQIANIIHQKLAIKYKFISTPPVPYYKYQPETVLENATHKLYFDRGIFTDKTIHYNRPDITLLDKCNKTALIIDIAVPNTHNLQNTIAEKLAKYIDLKLEITRMWSLKNVAIVPIVLSTTGVIPKQLHQSLKSLDLPPYTYQSLQKAAILNTCRIVRKFLQNDNEAIITTSHTQPSQTQFNGHSSSHNLTRSSSHYITTLLG

SEQ ID NO: 31176 - protein, 1215 aa, Xestia c-nigrum
MKWSNELNETLMKCYFRVTKMETDMTVWRKNLKEKFIECYPHLANLSEQRISDQKRVIVNNSMISEERIQILKSIVENELVETGSFQRQVDSSRSNTEVENVHLHTISNTDTLNIEIENVEPSQTEPIGERSDGDNFINLGTDHHLNTQHTCLERNPDIDEIFSQTLQYYKDIHPTERNYIPKQKTSKRLANIVNYINKIILPEQVTSDTDFNTLQTVIYCAAWTAAKANGSKISLIPPEGTSRFHQVNKPKWQKRLEHKIEVIRAKIGRLTHYMQGHRSRKLTKAVETILKNYRTHTTHEQPNTQLEHFLDTLKQKLAVIKSRLKRYTKCTLRKTQNNQFRNNEKLFYRSLKKSTTNQTTSNNNTHTVFPTTNELHQFWAGIWENPVYHNAEAEWIKEEEVIHSNIESMSYDQVDIGTFHDVLKRIHNWKAPGSDYIHNYWYKKFTHTHPHLFNYINDFIKDPTTLPSYITEGKTYMLPKDPSDLSNPAKYRPITCLQTFYKIITSCITNIIYKHLETQKILTEEQKGCKKLSQGCKEQLTIDAVVHRQVQRIKTDLHTMYIDYRKAYDSVPHSWLLEVLKIYKVHPQLITFLSNIIEKWNTRLQLNTLTEIVETEPIKIQRGIFQGDSLSPLWFCLALNPLSNKLNALKPGYQLQYNETMTDVLTDQQCCKINHLLYMDDIKLYATSPEDLYELADVTEKFSNDIAMEFGIDKCKINSIKAGKSFTHSYQMQTGATIDSLDETGTYKYLGYIQAKQIMHKEIKTTLTKQFKHRLKTIFNTQINAKNTTKAINTYAIPILTYSFGIIKWNKTDLKNLQRIVNTTLTKHRRHHPRSCVQRLTLPRNEGGRGIIDITNLHNKQITTLRTYFDYKSSTSTLHKAIAYNDKKLTPLNMYDRKTQNNEQQTNRQTKIAEWTQKSLHGRHRHDLNLPNVDKLASNEWLRRGELFPETEGFMIAIQDQVIETRNYQKHIMRIPQTIDICRRCNSSSETIQHITGACKAVVQTDYKHRHDQIANIIHQKLAIKYNLISTPPVPYYKYQPEIILENATHKLYFDRGIFTDKTIHFNRPDITLLDKRNKTAQIIDIAVPNTHNLQKTIAEKLSKYTDLKIEISRMWCLSNVAIVPIVLSTTGVIPKQLHQSLETLDLPAYTYQSLQKAAILNTCRIVRKLLQNENESVGTTTNTQPHTHTRSNTHRNSSSQDSIISSAHHITTG

SEQ ID NO: 31177 - protein, 1379 aa, Spodoptera frugiperda
MITRSKVKNTMQAKVPPADEEASAVSLSSSPRSIFSSLTPSPLSFTTRSLRSSISSTMSADVVSEASSAKNPSPAAGKKGTRKKWSIEMNEFIWRTYLIITKLETETNAYLSTLHNKFTQQFPDMAVSRQRIGDQRRAIVNNKLLPTTTLEAIRLEVRNYLQNQNSTTQIQEQTHQERIRTQISPLIHTQSKTRMKWSNELNETLIKCYFMVTKMETDMTVWRKNLKDKFTQHYPHLSHLSEQRISDQKRVIMNNNMISEARLQRIKLIVQQELDEIGSIETSSFERVHSSNAHENTSNINLELHSHINITNREPMSPEFRNSNIIQPRDNSPDQQLTATNTQIEHFERNVEIDELFSQALQHYSETHPTDRCYIPKQKTSKKLAKIVHYINQVILPDYVIRDIEFSQLQTILYVAAWTAAKANGSKLSLSSAQNRNNPQRDYKPKWQKRLERKINAIRAKIGRLTYYIQGHRSRKLRKEVNKILRDYKIHTTHEEPNTHLAHYLDTLKQKLAVFKSRLSRYTKCTLRKTQNNQFRNNEKQFYRTLKQSTTNHTTSNSTANTSLPSEENLKSFWASIWQNPVCHNAEAAWIKMEENKYENIPQMQFEQVDIETFHDVINKLHNWKAPGSDCIHNYWYKKFTTIHPHLFNHINNFIKDPNNIPSYITEGITYMLPKDLNDTSNPAKYRPITCLQTIYKIMTSCITHIIYKHIDTQNILTEEQKGCRKFSQGCKEQLVIDSVILKDVQKHKKDLYTMYIDYKKAYDSVPHSWLLHVLNIYKIHPHITHFLEIMISKWQTRLHLNTPTGTIATEFIKIQRGIFQGDSLSPLWFCLAINPLSNKLNSLHSGFQLQYRDTTSTIETTRQLCKINHLLYMDDIKLYASSPEGLYDLADTTEIFSNDIAMEFGIDKCKINSVKAGKTYTHSYQLHTGDTIHSLDETETYKYLGYIQAKQILHKDIKNQLIKQFKHRLKVICNSELNSRNTIKAINTFAIPILTYSFSIINWSKTELQNLQRNINTTLTKHRRHHPRSCTQRLTLSRNDGGRGIIDITNLHNKQITTLRSYFFSKSLTSTLHYAIAQNDKKLTPLNMSDRETQNNEKQIDRQTKIAQWAQKSLHGRHYHDLSQPNVDKLASNEWLRRGELFPETEGFMIAIQDQVIETRNYQKHIMHITLPTDTCRRCNSASETIQHITGACKSIVQTDYKHRHDQVANIIHQKLALKYNLISTPPVPYYKYQPQTVLENSLYKLYFDRAILTDKTTHYNRPDITLIDKANKTAQIIDIAIPNTHNLQNTIAEKLSKYTDLKIEISRMWRLNNVAIIPIVLSTTGVIPKQLHQSIKTLDLPPYVYQSLQKAAILNTCRLVRKFLNESDNSSYTQTQN

SEQ ID NO: 31178 - protein, 1444 aa, Amphipyra berbera
MPTLENRGPPVLFTLATVNAGLCCGRLCKSLATRGIIMITRSKKRKAIQTNMLSTDDETTQVSASSSPRSIFSSIASSPPSYILASSRSSSSSPLSVDVVSEVTSARNPSPATVSTITRKKWSEEMNTFIWRTYLIITNLETDTSSYLTSLHQQFINRFPQMNVSKQRVGDQRRAIVYKKLLPTTTLDIIRLEVSNSLKTHNTVLHPQTQTLQSNMSQINTNSPSQPNRRMKWSTELNENLIKCYYICTKMETDMTVWRKKLKEMFIEIYPQLSHLSEQRISDQKRVVINNRMISETRLQELKTDVQNTLNQTNSYEQHQNSHVISDSIQTQPPFNNNIAQLHTQETELELRNEPNYLNRIDVEALTQHNSTNMETNQERNQELEETFLQTLQYFTNTHPTQRNYIPKQKSSKKFAKIVSYINNIILPNYLNSDIDFDTLQTTIYSAAWTAAKANGSKLLHVSAENMVNTRQKNHKPKWQRRLEYKIKDLRAKIGRLTQYIYGNRSRKLTQEVNTILEHYKIHSTHEEPNTQLTHFLDTLKQKLTLVNSRLKRYTKCTHRKTQNNQFRNNERQFYRTLKNSTTNQTTPTNNVNNVNSILPPIDEIKQFWSQIWERPIGHNTEADWIKVETENYINIEQMEFEHIKRDTFLDVLKKLHNWKAPGSDYIHNFWYKNFTHTHPYLYNHINNFISNPTTMPCYISEGITYMLPKDSNDCTNPAKYRPITCLQTIYKIITSCISHVIYKHLDRNKILAEEQKGCKKFSQGCKEQLTIDSVILNQVQRKKADIYTMYIDYKKAYDSVPHTWLLEVLNIYKIHPQITTFLSNIIKQWSTRLHLTSPTGIVETETIKIQRGIFQGDSLSPLWFCLALNPLSNKLNSLRPGYQLQFNDTLNDILTDDQNCKINHLLYMDDIKLYASSPDDLYELANTTEHFSKDIGMEFGIDKCKINSIRAGKTYEHSHTIQTGETIDSLDENGTYKYLGYIQNKQLKHKEIKTTLTQQFKHRLKSIFNTQLHSKNTVKAINTYAIPVLTYSFGIINWTKTELKNLQRVINTTLTKHRKHHPRSCVQRLTLPRKEGGRGIIDISNLHNKQITTLRKYFNSKSTTSSLHKAIVYNDQKLTPLNMFDKTTQNNEQQTTRQTKILEWTQKSLHGRHRKDLEQLNVDKLASNEWLCRGDLFPETEGFMVAIQDQVIETRNYQKYIMRVPHANDICRRCSSSSETIQHITGACKAIVQTDYKHRHDQIANIIHQRLAIKYDLITTPPTPYYKYIPEIVLENNTHKLYYDRAILTDKTTHYNRPDITLLDKINKTAQIIDIAVPNTHNLQSTIAEKLSKYTDLKIEISRMWRLSNATIIPIVISTTGVIPKQLHQSLRTLDLPPYLYTSLQKAAILNTCRIVRKFLQNDNETQMITPHSQASNTTRTQSLNQTNSSQSHIMSSHHITNQ

SEQ ID NO: 31179 - protein, 1416 aa, Acronicta aceris
MSLATRGTNMITRSKTRKAIQANAATMDVEPSQSSRSSSPRSIFSSIASSPPSYLLSSSRSSSLSPRTVDVVMEATSARNPLPATVSTITRKKWSEEMNRFIWRTYLIITNLETDTNSYLTSLHQQFIDKFPQMNVSKQRVGDQRRAIVQKKLLPRTTLETIRLEVSNSLQIYNSDLHPHNNTSQQFIASHTGPTQQSQLKTRMKWSKEHNETLIKCYFIITKMETDMTVWRKKLKEKFVEFYPQLLHLSEQRISDQKRVIINNRMISEARITELKLYAEGVLNQTDSYMESIGHISQSTTEDVQEILLTNNNTQLTNIEQSHTHETELENDPNYLNSIDIEALTNSTVNTYHTDTNIEIRDQANPELEEIFANTLLHFTDTNPTKRNYIPKQKSSKKLAKIVTYIDNCILPKYVSNETDFKTLQTIIYSAAWTAAKANGRKLSYKTPENLANIHQRINKPKWQRRLEYKIKDLRAKIGRLTHYINGNRSRKLDREVHKILEHYKIHSTHEEPNTQLTHFLDTLKQKLTLLSSRLNRYTKCTLRKSQNNQFNKNEKQFYRSIKKSTTNRTMASNSENNTTDTLPPTSEIHKFWSNIWERPMLHNTEAEWIRTETENLVNTEQMDFEHIPIDTFHDVLKKLHNWKAPGSDYIHNFWFKKFTHIHPYLFNYINEFIKNPNTMPAYLTEGITYMLPKDFNDTNNPAKYRPITCLQTIYKIITSCITHIIYKHLDTNSILTEEQKGCRKYSQGCKEQLTIDAVILKQVQQKKKDLYTMYIDYKKAYDSVPHTWLIEVLNIYKIHPQIIAFLNNVIKQWTTRLYLPTPTGEAETEPIKIQRGIFQGDSLSPLWFCLALNPLSHKLKSVAPGYLLQYNDMSSDRLSDKQDCKINHLLYMDDIKLYASSPDDLYQLANITEQFSNDIGMEFGIDKCKINSVKGGQTFEHTHTIQTGETIESLDEHGTYKYLGYIQAKQIKHKQIKNQLTQQFKHRLKSIFNTQLYARNTIKAINTFAIPVLTYSFGIINWTKTELRKLQRIINTTLTKHRKHHPRSCVQRLTLPRKEGGRGIIDITNLHNKQISTLRTYFNYKSTTSNLHKAIVFNDRKLTPLNMSDKNKQSNETQTDGPTKILQWTQKSLHGRHRQDLCQPNVDKLASNEWLRRGDLFPETEGFMTAIQDQVIETRNYQKHIMRIPQIHDICRQCNSSPETIQHITGACKSIVQTDYKHRHDQIAKIIHQKLALKYNLISTPPVPYYKYNPEIILENNNHKLYYDRAILTDRTTHYNRPDITLLDKINKTAQIIDIAIPNTHNLQSTIAEKLTKYTDLKIEISRMWRLSHVSIIPIVLSTTGVIPKQLHQSLKSLDLAPYTYQSLQKAAILNTCRIVRKFLQNDNETLIPTSHPQVTTTINTRTQSRNHTQT

SEQ ID NO: 31180 - protein, 1411 aa, Eupsilia transversa
MITRSKTKQLIQASRPSADDETSSVSSSSSPRSIFSSIVSSPPSYLSRSLRSSSSSPISVDVVSEATTAINPSPATVTTNTRKKWSEDMNQFIWRTYLMITNLETETNSYLTSLHQQFINRFPQMNVSKQRVGDQRRAIVHNKLLSVTTLDKIRLEVSRNLQTDTTNLDTHTRTPAQLNTDQYNTHLQSEPKRRMRWSNEMNETLIKSYFIATKMETDMTVWRKKLREMFIEFYPQLSHLSEQRISDQKRVVLNNKMISDKRLQDLKTYAENTLNQPNPYRQLERHNLLIAADNTPTQAPTNNTETAHGNNQTHTQETEVGSEPNFLNTIDVGALTTIINTEHNTTNVEISQERYLELEETFSHTLQHFTSINPTKRNYIPKQKSSKKLAQIVSNINNVILPKYVNADTDFETLQTVIYSAAWTAAKTNGSKLSYITSERTAYINQKNKKPKWQKRLELRVKDLRTKIGRLTAYMQGNRGWRLVREVHTILENNRIHSTHEEPNTQLTHFLDTLKQKLTLVNSRLNRYNNCTLRKFQNNKFRNNEKQFYRTLKNSTTNHTEPSNSENNTNHSLPSVRELQRFWSGIWERPICHNTEAEWIKIETEKHMHTEQMEFEQVPIDTFHDVLQKLHNWKAPGSDYIHNFWYKKFTYTHPFLYNYINTFIKNPTTMPVYIAEGITYMIPKDSNDSVNPAKYRPITCLQTIYKIITSCITQIIYKHLDSNSILSEEQKGCRKFSQGCKEQLTIDSVILKQVQRKKKDLYTMYIDYKKAYDSVPHTWLLEILNIYKINPQIIAFLNNTITQWTTRLHLTTPTGIAETEHIKIQRGIFQGDSLSPLWFCLALNPLSNKLNSLMPGYNLKYNDNTDGIRTDRHDCKINHLLYMDDIKLYASSPEDLEELANATDTFSSDIGMEFGIDKCKINSVRAGQTYEHSYTTQSGETIDSLDEHGTYKYLGYIQAKQIKHKAIKNKLTQQFKHRLKSILNTQLHSKNTIKAINTYAIPVLTYSFGIISWTKTELKSLQRVINTSLTKYRKHHPRSCVQRLTLPRKEGGRGIIDITNLHNKQISTLRKYFNTKSTTSTLHKAIVYNDQKLTPLNMSDKTTQINEKQADRQTKISEWSQKSLHGRHRQDLCQPNVDKLASNEWLRRGDLFPETEGFMTAIQDQVIETRNYQKHIMRVPLPTDICRRCHSSSETIQHITGACKAIVQTDYKHRHDQIANIIHQKLAIKYKLITTAPVPYYKYTPETVLENTTHKLYFDRAILTDRTTHYNRPDITLLDKINKTAQIIDIAVPNTHNLQKTIAEKLSKYTDLKIEISRMWRLGSVAIIPVVLSTTGVIPKQLHQSLRTLDVAPSTYLTLQKAAILNTCRIVRKFLQNDNDAQISHAQTSFTTTTQNQNIISPSHIISSLIT

SEQ ID NO: 31181 - protein, 945 aa, Amphipyra tragopoginis
MLGNRSRKLNKEVNTILEHYKIHSTHEEPNTQLTHFLDTLKQKLTLLNSRLSRYTKCTHRKTQNYQFKNNERQFYRTLKKSTTNQTTPSSNTNNTNNSESPPIHELQQFWAGIWERPICHNTEAEWIKIETESHINTEQMHFEHVEIDTFHEVLKKLHNWKAPGSDFIHNFWYKKLTHIHPYLHNYINEFIKNPTTMPTCITEGITYMLPKDSNDRTNPAKYRPITCLQTIYKIITSCITHIIYKYLETNKILTEEQKGCRRFSQGCKEQLTIDSVILKQVQRKKHDLYTMYIDYKKAYDSVPHTWLLEVLNIYKIHPQITTFLSNIIKHWTTRLHLTTPTGIVETEPIKIQRGIFQGDSLSPLWFCLALNPLSNMLNSVRPGYFLQLNDTANDILTDKQDCKINHLLYMDDIKLYASSQDDLDELANITDHFSSDIGMEFGIDKCKINSVRAGKSYEHSYTIQTGETIDSLDENGTYKYLGYIQSRQIKHKEIKTTLTQQFKHRLKSIFNTQLHSKNTIKAVNTYAIPILTYSFGIISWTKTELKTLQRVINTTLTKHRKHHPRSCVQRLTLPRKEGGRGIIDITNLHNKQISTLRKYFHTKSTCSTLHKAIVYNDQKMTPLNMFDKTNQNNEKQIDKQTKILEWTQKSLHGRHRKDLGQPNVDMLASNEWLSRGDLFPETEGFMMAIQDQVIETRNYQKYIMRAPLATDICRRCNSSSETIQHITGACKAIVQTDYKHRHDQIANIIHQKLAIKYNLISTPPTPYYKYNPETVLENNTHKLYYDRAILTDRTTHYNRPDITLLDKINKTAQIIDIAVPNTHNLQNTIAEKLSKYTDLKIEISRMWRLSNVSIIPIVLSTTGVIPKQLHQSLKTLDLAPYTYQSLQKAAILNTCRIVRKFLQNDNETQTITPHSQASITTRTQSYDQTHTLQSHNISSHHITNL

SEQ ID NO: 31182 - protein, 1398 aa, Ochropleura plecta
MLTRSKTKKSIQANMPSVDDETSSVSSSSSPKSIFSSIVSSPPSYLSRSSRSSSILSSMAADVVSEANSANNPSPTAVSTTTRKKWSKEMNEFIWRNYLIITNLEADTKAYLTSLHHQFTEKFPNMKVSKQRIGDQRRAIVSKNLLPSTTLDAIRREVSNCLPTHSSDSQLESPPEILLSQTDTHHHSQSEPKRRMKWSNELNETLMKCYFRVTKMETDLTVWRKNLKEKFIECYPHLSHLSEQRISDQKRVIVNNNMIPEARLQILKSIVENELIETGSFQRQADSRGSNTEVGNLHTITNTDSLNIEIENREEPSQREHSGERTNVNNLGTDHPIHLNTQHTCQDRNPDIDEIFSQTLQYYKDTHPTERSYIPKQKTSKRLANIVSYINTIVLPEHVTSDTDFNALQTIIYCAAWTAAKANGSKISLTPLEDRSRLHQVFMPKWQKRLEHKIEVFRAKIGRLTHYMRGHRSRKLKKAVESILKDYKTHTTHEQPNTQLEHFLDTLKQKLTVIKSRLNRYTKCTLRKTQNKQFRNNERQFYQSLKNSTTNQTTSNNNTHISFPTTEELQQFWAGIWENPVFHNAEAEWVKEEEAIHSNTEAMFFDQIEVGTFHDVLNRIHNWKAPGSDHIHNYWYKKFTHTHPHIFNHIINFIKDPTTLPSYITEGKTYMLPKDPSDSENPAKYRPITCLQTIYKIMTSCITNIIYKHLETQKILTEEQKGCKKLSQGCKEQLTIDAVIHKQVQRTKKDLHTMYIDYKKAYDSVPHSWLLEVLKIYKIHPQLIQFLGNIVEKWKTRLQLNTSTEIVQTEPIKIQRGIFQGDSLSPLWFCLALNPLSNKLNALIPGFQLQYNDIMTDTLTDQHNCKINHLLYMDDIKLYAASPDDLYELADVTEKFSNDIAMEFGIDKCKINSIKAGETYRHSYQMQTGVLIDSLDETGTYKYLGYIQGKQIMHKEIKTTLTKQFRHRLKTIFSTQINAKNTIKAINTYAIPILTYSFGIIKWNKTDLKNLQRIVNTTLTKHRRHHPRSCVQRLTLPRNEGGRGIIDITNLHNKQITTLRTYFDNKSSTSTLHKAIAYNDRKLTPLNLYDKTTQINEKQTDRQTKIAEWTQKSLHGRHRHDLNLPNVDKLASNEWLRRGELFPETEGFMIAIQDQVIETRNYRKHIMRVPQTIDVCRRCNSSSETIQHITGACKAVVQTDYKHRHDQIANIIHQKLAIKYNLISTPPVPYYKYQPEIVLESATHKLYFDRAIFTDRTIHYNRPDITLLDKHNKTAQIIDIAVPNTHNLQNTIADKLSKYTDLKIEISRMWCLSNVTIVPIVVSTTGVIPKQLHQSLKTLDLPPYTYQNLQKAAILNTCRIVRKFLQNENESMVTTTHTQLPVTTHTLSSSHPITTFTG

SEQ ID NO: 31183 - protein, 982 aa, Mesoligia furuncula
MNGSKLSHVTSDNPTNINLPQFKKPKWQRRLELRVKDLRTNIGRLTAYMLGNRGWKLVRKVHTILENYKIHSTHEEPNTQLTHFLDTLKQKLTLVNSRLNRYNKCTLRKTQNNKFRNNEKQFYRTLKQSTTNQTVHSESENNTNQSLPSIDELQQFWSRIWERPICHNTEAEWIKIETENHKHTEQMEFEHVSIETFHDVLQNLHNWKAPGSDNIHNFWYKKFTHIHPYLYNYINTFIKNPSMMPSYIAEGITFMIPKDSSDSTNPAKYRPITCLQTIYKIITSCITHSIYQHLETNTILAEEQKGCRKFSQGCKEQLTIDSVILKQVQRKKRDLYTMYIDYKKAYDSVPHTWLLEVLKIYKVNPLIVTFLNNTMAQWTTRLHLKSPSGIVETEAIKIQRGIFQGDSLSPLWFCLALNPLSNKLNTLKPGYNLPFNDTIDDLQTDRQNCKINHLLYMDDIKLYASTQDDLNKLAETTDQFSRDIKMEFGIDKCKINSVRAGQTYEHSYIIQTGEIIDSLNENETYKYLGYIQTQQIKHKEIKNKLTQQFKHRLKSIFNTQLHSRHTVKAINTFAIPVLTYSFGILSWTKTELKNLQRVINTTLTKNRKHHPRSCVQRLTLPRKEGGRGIIDITNLHNKQISTLRTYFNTKSTTSTLHKAIVHNDKKLTPLNMFDKTTQSNEKQTDRQTKILEWTQKSLHGRHRQDLCQPNVDKLASNEWLRRGDLFPETEGFMTAIQDQVIETRNYQKHIMRIPISTDICRRCYSSSETIQHITGACRAIVQTDYKHRHDQIANIIHQKLAIKYKLINTPPVPYYKYNPEIVLENTTHKLYFDRAILTDRTTHYNRPDITLLDKINKTAQIIDIAVPNTHNLQNTIAEKLSKYTDSKIEISRMWRLGSVAIIPVVVSTTGVIPKQLHQSLKTLDLSPSTYQTLQKAAILNTCRIVRKFLQNDNDAQISHPQTSPTTQSLNISSHHNTLSSIA

SEQ ID NO: 31184 - protein, 1409 aa, Xestia c-nigrum
MLTRSKTKKNIQASMPATDDETSPVSSSSSPKSIFSSIASSPPSYSSRSSRSSSILSPMTVDVVSEANVANNPSPAAVSTTTRKKWSKEMNEFIWRNYLIITNLESDTKAYLTSLHHRFTDKFPNMNISKQRIGDQRRAIVSKKLLSSTVLNTIRLEVSNHLRTPIDDLELHSPPEYPSSQRDSQLNSQSEPKRRMKWSNELNETLMKCYFRVTKMETDMTVWRKNLKEKFIECYPHLSHLSEQRISDQKRVIVNNSMISEARLQVLKSIVENELCEIESFQRQHDSRMSNTDVGNLHLDTNTETLNTDIENIEHSETENIGVEIDDGNNNLGPEHPIHLNIQHTNLVRNPEIDEIFSQTLQYFKDTQPTERSYIPKQKSSKKLANIVSYINKVILPEQVTNETNFNHLQTVIYCAAWTAAKANGSKISLAPPVDSSSRPQQAHKPKWQKRLENKMESLRAKIGRLTQYIQGVRSRKLIKAVEIILKDYRIHTLHEQPNTQLEHFLDTLKQKLTVVKSRLNRYTKCTLRKTQNNQFRNNEKQFYRTLRKSTTNETTSNSNAHTAFPTTEELQQFWAGIWENPVCHNTEAEWIKTEQVIHTNTEAMIFDQIEVATFHDVLTKIHNWKAPGSDYIHNYWYKKFTHTHPHIFNHINNFIKDPATIPTYITEGKTYMLPKDPSDPTNPAKYRPITCLQTIYKIMTSCISHVIYKHLETQKILTEEQKGCKKLSQGCKEQLTIDAVIHRHVQRPKKDLHTMYIDYRKAYDSVPHSWLLEVLKIYKIHPQLINCLGTIVEKWKTRLQLNISTGTVETELIKIQRGIFQGDSLSPLWFCLALNPLSNKLNALLPGYQLQFSDTMTDTPTDQQYCKVNHLLYMDDIKLYASSPDDLYELADVTEQFSKDIAMEFGIDKCKINSIKAGKTFTHSYQMQTGATIDSLDETGTYKYLGYIQAKQILHKEIKTTLTKQFKHRLNTIFNTQINAKNTIKAINTYAIPILTYSFGIIKWNKTDLKNLQRIINTTLTKHRRHHPRSCVQRLTLPRNDGGRGIIDITNLHNKQISTLRTYFDNKSSTSTLHKAIVYNDKKLTPLNMYDRTTQSNEQQTDRQTKIAEWTQKSLHGRHRHDLNLPNVDKLASNEWLRRGELFPETEGFMIAIQDQVIETRNYQKHIMRVPHTVDICRRCNSSSETIQHVTGACKAIVQTDYKHRHDQIANIIHQKLAIKYKFISTPPVPYYKYQPETVLENATHKLYFDRGIFTDKTIHYNRPDITLLDKCNKTALIIDIAVPNTHNLQNTIAEKLAKYIDLKLEITRMWSLKNVAIVPIVLSTTGVIPKQLHQSLKSLDLPPYTYQSLQKAAILNTCRIVRKFLQNDNEAIITTSHTQPSQTQFNGHSSTHNLTRSSSHYITTLLG

SEQ ID NO: 31185 - protein, 1409 aa, Apamea monoglypha
MITRSKTKHLIQANKPSADDETSPVTSSSSPRSIFSSIVSSPPSYLSRSLRSSSSSPMSVDVVSEASTAINPSPATVTTNTRKKWSKDMNQFIWRTYLILTNLDTETNSYLTSLHQQFIIRFPQMNVSKQRVGDQRRAIVHKKLLSATTLEKIRLEVSRELQTDTTNLDTHQLNTDQSNIHLQSGSKSRMRWSNEMNETLIKCYFLTTKMETDMTVWRKKLREMFIEFYPQLSYLSEQRISDQKRVVLNNKMITEARLQDLKMYAENTLNEANPYRQTEYHNSLIVRNNTPTQVSTNNNTETAYFNNNQTHTQETEVGNEPTFLNCIDLGALTSTIINTEHNTTNGDISQERNQELEETFSHTLHHFTNVHPTKRSYIPKQKPSKKFAQIVSYINNVILPKYVNADTDYETLQTVIYTAAWTAAKTNGSKLSHITPESTTYIYQKNKKPKWQKRLELRIKDLRIKIGRLTAYIQGNRGWRLVREVQTILENYRIHSTHEEPNTQLTHFLDTLKQKLTLVNSRLNRYNSCTLRKIQNNKFRNNEKQFYRTLKNSTTNQTATSSNENNTNHSLTSVDALQQFWSRIWERPICHNTEAEWVKIETENHIHTEQMEFDQVPIETFHDVLQKLHNWKAPGSDYIHNFWYKKLTYTHPYLYNYINTFITNPTTMPTYIAEGITYMIPKDSNDSANPAKYRPLTCLQTIYKIITSCITQIIYKHLESNSILSEEQKGCRKFSQGCKEQLTIDSVILKQVQRKKKDLYTMYIDYKKAYDSVPHTWLVEILHIYKINPQIITFLNNTITQWTTRLHLTTSTGIVESESIKIQRGIFQGDSLSPLWFCLALNPLSNKLNSLMPGYKLNYNDTIDDIRTDRHDCKINHLLYMDDIKLYAASPEDLNELANATDKFSNDIGMDFGIDKCKINSVRTGQTYEHSYTTQSGETIDSLDENGTYKYLGYIQAKQIKHKTIKNKLTQQFKHRLKSILNTQLHSKNTIKAINTYAIPVLTYSFGIISWTKTELKNLQRVINTSLTKYRKHHPRSCVQRLTLPRKEGGRGIIDITNLHNKQISILRKYFNTKSTMSTLHKAIVYNDRKLTPLNMSDKTTQMNEKQTDRQTKISEWTQKSLHGRHRHDLCQPNVDKLASNEWLRRGDLFPETEGFMTAIQDQIIETRNYQKHIMRIPISTDICRRCHSSSETIQHITGACKAIVQTDYKHRHDQIANIIHQKLAIKFKLITTPPVPYYKYTPETVLENTTHKLYFDRAILTDKTTHYNRPDITLLDKINKTAQIIDIAVPNTHNLQNTIAEKLSKYIDLKIEISRMWRLGSVAIIPVVLSTTGVIPKQLHQSLKTLDVAPSTYQTLQKAAILNTCRIVRKFLQNDNDAQIAHPQTSFTTATQSEHIISPRHISSSIIT

SEQ ID NO: 31186 - protein, 1444 aa, Amphipyra berbera
MPTLENRGPPVLFTLATVNAGLCCGRLCKSLATRGIIMITRSKKRKAIQTNMLSTDDETTQVSASSSPRSIFSSIASSPPSYILASSRSSSSSPLSVDVVSEATSARNPSPATVSTITRKKWSEEMNTFIWRTYLIITNLETDTSSYLTSLHQQFINRFPQMNVSKQRVGDQRRAIVYKKLLPTTTLDIIRLEVSNSLKTHNTVLHPQTQTLQSNMSQINTNSPSQPNRRMKWSTELNENLIKCYYICTKMETDMTVWRKKLKEMFIEIYPQLSHLSEQRISDQKRVVINNRMISETRLQELKTDVQNTLNQTNSYEQHQNSHVISDSIQTQPPFNNNIAQLHTQETELELRNEPNYLNRIDVEALTQHNSTNMETNQERNQELEETFLQTLQYFTNTHPTQRNYIPKQKSSKKFAKIVSYINNIILPNYLNSDIDFDTLQTIIYSAAWTAAKSNGSKLLHVSAENMVNTRQKNHKPKWQRRLEYKIKDLRAKIGRLTQYIYGNRSRKLTQEVNTILEHYKIHSTHEEPNTQLTHFLDTLKQKLTLVNSRLKRYTKCTHRKTQNNQFRNNERQFYRTLKNSTTNQTTPTNNVNNVNSILPPIDEIKQFWSQIWERPIGHNTEADWIKVETENYINIEQMEFEHIKRDTFLDVLKKLHNWKAPGSDYIHNFWYKNFTHTHPYLYNHINNFISNPTTMPCYISEGITYMLPKDSNDRTNPAKYRPITCLQTIYKIITSCISHVIYKHLDRNKILAEEQKGCKKFSQGCKEQLTIDSVILNQVQRKKADIYTMYIDYKKAYDSVPHTWLLEVLNIYKIHPQITTFLSNIIKQWSTRLHLTSPTGIVETETIKIQRGIFQGDSLSPLWFCLALNPLSNKLNSLRPGYQLQFYDTLNDILTDDQNCKINHLLYMDDIKLYASSPDDLYELANTTEHFSKDIGMEFGIDKCKINSIRAGKTYEHSHTIQTGETIDSLDENGTYKYLGYIQNKQLKHKEIKTTLTQQFKHRLKSIFNTQLHSKNTVKAINTYAIPVLTYSFGIINWTKTELKNLQRVINTTLTKHRKHHPRSCVQRLTLPRKEGGRGIIDISNLHNKQITTLRKYFNSKSTTSSLHKAIVYNDQKLTPLNMFDKTTQNNEKQTTRQTKILEWTQKSLHGRHRKDLEQLNVDKLASNEWLCRGDLFPETEGFMMAIQDQVIETRNYQKYIMRVPHANDICRRCSSSSETIQHITGACKAIVQTDYKHRHDQIANIIHQRLAIKYDLITTPPTPYYKYNPEIVLENNTHKLYYDRAILTDKTTHYNRPDITLLDKINKTAQIIDIAVPNTHNLQSTIAEKLSKYTDLKIEISRMWRLSNATIIPIVISTTGVIPKQLHQSLRTLDLPPYLYTSLQKAAILNTCRIVRKFLQNDNETQMITPHSQASNTTRTQSLNQTNSSQSHIMSSHHITNQ

SEQ ID NO: 31187 - protein, 1385 aa, Mamestra brassicae
MITRSKTKKHIQAHRPLSEDGPSSTSSPSSPRSIFSSIASSPPSYILRSSRASSILSTGSVDVVSEATTAKNPSPATGITNTRKKWSKDMNEFIWRTYLIITNLETETNSYVTSLHQQFINKFPQMNVSKQRVGDQRRAIINNKLISDTTLEKIRLEVSSELQTEIVNLNTPIPIRSQSEIDQNNTHIQSGLKSRIKWSNEMNETLINCYFIVTKMETDMTVWRKKLREMFIDFFPELTHLSEQRISDQKRVVLNNKMIPEARLQDLKMHAENTLNQPNQYGQSEYHNPPTENTLTQSLTINNTETACANQTHESQIVIESNSLNSIDVEALTSTIINTEHNTTHAEMNEERSLELEKTFSHTIQHFKKIHPTKRNYIPKQKPSKKLAQIVSYINNVILPKHINEDTDFETLQTVIYSAAWTAAKTNGSKLSLVTSENTANILQKYKKPKWQRRLELRVRDLRTKIGRLTAYMQGHRGWKLVREVNTIIENYKTHSTHEEPNTQLTHFLDTLKQKLTLVNSRLNRYNKCTLRKIQNNNFNNNEKQFYRTLKQATTNQSVPSESQGNSIHRLPPIDNLRQFWSGIWERPICHNAAAEWITKETNNYSHTVQMESAHIPIETFHDVLQKLHNWKAPGSDYIHNFWYKKLTHIHPYLYNYINTFIQNPTTMPAYIAEGITYMIPKDISDTSNPAKYRPITCLQTIYKIVTSCITHIIYKHLETNEILSEEQKGCRKYSQGCKEQLTIDSVILKQVQMKKRDLYTMYIDYKKAYDSVPHKWLLEVLQIYKINPIIVTFLSNAMSHWMTRLHVTSPTGIVETEPIKIQRGIFQGDSLSPLWFCQALNPLSNRLNTVTPGYNLPFNDTTADIETDRQNFKINHLLYMDDIKLYASTPDDLFELAETADQFSTDIRMEFGIDKCKINSVKEGKPYHHSYTIQTGETIDSLNVNETYKYLGYIQDRQIKHKDIKNKLIQQFKHRLRSIFTTQLYSKYTVKAINTFAIPVLTYSFGIISWTKTDLKNLQRVINTTMTKHRKHHPRSCVQRLTLPRKEGGRGIIDITNLHNKQISTLRKYFNTKSATSTLHKAIVYNDRKLTPLNMHEKTTQINEKQNDTPTKILEWTQKSLHGRHRHDLCQPNVDKLASNEWLRHGDLFPETEGFMTAIQDQVIETRNYQKHIMRVPLSTDTCRRCHSSPETIQHITGACKAIVQTDYKHRHDQIANIIHQKLAIKYKFITTPPVPYYKYVPETVLENATHKLYFDRAILTDKTTHYNRPDITLLDKINKTAQIIDIAVPNTHNLQSTVAGKLSKYTDLKIELSRMWRLGNVSIIPVVISTTGVVPKQLHQSLKMLDIASSTYQTLQKAAILNTCRIVRKFLQNDNNADTFSIT

SEQ ID NO: 31188 - protein, 931 aa, Craniophora ligustri
MNGHRSRKLIRQVNLILDNCRTHTLHEEPNTQLQHFLDTLKQKLSVANSRLIRYKKCTLRKTQNYQFNNNERQFYRTLKKTTTNHTTPNNCRNNTHPTAPPEGELHRFWAGIWENPIYHNSEADWIKTEMSTNTEPMNFDKIEIEIFQDVLLRLHNWKAPGTDHIHNFWYKKFTYIHLHFFNHINNFITNPSTLPSYITEGITYMLPKDQNDTINPAKYRPITCLQTIYKIITSCVTRSIYSHLDTNCILAEEQKGCRKFSQGCKEQLTIDSVILKQVQRKKKDLCTMYIDYKKAYDSVPHSWLLEVLNIYKIHPLIKNFLKSIIDKWNTRLHLNTSTGSIETNPIKIKRGIFQGDSLSPLWFCLALNPLSKILNSLKPGYLLQYNDTAIDGLTNKQFCKINHLLYMDDIKLYASSPGELSELANMTEKFSNDIAMEFGIEKCKINSMIAGKTFRHSYEVETGETIDSLDESGTYKYLGYIQSKQILHKEIKSTLFKQFKHRLKTICNTQIYSRNTVKAINSYAIPILTYSFGIINWNKSELKNLQRIINTTLTKHRKHHPRSCVQRLTLPRKEGGRGIIDIRNLHNKQITTLRTYFNSKCTTSTLHKAIAYNDQKLTPLNMFDKTTQNNEALTDRQTKIFEWAQKSLHGRHHHDLNQTNVDKLASNEWLRRGELFPETEGFMTAIQDQVIETRNYQKYIIRAPLPTDSCRRCNSSSETIQHITGACKAIVQTDYKHRHDQIANIIHQKLAIKYKLISTPPTPYYKYTAETVLENNTHKLYYDRAILTDRTTHYNRPDITLLDKTNKTAHIIDIAVPNTHNLQNTIAEKLAKYTDLKIEIARMWRLSSVTIVPIVLSTTGVIPNQLHQSLKILDLPPYTYYNLQKAAILNTCRIVRKFLQNDTETEITITNTRTHHNTPITSSQHNIILSS

SEQ ID NO: 31189 - protein, 1401 aa, Mesoligia furuncula
MITRSKTKKQIQANKPSADEISPVSSSSSPRSIFSSIVSSPPSYLSHSSRSSSSSSPMSVDVVSEATTAMNPSPAIVKSNTRKKWSEDMNQFIWRTYLIITNLDTETNSYLTSLHQQFINRFPQMNVSKQRVGDQRRAIVQKKLLSATTLEKIRLEVSRELQSDTTNVDTHIRTPSQLNTDQNNTHLQSGSKSRMRWSNEMNETLIKCYFITTKMETDMTVWRKKLREMFIEFYPQLSHLSEQRISDQKRVVLSNKMITEARLQDLKTYAENTLNHANPYRQTEYHNSLIAPDITPTQASTNNNTETAYINNQTYTQDTEVGSEPNFLNSIDVGSLTSTIINTEHNTLNVETSQELKETFSHTLQHFTNVQPTKRNYIPKQKPSKKFAQIVSYINNEILPKYVSADTDFETLQTIVYSAAWSAAKTNGSKLSRITSENTANLNQKNKKPKWRKRLELRVKDLRKKIGRLTAYMQGNRGWRLVREVHTILENYRIHSIHEEPNTQLTQFLDTLKQKLTLVNSRLDRYNKCTSRKIQNNKFRNNEKQFYRTLKNSTNNQTLPNNNENNSNQSLPSVDELHNFWSRIWERPICHNADADWIKIESENYRHTEQMEFEHVPIDTFHDVLQKLHNWKAPGSDYIHNFWYKKFTHIHPYLYNYINNFIQNPISMPTYIAEGITYMIPKECNDSTNPAKYRPITCLQTIYKIITACITQIIYKHLEENTILSEEQKGCRKFSQGCKEQLTIDSVILKQVQRKKKDLYTMYIDYKKAYDSVPHTWLLEVLKIYKINPQIITFLNNTMTQWTTRLHLTSSTGTVETEPIKIQRGIFQGDSLSPLWFCLALNPLSNKLNSLLPGYNLRYNDTADDIQTDRQNCKINHLLYMDDIKLYASTSDDLYLLAKTTDQISRDIGMEFGIDKCKINSVKAGRTYEHTYTLQTGETIDSLDENGTYKYLGYIQAKQIKQREIKNKLTQQFKHRLKSIFNTQLYSRHTTKAINTYAIPVLTYSFGIISWTKTELKSLQRIINTSLTKYRKHHPRSCVQRLTLPRKEGGRGIIDITNLHNKQISTLRKYFHTKSTTSILHKAIVYNDRKLTPLNMADQTTQINEKQTDRQTKILEWTQKSLHGRHHQDLCQPNVDKLASNEWLRHGDLFPETEGFMTAIQDQVIETRNYQKHIMRVPLSTDICRRCHSSSETIQHITGACKAIVQTDYKHRHDQIANIIHQKLGIKYKLITTPQVPYYKYNPETVLENATHKLYFDRAILTDRTTHYNRPDITLLDKINKTAQIIDIAVPNTHNLQNTIAEKLSKYTDLKIEITRMWHLGGVAIIPVVLSTTGVIPKQLHLSLKTLDLAPSTYQTLQKAAILNTCRIVRKFLQNDNDAQMSHAQTSSTIATRHTLSSTIT

SEQ ID NO: 31190 - protein, 1411 aa, Eupsilia transversa
MITRSKTKQLIQASRPSADDETSSVSSSSSPRSIFSSIVSSPPSYLSRSLRSSSSSPISVDVVSEATTAINPSPATVTTNTRKKWSEDMNQFIWRTYLMITNLETETNSYLTSLHQQFINRFPQMNVSKQRVGDQRRAIVHNKLLSVTTLDKIRLEVSRNLQTDTTNLDTHTRTPAQLNTYQYNTHLQSEPKRRMRWSNEMNETLIKSYFIATKMETDMTVWRKKLREMFIEFYPQLSHLSEQRISDQKRVVLNNKMISDERLQDLKTYAENTLNQPNPYRQLERHNLLIAADNTPTQAPTNNTETAHGNNQTHTQETEVGSEPNFLNTIDVGALTTIINTEHNTTNVEISQERYLELEETFSHTLQHFTSINPTKRNYIPKQKSSKKLAQIVSNINNVILPKYVNADTDFETLQTVIYSAAWTAAKTNGSKLSYITSERTAYINQKNKKPKWQKRLELRVKDLRTKIGRLTAYMQGNRGWRLVREVHTILENNRIHSTHEEPNTQLTHFLDTLKQKLTLVNSRLNRYNNCTLRKFQNNKFRNNEKQFYRTLKNSTTNHTEPSNSENNTNHSLPSVRELQRFWSGIWERPICHNTEAEWIKIETEKHMHTEQMEFEQVPIDTFHDVLQKLHNWKAPGSDYIHNFWYKKFTYTHPFLYNYINTFIKNPTTMPVYIAEGITYMIPKDSNDSANPAKYRPITCLQTIYKIITSCITQIIYKHLDSNSILSEEQKGCRKFSQGCKEQLTIDSVILKQVQRKKKDLYTMYIDYKKAYDSVPHTWLLEILNIYKINPQIIAFLNNTITQWTTRLHLTTPTGIAETEHIKIQRGIFQGDSLSPLWFCLALNPLSNKLNSLMPGYNLKYNDTTDGIRTDRHDCKINHLLYMDDIKLYASSPEDLEELANATDTFSSDIGMEFGIDKCKINSVRAGQTYEHSYTTQSGETIDSLDEHGTYKYLGYIQAKQIKHKAIKNKLTQQFKHRLKSILNTQLHSKNTIKAINTYAIPVLTYSFGIISWTKTELKSLQRVINTSLTKYRKHHPRSCVQRLTLPRKEGGRGIIDITNLHNKQISTLRKYFNTKSTTSTLHKAIVYNDQKLTPLNMSDKTTQINEKQTDRQTKISEWSQKSLHGRHRQDLCQPNVDKLASNEWLRRGDLFPETEGFMTAIQDQVIETRNYQKHIMRVPLPTDICRRCHSSSETIQHITGACKAIVQTDYKHRHDQIANIIHQKLAIKYKLITTAPVPYYKYTPETVLENTTHKLYFDRAILTDRTTHYNRPDITLLDKINKTAQIIDIAVPNTHNLQKTIAEKLSKYTDLKIEISRMWRLGSVAIIPVVLSTTGVIPKQLHQSLRTLDVAPSTYLTLQKAAILNTCRIVRKFLQNDNDAQISHAQTSFTTTTQNQNIISPSHIISSLIT

SEQ ID NO: 31191 - protein, 1413 aa, Noctua pronuba
MLTRSKTKKSIQANMPAADDETSPVSSSSSPKSIFSSIASSPPSYLSRSSRSSSILSPMTVDVVLEANLANNPSPTAVSTTTRKKWSKEMNEFIWRNYLIITNLESDTKAYLTSLHHQFIVKFPNMEVSKQRIGDQRRAIVSKKLLSSTTLDTIRTEVSNHLRTHNNDLEFQSPPEFPSSQTDSQPHSQSEPKRRMKWSNELNETLMKCYFRATKMETDMTVWRKNLKEKFIECYPHLSHLSEQRISDQKRVIVNNSMIPVARLQVLKSIVENELFETESFQRQVDSRMTNTDVGNEHLNTNTETINIDIEIIVPPQTENIGVRIDDGNTSNLGPEHPIHLNTQHTSLVRNPEIDEIFTQTLQYYKDTQPTERSYIPKQKSSKKLANIVSYINKVILPEQITSDTNFNHLQTVIYCAAWTAAKANGSKISLAPPVDSSSRLQQAHKPKWQKRLEIKIESIRAKIGRLTQYIQGVRSRKLIKAVEIILKDYRIHTSHEQPNTQLEHFLDTLKQKLTVVKSRLNRYTKCTLRKTQNNQFRNNEKQFYRSLKKSTTNETTSNNNTHTAFPTTEELQQFWAGIWENPVYHNTEAEWIKVEQLLHTNTEAMIFDQVEVATFHDVLTKIHNWKAPGSDYIHNYWYKKFTHTHPHIFNHINNFIKDPATIPTYITEGKTYMLPKDPSDSANPAKYRPITCLQTIYKIMTSCISHIIYKHLETQKILTEEQKGCKKLSQGCKEQLTIDAVIHRHVQRTKKDLHTMYIDYRKAYDSVPHSWLLEVLKIYKIHPQLINCLGTIVEKWKTRLQLNTSTGTVETELIKIQRGIFQGDSLSPLWFCLALNPLSNKLNALSPGYQLQYSDTMTDILPDQQCCKVNHLLYMDDIKLYASSPDDLYELADVTEQFSKDIAMEFGIDKCKINSVTAGKTYTHSYQMQTGATIDSLDETGTYKYLGYIQAKQILHKEIKTTLTKQFKHRLKTIFNTQINAKNTIKAINTYAIPILTYSFGIIKWNKTDLKNLQRIINTTLTKHRRHHPRSCVQRLTLPRNDGGRGIIDITNLHNKQITTLRKYFDNKSSTSTLHKAIAYNDKKLTPLNMNDRTTQSNEQQTDRQTKIVEWTQKSLHGRHRHDLNLPNVDNLASNEWLKRGELFPETEGFMIAIQDQVIETRNYQKHIMRVPQTVDICRRCNSSSETIQHITGACKAIVQTDYKHRHDQVANIIHQKLAIKYNFISTPPVPYYKYQPETVLENATHKLYFDRGIFTDKTIHYNRPDITLLDKCNKTALIIDIAVPNTHNLQNTIAEKLAKYIDLKIEISRMWRLNNVAIVPIVVSTTGVIPKQLHQSLKTLDLPPYTYQSLQKAAILNTCRIVRKFLQNENETVISTSHTRRSITAQTQLNGHLSSHNLTISSSHHITTLPG

SEQ ID NO: 31192 - protein, 1398 aa, Ochropleura plecta
MLTRSKTKKSIQANMPSVDDETSSVSSSSSPKSIFSSIVSSPPSYLSRSSRSSSILSSMAADVVSEANSANNPSPTAVSTTTRKKWSKEMNEFIWRNYLIITNLEADTKAYLTSLHHQFTEKFPNMKVSKQRIGDQRRAIVSKNLLPSTTLDAIRREVSNCLPTHSSDSQLESPPEILLFQTDTHHHSQSEPKRRMKWSNELNETLMKCYFRVTKMETDLTVWRKNLKEKFIECYPHLSHLSEQRISDQKRVIVNNNMIPEARLQILKSIVENELIETGSFQRQADSRGSNTEVGNLHTITNTDTLNIEIENREEPSQREHSGERTNVNNLGTDHPIHLNTQHTCQDRNPDIDEIFSQTLQYYKDTHPTERSYIPKQKTSKRLAKIVSYINTIILPEHVTSDTDFNALQTIIYCAAWTAAKANGSKISLTPVEDRSRLHQVYMPKWQKRLEHKIEVFRAKIGRLTHYMRGHRSRKLNKAVEAILKDYKTHTTHEQPNTQLEHFLDTLKQKLTVIKSRLNRYTKCTLRKTQNKQFRNNERQFYRSLKNSTTNQTTSNNNTHISFPTTEELQQFWAEIWENPVCHNAEAEWIKEEEAIHSNTEAMFFDQIEVGTFHDVLNRIHNWKAPGSDHIHNYWYKKFTHTHPHIFNHINNFIKDPTTLPSYITEGKTYMLPKDPSDSENPAKYRPITCLQTIYKIMTSCITNIIYKHLETQKILTEEQKGCKKLSQGCKEQLTIDAVIHKQVQRTKKDLHTMYIDYKKAYDSVPHSWLLEVLKIYKIHPQLIQFLGNIVEKWKTRLQLNTSTEIVQTEPIKIQRGIFQGDSLSPLWFCLALNPLSNKLNALIPGFQLQYNDIMTDTLNDQHNCKINHLLYMDDIKLYAASPDDLYELADVTEKFSNDIAMEFGIDKCKINSIKAGETYTHSYQMQTGVLIDSLDETGTYKYLGYIQGKQIMHKEIKTTLTKQFRHRLKTIFSTQINAKNTIKAINTYAIPILTYSFGIIKWNKTDLKNLQRIVNTTLTKHRRHHPRSCVQRLTLPRNEGGRGIIDITNLHNKQITTLRTYFDNKSSTSTLHKAIAYNDRKLTPLNLYDKTAQINEKQTDRQTKIAEWTQKSLHGRHRHDLNLPNVDKLASNEWLRRGELFPETEGFMIAIQDQVIETRNYRKHIMRVPQTIDVCRRCNSSSETIQHITGACKAVVQTDYKHRHDQIANIIHQKLAIKYNLISTPPVPYYKYQPEIVLENATHKLYFDRAIFTDRTIHYNRPDITLLDKHNKTAQIIDIAVPNTHNLQNTIAEKLSKYTDLKIEISRMWCLSNVTIVPIVVSTTGVIPKQLHQSLKTLDLPPYTYQNLQKAAILNTCRIVRKFLQNENESIVATTHTQPPVTTHTLSSSHPITTFTG

SEQ ID NO: 31193 - protein, 1398 aa, Ochropleura plecta
MLTRSKTKKSIQANMPSVDDETSSVSSSSSPKSIFSSIVSSPPSYLSRSSRSSSILSSMAADVVSEANSANNPSPTAVSTTTRKKWSKEMNEFIWRNYLIITNLEADTKAYLTSLHHQFTEKFPNMKVSKQRIGDQRRAIVSKNLLPSTTLDAIRREVSNCLPTHTSDSQLESPPEFLLPQTDTHHHSQSEPKRRMKWSNELNETLMKCYFRVTKMETDLTVWRKKLKEKFIECYPHLSHLSEQRISDQKRVIVNNNMIPEARLQILKSIVENEFIETGSFQRQADIRGSNAEVGNLHTITNTDTLNIEIENREEPSQREHLGERTDVNNLGTDHPIHLNTQHTCQDRNPDIDEIFSQTLQYYKDTHPTERSYIPKQKTSKRLANIVSYINTIVLPEHVTSDTDFNALQTIIYCAAWTAAKANGSKISLTPLEDRSRLQQVYLPKWQKRLEHKLEVFRAKIGRLTHYMRGHRSRKLNKAVESILKDYKTHTTHEQPNTQLEHFLDTLKQKLTVIKSRLNRYTKCTLRKTQNKQFRNNERQFYRSLKNSTTNQTTSNNNTHISFPTTEELQQFWAGIWENPVCHNAEAEWIKEEEAIYSNTEAMYYDQIEVGTFHDVLNRIHNWKAPGSDHIHNYWYKKFTHTHPHIYNHINNFIKDPTTLPSYITEGKTYMLPKDPSDSSNPAKYRPITCLQTIYKIMTSCITNIIYKHLETQKILTEEQKGCKKLSQGCKEQLTIDAVIHKQVQRTKKDLHTMYIDYRKAYDSVPHSWLLEVLKIYKIHPQLIQFLGNIVEKWQTRLQLNTSTEVVQTEPIKIQRGIFQGDSLSPLWFCLALNPLSNKLNALIPGIQLQYNDTMTDTLTDQHNCKINHLLYMDDIKLYAASPDDLYELADVTEKFSNDIAMEFGIDKCKINSIKAGETYTHSYQMQTGVLIDSLDETGTYKYLGYIQGKQIMHKEIKTTLNKQFRHRLKTIFSTQINAKNTIKAINTYAIPILTYSFGIIKWNKTDLKNLQTIVNTTLTKHRRHHPRSCVQRLTLPRNEGGRGIIDITNLHNKQITTLRTYFHNKSSTSTLHKAIAYNDRKLTPLNLYDKTTQINEKQTDRQTKIAEWTQKSLHGRHRHDLNLPNVDKLASNEWLRRGELFPETEGFMIAIQDQVIETRNYRKHIMRVPQTIDICRRCNSSSETIQHITGACKAVVQTDYKHRHDQIANIIHQKLAIKYNLISTPPVPYYKYQPEIVLENATHKLYFDRAIFTDRTIHYNRPDITLLDKHNKTAQIIDIAVPNTHNLQNTIAEKLSKYTDLKIEISRMWCLSNVTIVPIVVSTTGVIPKQLHQSLKTLDLPPYTYQNLQKAAILNTCRIVRKFLQNENESIVTTTHTQLPVTTHTLSSSHPITTFTG

SEQ ID NO: 31194 - protein, 1413 aa, Noctua fimbriata
MLTRSKTKKSIQANMPAVDDETSPVSSSSSPKSIFSSIASSPPSYLSRSSRSSSLLSPMTVEVVSEASLASNPSPTAVSTTTRKKWSKEMNEFIWRNYLIITNLEYDTKAYLTSLHHQFIEKFPNMKVSKQRIGDQRRAIVFKKLLPSTTLDTIRLEVSNHLRTHNSVLELQSPPEFPTSQTDSQPHSQSEPKRRMKWSNELNETLMKCYFRATKMETDMTVWRKNLKEKFIECYPNLSHLSEQRISDQKRVIVNNSMIPVARLQVLKSIVEKELFETESFQRQVDSRMSNTDVENVHLHTNTETINIDIENIEPPQTENIGVGIDDGNINNLGPEHPIHLNTQHTSLVRNPEIDEIFSQTLQYYKDTQPTERSYIPKQKSSKKLANIVSYINKVILPEQVTSDTNFNHLQTVIYCAAWTAAKANGSKISLAPPVDRSSRLQQAHKPKWQKRLENKIESIRAKIGRLTQYIQGVRSRKLIKAVEIILKDYRIHTSHEQPNTQLEHFLDTLKQKLTVVKSRLNRYTKCTQRKTQNNQFRNNEKQFYRSLNKSTTNETISDNNTNTAFPTTEELQQFWAGIWESPVYHNTEAEWIKGEQVIQTNTEAMIFDHVEVATFHDVLTKIHNWKAPGSDNIHNYWYKKFTHIHPHIFNHINNFINDPTTIPTYITEGKTYMLPKDPSDSANPAKYRPITCLQTVYKIMTSCISHIIYKHLETQKILTEEQKGCKKLSQGCKEQLTIDAVIHRHVQRTKKDLHTMYIDYRKAYDSVPHSWLLEVLNIYKIHPRLINCLGTIVEKWKTRLQLNTSTGTVETEFIKIQRGIFQGDSLSPLWFCLALNPLSNKLNALLPGYQLQYSDTMTDILTDQHYCKVNHLLYMDDIKLYASSPDDLYELADVTEQFSKDIAMEFGIDKCKINSIRAGKTYTHSYQMQTGATIDSLDETGTYKYLGYIQAKQILHKEIKTKLTKQFKHRLKTIFNTQINAKNTIKAINTYAIPILTYSFGIINWNKTDLKNLQRIINTTLTKHRRHHPRSCVQRLTLPRNDGGRGIIDITNLHNKQITTLRKYFENKSSTSTLHKAIAYNDKKLTPLNMYDRTTQSNEQQTDRQTKIAEWTQKSLHGKHRHDLNLPNVDKLASNEWLKRGELFPETEGFMIAIQDQVIETRNYQKHIMRVPQTVDICRRCNSSSETIQHITGACKAIVQTDYKHRHDQIANIIHQKLAIKYNFISTPPVPYYKYQPETVLENATHKLYFDRGIFTDKTIHYNRPDITLLDKCNKTALIIDIAVPNTHNLQNTIAEKLSKYVDLKIEISRMWRLNNVAIVPIVLSTTGVIPKQLHQSLKTLDLPPYTYQSLQKAANLNTCRIVRKFLQNENDTVISTSHTRPSITAQTQVNGHSSSHNLTLSSSHHITTLPG

SEQ ID NO: 31195 - protein, 1409 aa, Apamea monoglypha
MITRSKTKHLIQANKPSADDETSPVTSSSSPRSIFSSIVSSPPSYLSRSLRSSSSSPMSVDVVSEASTAINPSPATVTTNTRKKWSKDMNQFIWRTYLILTNLDTETNSYLTSLHQQFIIRFPQMNVSKQRVGDQRRPIVHKKILSATTLEKIRLEVSRELQTDTTNLDTHQLNTDQSNIHLQSGSKSRMRWSNEMNETLIKCYFITTKMETDMTVWRKKLREMFIEFYPQLSYLSEQRISDQKRVVLNNKMITEARLQDLKMYAENTLNEANPYRQTEYHNSLIVRNNTPTQVSTNNNTETAYFNNNQTHTQETEVGNEPNFLNCIDLGALTSTIINTEHNTTNGDISQERNQELEETFSHTLHHFTNVHPTKRSYIPKQKPSKKFAQIVSYINNVILPKYVNADTDYETLQTVIYTAAWTAAKTNGSKLSHITPDSTTYIYQKNKKPKWQKRLELRIKDLRIKTGRLTAYIQGNRGWRLVREVQTILENYRIHSTHEEPNTQLTHFLDTLKQKLTLVNSRLNRYNNCTLRKIQNNKFRNNEKQFYRTLKNSTTNQTATSSNENNTNHSLTSVDALQQFWSRIWERPICHNTEAEWVKIETENHIHTEQMEFDQVPIETFHDVLQKLHNWKAPGSDYIHNFWYKKLTYTHPYLYNYINTFITNPTTMPTYIAEGITYMIPKDSNDSANPAKYRPITCLQTIYKIITSCITQIIYKHLESNSILSEEQKGCRKFSQGCKEQLTIDSVILKQVQRKKKDLYTMYIDYKKAYDSVPHTWLIEILHIYKINPQVITFLNNTITQWTTRLHLTTSTGIVESESIKIQRGIFQGDSLSPLWFCLALNPLSNKLNSLMPGYKLNYNDTIDDIRTDRHDCKINHLLYMDDIKLYAASPEDLNELANATDKFSNDIGMDFGIDKCKINSVRTGQTYEHSYTTQSGETIDSLDENGTYKYLGYIQAKQIKHKTIKNKLTQQFKHRLKSILNTQLHSKNTIKAINTYAIPVLTYSFGIISWTKTELKNLQRVINTSLTKYRKHHPRSCVQRLTLPRKEGGRGIIDITNLHNKQISILRKYFNTKSTMSTLHKAIVYNDRKLTPLNMSDKTTQMNEKQTDRQTKISEWTQKSLHGRHRHDLCQPNVDKLASNEWLRRGDLFPETEGFMTAIQDQIIETRNYQKHIMRIPISTDICRRCHSSSETIQHITGACKAIVQTDYKHRHDQIANIIHQKLAIKFKLITTPSVPYYKYTPETVLENTTHKLYFDRAILTDKTTHYNRPDITLLDKINKTAQIIDIAVPNTHNLQNTIAEKLSKYIDLKIEISRMWRLGSVAIIPVVLSTTGVIPKQLHQSLKTLDVAPSTYQTLQKAAILNTCRIVRKFLQNDNDAQIAHPQTSFTTATQSEHIISPRHISSSIIT

SEQ ID NO: 31196 - protein, 1404 aa, Ochropleura plecta
MLTRSKTKKSIQANMPSADDETSSVSLSSSPKSIFSSIASSPPSYLSRSSRSSSILSPMAADVVSEASLANNPSPIAVSTTTRKKWSKEMNEFIWRNYLIITNLETDTKAYLTSLHHQFTENFPNMKVSKQRIGDQRRAIVSKNLLPSTILDTIRLEVGNHLKTQNNDPALQSPPEFRSSQPESQAEPKRRMKWSNELNETLMKCYFRVTKMETDMTVWRKNLKENFIEFYPQLSHLSEQRISDQKRVIVNNNMISEARLQILKKTVENELFETESFQRQADNITSNTDAVNVHLHTNTEILNIDIRSIEPSQTDNVGIGIDDDNFNNVEQIIHLNTQQTDLVINPEIDEIFSQTLQYYKDTLPTERSYIPKLKSSKKLANIVSYINKVILPEQVTSETNFNHLQTVIYCAAWTAAKANGSKIYLSSPVESSRLQQVYKPKWQKRLEKKKEALRAKIGRLTQYIQGHRSRKLIKAVETILKDYRTHTLHEQPNTQLEHFLDTLKQKLTVVKSRLNRYTKCTLRKTQNNQFRNNEKQFYRSLKQSTTNETTPNTHTAFPTTEELQQFWAGIWENAVCHNTEAEWIKAEQAFHINTETMITDHIEIATFHDVLTKIHNWKAPGSDYIHNYWYKKFTHIHPHIFNHINNFIKDPATIPTYIMEGKTFMLPKDPNDPANPAKYRPITCLQTIYKIMTSCISHIIYNHLETHKILTEEQKGCKKLSQGCKEQLTIDAVIHKHVQRNNNDLHTMYIDYKKAYDSVPHSWLLEVLKIYKIHPQLINCLGNIIEKWKTRLQLNTSTGIVQTELIKIQRGIFQGDSLSPLWFCLALNPLSNKLNSLLPGYQLQYNDTMTDILTDQQYCKVNHLLYMDDIKLYASSPDDLYELADVTEQFSNDIAMEFGIDKCKINSIRAGKTYTHSYQMQTGATIDSLDETGTYKYLGYIQAKQIMHKEIKTKLTKQFKHRLKTIFNTQINAKNTIKAINTYAIPILTYSFGIIKWNKTDLQNLQRIINTTLTKHRRHHPRSCVQRLTLPRNDGGRGIIDITNLHNKQITTLRTYFKNKSSISTLHKAIAFNDKKLTPLNMYDNTTQSNEQQTDRQTKIAEWTQKSLHGRHRHDLNLPNVDKLASNEWLRRGELFPETEGFMIAIQDQVIETRNYQKHIMKVHQTVDICRRCNSSSETIQHITGACKAIVQTDYKHRHDQIANIIHQKLAIKYNLISTPPVPYYKYQPETVLENATHKLYFDRGIFTDKTIHYNRPDITLLDKSKKTAQIIDIAVPNTHNLQNTIAEKLAKYTDLKMEISRMWHLNNVSIIPIVLSTTGIIPKQLHQSLKTLDLPPYTYQSLQKATILNTCRIVRKFLQIQNETVTSTSRTRRPITAQSQLNGQSSSHNPTISSSHRITTLSG

SEQ ID NO: 31197 - protein, 1377 aa, Spodoptera frugiperda
MITRSKNKNKSTMQANVPPTDVDTSTVSLSSSPRSIFSSITPSSLSITSRSLRSSTSSTRSVDVVAEATSAKNSSSAAGSKNTRKKWTKEMNEFIWRTYLIITNLETDTNAYLNTLHIQFTQQFPDMVVSRQRIGDQRRAIINNKLLPTTTLDAIRLEVRNYLQTQNRTMHQDQNQSQHLTIPQVDPLTHTHSHSKTRMKWSNELNETLIKCYFEVTKMETDMTVWRKNLKEKFVECYPHLSHLSEQRISDQKRVIINNKMISDTRMQILKLTVEQKLRESGTVAPDRLNNSSSHTSTSNIHSASQIHIENTYTQPMTLESAEFSILQETYDNNIIEPQLTHTTENYERNPEIDQQFLEALQYFTDVHPTNRCYLPKQKTSKKLAQIVDYINKVILPEHVSTYTDFNQLQTIIYSAAWTAAKVNGSRVTLSYAQDQINLRKDYKPKWQKRLERKLDTIRAKIGRLTYYMQGHRSRKLEKEVNRILRDYRTHTIHEEPNTQLTHFLDTLKQKLVVIKSRLCRYTKCTLRKTQNNQFKTNEKQFYRTLKNLTTNNTLPNNTTHTTFPTQESLQQFWAGIWENSVCHNNEAEWIKAEITEHNNIQQMPFEQIDIQTFHNALNKAHNWKAPGSDHIHNYWYKKFTTIHPHLYNHINDFIKDPINMPSYISEGITYMLPKDPNDTVNPAKYRPITCLQTIYKIMTSCLTQIIYKHIDSQKILTEEQKGCRKFSQGCKEQLIIDSVILKDVQRHKKDLYTMYIDYKKAYDSVPHSWLLQILNIYKIHPHIIYFLENIIRTWQTRLYLNTPTGTIATESIKIQRGIFQGDSLSPLWFCLALNPLSNKLRSLESGIQFQYRESMSTVQTDNENCKINHLLYMDDIKLYTTTPEDLDLLADTTERFSTDIKMDFGIDKCKINSVKAGKTYTHSYQLQSGENIESMDENGTYKYLGYIQSKQILHKQIKSQLTKQFKHRLKVICNTQLNSRNTIKAINTYAIPSLTYSFGIINWTKTELQNLQRNINTTLTKHRRHHPRSCVQRLTLPRNDGGRGIIDITNLHNKQITTLRTYFFNRSTVSNLHRAIVQSDKKLTPLNMADQATQNNEKQTDRQTKISEWIQKSLHGRHYHDLSQPNVDKVASNEWLRRGELFPETEGFMIAIQDQVIETRNYQKHIMRIPIATDTCRRCNSAPETIQHITGACKSIVQTDYKHRHDQVANIIHQKIALKYNLISTPPVPYYKYQPETVLENSSHKLYFDRAILTDKTTHYNRPDITLIDKTNKTAQIIDIAIPNTHNLQNTIAEKLSKYTDLKIEITRMWRLNSVTIVPIVLSTTGVIPKQLHQSIKTLDLPSYTYQNLQKAAILNTCHIVRKFLSETDNVSFTRT

SEQ ID NO: 31198 - protein, 1411 aa, Eupsilia transversa
MITRSKTKQLIQASRPSADDETSSVSSSSSPRSIFSSIVSSPPSYLSRSLRSSSSSPISVDVVSEATTAINPSPATVTTNTRKKWSEDMNQFIWRTYLIITNLETETNSYLTSLHQQFINRFPQMNVSKQRVGDQRRAIVHNKLLSVTTLDKIRLEVSRNLQTDTTNLDTHTRTPAQLNTYQYNTHLQSEPKRRMRWSNEMNETLIKSYFIATKMETDMTVWRKKLREMFIEFYPQLSHLSEQRISDQKRVVLNNKMISDERLQDLKTYAENTLNQPNPYRQLERHNLLIAADNTPTQAPTNNTETAHGNNQTHTQETEVGSEPNFLNTIDVGALTTIINTEHNTTNVEISQERYLELEETFSHTLQHFTSINPTKRNYIPKQKSSKKLAQIVSNINNVILPKYVNADTDFETLQTVIYSAAWTAAKTNGSKLSYITSERTAYINQKNKKPKWQKRLELRVKDLRTKIGRLTAYMQGNRGWRLVREVHTILENNRIHSTHEEPNTQLTHFLDTLKQKLTLVNSRLNRYNNCTLRKFQNNKFRNNEKQFYRTLKNSTTNHTEPSNSENNTNHSLPSVRELQRFWSGIWERPICHNTEAEWIKIETEKHMHTEQMEFEQVPIDTFHDVLQKLHNWKAPGSDYIHNFWYKKFTYTHPFLYNYINTFIKNPTTMPVYIAEGITYMIPKDSNDSANPAKYRPITCLQTIYKIITSCITQIIYKHLDSNSILSEEQKGCRKFSQGCKEQLTIDSVILKQVQRKKKDLYTMYIDYKKAYDSVPHTWLLEILNIYKINPQIIAFLNNTITQWTTRLHLTTPTGIAETEHIKIQRGIFQGDSLSPLWFCLALNPLSNKLNSLMPGYNLKYNDTTDGIRTDRHDCKINHLLYMDDIKLYASSPEDLEELANATDTFSSDIGMEFGIDKCKINSVRAGQTYEHSYTTQSGETIDSLDEHGTYKYLGYIQAKQIKHKAIKNKLTQQFKHRLKSILNTQLHSKNTIKAINTYAIPVLTYSFGIISWTKTELKSLQRVINTSLTKYRKHHPRSCVQRLTLPRKEGGRGIIDITNLHNKQISTLRKYFNTKSTTSTLHKAIVYNDQKLTPLNMSDKTTQINEKQTDRQTKISEWSQKSLHGRHRQDLCQPNVDKLASNEWLRRGDLFPETEGFMTAIQDQVIETRNYQKHIMRVPLPTDICRRCHSSSETIQHITGACKAIVQTDYKHRHDQIANIIHQKLAIKYKLITTAPVPYYKYTPETVLENTTHKLYFDRAILTDRTTHYNRPDITLLDKINKTAQIIDIAVPNTHNLQKTIAEKLSKYTDLKIEISRMWRLGSVAIIPVVLSTTGVIPKQLHQSLRTLDVAPSTYLTLQKAAILNTCRIVRKFLQNDNDAQISHAQTSFTTTTQNQNIISPSHIISSLIT

SEQ ID NO: 31199 - protein, 1414 aa, Phlogophora meticulosa
MITRSKTKKDIQANMPSVDDETSTTSSSASPRSIFSSIASSPPSYLSRSSRSSSTSSPTSVDVVSEAILANKPSPTADIKNTRKKWSIEMNEFIWRTYLIITNLESDKNAYLTSLHQQFIEKFPNMKVSKQRIGDQRRAIVSKKLLPSITLDSIRLEVIHNLQTPNNDLQLQPQTPQEILTFQTNTQPYSQSEPKRRMKWSNELNETLMKCYFRATKLETDMTIWRKNLKEKFIECYPHLSHLSEQRISDQKRVIVNNSMISETRLQILKSIVENELLETASFNWQSDSIRRTTENVHSQPPQNTLNIDIENIEMSQTQQIGVETEGDNLNAIELEHPVHSNTQTSQERNLQIDEIFSETLQYYRDNYPTERSYIPVQKSSKRLANIVSYINKVILPEQVTQDTEFNHLQTIIYCAAWTAAKANGSKISLSPPEYRNRLQQDRKPKWQKRLDHKIEVIRAKIGRLTHYMQGHRSKKLTKEVNTILRDYKTHTSHEEPNTHLTHFLDTLKQKLTVVKSRLDRYTKCTLRKTQNNQFRNNEKLFYRKLKASTTNHTTPSNNTNTVWPATDELQQFWAGIWENPVSHNTEAEWIKEEEAYQTNVEAMDFDQVDVETFHDVLQKIHNWKAPGSDHIHNYWYKKFTHIHPYLYNCINNFIKDPNIIPSYITEGKTYMLPKDPNDTANPAKYRPITCLQTIYKILTSCITQIIYKHLETQHILTEEQKGCRKFSQGCKEQLTIDAVILKHVQRTKKDLCSMYIDYRKAYDSVPHSWLLKVLSLYKIHSQLINFLGNILDKWQTRLHLNTSIGIVETEHIKIQRGIFQGDSLSPLWFCLALNPLSNKLNALKPGYQLQYIDTTTDILTDQQTCKLNHLLYMDDIKLYASSPDDLYELANATEQFSNDIAMEFGIDKCKINSIRAGKTYSHSYYMQTGDTIESLDENGTYKYLGYIQAKQILHKEIKATLTKQFKHRLKTICHSQINARNTIKAINTYAIPVLTYSFAIINWNKTELKHLQRVINTTLTKHRRHHPRSCVQRLTLPRNEGGRGIIDITNLHNKQITILRTYFYTKSPISTLHKAIAFNDKKLTPLNMFEKTTQSNEQQTDRQTKIAEWTKKSLHGRHRHDLNQPNVDKLASNEWLRRGELFPETEGFMIAIQDQVIETRNYQKHIMRVPQTIDRCRRCNSSSETIQHITGACKAIVQTDYKHRHDQLANIIHQKLAIKYKLIPTPPVAYYKYQPETVLENSTHKLYFDRAILTDKTTHYNRPDITLLDKINKTAQIIDIAVPNTHNLQNTIAEKLSKYIDLKIEISRMWRLSNVTIVPIVLSTTGVIPKQLHQSLKTLDLPPYTYQTLQKAAILNTCRIVRKFLQNDNDTSIVSSHTRAAANARTQSHELTQSPSQNPNTPSSHHNITNSQG

SEQ ID NO: 31200 - protein, 1414 aa, Xestia xanthographa
MLTRSKTKKNIQANMPAADDETSPVSSSSKPKSIFSSIASSPPSYLSRSSRSSSILSPMTVEVESEANLANNPSPTAVTTTRKKWSKEMNEFIWRNYLIITNLESDTKAYLTSLHHQFIAKFPNMKVSKQRIGDQRRAIVSKKLLPSTTLDTIKLEVSNHLRTHNNDLELHFPPEIPSSQTDSQPHSQSEPKRRMKWSNELNETLMKCYFRVTKMETDMTVWRKNLKEKFIECCPHLSHLSEQRISDQKRVIVNNSMIPESRLQILKSFVENELCETESFQRQVDNIISNIDVGNIHIDTNTETLNIDIENIGPSETENIGVGIDDGNTNNLGQEHPIHLNTQHTSPIRNPEIDEIFSQTLQYYKDTHPTERSYIPKQKSSKKLANIVSYINKVILPEQVTSDTDFNHLQTVIYCAAWTAAKANGSKNTLAPPVDSSSRPQQAHKPKWQKRLENKIESIRAKIGRLTQYIQGVRSRKLIKAVEIILKDYRIHTLHEQPNTQLEHFLDTLKQKLTVVKSRLNRYTKCTLRKTQNNQFRNNEKQFYRSLRKSTTNETTSNNNTHTAFPTTEELQQFWAGIWENPVCHNTEAEWIKAEQVIHTNTEAMIFDQVEVATFHDVLTKIHNWKAPGSDYIHNYWYKKFTHTHPHIFNHINNFIKDPATIPTYITEGKTYMLPKDHSDSANPAKYRPITCLQTIYKIMTSCISHIIYKHLETQKILSEEQKGCKKLSQGCKEQLTIDAVIHRHVQRTKKDLHTMYIDYRKAYDSVPHSWLLEVLKIYKIHPQLIKFLGTILEQWKTRLQLNTSTGTVETELIKIQRGIFQGDSLSPLWFCLALNPLSNKLNALIPGYQLQFSDTMTDILTDQQYCKVNHLLYMDDIKLYASSPDDLYELADVTEQFSKDIAMEFGIDKCKINSISAGKTYTHSYQMQTGATIDSLDETGTYKYLGYIQAKQIQHKEIKTTLTKQFKHRLKTIFNTQINAKNTIKAINTYAIPILTYSFGIIKWNKTDLKNLQRIINTTLTKHRRHHPRSCVQRLTLPRNDGGRGIIDITNLHNKQITTLRTYFDNKSSTSTLHKAIAYNDKKLTPLNMYDRTTQSNEQQTDRQTKIAEWTQKSLHGRHRHDLNLPNVDKLASNEWLKRGELFPETEGFMIAIQDQVIETRNYQKHIMRVPQTVDICRRCNSSSETIQHITGACKAIVQTDYKHRHDQIANIIHQKLAIKYNFISTPPVPYYKYQPETVLENATHKLYFDRGIFTDKTIHYNRPDITLLDKRNKTAQIIDIAVPNTHNLQNTIAEKLSKYIDLKIEISRMWCISNVAIVPIVVSTTGVIPKQLHQSLRTLDLPPYTYQSLQKAAILNTCRIVRKFLQNENKSVVTTTNTEPRVTAHTQFTRQRHSSSQNSVISSFHHNITFPG

SEQ ID NO: 31201 - protein, 1272 aa, Spodoptera exigua
MITRSKVKYTMQAKVPPADDESSVVSLSSSPRSTFSSITPSSLSFTSRSLRSSISSTMSADVVSEATLAKNPSSAAGTKSTRKKWSKEMNEFIWRTYLIITNLETETNAYLSILHSKFIQQFPDMVVSKQRVGDQRRAILNNQLLPTSTLDAIRLEVSIYLQNENYTSQTTQTLITTQIDPLIHRQSKTRMKWSNELNETLIKCYFIATKMETDMTVWRKNLKDKFTQHFPHLSHLSEQRISDQKRVIMNNKMISEIRLQMIKLTAQQELDQIGSISIGRLNSPNSYQNTSSPYLEQQTNINIANKEPMTSVLQDTNITQELNDNSSDQPRANTDTHTQNIPRNCEIDELFAQTLQFYSETHPTSRCYIPKQRTSKKLAKIVDYINQVILPDYVIRDIEFPELQTIIYSAAWTAAKVNGSRINLSSTQDRNNPRKDYKPKWQKRLEHKIDAIRAKLGRLTHYIQGHRSRKLEIEVNKILRDYRIHTTHEAPNIHLAHYLDTLKQKLAVYKSRLNRYIKCTLRKTQNNRFRNNEKQFYRTLKKSTTNHTTSSNTANTSFPTGENLRSFWAGIWQNPVCHNAEAEWIRAEERKHENITQMQFEQVDIETFHNVINKAHNWKAPGSDHIHNYWYKKFTTIHPHLFNHINNFIKYPTNIPTYITEGITYMLPKDLNDPANPAKYRPITCLQTIYKIMTACITHIIYKHIDTQKILTEEQKGCRKFSQGCKEQLIIDSIILKDIQKHKKDLYTMYIDYKKAYDSVPHSWLLHILKIYKIHPDISHFLEVIISKWQTQLHLNTPIRTITTEFIKIQRGIFQGDSLSPLWFCLAINPLSNILNSLQSGYQLQCRETITDTESNQQLCKINHLLYMDDIKLYAASQEDLYQLADNTEIFSSDIAMEFGIDKCKINSIKAGKTYTHSYQLQTGDTIESLDEGGTYKYLGYIQAQQILHKEIKSQITKQFKHRLKIICNTELNARNTIKAINTYAIPTLTYSFGIINWTKTELQTLQRNINTTLTKYRRHHPRSCTQRLNLPRNDGGRGIIDITNLHNKQITTLRSYFFNKSKTLILHQAIVQNDRKLTPLNMSDPETQINEKQIDRQTKIAEWAQKSLHARHYHDLNQPNVDKSASNEWLRRGELFPETEGFMMAIQDQVIETRNYQKHIMRTTIPTDTCRRCGSASETIQHITGACKAIVQTDYKHRHDQVANIIHQRLAIKYNLIPSSPERENGLRLVFVVRYFTTNTNLKPFLKTYPINYITTELFSLTKPHISIDRT

SEQ ID NO: 31202 - protein, 1431 aa, Eilema sororculum
MVNAGLCHGGPFMSPASRGNNMLELENHKRKYNLRPLPGGRRDPTRNDDCRAQCIRINDNAVTNDQISLAGSSPTLFSSIPSSNQSFCTSPVPSTTESSTTYHSVQLVNVAQETHQVNEPVPTTSVVNKRKRWTYEMNEFILRTYLQLTNLETDTNSYLPPLHTKFLEKYPTMEVSRQRIGDQRRAIVRRKLLPQDSIDTIYNEVRTELRNIQKQVTRHSTQYSTQHFTRHSTQDPTQLSTQHFTQSNTGAKTQPQQRLRWTTEYNEAIIRSYFKVTELETNKTLYRKNLHQEFIRLYPDLAHLTEQRIADQRRLIENNRYISKTRLEEIKKEVTDELLLTHRNSDIGYVNIEQTQTVRLESYETENNCNTFTNIEVERLLEETTEPTTHPTLTLEQNCKIEETFSQALQFYTNTDPTARNYIPKQKTAKSFTDTVNYINNFILPAYLNSDTSFETLQTIIYCAAWTAAKHNGAKLSLAPTEVTGQIQKDYKPKWQRRLERKILEYRAKIGRLTQYIEGNRNRKLVKQVNKTLEQYKIHTSHEEPNTQLTHFLDTLKQKLTVIKSRLKRYTACTQRKSQNNQFCNNEKQFYRKLKQSTTNRHTPNNTGSITNTPQLDDLQKFWSDIWEKPVRHNTEAEWIKTEKSSQANTSEMHFECVPIEIFQTTIQKSHNWKAPGSDYLHNYWYKKFTKSHPYLHNYINSFIIDSSKMPAYITDGVTYMLPKDPKDTANPAKYRPITCLQTIYKIITSCLTHMIYKHLETNNILTEEQKGCRKFSQGCKEQLTIDSVIHRQVQRSKKDLCTMYIDYKKAYDSVPHTWLKEVLQIYKVNPQIITFLSNVMERWTTHIHLNTRTGTVTTDSIKIKRGIFQGDSLSPLWFCMALNPLSKHLNSLDSGYLLDYLENPTDRLTEKRTCKINHLLYMDDIKLYATTPDDLDILAQFTETFSNDISMEFGLDKCKINSVILGKIHKHSYEVQTGETIDSLDENDTYKYLGYNQSKQIHHKETKYKLTHQFKHRLNSILNTQLNSRNLIKAVNAYAIPILTYSFGIINWTKTELKNLQRIINTTMTKHRKHHPRSCLQRLTLPREEGGRGIIDVINLHNKQITILKSYFSSKTTTSTLHKAIAYNDQKHTPLNMHDWTTQNNETIKSIQTKIAEWTQKSLHGRHRQDLCQPHVDKKASNEWLRGGYLFPETEGFMMAIQDQVIETRNYQKHIIRNHLVSDVCRRCNSSSETIQHITGACKAIVQTDYKHRHDQVANIIHQKIALKYNLITSTPLPYYKYGAETVLENQTHKLYFDRAILTDKTIHYNRPDITLIDKQNNTAQLIDIAVPNTHNLQTTISEKLSKYVELKMEVTRMWRLNNATIIPIVLSTTGVIPAQLHQSIKTIDLPCSIYKILQKAVILNTCRIVRKFLNNDNTSNTHSPTQTHQ

SEQ ID NO: 31203 - protein, 1414 aa, Phlogophora meticulosa
MITRSKTKKDIQANMPSVDDETSTTSSSASPRSIFSSIASSPPSYLSRSSRSSSTSSPTSVDVVSEAILANKPSPTADIKNTRKKWSIEMNEFIWRTYLIITNLESDKNAYLTSLHQQFIEKFPNMKVSKQRIGDQRRAIVSKKLLPSITLDSIRLEVINNLQTPNNDLQLQPQTPQEILTFQTNTQPYSQSEPKRRMKWSNELNETLMKCYFRATKLETDMTIWRKNLKEKFIECYPHLSHLSEQRISDQKRVIVNNSMISETRLQILKSIVENELLETASFNWQSDSIRRTTENVHSQPPQNTLNIDIENIEMSQTQQIGVETEGDNLNAIELEHPVHSNTQTSQERNLQIDEIFSETLQYYRDTYPTERSYIPVQKSSKRLANIVSYINKVILPEQVTQDTEFNHLQTIIYCAAWTAAKANGSKISLSPPEYRNRLQQDRKPKWQKRLDHKIEVIRAKIGRLTHYMQGHRSKKLTKEVNTILRDYKTHTSHEEPNTHLTHFLDTLKQKLTVVKSRLDRYTKCTLRKTQNNQFRNNEKLFYRKLKASTTNHTTPSNNTNTVWPATDELQQFWAGIWENPVSHNTEAEWIKEEEAYQTNVEAMDFDQVDVETFHDVLQKIHNWKAPGSDHIHNYWYKKFTHIHPYLYNCINNFIKDPNIIPSYITEGKTYMLPKDPNDTANPAKYRPITCLQTIYKILTSCITQIIYKHLETQHILTEEQKGCRKFSQGCKEQLTIDAVILKHVQRTKKDLCSMYIDYRKAYDSVPHSWLLKVLSLYKIHSQLINFLGNILDKWQTRLHLNTSIGIVETEHIKIQRGIFQGDSLSPLWFCLALNPLSNKLNALKPGYQLQYIDTTTDILTDQQTCKLNHLLYMDDIKLYASSPDDLYELANATEQFSNDIAMEFGIDKCKINSIRAGKTYSHSYYMQTGDTIESLDENGTYKYLGYIQAKQILHKEIKATLTKQFKHRLKTICHSQINARNTIKAINTYAIPVLTYSFAIINWNKTELKHLQRVINTTLTKHRRHHPRSCVQRLTLPRNEGGRGIIDITNLHNKQITILRTYFYTKSPISTLHKAIAFNDKKLTPLNMFEKTTQSNEQQTDRQTKIAEWTKKSLHGRHRHDLNQPNVDKLASNEWLRRGELFPETEGFMIAIQDQVIETRNYQKHIMRVPQTIDRCRRCNSSSETIQHITGACKAIVQTDYKHRHDQLANIIHQKLAIKYKLIPTPPVAYYKYQPETVLENSTHKLYFDRAILTDKTTHYNRPDITLLDKINKTAQIIDIAVPNTHNLQNTIAEKLSKYIDLKIEISRMWRLSNVTIVPIVLSTTGVIPKQLHQSLKTLDLPPYTYQTLQKAAILNTCRIVRKFLQNDNDTSIVSSHTRAAVNARTQSHELTQSPSQNPNTPSSHHNITNSQG

SEQ ID NO: 31204 - protein, 1385 aa, Mamestra brassicae
MITRSKTKKHIQAHRPLSEDGPSSTSSPSSPRSIFSSIASSPPSYILRSSRASSILSTGSVDVVSEATTAKNPSPATGITNTRKKWSKDMNEFIWRTYLIITNLETETNSYVTSLHQQFINKFPQMNVSKQRVGDQRRAIINNKLISDTTLEKIRLEVSSELQTEIVNLNTPIPIRSQSEIDQNNTHIQSGLKSRIKWSNEMNETLINCYFIVTKMETDMTVWRKKLREMFIDFFPELTHLSEQRISDQKRVVLNNKMIPEARLQDLKMHAENTLNQPNQYGQSEYHNPPTENTLTQSLTINNTETACANQTHESQIVIESNSLNSIDVEALTSTIINTEHNTTHAEMNEERSLELEKTFSHTIQHFKKIHPTKRNYIPKQKPSKKLAQIVSYINNVILLKHINEDTDFETLQTVIYSAAWTAAKTNGSKLSLVTSENTANILQKYKKPKWQRRLELRVRDLRTKIGRLTAYMQGHRGWKLVREVNTIIENYKTHSTHEEPNTQLTHFLDTLKQKLTLVNSRLNRYNKCTLRKIQNNNFNNNEKQFYRTLKQATTNQSVPSESQGNSIHRLPPIDNLRQFWSGIWERPICHNAAAEWITKETNNYSHTVQMESAHIPIETFHDVLQKLHNWKAPGSDYIHNFWYKKLTHIHPYLYNYINTFIQNPTTMPAYIAEGITYMIPKDISDTSNPAKYRPITCLQTIYKIVTSCITHIIYKHLETNEILSEEQKGCRKYSQGCKEQLTIDSVILKQVQMKKRDLYTMYIDYKKAYDSVPHTWLLEVLQIYKINPIIVTFLSNAMSHWMTRLHVTSPTGIVETEPIKIQRGIFQGDSLSPLWFCLALNPLSNRLNTVTPGYNLPFNDTTADIETDRQNFKINHLLYMDDIKLYASTPDDLFELAETADQFSTDIRMEFGIDKCKINSVKEGKPYHHSYTIQTGETIDSLNVNETYKYLGYIQDRQIKHKDIKNKLIQQFKHRLRSIFTTQLYSKYTVKAINTFAIPVLTYSFGIISWTKTDLKNLQRVINTTMTKHRKHHPRSCVQRLTLPRKEGGRGIIDITNLHNKQISTLRKYFNTKSATSTLHKAIVYNDRKLTPLNMHEKTTQINEKQNDTPTKILEWTQKSLHGRHRHDLCQPNVDKLASNEWLRHGDLFPETEGFMTAIQDQVIETRNYQKHIMRVPLSTDTCRRCHSSPETIQHITGACKAIVQTDYKHRHDQIANIIHQKLAIKYKFITTPPVPYYKYVPETVLENATHKLYFDRAILTDKTTHYNRPDITLLDKINKTAQIIDIAVPNTHNLQSTVAGNLSKYTDLKIELSRMWRLGNVSIIPVVISTTGVVPKQLHQSLKMLDIASSTYQTLQKAAILNTCRIVRKFLQNDNNADTFSIT

SEQ ID NO: 31205 - protein, 1413 aa, Noctua fimbriata
MLTRSKTKKSIQANVPAVDDETSPVSSSSSPKSIFSSIASSPPSYLSRSSRSSSLLSPMTVEVVSEASLASNPSPTAVSTTTRKKWSKEMNEFIWRNYLIITNLEYDTKAYLTSLHHQFIEKFPNMQVSKQRIGDQRRAIVSKKLLPSTTLDTIRLEVSNHLRTHNNELELQSPPEFPTSQTDSQPHSQSEPKRRMKWSNELNETLMKCYFRATKMETDMTVWRKNLKEKFIECYPNLSHLSEQRISDQKRVIVNNSMIPVARLQVLKSIVEKELFETESFQRQVDSRMSNTDVENVHLHTNTETINIDIENIEPPLTENIGVGIDDGNINNLGPEHPIHLNTQHTSLVRNPEIDEIFSQTLQYYKDTQPTERSYIPKQKSSKKLANIVSYINKVILPEQVTSDTNFNHLQTVIYCAAWTAAKANGSKISLAPPVDRSSRLQQAHKPKWQKRLENKIESIRAKIGRLTQYIQGVRSRKLIKAVEIILKDYRIHTSHEQPNTQLEHFLDTLKQKLTVVKSRLNRYTKCTQRKTQNNQFRNNEKQFYRSLKKSTTNETISDNNTNTAFPTTEELQQFWAGIWESPVYHNTEAEWIKGEQVIQTNTETMIFDHVEVATFHDVLTKIHNWKAPGSDYIHNYWYKKFTHIHPHIFNHINNFIKDPTTIPTYITEGKTYMLPKDPSDSANPAKYRPITCLQTIYKIMTSCISHIIYKHLETQKILTEEQKGCKKLSQGCKEQLTIDAVIHRHVQRTKKDLHTMYIDYRKAYDSVPHSWLLEVLNIYKIHPQLINCLGTIVEKWKTRLQLNTSTGTVETEFIKIQRGIFQGDSLSPLWFCLALNPLSNKLNALLPGYQLQYSDTMTDILTDQHYCKVNHLLYMDDIKLYASSPDDLYELADVTEQFSKDIAMEFGIDKCKINSIRAGKTYTHSYQMQTGATIDSLDETGTYKYLGYIQAKQILHKEIKTKLTKQFKHRLKTIFNTQINAKNTIKAINTYAIPILTYSFGIIKWNKTDLKNLQRIINTTLTKHRRHHPRSCVQRLTLPRNDGGRGIIDITNLHNKQITTLRKYFENKSSTSTLHKAIAYNDKKLTPLNMYDRTTQSNEQQTDRQTKIAEWTQKSLHGRHRHDLNLPNVDKLASNEWLKRGELFPETEGFMIAIQDQVIETRNYQKHIMRVPQTVDICRRCNSSSETIQHITGACKAIVQTDYKHRHDQIANIIHQKLAIKYNFISTPPVPYYKYQPETVLENATHKLYFDRGIFTDKTIHYNRPDITLLDKCNKTALIIDIAVPNTHNLQNTIAEKLSKYIDLKIEISRMWRLNNVAIVPIVLSTTGVIPKQLHQSLKTLDLPPYTYQSLQKAAILNTCRIVRKFLQNENDTVISTSHTRPSITAQTQVNGHSSSHNLTLSSSHHITTLPG

SEQ ID NO: 31206 - protein, 979 aa, Xestia c-nigrum
MNAYCTSRFHQVNKPKWQKRLEHKIEVIRAKIGRLTHYMQGHRSRKLTKAVETILKNYRTHTTHEQPNTQLEHFLDTLKQKLAVIKSRLKRYTKCTLRKTQNNQFRNNEKLFYRSLKKSTTNQTTSNNNTHTVFPTTNELHQFWAGIWENPVYHNAEAEWIKEEEVIHSNIESMSYDQVDIGTFHDVLKRIHNWKAPGSDYIHNYWYKKFTHTHPHLFNYINDFIKDPTTLPSYITEGKTYMLPKDPSDLSNPAKYRPITCLQTFYKIITSCITKIIYKHLETQKILTEEQKGCKKLSQGCKEQLTIDAVVHRQVQRIKTDLHTMYIDYRKAYDSVPHSWLLEVLKIYKVHPQLITFLSNIIEKWNTRLQLNTLTEIVETEPIKIQRGIFQGDSLSPLWFCLALNPLSNKLNALKPGYQLQYNETMTDVLTDQQCCKINHLLYMDDIKLYATSPEDLYELADVTEKFSNDIAMEFGIDKCKINSIKAGKSFTHSYQMQTGATIDSLDETGTYKYLGYIQAKQIMHKEIKTTLTKQFKHRLKTIFNTQINAKNTTKAINTYAIPILTYSFGIIKWNKIDLKNLQRIVNTTLTKHRRHHPRSCVQRLTLPRNEGGRGIIDITNLHNKQITTLRTYFDYKSSTSTLHKAIAYNDKKLTPLNMYDRKTQNNEQQTNRQTKIAEWTQKSLHGRHRHDLNLPNVDKLASNEWLRRGELFPETEGFMIAIQDQVIETRNYQKHIMRIPQTIDICRRCNSSSETIQHITGACKAVVQTDYKHRHDQIANIIHQKLAIKYNLISTPPVPYYKYQPEIILENATHKLYFDRGIFTDKTIHFNRPDITLLDKRNKTAQIIDIAVPNTHNLQKTIAEKLSKYTDLKIEISRMWCLSNVAIVPIVLSTTGVIPKQLHQSLKTLDLPAYTYQSLQKAAILNTCRIVRKFLQNENESVGTTTNTQPHTHTRSNTHRNSSSQDSIISSAHHITTG

SEQ ID NO: 31207 - protein, 1408 aa, Apamea monoglypha
MITRSKTKHLIQANKPSADDETSPVTSSSSPRSIFSSIVSSPPSYLSRSLRSSSSSPMSVEVVSEASTAINPSPATVTTNTRKKWSKDMNQFIWRTYLILTNLDTETNSYLTSLHQQFIIRFPQMNVSKQRVGDQRRAIVHKKLLSVTTLEKIRLEVSRELQTDTTNLDTHQLNTESNIHLQSGSKSRMRWSNEMNETLIKCYFITTKMETDMTVWRKKLREMFIEFYPQLSYLSEQRISDQKRVVLNNKMITEARLQDLKMYAENTLNEANPYRQTEYHNSLIVRNNTPTQVSTNNNTETAYFNNNQTHTQETEVGNEPNFLNCIDLGALTYTIINTEHNTTNGDISQERNQELEETFSHTLHHFTNVHPTKRSYIPKQKPSKKFAQIVSYINNVILPKYVNADTDYETLQTVIYTAAWTAAKTNGSKLSHITPESTTYIYQKNKKPKWQKRLELRIKDLRIKIGRLTAYIQGNRGWRLVREVQTILENYRIHSTHEEPNTQLTHFLDTLKQKLTLVNSRLNRYNNCTLRKIQNNKFRNNEKQFYRTLKNSTTNQTATSSNENNTNHSLTSVDALQQFWSRIWERPICHNTEAEWVKIETENHIHTEQMEFDQVPIETFHDVLQKLHNWKAPGSDYIHNFWYKKLTYTHPYLYNYINTFITNPTTMPTYIPEGITYMIPKDSNDSANPAKYRPITCLQTIYKIITSCITQIIYKHLESNSILSEEQKGCRKFSQGCKEQLTIDSVILKQVQRKKKDLYTMYIDYKKAYDSVPHTWLIEILHIYKINPQIITFLNNTITQWTTRLHLTTSTGIVESESIKIQRGIFQGDSLSPLWFCLALNPLSNKLNSLMPGYKLNYNDTIDDIRTDRHDCKINHLLYMDDIKLYAASPEYLNELANATDKFSNDIGMDFGIDKCKINSVRTGQTYEHSYTTQSGETIDSLDENGTYKYLGYIQAKQIKHKTIKNKLTQQFKHRLKSILNTQLHSKNTIKAINTYAIPVLTYSFGIISWTKTELKNLQRVINTSLTKYRKHHPRSCVQRLTLPRKEGGRGIIDITNLHNKQISILRKYFNTKSTMSTLHKAIVYNDRKLTPLNMSDKTTQMNEKQTDRQTKISEWTQKSLHGRHRHDLCQPNVDKLASNEWLRRGDLFPETEGFMTAIQDQIIETRNYQKHIMRIPISTDICRRCHSSSETIQHITGACKAIVQTDYKHRHDQIANIIHQKLAIKFKLITTPPVPYYKYTPETVLENTTHKLYFDRAILTDKTTHYNRPDITLLDKINKTAQIIDIAVPNTHNLQNTIAEKLSKYIDLKIEISRMWRLGSVAIIPVVLSTTGVIPKQLHQSLKTLDVAPSTYQTLQKAAILNTCRIVRKFLQNDNDAQIAHPQTSFTTATQSEHIISPRHISSSIIT

SEQ ID NO: 31208 - protein, 810 aa, Xestia xanthographa
MIFDQVEVVTFQDVLTKIHNWKAPGSDYIHNYWYKKFTHTHPHIFNHINNFIKDPPTIPTYITEGKTYMLPKDHSDSANPAKYRPITCLQTIYKIMTSCISHIIYKHLETQKILSEEQKGCKKLSQGCKEQLTIDAVIHRHVQRTKKDLHTMYIDYRKAYDSVPHSWLLEVLKIYKIHPQLIKFLGTIVEQWKTRLQLNTSTGTVETELIKIQRGIFQGDSLSPLWFCLALNPLSNKLNALIPGYQLQFSDTMTDILTDQQYCKVNHLLYMDDIKLYASSPDDLYELADVTEQFSKDIAMEFGIDKCKINSISAGKTYTHSYQMQTGATIDSLDETGTYKYLGYIQAKQIQHKEIKNTLTKQFKHRLKTIFNTQINAKNTIKAINTYAIPILTYSFSIIKWNKTDLKNLQRIINTTLTKHRRHHPRSCVQRLTLPRNDGGRGIIDITNLHNKQITTLRTYFDNKSSTSTLHKAIAYNDKKLTPLNMYDRTTQSNEQQTDRQTKIAEWTQKSLHGRHRHDLNLPNVDKLASNEWLKRGELFPETEGFMIAIQDQVVETRNYQKHIMRVPQTVDICRRCNSSSETIQHITGACKAIVQTDYKHRHDQIANIIHQKLAIKYNFISTPPVPYYKYQPETVLENATHKLYFDRGIFTDKTIHYNRPDITLLDKRNKTAQIIDIAVPNTHNLQNTIAEKLSKYIDLKIEISRMWCLSNVAIVPIVVSTTGVIPKQLHQSLRTLDLPPYTYPSLQKAAILNTCRIVRKFLQNENKSVVTTTNTEPRVTAHTQFTRHRHSSSQNSVISSSHHNTTFPG

SEQ ID NO: 31209 - protein, 1413 aa, Noctua fimbriata
MLTRSKTKKSIQANMPAVDDETSPVSSSSSPKSIFSSIASSPPSYLSRSSRSSSLLSPMTVEVVSEASLASNPSPTAVSTTTRKKWSKEMNEFIWRNYLIITNLEYDTKAYLTSLHHQFIEKFPNMQVSKQRIGDQRRAIVSKKLLPSTTLDTIRLEVSNHLRTHNNELELQSPPEFPTSQTDSQPHSQSEPKRRMKWSNELNETLMKCYFRATKMETDMTVWRKNLKEKFIECYPNLSHLSEQRISDQKRVIVNNSMIPVARLQVLKSIVEKELFETESFQRQVDSRMSNTDVENVHLHTNTETINIDIENIEPPLTENIGVGIDDGNINNLGPEHPIHLNTQHTSLVRNPEIDEIFSQTLQYYKDTQPTERSYIPKQKSSKKLANIVSYINKVILPEQVTSDTNFNHLQTVIYCAAWTAAKANGSKISLAPPVDRSSRLQQAHKPKWQKRLENKIESIRAKIGRLTQYIQGVRSRKLIKAVEIILKDYRIHTSHEQPNTQLEHFLDTLKQKLTVVKSRLNRYTKCTQRKTQNNQFRNNEKQFYRSLKKSTTNETISDNNTNTAFPTTEELQQFWAGIWESPVYHNTEAEWIKGEQVIQTNTEAMIFDHVEVATFHDVLTKIHNWKAPGSDYIHNYWYKKFTHIHPHIFNHINNFIKDPTTIPTYITEGKTYMLPKDPSDSANPAKYRPITCLQTIYKIMTSCISHIIYKHLETQKILTEEQKGCKKLSQGCKEQLTIDAVIHRHVQRTKKDLHTMYIDYRKAYDSVPHSWLLEVLNIYKIHPQLINCLGTIVEKWKTRLQLNTSTGTVETEFIKIQRGIFQGDSLSPLWFCLALNPLSNKLNALLPGYQLQYSDTMTDILTDQHYCKVNHLLYMDDIKLYASSPDDLYELADVTEQFSKDIAMEFGIDKCKINSIRAGKTYTHSYQMQTGATIDSLDETGTYKYLGYIQAKQILHKEIKTKLTKQFKHRLKTIFNTQINAKNTIKAINTYAIPILTYSFGIIKWNKTDLKNLQRIINTTLTKHRRHHPRSCVQRLTLPRNDGGRGIIDITNLHNKQITTLRKYFENKSSTSTLHKAIAYNDKKLTPLNMYDRTTQSNEQQTDRQTKIAEWTQKSLHGRHRHDLNLPNVDKLASNEWLKRGELFPETEGFMIAIQDQVIETRNYQKHIMRVPQTVDICRRCNSSSETIQHITGACKAIVQTDYKHRHDQIANIIHQKLAIKYNFISTPPVPYYKYQPETVLENATHKLYFDRGIFTDKTIHYNRPDITLLDKCNKTALIIDIAVPNTHNLQNTIAEKLSKYIDLKIEISRMWRLNNVAIVPIVLSTTGVIPKQLHQSLKTLDLPPYTYQSLQKAAILNTCRIVRKFLQNENDTVISTSHTRHSITAQTQVNGHSSSHNLTLSSSHHITTLPG

SEQ ID NO: 31210 - protein, 1444 aa, Amphipyra berbera
MPTLENRGPPVLFTLATVNAGLCCGRLCKSLATRGIIMITRSKKRKAIQTNMLSTDDETTQVSASSSPRSIFSSIASSPPSYILASSRSSSSSPLSVDVVLEATSARNPSPATVSTITRKKWSEEMNTFIWRTYLIITNLETDTSSYLTSLHQQFINRFPQMNVSKQRVGDQRRAIVYKKLLPTTTLDIIRLEVSNSLKTHNTVLHPQTQTLQSNMSQINTNSPSQPNRRMKWSTELNENLIKCYYICTKMETDMTVWRKKLKEMFIEIYPQLSHLSEQRISDQKRVVINNRMISETRLQALKTDVQNTLNQTNSYEQHQNSHVISDSIQTQPPFNNNIAQLHTQETELELRNEPNYLNRIDVEALTQHNSTNVETNQERNQELDETFLQTLQYFTNTHPTQRNYIPKQKSSKKFAKIVSYINNIIIPNYLNSDIDFDTLQTIIYSAAWTAAKANGSKLLHVSAENMVNTRQKDHKPKWQRRLEYKIKDLRAKIGRLTQYIYGNRSRKLTHEVNTILEHYKIHSTHEEPNTQLTHFLDTLKQKLTLVNSRLKRYTKCTHRKTQNNQFRNNERQFYRTLKNSTTNQTTPTNNVNNVNSILPPIDEIKQFWSQIWERPIGHNTEADWIKVETENYINIEQMEFEHIKRDTFLDVLKKLHNWKAPGSDYIHNFWYKNFTHTHPYLYNHINNFISNPTTMPCYISEGITYMLPKDSNDRTNPAKYRPITCLQTIYKIITSCISHVIYKHLDRNKILAEEQKGCKKFSQGCKEQLTIDSVILNQVQRKKADIYTMYIDYKKAYDSVPHTWLLEVLNIYKIHPQITTFLSNIIKLWSTRLHLTSPTGIVETETIKIQRGIFQGDSLSPLWFCLALNPLSNKLNSLRPGYQLQFNDTLNDILTDDQNCKINHLLYMDDIKLYASSPDDLYELANTTEHFSKDIGMEFGIDKCKINSIRAGKTYEHSHTIQTGETIDSLDENGTYKYLGYIQNKQLKHKEIKTILTQQFKHRLKSIFNTQLHSKNTVKAINTYAIPVLTYSFGIINWTKTELKNLQRVINTTLTKHRKHHPRSCVQRLTLPRKEGGRGIIDISNLHNKQITTLRKYFNSKSTTSSLHKAIVYNDQKLTPLNMFDKTTQNNEKQTTRQTKILEWTQKSLHGRHRKDLEQLNVDKLASNEWLCRGDLFPETEGFMVAIQDQVIETRNYQKYIMRVPHANDICRRCSSSSETIQHITGACKAIVQTDYKHRHDQIANIIHQRLAIKYDLITTPPTPYYKYNPEIVLENNTHKLYYDRAILTDKTTHYNRPDITLLDKINKTAQIIDIAVPNTHNLQSTIAEKLSKYTDLKIEISRMWRLSNATIIPIVISTTGVIPKQLHQSLRTLDLPPYLYTSLQKAAILNTCRIVRKFLQNDNETQMITPHSQASNTTRTQSLNQTNSSQSHIMSSHHITNQ

SEQ ID NO: 31211 - protein, 1444 aa, Amphipyra berbera
MPTLENRGPPVLFTLATVNAGLCCGRLCKSLATRGIIMITRSKKRKAIQTNMLSTDDETTQVSASSSPRSIFSSIASSPPSYILASSRSSSSSPLSVDVVSEATSARNPSPATVSTITRKKWSEEMNTFIWRTYLIITNLETDTSSYLTSLHQQFINRFPQMNVSKQRVGDQRRAIVYKKLLPTTTLDIIRLEVSNSLKTHNTVLHPQTQTLQSNMSQINTNSPSQPNRRMKWSTELNENLIKCYYICTKMETDMTVWRKKLKEMFIEIYPQLSHLSEQRISDQKRVVINNRMISETRLQELKTDVQNTLNQTNSYEQHQNSHVSSDSIQTQPPFNNNIAQLHTQETELELRNEPNYLNRIDVEALTQHNSTNMETNQERNQELEETFLQTLQYFTSTHPTQRNYIPKQKSSKKFAKIVSYINNTILPNYLNSDIDFDTLQTIIYSAAWTAAKANGSKLLHVSAENMVNTRQINHKPKWQRRLEYKIKDLRAKIGRLTQYIYGNRSRKLTQEVTTILEHYKIHSTHEEPNTQLTHFLDTLKQKLTLVNSRLKRYTKCTNRKTQNNQFRNNERQFYRTLKNSTTNQTTPTNNVNNVNSILPPIDEIKQFWSQIWERPIGHNTEADWIKVETENYINIEQMEFEHIKRDTFLDVLKKLHNWKAPGSDYIHNFWYKNFTHTHPYLYNHINNFISNPTTMPCYISEGITYMLPKDSNDRTNPAKYRPITCLQTIYKIITSCISHVIYKHLDRNKILAEEQKGCKKFSQGCKEQLTIDSVILNQVQRKKADIYTMYIDYKKAYDSVPHTWLLEVLNIYKIHPQITTFLSNIIKQWSTRLHLTSPTGIVETETIKIQRGIFQGDSLSPLWFCLALNPLSNKLNSLRPGYQLQFNDTLNDILTDDQNCKINHLLYMDDIKLYASSPDDLYELANTTEHFSKDIGMEFGIDKCKINSIRAGKMYEHSHTIQTGETIDSLDENGTYKYLGYIQNKQLKHKEIKTTLTQQFKHRLKSIFNTQLHSKNTVKAINTYAIPVLTYSFGIINWTKTELKNLQRLINTTLTKHRKHHPRSCVQRLTLPRKEGGRGIIDISNLHNKQITTLRKYFNSKSTTSSLHKAIVYNDQKLTPLNMFDKTTQNNEKQTTRQTKILEWTQKSLHGRHRKDLEQLNVDKLASNEWLCRGDLFPETEGFMVAIQDQVIETRNYQKYIMRVPHANDICRRCSSSSETIQHITGACKAIVQTDYKHRHDQIANIIHQRLAIKYDLITTPPTPYYKYNPEIVLENNTHKLYYDRAILTDKTTHYNRPDITLLDKINKTAQIIDIAVPNTHNLQSTISEKLSKYTDLKIEISRMWRLSNATIIPIVISTTGVIPKQLHQSLRTLDLPPYLYTSLQKAAILNTCRIVRKFLQNDNETQMITPHSQASNTTRTQSLNQTNSSQSHIMSSHHITNQ

SEQ ID NO: 31212 - protein, 1151 aa, Acronicta aceris
MISEARLTELKLYAEGVLNQTDSYMESIGHISQSTTEDVQEILLTNNNTQLTNIEQSHTHETELENDPNYLNSIDIEALTNSTANTYHTDTNIEIRDQANPELEEIFANTLLHFTDTNPTKRNYIPKQKSSKKLAKIVTYIDNCILPKYVSNETDFKTLQTIIYSAAWTAAKANGSKLSYKTPENLANIHQRINKPKWQRRLEYKIKDVRAKIGRLTHYIHGNRSRKLDREVHKILEHYKIHSTHEEPNTQLTHFLDTLKQKLTLLSSRLNRYTKCTLRKSQNNQFNKNEKQFYRSIKKSTTNRTMASNSENNTTDTLPPTSEIHKFWSNIWERPMLHNTEAEWIRTETENLVNTEQMDFEHIPIDTFHDVLKKLHNWKAPGSDYIHNFWFKKFTHIHPYLFNYINEFIKNPNTMPAYLTEGITYMLPKDFNDTNNPAKYRPITCLQTIYKIITSCITHIIYKHLDTNSILTEEQKGCRKYSQGCKEQLTIDAVILKQVQQKKKDLYTMYIDYKKAYDSVPHTWLIEVLNIYKIHPQIIAFLNNVIKQWTTRLYLPTPTGEAETEPIKIQRGIFQGDSLSPLWFCLALNPLSHKLKSIAPGYLLQYNDMSSDRLSDKQDCKINHLLYMDDIKLYASSPDDLYQLANITEQFSNDIGMEFGIDKCKINSVKGGQTFEHTHTIQTGETIESLDEHGTYKYLGYIQAKQIKHKQIKNQLTQQFKHRLKSIFNTQLYARNTIKAINTFAIPVLTYSFGIINWTKTELRKLQRIINTTLTKHRKHHPRSCVQRLTLPRKEGGRGIIDITNLHNKQISTLRTYFNYKSTTSNLHKAIVFNDRKLTPLNMSDKNKQSNETQTDGPTKILQWTQKSLHGRHRQDLCQPNVDKLASNEWLRRGDLFPETEGFMTAIQDQVIETRNYQKHIMRIPQIHDICRRCNSSPKTIQHITGACKSIVQTDYKHRHDQIAKIIHQKLALKYNLISTPPVPYYKYNPEIILENNNHKLYYDRAILTDRTTHYNRPDITLLDKINKTAQIIDIAIPNTHNLQSTIAEKLTKYTDLKIEISRMWRLSHVSIIPIVLSTTGVIPKQLHQSLKSLDLAPYTYQSLQKAAILNTCRIVRKFLQNDNETLIPTSHPQVTTTINTRTQSRNHTQT

SEQ ID NO: 31213 - protein, 1444 aa, Amphipyra berbera
MPTLENRGPPVLFTLATVNAGLCCGRLCKSLATRGIIMITRSKKRKAIQTNMLSTDDETTQVSASSSPRSIFSSIASSPPSYILASSRSSSSSPLSVDVVSEATSARDPSPATVSTITRKKWSEEMNTFIWRTYLIITNLETDTSSYLTSLHQQFINRFPQMNVSKQRVGDQRRAIVYKKLLPTTTLDIIRLEVSNSLKTHNTVLHPQTQTLQSNMSQINTNSPSQPNRRMKWSTELNENLIKCYYICTKMETDMTVWRKKLKEMFIEIYPQLSHLSEQRISDQKRVVINNRMISETRLQELKTDVQNTLNQTNSYEQHQNSHVISDSIQTQPPFNNNIAQLHTQETELELRNEPNYLNRIDVEALTQHNSTNMETNQERNQELEETFLQTLQYFTNTHPTQRNYIPKQKSSKKFAKIVSYINNIILPNYLNSDIDFDTLQTIIYSAAWTAAKANGSKLLHVSAENMVNTRQKNHKPKWQRRLEYKIKDLRAKIGRLTQYIYGNRSRKLTQEVNTILEHYKIHSTHEEPNTQLTHFLDTLKQKLTLVNSRLKRYTKCTHRKTQNNQFRNNERQFYRTLKNSTTNQTTPTNNVNNVNSILPPIDEIKQFWSQIWERPIGHNTEADWIKVETENYINIEQMEFEHIKRDTFLDVLKKLHNWKAPGSDYIHNFWYKNFTHTHPYLYNHINNFISNPTTMPCYISEGITYMLPKDSNDRTNPAKYRPITCLQTIYKIITSCISHVIYKHLDRNKILAEEQKGCKKFSQGCKEQLTIDSVILNQVQRKKADIYTMYIDYKKAYDSVPHTWLLEVLNIYKIHPQITKFLSNIIKQWSTRLHLTSPTGIVETETIKIQRGIFQGDSLSPLWFCLALNPLSNKLNSLRPGYQLQFNDTLNDILTDDQNCKINHLLYMDDIKLYASSPDDLYELANTTEHFSKDIGMEFGIDKCKINSIRAGKTYEHSHTIQTGETIDSLDENGTYKYLGYIQNKQLKHKEIKTTLTQQFQHRLKSIFNTQLHSKNTVKAINTYAIPVLTYSFGIINWTKTELKNLQRVINTTLTKHRKHHPRSCVQRLTLPRKEGGRGIIDISNLHNKQITTLKKYFNSKSTTSSLHKAIVYNDQKLTPLNMFDKTTQNNEKQTTRQTKILEWTQKSLHGRHRKDLEQLNVDKLASNEWLCRGDLFPETEGFMVAIQDQVIETRNYQKYIMRVPHANDICRRCSSSSETIQHITGACKAIVQTDYKHRHDQIANIIHQRLAIKYDLITTPPTPYYKYNPEIVLENNTHKLYYDRAILTDKTKHYNRPDITLLDKINKTAQIIDIAVPNTHNLQSTIAEKLSKYTDLKIEISRMWRLSNATIIPIVISTTGVIPKQLHQSLRTLDLPPYLYTSLQKAAILNTCRIVRKFLQNDNETQMIIPHSQASNTTRTQSLNQTNSSQSNIMSSHHITNQ

SEQ ID NO: 31214 - protein, 1444 aa, Amphipyra berbera
MPTLENRGPPVLFTLATVNAGLCCGRLCKSLATRGIIMITRSKKRKAIQTNMLSTDDETTQVSASSSPRSIFSSIASSPPSYILASSRSSSSSPLSVDVVSEATSARNPSPATVSTITQKKWSEEMNTFIWRTYLIITNLETDTSSYLTSLHQQFINRFPQMNVSKQRVGDQRRAIVYKKLLPTTTLDIIRLEVSNSLKTHNTVLHPQTQTLQSNMSQINTNSPSQPNRRMKWSTELNENLIKCYYICTKMETDMTVWRKKLKEMFIEIYPQLSHLSEQRISDQKRVVINNRMISETRLQALKTDVQNTLNQTNSYEQHQNSHVISDSIQTQPPFNNNIAQLHTQETELELRNEPNYLNRIDVEALTQHNSTNVETNQERNQELDETFLQTLQYFTNTHPTQRNYIPKQKSSKKFAKIVSYINNIILPNYLNSDIDFDTLQTIIYSAAWTAAKANGSKLLHVSAENMVNTRQKDHKPKWQRRLEYKIKDLRAKIGRLTQYIYGNRSRKLTHEVNTILEHYKIHSTHEEPNTQLTHFLDTLKQKLTLVNSRLKRYTKCTHRKSQNNQFRNNERQFYRTLKNSTTNQTTPTNNVNNVNSILPPIDEIKQFWSQIWERPIGHNTEADWIKVETENYINIEQMEFEHIKRDTFLDVLKKLHNWKAPGSDYIHNFWYKNFTHTHPYLYNHINNFISNPTTMPCYISEGITYMLPKDSNDRTNPAKYRPITCLQTIYKIITSCISHVIYKHLDRNKILAEEQKGCKKFSQGCKEQLTIDSVILNQVQRKKADIYTMYIDYKKAYDSVPHTWLLEVLNIYKIHPQITTFLSNIIKLWSTRLHLTSPTGIVETETIKIQRGIFQGDSLSPLWFCLALNPLSNKLNSLRPGYQLQFNDTLNDILTDDQNCKINHLLYMDDIKLYASSPDDLYELANTTEHFSKDIGMEFGIDKCKINSIRAGKTYEHSHTIQTGETIDSLDENGTYKYLGYIQNKQLKHKEIKTILTQQFKHRLKSIFNTQLHSKNTVKAINTYAIPVLTYSFGIINWTKTELKNLQRVINTTLTKHRKHHPRSCVQRLTLPRKEGGRGIIDISNLHNKQITTLRKYFNSKSTTSSLHKAIVYNDQKLTPLNMFDKTTQNNEKQTTRQTKILEWTQKSLHGRHRKDLEQLNVDKLASNEWLCRGDLFPETEGFMVAIQDQVIETRNYQKYIMRVPHANDICRRCSSSSETIQHITGACKAIVQTDYKHRHDQIANIIHQRLAIKYDLITTPPTPYYKYNPEIVLENNTHKLYYDRAILTDKTTHYNRPDITLLDKINKTAQIIDIAVPNTHNLQSTIAEKLSKYTDLKIEISRMWRLSNATIIPIVISTTGVIPKQLHQSLRTLDLPPYLYTSLQKAAILNTCRIVRKFLQNDNETQMITPHSQASNTTRTQSLNQTNSSQSHIMSSHHITNQ

SEQ ID NO: 31215 - protein, 1000 aa, Mamestra brassicae
MVSLISAFSCFISILTPILTIDTDFETLQTVIYSAAWTAAKINGSKLSCTTSKNAINMNQKNRKPKWQKRLELRVKDLRTKIGRLTAFIQGNRGWRLVREVHTILESYRIHSMHEEPNTQLTHFLDTLKQKLTLVNSRLNRYNSCTLRKTQNNKFRNNEKQFYRSLKNSTTNTTALNNNENNTNYSLPSVDELRQFWSRIWERPICHNMEAEWIKTETENHKHTEQMEFEHVPIDTFHDVLQKLHNWKSPGSDCIHNFWYKKFTFIHPHLYNFINNFIKDPTTMPTYIAEGITYMISKDSNDSANPAKYRPITCLQTIYKIITSCITQIIYTHLDSNSILSEEQKGCRKFSQGCKEQLTIDSVILKQVQARKKDLYTMYIDYKKAYDSVPHTWLLEILKIYKINPQIIAFLNTTMTHWTTRLHLTTLTGIVETESIKIQRGIFQGDSLSPLWFCLALNPLSNKLNSLMPGYNLHYNDTTDDIRTDHQDCKINHLLYMDDIKLYAFLPEDLNELANATDQFSSDIGMEFGIDKCKINSVKAGKTYDHSYTTHSGETIDSLDEHGTYKYLGYIQAQQIKHKPIKNKLTQQFKHRLKSIFNTQLNSKHTIKAVNTFAIPVLTYSFGIISWTKTELKNLQRVINTTLTKHRKHHPRSCVQRLILPRKEGGRGIIDITNLHDKQISTIRKYFNSKSTTSTIHKAIVYNDRKLTPLNMFDKTTQTNEKQTDRQTKILEWTQKSLHGRHRQDLCQPNVDKLASNEWLRRGDLFPETEGFMTAIQDQVIETRNYQKHIMRIPISTDFCRRCHSSPETIQHITGACKAIVQTDYKHRHDQVANIIHQKLAIKYKLITTPSVPYYKYNPETVLENATHKLYFDRAILTDKTTHYNRPDITLVDKINKTAQIIDIAVPNTHNLQNTIAEKLSKYTDLKIEISRMWRLSSVAIIPVVLSATGVIPKQLHQSLKSLEIAPSTYQNLQKAVILNTCRIVRKFLQSDNDAQTTNT

SEQ ID NO: 31216 - protein, 1398 aa, Dalla quadristriga
MRLRSRQIVPQAGTSSGESRPEPAGSGSPTYSGEGAVLLPSVHSNYQDTNTIINSNPSSPSSSISCFQSPSSSPHSFQNPSTSRSSTVTPIPVDVVQEANAKKPAPATGTNITRKKWSIEMNEFIWRTYLIITKLETDTNSYLTSLHQQFVHKFPEMKVSKQRIGDQRRAIFHKKLLPATTLDTIKLEVSNSLEIKITQIHSHSLIQLNTLHDNMHPKSQSTSKSRMKWSNELNETLITCYLITTKMETDMTIWRKKLRDKFIEIFPYLSHLSEQRISDQKRVIINNNRIPETRFQEIKKYAENEIISQTQVTTENEQSQFFTDVNTDDVNAETNPPTQDTEVENDPNYLNSIDVEAIHRDNTSTEFCHERNEELEETFSQTLSYFTNTHPTNRTYIPKQKTSKKFANIVSYMNNIILPKYIYSDIDFDTLQTIIYSAAWTAAKTNGSKLLHAPAENITTAHQKDHKPKWQKRLESKIKDLRCKIGRLTHYIHGNRSRKLVNEVNAIMKHYRIHTIHEEPNSQLTHFLDTLKQKLTLISSRLNRYTKCTLRKTQNNQFKNNERQFYRTLKNTTTNLHKQTNNETNLPPKDGLQRFWAGIWENPLSHNADADWIKQEKENQSNTMHMQFEHVPIDIFHDTLKKLHNWKAPGSDFIHNFWYKKLTHVHPYLYNHVNNFIKNPSKIPSYISEGITYMLPKDHNDTKNPAKYRPITCLQTVYKIITSCITHLVYIHLENNNILCEEQKGCRKLSQGCKEQLTIDSVILKHAQRNKNDLYTMYIDYKKAYDSVPHTWLLDVLNIYKIHPEIIAFLSHVIDEWTTRLHIKAPSGVVETEPIRIQRGIFQGDSFSPLWFCLALNPLSNKLNSLKSGYLLQLNNRPNDLLTDQQECKVNHLLYMDDIKLYASTSDQLNELASTTEQFSDDIRMEFGIDKCKINSVKAGKTYQQSYIIQTGEKIDSLEENDTYKYLGYIQSKEIKHKEIKASLTQQFKHRLKSIFDSQLQARNTIKAINTFAIPILTYSFGVISWTKAELQKLQRVINTTMTKYRKHHPRSCVQRLTLPRKEGGRGIVDIANLHNKQISTLRMYFIDKSTSSNLHNAIVCNDRKFTPLNMHDKTEQSNEKQTDIQTKIVQWTQKSMHGRHRHDLSQPNVDKLASNEWLSRGDLFPETEGFMIAIQDQVIETRNYRKYIMRVPQTVDICRRCNSCTETIQHITGACKVLVQNDYKYRHDQLAKIIHQQMAIKYNLLSPPTIEYYKYNPETVLENNTHKLYYDRAILTDKTTHYNRPDITLIDKIKKTAQIIDIAVPNTHNLQNTIAEKLAKYTDLKIEISRMWRLNKVVIIPVVLSTTGVVPKQLHQSLKSLGLSPFIYQKLQKAAILNTCRIVRKFLQNDIETRPQS

SEQ ID NO: 31217 - protein, 1071 aa, Amphipyra berbera
METNQERNQELEETFLQTLQYFTNTHPTQRNYIPKQKSSKKFAKIVSYINNIILPNYLNSDIDFDTLQTIIYSAAWTAAKSNGSKLLHVSAENMVNTRQKNHKPKWQRRLEYKIKDLRAKIGRLTQYIYGNRSRKLTQEVNTILEHYKIHSTHEEPNTQLTHFLDTLKQKLTLVNSRLKRYTKCTHRKTQNNQFRNNERQFYRTLKNSTTNQTTPTNNVNNVNSILPPIDEIKQFWSQIWERPIGHNTEADWIKVETENYINIEQMEFEHIKRDTFLDVLKKLHNWKAPGSDYIHNFWYKNFTHTHPYLYNHINNFISNPTTMPCYISEGITYMLPKDSNDRTNPAKFRPITCLQTIYKIITSCISHVIYKHLDRNKILAEEQKGCKKFSQGCKEQLTIDSVILNQVQRKKADIYTMYIDYKKAYDSVPHTWLLEVLNIYKIHPQITTFLSNIIKQWSTRLHLTSPTGIVETETIKIQRGIFQGDSLSPLWFCLALNPLSNKLNSLRPGYQLQFYDTLNDILTDDQNCKINHLLYMDDIKLYASSPDDLYELANTTEHFSKDIGMEFGIDKCKINSIRAGKTYEHSHTIQTGETIDSLDENGTYKYLGYIQNKQLKHKEIKTTLTQQFKHRLKSIFNTQLHSKNTVKAINTYAIPVLTYSFGIINWTKTELKNLQRVINTTLTKHRKHHPRSCVQRLTLPRKEGGRGIIDISNLHNKQITTLRKYFNSKSTTSSLHKAIVYNDQKLTPLNMFDKTTQKNEKQTTRQTKILEWTQKSLHGRHRKDLEQLNVDKLASNEWLCRGDLFPETEGFMVAIQDQVIETRNYQKYIMRVPHANDICRRCSSSSETIQHITGACKAIVQTDYKHRHDQIANIIHQRLAIKYDLITTPPTPYYKYNPEIVLENNTHKLYYDRAILTDKTTHYNRPDITLLDKINKTAQIIDIAVPNTHNLQSTIAEKLSKYTDLKIEISRMWRLSNATIIPIVISTTGVIPKQLHQSLRTLDLPPYLYTSLQKAAILNTCRIVRKFLQNDNETQMITPHSQASNTTRTQSLNQTNSSQSHIVSSHHITNQ

SEQ ID NO: 31218 - protein, 1412 aa, Mesoligia furuncula
MITRSKTKKLIEANKPSADDEISPVSSSSSPRSIFSSIVSSSPSYLSHSSRSSSSSSPPMSVDVVSEATTAMNPSPATVKSNTRKKWSEDMNQFIWRTYLIITNLDTETNSYLTSLHQQFINRFPQMNVSKQRVGDQRRAIVHKKLLSATTLEKISLEVRRELQTDNTNLDTHIRTPLQLNTDQSNIHLQSEPKSRMRWSNEMNETLIKCYYITTKMETDMTVWRKKLREMFIEFYPHLSHLSEQRISDQKRVVLNNRIISDARLQDLKTYAENTLNQTTPYRHSEYHYSHIAAENTPTQTSISNNTETAYVNQSHTQEVEVENEPNFLNSIDFEPLTNNIINTEHNIPNVEISLERSQELEETFSHTLQHFTNIHATKRNYIPKQKPSKKLAQIVSYINNVILPKYANADTDFETLQTVIYSAAWTAARMNGSKLSHVTSDNPTNINLPQFKKPKWQRRLELRVKDLRTNIGRLTAYMQGNRGWKLVRKVHTILENYKIHSTHEERNTQLTHFLDTLKQKLTLVNSRLNRYNKCTLRKTQNNKFRNNEKQFYRTLKQSTTNQTVHSESENNTNQSLPSIDELQQFWSRIWERPICHNTEAEWIKIETENHKHTEQMEFEHVSIETFHDVLQNLHNWKAPGSDNIHNFWYKKFTHIHPYLYNYINTFIKNPSMMPSYIAEGITFMIPKDSSDSTNPAKYRPITCLQTIYKIITSCITHSIYQHLETNTILAEEQKGCRKFSQGCKEQLTIDSVILKQVQRKKRDLYTMYIDYKKAYDSVPHTWLLEVLKIYKVNPLIVTFLNNTMAQWTTRLHLKSPSGIVETEAIKIQRGIFQGDSLSPLWFCLALNPLSNKLNTLKPGYNLPFNDTIDDLQTDRQNCKINHLLYMDDIKLYASTQDDLNKLAETTDQFSRDIKMEFGIDKCKINSVRAGQTYEHSYIIQTGEIIDSLNENETYKYLGYIQAQQIKHKEIKNKLTQQFKHRLKSIFNTQLHSRHTVKAINTFAIPVLTYSFGILSWTKTELKNLQRVINTTLTKNRKHHSRSCVQRLTLPRKEGGRGIIDITNLHNKQISTLRTYFNTKSTTSTLHKAIVHNDKKLTPLNMFDKTSQSNEKQTDRQTKILEWTQKSLHGRHRQDLCQPNVDKLASNEWLRRGDLFPETEGFMTAIQDQVIETRNYQKHIMRIPISTDICRRCYSSSETIQHITGACRAIVQTDYKHRHDQIANIIHQKLAIKYKLINTPPVPYYKYNPEIVLENTTHKLYFDRAILTDRTTHYNRPDITLLDKINKTAQIIDIAVPNTHNLQNTIAEKLSKYTDLKIEISRMWRLGSVAIIPVVVSTTGVIPKQLHQSLKTLDLSPSTYQTLQKAAILNTCRIVRKFLQNDNDAQISHPQTSPTTQSLNISSHHNTLSSIA

SEQ ID NO: 31219 - protein, 1409 aa, Xestia c-nigrum
MLTRSKTKKYIQASMPATDDETSPVSSSSSPKSIFSSIASSPPSYSSRSSRSSSILSPMTVDVVSEANVANNPSPAAVSTTTRKKWSKEMNEFIWRNYLIITNLESDTKAYLTSLHHRFTDKFPNMNISKQRIGDQRRAIVSKKLLSSTVLNTIRLEVSNHLRTPIDDLELHSPPEYPSSQRDSQLNSQSEPKRRMKWSNELNETLMKCYFRVTKMETDMTVWRKNLKEKFIECYPHLSHLSEQRISDQKRVIVNNSMISEARLQVLKSIVENELCEIESFQRQHDSRMSNTDVGNLHLDTNTETLNTDIENIEHSETENIGVEIDDGNNNLGPEHPIHLNIQHTNLVRNLEIDEIFSQTLQYFKDTQPTERSYIPKQKSSKKLANVVSYINKVILPEHVTNETNFNHLQTVIYCAAWTAAKANGSKISLAPPVDSSSRPQQAHKPKWQKRLENKMESLRAKIGRLTQYIQGVRSRKLIKAVEIILKDYRIHTLHEQPNTQLEHFLDTLKQKLTVVKSRLNRYTKCTLRKTQNNQFRNNEKQFYRTLRKSTTNETTSNSNAHTAFPTTEELQQFWAGIWENPVCHNTEAEWIKTEQVIHTNTEAMIFDQIEVATFHDVLTKIHNWKAPGSDYIHNYWYKKFTHTHPHIFNHINNFIKDPATIPTYITEGKTYMLPKDPSDPTNPAKYRPITCLQTIYKIMTSCISHVIYKHLETQKILTEEQKGCKKLSQGCKEQLTIDAVIHRHVQRTKKDLHTMYIDYRKAYDSVPHSWLLEVLKIYKIHPQLINCLGTIVEKWKTRLQLNISTGTVETELIKIQRGIFQGDSLSPLWFCLALNPLSNKLNALLPGYQLQFSDTMTDTPTDQQYCKVNHLLYMDDIKLYASSPDDLYELADVTEQFSKDIAMEFGIDKCKINSIKAGKTFTHSYQMQTGATIDSLDETGTYKYLGYIQAKQILHKEIKTTLTKQFKHRLNTIFNTQINAKNTIKAINTYAIPILTYSFGIIKWNKTDLKNLQRIINTTLTKHRRHHPRSCVQRLTLPRNDGGRGIIDITNLHNKQISTLRTYFDNKSSTSTLHKAIVYNDKKLTPLNMYDRTTQSNEQQTDRQTKIAEWTQKSLHGRHRHDLNLPNVDKLASNEWLRRGELFPETEGFMIAIQDQVIETRNYQKHIMRVPHTVDICRRCNSSSETIQHVTGACKAIVQTDYKHRHDQIANIIHQKLAIKYKFISTPPVPYYKYQPETVLENATHKLYFDRGIFTDKTIHYNRPDITLLDKCNKTALIIDIAVPNTHNLQNTIAEKLAKYIDLKLEITRMWSLKNVAIVPIVLSTTGVIPKQLHQSLKSLDLPPYTYQSLQKAAILNTCRIVRNFLQNDNEAIITTSHTQPSQTQFNGHSSSHNLTRSSSHYITTLLG

SEQ ID NO: 31220 - protein, 1444 aa, Amphipyra berbera
MPTLENRGPPVLFTLATVNAGLCCGRLCKSLATRGIIMITRSKKRKAIQTNMLSTDDETTQVSASSSPRSIFSSIASSPPSYILASSRSSSSSPLSVDVVSEATSARNPSPATVSTITRKKWSEEMNTFIWRTYLIITNLETDTSSYLTSLHQQFINRFPQMNVSKQRVGDQRRAIVYKKLLPTTTLDIIRLEVSNSLKTHNTVLHPQTQTLQSNMSQINTNSPSQPNRRMKWSTELNENLIKCYYICTKMETDMTVWRKKLKEMFIEIYPQLSHLSEQRISDQKRVVINNRMISETRLQALKTDVQNTLNQTNSYEQHQSSHVISDSIQTQPPFNNNIAQLHTQETELELRNEPNYLNRIDVEALTQHNSTNVETNQERNQELDETFLQTLQYFTNTHPTQRNYIPKQKSSKKFAKIVSYINNIILPNYLNSDIDFDTLQTIIYSAAWTAAKANGSKLLHVSAENMVNTRQKDHKPKWQRRLEYKIKDLRAKIGRLTQYIYGNRSRKLTHEVNTILEHYKIHSTHEEPNTQLTHFLDTLKQKLTLVNSRLKRYTKCTHRKTQNNQFRNNERQFYRTLKNSTTNQTTPTNNVNNVNSILPPIDEIKQFWSQIWERPIGHNTEADWIKVETENYINIEQMEFEHIKRDTFLDVLKKLHNWKAPGSDYIHNFWYKNFTHTHPYLYNHINNFISNPTTMPCYISEGITYMLPKDSNDRTNPAKYRPITCLQTIYKIITSCISHVIYKHLDRNKILAEEQKGCKKFSQGCKEQLTIDSVILNQVQRKKADIYTMYIDYKKAYDSVPHTWLLEVLNIYKIHPQITTFLSNIIKLWSTRLHLTSPTGIVETETIKIQRGIFQGDSLSPLWFCLALNPLSNKLNSLRPGYQLQFNDTLNDILTDDQNCKINHLLYMDDIKLYASSPDDLYELANTTEHFSKDIGMEFGIDKCKINSIRAGKTYEHSHTIQTGETIDSLDENGTYKYLGYIQNKQLKHKEIKTILTQQFKHRLKSIFNTQLHSKNTVKAINTYAIPVLTYSFGIINWTKTELKNLQRVINTTLTKHRKHHPRSCVQRLTLPRKEGGRGIIDISNLHNKQITTLRKYFNSKSTTSSLHKAIVYNDQKLTPLNMFDKTTQNNEKQTTRQTKILEWTQKSLHGRHRKDLEQLNVDKLASNEWLCRGDLFPETEGFMVAIQDQVIETRNYQKYIMRVPHANDICRRCSSSSETIQHITGACKAIVQTDYKHRHDQIANIIHQRLAIKYDLITTPPTPYYKYNPEIVLENNTHKLYYDRAILTDKTTHYNRPDITLLDKINKTAQIIDIAVPNTHNLQSTIAEKLSKYTDLKIEISRMWRLSNATIIPIVISTTGVIPKQLHQSLRTLDLPPYLYTSLQKAAILNTCRIVRKFLQNDNETQMITPHSQASNTTRTQSLNQTNSSQSHIMSSHHITNQ

SEQ ID NO: 31221 - protein, 1444 aa, Amphipyra berbera
MPTLENRGPPVLFTLATVNAGLCCGRLCKSLATRGIIMITRSKKRKAIQTNMLSTDDETTQVSASSSPRSIFSSIASSPPSYILASSRSSSSSPLSVDVVSEATSARNPSPATVSTITRKKWSEEMNTFIWRTYLIITNLETDTSSYLTSLHQQFINRFPQMNVSKQRVGDQRRAIVYKKLLPTTTLDIIRLEVSNSLKTHNTVLHPQTQTLQSNMSQINTNSPSQPNRRMKWSTELNENLIKCYYICTKMETDMTVWRKKLKEMFIEIYPQLSHLSEQRISDQKRVVINNRMISETRLQALKTDVQNTLNQTNSYEQHQNSHVISDSIQTQPPFNNNIAQLHTQETELELRNEPNYLNRIDVEALTQHNSTNVETNQERNQELDETFLQTLQYFTNTHPTQRNYIPKQKSSKKFAKIVSYINNIILPNYLNSDIDFDTLQTIIYSAAWTAAKANGSKLLHVSAENMVNTRQKDHKPKWQRRLEYKIKDLRAKIGRLTQYIYGNRSRKLTHEVNTILEHYKIHSTHEEPNTQLTHFLDTLKQKLTLVNSRLKRYTKCTHRKTQNNQFRNNERQFYRTLKNSTTNQTTPTNNVNNVNSILPPIDEIKQFWSQIWERPIGHNTEADWIKVETENYINIEQMEFEHIKRDTFLDVLKKLHNWKAPGSDYIHNFWYKNFTHTHPYLYNHINNFISNPTTMPCYISEGITYMLPKDSNDRTNPAKYRPITCLQTIYKIITSCISHVIYKHLDRNKILAEEQKGCKKFSQGCKEQLTIDSVILNQVQRKKADIYTMYIDYKKAYDSVPHTWLLEVLNIYKIHPQITTFLSNIIKLWSTRLHLTSPTGIVETETIKIQRGIFQGDSLSPLWFCLALNPLSNKLNSLRPGYQLQFNDTLNDILTDDQNCKINHLLYMDDIKLYASSPDDLYELANTTEHFSKDIGMEFGIDKCKINSIRAGKTYEHSHTIQTGETIDSLDENGTYKYLGYIQNTQLKHKEIKTILTQQFKHRLKSIFNTQLHSKNTVKAINTYAIPVLTYSFGIINWTKTELKNLQRVINTTLTKHRKHHPRSCVQRLTLPRKEGGRGIIDISNLHNKQITTLRKYFNSKSTTSSLHKAIVYNDQKLTPLNMFDKTTQNNEKQTTRQTKILEWTQKSLHGRHRKDLEQLNVDKLASNEWLCRGDLFPETEGFMVAIQDQVIETRNYQKYIMRVPHANDICRRCSSSSETIQHITGACKAIVQTDYKHRHDQIANIIHQRLAIKYDLITTPPTPYYKYNPEIVLENNTHKLYYDRAILTDKTTHYNRPDITLLDKINKTAQIIDIAVPNTHNLQSTIAEKLSKYTDLKIEISRMWRLSNATIIPIVISTTGVIPKQLHQSLRTLDLPPYLYTSLQKAAILNTCRIVRKFLQNDNETQMITPHSQASNTTRTQSLNQTNSSQSHIMSSHHITNQ

SEQ ID NO: 31222 - protein, 1366 aa, Amphipyra berbera
MPTLENRGPPVLFTLATVNAGLCCGRLCKSLATRGIIMITRSKKRKAIQTNMLSTDDETTQVSASSSPRSIFSSIASSPPSYILASSRSSSSSPLSVDVVSEATSARDPSPATVSTITRKKWSEEMNTFIWRTYLIIINLETDTSSYLTSLHQQFINRFPQMNVSKQRVGDQRRAIVYKKLLPTTTLDIIRLEVSNSLKTHNTVLHPQTQTLQSNMSQINTNSPSQPNRRMKWSTELNENLIKCYYICTKMETDMTVWRKKLKEMFIEIYPQLSHLSEQRISDQKRVVINNRMISETRLQELKTDVQNTLNQTNSYEQHQNSHVISDSIQTQPPFNNNIAQLHTQETELELRNEPNYLNRIDVEALTQHNSTNMETNQERNQELEETFLQTLQYFTNTHPTQRNYIPKQKSSKKFAKIVSYINNIILPNYLNSDIDFDTLQTIIYSAAWTAAKANGSKLLHVSAENMVNTGQKNHKPKWQRRLEYKIKDLRAKIGRLTQYIYGNRSRKLTQEVNTILKHYKIHSTHEEPNTLLTHFLDTLKQKLTLVNSRLKRYTKCTHRKTQNNQFRNNERQFYRTLKNSTTNQTTPTNNVNNVNSILPPIDEIKQFWSQIWERPIGHNTEADWIKVETENYINIEQMEFEHIKRDTFLDVLKKLHNWKAPGSDYIHNFWYKIFTHTHPYLYNHINNFISNPTTMPCYISEGITYMLPKDSNDRTNPAKYRPITCLQTIYKIITSCISHVIYKHLDRNKILAEEQKGCKKFSQGCKEQLTIDSVILNQVQRKKADIYTMYIDYKKAYDSVPHTWLLEVLNIYKIHPQITTFLSNIIKQWSTRLHLTSPTGIVETETIKIQRGIFQGDSLSPLWFCLALNPLSNKLNSLRPGYQLQFNDTLNDILTDDQNCKINHPLYMDDIKLYASSPDDLYELANTTEHFSKDIGMEFGIDKCKINSIRAGKTYEHSHTIQTGETIDSLDENGTYKYLGYIQNKQLKHKEIKTTLTQQFKHRLKSIFNTQLHSKNTVKAINTYAIPVLTYSFGIINWTKTELKNLQRVINTTLTKHRKHHPRSCVQRLTLPRKEGGRGIIDISNLHNKQITTLRKYFNSKSTTSSLHKAIVYNDQKLTPLNMFDKTTQNNEKQTTRQTKILEWTQKSLHGRHRKDLEQLNVDKLASNEWLCRGDLFPETEGFMVAIHDQVIETRNYQKYIMRIPHANDICRRCSSSSETIQHITGACKAIVQTDYKHRHDQIANIIHQRLAIKYDLITTPPTPYYKYNPEIVLENNTHKLYYDRAILTDKTTHYNRPDITLLDKINKTAQIIDIAVPNTHNLQSTIAEKLSKYTDLKIEISRMWRLSNATIIPIVISTTGVIPK

SEQ ID NO: 31223 - protein, 1416 aa, Acronicta aceris
MSLATRGTNMITRSKTRKAIQANAATMDVEPSQSSRPSSPRSIFSSIASSPPSYLLSSSRSSSLSPRTVDVAMEATSARNPLPATVSTITRKKWSEEMNRFIWRTYLIITNLETDTNSYLTSLHQQFIDKFPQMNVSKQRVGDQRRAIVQKKLLPRTTLETIRLEVSDRLQIYNSDLHSHNSTSQQFIASHTGPTQQSQLKTRMKWSKEHNETLIKCYFIITKMETDMTVWRKKLKEKFVEFYPQLLHLSEQRISDQKRVIINNRMISEARLTELKLYAESVLNQTDSYMESIDHISQSTTEDVQEILLTNNNTQLTNIEQSHTHETELENNPNYLNSIDIEALTNSTANTYHTDTNIEIRDQANPELEEIFANTLLHFTDTNPTKRNYIPKQKSSKKLGKIVTYIDNCILPKYVSNETDFKTLQTIIYSAAWTAAKANGSKLSYKTPENVANIHQRINKPKWQRRLEYKIKDLRAKIGRLTHYIHGNTSRKLDREIHKILEHYKIHSTHEEPNTQLTHFLDTLKQKLTLLSSRLNRYTKCTLRKSQNNQFNKNEKQFYRSIKKSTTNRTMPSNSENNTTNTLPPTSEIHKFWSNIWERPMLHNTEAEWIRTETENLVNTEQMDFEHIPIDTFHDVLKKLHNWKAPGSDYIHNFWFKKFTHIHPYLFNYINEFIKNPNTMPAYLTEGITYMLPKDFNDTNNPAKYRPITCLQTIYKIITSCITHIIYKHLDTNSILTEEQKGCRKYSQGCKEQLTIDAVILKQVQQKKKDLYTMYIDYKKAYDSVPHTWLIEVLNIYKIHPQIIAFLNNVIKQWTTRLYLPSPTGEAETEPIKIQRGIFQGDSLSPLWFCLALNPLSHKLKSVAPGYLLQYNDMSSDRLSDKQDCKINHLLYMDDIKLYASSPDDLYQLANITEQFSNDIGMEFGIDKCKINSVKGGQTFEHTHTIQTGETIESLDEHGTYKYLGYIQAKQIKHKQIKNQLTQQFKHRLKSIFNTELYARNTIKAINTFAIPVLTYSFGIINWTKTELRKLQRIINTTLTKHRKHHPRSCVQRLTLPRKEGGRGIIDITNLHNKQISTLRTYFNYKSTTSNLHKAIVFNDRKLTPLNMSDKNKQSNETQTDGPTKILQWTQKSLHGRHRQDLCQPNVDKLASNEWLRRGDLFPETEGFMTAIQDQVIETRNYQKHIMRIPQIHDICRRCNSSPETIQHITGACKSIVQTDYKHRHDQIAKIIHQKLALKYNLISTPPVPYYKYNPEIILENNNHKLYYDRAILTDRTTHYNRPDITLLDKINKTAQIIDIAIPNTHNLQSTIAEKLTKYTDLKIEISRMWRLSHVSIIPIVLSTTGVIPKQLHQSLKSLDLAPYTYQSLQKAAILNTCRIVRKFLQNDNETLIPASHPQVTATVSTRTQSRNHTQT

SEQ ID NO: 31224 - protein, 1431 aa, Eilema sororculum
MVNAGLCHGGPFMSPASRGNNMLELENHKRKYNLRPLPGGRRDPTRNDDCRAQCIRINDNAVTNDQISLAGSSPTLFSSIPSSNQSFCTSPVPSTTESSTTYHSVQLVNVAQGTHQVNEPVPTTSVVNKRKRWTYEMNEFILRTYLQLTNLETDTNSYLPPLHTKFLEKYPTMEVSRQRIGDQRRAIVRRKLLPQDSIDTIYNEVRTELRNIQKQVTRHSTQYSTQHFTRHSTQDPTQLSTQHFTQSNTGAKTQPQQRLRWTTEYNEAIIRSYFKVTELETNKTLYRKNLHQEFIRLYPDLVHLTEQRIADQRRLIENNRYISKTRLEEIKKEVTDELLLTHRNSDIGYVNIEQTQTVRLESYETENNCNTFTNIEVERLLEETTEPTTHPTLTLEQNCKIEETFSQALQFYTNTDPTARNYIPKQKTAKSFTDTVNYINNFILPAYLNSDTSFETLQTIIYCAAWTAAKHNGAKLSLAPTEVTGQIQKDYKPKWQRRLERKILEYRAKIGRLTQYIEGNRNRKLVKQVNKTLEQYKIHTSHEEPNTQLTHFLDTLKQKLTVIKSRLKRYTACTQRKSQNNQFCNNEKQFYRKLKQSTTNRHTPNNTGSITNTPQLDDLQKFWSDIWEKPVRHNTEAEWIKTEKSSQANTSEMHFECVPIEIFQTTIQKSHNWKAPGSDYLHNYWYKKFTKSHPYLHNYINSFIIDSSKMPAYITDGVTYMLPKDPKDTANPAKYRPITCLQTIYKIITSCLTHMIYKHLETNNILTEEQKGCRKFSQGCKEQLTIDSVIHRQVQRSKKDLCTMYIDYKKAYDSVPHTWLKEVLQIYKVNPQIITFLSNVMERWTTHIHLNTRTGTVTTDSIKIKRGIFQGDSLSPLWFCMALNPLSKHLNSLDSGYLLDYLENPTDRLTEKRTCKINHLLYMDDIKLYATTPDDLDILAQFTETFSNDISMEFGLDKCKINSVILGKIHKHSYEVQTGETIDSLDENDTYKYLGYNQSKQIHHKETKYKLTHQFKHRLNSILNTQLNSRNLIKAVNAYAIPILTYSFGIINWTKTELKNLQRIINTTMTKHRKHHPRSCLQRLTLPREEGGRGIIDVINLHNKQITILKSYFSSKTTTSTLHKAIAYNDQKHTPLNMHDWTTQNNETIKSIQTKIAEWTQKSLHGRHRQDLCQPHVDKKASNEWLRGGYLFPETEGFMMAIQDQVIETRNYQKHIIRNHLVSDVCRRCNSSSETIQHITGACKAIVQTDYKHRHDQVANIIHQKIALKYNLITSTPLPYYKYVAETVLENQTHKLYFDRAILTDKTIHYNRPDITLIDKQNNTAQLIDIAVPNTHNLQTTISEKLSKYVELKMEVTRMWRLNNATIIPIVLSTTGVIPAQLHQSIKTIDLPCSIYKILQKAVILNTCRIVRKFLNNDNTSNTHSPTQTHQ

SEQ ID NO: 31225 - protein, 1189 aa, Ochropleura plecta
MKWSNELNETLMKCYFRVTKMETDLTVWRKNLKEKFIECYPHLSHLSEQRISDQKRVIVNNNMIPEARLQILKSIVENELIETGSFQRQADSRGSNTEVGNLHAITNTDTLNIEIENREEPSQREHSGERANVNNLGTDHPIHLNTQHTCQDRNPDIDEIFSQTLQYYKDTHPTERSYIPKQKTSKRLANIVSYINTIVLPEHVTSDTDFNALQTIIYCAAWTAAKANGSKISLTPLEDRSRLHQVYMPKWQKRLEHKIEVFRAKIGRLTHYMRGHRSRKLNKAVESILKDYKTHTTHEQPNTQLEHFLDTLKQKLTVIKSRLNRYTKCTLRKTQNKQFRNNERQFYRSLKNSTTNQTTSNNNTHISFPTTEELQQFWVGIWENPVCHNAEAEWIKEEEAIHSNTEAMFFDQIEVGTFHDVLDRIHNWKAPGSDHIHNYWYKKFTHTHPHIFNHINNFIKDPTTLPSYITEGKTYMLPKDPSDSENPAKYRPITCLQTIYKIMTSCITNIIYKHLETQKILTEEQKGCKKLSQGCKEQLTIDAVIHKQVQRTKKDLHTMYILEVLKIYKIHPQLIQFLGNIVEKWKTRLQLNTSTEIVQTEPIKIQRGIFQGDSLSPLWFCLALNPLSNKLSALIPGFQLQYNDIMTDTLTDQHNCKINHLLYMDDIKLYAASPDDLYELADVTEKFSNDIAMEFDIDKCKINSIKAGETYTHSYQMQTGVLIDSLDETGTYKYLGYIQGKQIMHKEIKTTLTKQFRHRLKTIFSTQINAKNTIKAINTYAIPILTYSFGIIKWNKTDLKNLQRIVNTTLTKHRRHHPRSCVQRLTLPRNEGGRGIIDITNLHNKQITTLRTYFDNKSSTSTLHKAIAYNDRKLTPLNLYDKTTQINEKQSDRQTKIAEWTQKSLHGRHRHDLNLPNVDKLASNEWLRRGELFPETEGFMIAIQDQVIETRNYRKHIMRVPQTIDVCRRCNSSPETIQHITGACKAVVQTDYKHRHDQIANIIHQKLAIKYNLISTPPVPYYKYQPEIVLENATHKLYFDRAIFTDRTIHYNRPDITLLDKHNKTAQIIDIAVPNTHNLQNTIAEKLSKYTDLKIEISRMWCLSNVTIVPIVVSTTGVIPKQLHQSLKTLDLPPYTYQNLQKAAILNTCRIVRIFLQNENESIVTTTHTQLPVTTHTLSSSHPITTFTG

SEQ ID NO: 31226 - protein, 1379 aa, Spodoptera frugiperda
MITRSKVKNTMQAKVPPADEEASAVSLSSSPRSIFSSLTPSPLSFTTRSLRSSISSTMSADVVSEASSAKNPSPAAGKKGTRKKWSTEMNEFIWRTYLIITKLETETNAYLSILHNKFTQQFPDMAVSRQRIGDQRRAIVNNKLLPATTLDAIRLEVRNYLQNQNSTTQIQEQTHQERIRTQISPLTHTQSKTRMKWSNELNETLIKCYFMVTKMETDMTVWRKNLKEKFTQHYPHLSHLSEQRISDQKRVIMNNNMISEARLQRIKLIVQQELDEIGSIETSSFERVHSSNVHENTSNINLELHSHINITNREPMSPEFRNSNIIQLSDNTPDQQLTATNTQIEHFERNAEIDELFSQTLQHYSETHPTDRCYIPKQKTSKKLAKIVHYINQVILPDYVISDIEFSQLQTILYAAAWTAAKANGSKISLSSAQNRNNPQRDYKPKWQKRLERKINAIRTKIGRLTYYIQGHRSRKLRKEVNKILRDYRIHTTHEEPNTHLAHYLDTLKQKLAVFKSRLSRYTKCTLRKTQNNQFRNNEKQFYRTLKQSTTNHTTSNSTANTSLPSEENLKSFWASIWQNPVCHNAEAAWIKMEENKYENIPQMQFEQVDIETFHDVINKLHNWKAPGSDCLHNYWYKKFTTIHPHLFNHINNFIKDPNNIPSYITEGITYMLPKDLNDTSNPAKYRPITCLQTIYKIMTSCITHIIYKHIDTQNILTEEQKGCRKFSQGCKEQLVIDSVILKDVQKHKKDLYTMYIDYKKAYDSVPHSWLLHVLNIYKIHPHITHFLEIIISKWQTRLHLNTPTGTIATEFIKIQRGIFQGDSLSPLWFCLAINPLSNKLNSLHSGFQLQYRDTTSTIETTRQLCKINHLLYMDDIKLYASSPEGLYDLADTTEIFSNDIAMEFGIDKCKINSVKAGKTYTHSYQLHTGDTIHSLDETETYKYLGYIQAKQILHKDIKNQLIKQFKHRLKVICNSELNSRNTIKAINTFAIPILTYSFSIINWSKTELQNLQRNINTTLTKHRRHHPRSCTQRLTLSRNDGGRGIIDITNLHNKQITTLRSYFFSKSLTSTLHYAIAQNDKKLTPLNMSDRETQNNEKQIDRQTKIAQWAQKSLHGRHYHDLSQPNVDKLASNEWLRRGELFPETEGFMIAIQDQVIETRNYQKHIMHITLPTDTCRRCNSASETIQHITGACKSIVQTDYKHRHDQVANIIHQKLALKYNLISTPPVPYYKYQPQTVLENSLYKLYFDRAILTDKTTHYNRPDITLIDKANKTAQIIDIAIPNTHNLQNTIAEKLSKYTDLKIEISRMWRLNNVAIIPIVLSTTGVIPKQLHQSIKSLDLPPYIYQSLQKAAILNTCRIVRKFLNESDNSSYTQTQN

SEQ ID NO: 31227 - protein, 1412 aa, Agrochola circellaris
MITRSKKKQQIQANKPSADDETSTVSSSSSPRSIFSSIVSSPPSYLSRSLRSSSSSPMSVDVVSEATTAINPSPATVITNTRKKWNEDMNQFIWRTYLIITNLETETNSYLTSLHQQFINRFPEMNVSKQRVGDQRRAIVHNKLLSVTTLDTIRLEVSRKLQTDTTNLDTHTRTPTQLNTDQCNTHLQAEPKRRMRWSNEMNETLIKSYFIATKMETDMTVWRKKLREMFIDFYPQLSHLSEQRISDQKRVILNNKMISDERLQDLKTYAVNTINQPNPYRQLEHHNLLIAADNTPTQAPTNNNTESALGNNQTHTQETEVGSEPNFLNNIDIGALTTTINTEHNTTYVEISQEICQELEETFSHTLQHFRSIHPTKRNYIPKQNTSKKLAQIVSNINNAILPKYVNADTDFETLQTVIYSAAWTAAKTNGSKLSYITSDSTTYTNQKNKKPKWQKRLELKVKNLRTKIGRLTAYMQGNRGWRLVREVHTILENYRIHSTHEEPNTQLTHFLDTLKQKLTLVNSRLNRYNNCTLRKIQNNKFRNKEKQFYRTLKNSTTNQTAPSNNENNTNHSLPPVQELQQFWSGIWERPICHNNEAEWVKTETGNHLHTEQMEFEQIPIDTFHDVLQKLHNWKAPGSDYIHNFWYKKFTHIHPFLYNYINTFIKNPTTMPTYIAEGITYMVPKDSNDSANPAKYRPITCLQTIYKIITSCITQIISKHLESNSILSEEQKGCRKFSQGCKEQLTIDAVILKQVQRNKKDLYTMYIDYKKAYDSIPHTWLLEILNIYKINPQIIAFLNNTITQWTTRLHLTTSTGFVETEPIKIQRGIFQGDSLSPLWFCLALNPLSNKLNSLMPGYNLNYNDTIDGIRTDRHNCKINHLLYMDDIKLYASSPEDLNELANATDKFSSDIGMEFGIDKCKINSVRAGQTYEQSYITQSGETIDSLDENGTYKYLGYIQAKQIKHKTIKNKLTQQFKHRLKSILNTQLYSKNTIKAINTYAIPVLTYSFGIISWTKTELKSLQRVINTNLTKYRKHHPRSCVQRLTLPRKEGGRGIIDITNLHNKQISTLRKYFNTKSTTSTLHKAIVYNDRKLTPLNMSDKTTQINEKQTDRQTKISEWTQKSLHGRHRQDLCQPNVDKVASNEWLRRGDLFPETEGFMTAIQDQVIVTRNYQKHIMRVPLSTDICRRCHSSSETIQHITGACKAIVQTDYKHRHDQIANIIHQKLAIKYKLITTPPVPYYKYTPETVLENTTHKLYFDRAILTDRTTHYNRPDITLLDKINKTAQIIDIAVPNTHNLQNTIAEKLSKYTDLKIEISRMWRLGSVTIIPVVLSTTGVIPKQLHQSLKTLDVAPSTYQTLQKAAILNTCRIVRKFMQNDNDAQISHAQTSLTTATQNQNIIAPRHILSPIIT

SEQ ID NO: 31228 - protein, 1398 aa, Ochropleura plecta
MLTRSKTKKSIQANMPSVDDETSSVSSSSSPKSIFSSIVSSPPSYLSRSSRSSSILSSMAADVVSEANSANYPSPTAVSTTTRKKWSKEMNEFIWRNYLIITNLEADTKAYLTSLHHQFTEKFPNMKVSKQRIGDQRRAIVSKNLLPSTTLDAIRREVSNCLPTHSSDSQLESPPEILLSQTDTHHHSQSEPKRRMKWSNELNETLMKCYFRVTKMETDLTVWRKNLKEKFIECYPHLSHLSEQRISDQKRVIVNNNMIPEARLQILKSIVENELIETGSFQRQADSRGSNTEVGNLHTITNTDTLNIEIENREEPSQREHSGERTNVNNLGTDHPIHLNTQHTCQDRNPDIDEIFSQTLQYYKDTHPTERSYIPKQKTSKRLAKIVSYINTIILPEHVTSDTDFNALQTIIYCAAWTAAKANGSKISLKPLEDRSRLLQVYMPKWQKRLEHKIEVFRAKIGRLTHYMRGHRSRKLNKAVEAILKDYKTHTTHEQPNTQLEHFLDTLKQKLTVIKSRLNRYTKCTLRKTQNKQFRNNERQFYRSLKNSTTNQTTSNNNTHISFPTTEELQQFWAGIWENPVCHNAEAEWIKEEEAIHSNTEAMFFDQIEVGTFHDVLNRIHNWKAPGSDHIHNYWYKKFTHTHPHIFNHINNFIKDPTTLPSYITEGKTYMLPKDPSDSENPAKYRPITCLQTIYKIMTSCITNIIYKHLETQKILTEEQKGCKKLSQGCKEQLTIDAVIHKQVQRTKKDLHTMYIDYKKAYDSVPHSWLLEVLKIYKIHPQLIQFLGNIVEKWKTRLQLNTSTEIVQTEPIKIQRGIFQGDSLSPLWFCLALNPLSNKLNALIPGFQLQYNDIMTDTLTDQHNCKINHLLYMDDIKLYAASPDDLYELADVTEKFSNDIAMEFGIDKCKINSIKAGETYTHSYQMQTGVLIDSLDETGTYKYLGYIQGKQIMHKEIKTTLTKQFRHRLKTIFSTQINAKNTIKAINTYAIPILTYSFGIIKWNKTDLKNLQRIVNTTLTKHRRHHPRSCVQRLTLPRNEGGRGIIDITNLHNKQITTLRTYFDNKSSTSTLHKAIAYNDRKLTPLNLYDKTAQINEKQTDRQTKIAEWTQKSLHGRHRHDLNLPNVDKLASNEWLRRGELFPETEGFMIAIQDQVIETRNYRKHIMRVPQTIDVCRRCNSSSETIQHITGACKAVVQTDYKHRHDQIANIIHQKLAIKYNLISTPPVPYYKYQPEIVLENATHKLYFDRAIFTDRTIHYNRPDITLLDKHNKTAQIIDIAVPNTHNLQNTIAEKLSKYTDLKIEISRMWCLSNVTIVPIVVSTTGVIPKQLHQSLKTLDLPPYTYQNLQKAAILNTCRIVRKFLQNENESIVTTTHTQPPVTTHTLSSSHPITTFTG

SEQ ID NO: 31229 - protein, 1409 aa, Mesoligia furuncula
MITRSKTKKQIQANKPSADEISPVSSSASPRSIFSSIVSSPPSYLSHSSRSSSSSSPMSVDVVSEATTAMNPSPAIVKSNTRKKWSEDMNQFIWRTYLIITKLDTETNSYLTSLHQQFINRFPQMNVSKQRVGDQRRAMVQKKLLSATTLEKIRLEVSRELQSDTTNLDTHMRTPSQLNTDQNNTHLQSGSKSRMRWSNEMNETLIKCYFITTKMETDMTVWRKKLREMFIEFYPQLSHLSEQRISDQKRVVLSNKMITEARLQDLKTYAENTLNHANPYRQTEYHNSLIAPDITPTQASTNNNTETAYINNQTYTQDTEVGSEPNFLNSIDVGSLTSTIINTEHNTLNVETSQELKETFSHTLQHFTNVQPTKRNYIPKQKPSKKFAQIVSYINNEILPKYVNADTDFETLQTVVYSAAWSAAKTNGSKLSRITSENTANLNQKNKKPKWRKRLELRVKDLRTKIGRLTAYMQGNRGWRLVREVHTILENYRIHSIHEEPNTQLTQFLDTLKQKLTLVNSRLDRYNKCTSRKIQNNKFRNNEKQFYRTLKNSTNNQTLPNNIENNSNHSLPSVDELQNFWSRIWERPICHNADADWIKIESENYRHTEQMEFEHVPIDTFHDVLQKLHNWKAPGSDYIHNFWYKKFTHIHPYLYNYINNFIQNPISMPTYIAEGITYMIPKECNDSTNPAKYRPITCLQTIYKIITSCITQIIYKHLEENTILSEEQKGCRKFSQGCKEQLTIDSVILKQVQRKKKDLYTMYIDYKKAYDSVPHTWLLEVLKIYKINPQIITFLNNTMTQWTTRLHLTSSTGTVETEPIKIQRGIFQGDSLSPLWFCLALNPLSNKLNSLLPGYNLRYNDTADDIQTDRQNCKINHLLYMDDIKLYASTSDDLYLLAKTTDQISSDIGMEFGIDKCKINSVKAGRTYEHTYTLQTGETIDSLDENGTYKYLGYIQAKQIKQREIKNKLTQQFKHRLKSIFNTQLYSRHTTKAINTYAIPVLTYSFGIISWTKTELKSLQRIINTSLTKYRKHHPRSCVQRLTLPRKEGGRGIIDITNLHNKQISTLRKYFHTKSTTSILHKAIVYNDQKLTPLNMADQTTQINEKQTDRQTKILEWTQKSLHGRHRQDLCQPNVDKLASNEWLRHGDLFPETEGFMTAIQDQVIETRNYQKHIMRVPLSTDICRRCHSSSETIQHITGACKAIVQTDYKHRHDQIAKIIHQKLGIKYKLITTPQVPYYKYNPETVLENATHKLYFDRAILTDRTTHYNRPDITLLDKINKTAQIIDIAVPNTHNLQNTIAEKLSKYTDLKIEITRMWHLGGVAIIPVVLSTTGVIPKQLHLSLKTLDLAPSTYQTLQKAAILNTCRIVRKFLQNDNDAQMSHAQTSSTIATQSHNIPSSRHTLSSTIT

SEQ ID NO: 31230 - protein, 1412 aa, Agrochola circellaris
MITRSKKKQQIQANKPSADDETSTVSSSSSPRSIFSSIVSSPPSYLSRSLRSSSSSPMSVDVVSEATTAINPSPATVTTNTRKKWNEDMNQFIWRTYLIITNLETETNSYLTSLHQQFINRFPEMNVSKQRVGDQRRAIVHNKLLSVTTLDTIRLEVSRKLQTDTTHLDTHTRTPTQLNTDQCNTHLQAEPKRRMRWSNEMNETLIKSYFIATKMETDMTVWRKKLREMFIDFYPQLSHLSEQRISDQKRVILNNKMISDERLQDLKTYAVNTINQPNPYRQLEHHNLLIAADNTPTHAPTNNNTESALGNNQTHTQETEVGSEPNFLNSIDIGALTTTINTEHNTTYVEISQERCQELEETFSHTLQHFRNIHPTKRNYIPKQNTSKKLAQIVSNINNAILPKYVNADTEFETLQTVIYSAAWTAAKTNGSKLSYITSDSTTYTNQKNKKPKWQKRLELKVKNLRTKIGRLTAYMQGNRGWRLVREVHTILENYRIHSTHEEPNTQLTHFLDTLKQKLTLVNSRLNRYNNCTLRKIQNNKFRNNEKQFYRTLKNSTTNQTAPSNNENNTNHSLPPVQELQQFWSGIWERPICHNNAAEWVKTETGNHLHTEQMEFQQIPIDTFHDVLQKLHNWKAPGSDYIHNFWYKKFTHIHPFLYNYINTFIKNPTTMPTYIAEGITYMVPKDSNDSANPAKYRPITCLQTIYKIITSCITQIISKHLESNSILSEEQKGCRKFSQGCKEQLTIDAVILKQVQRNKKDLYTMYIDYKKAYDSIPHTWLLEILNIYKINPQIIAFLNNTITQWTTRLHLTTSTGFVETEPIKIQRGIFQGDSLSPLWFCLALNPLSNKLNSLMPGYNLNYNDTIDGIRTDRHNCKINHLLYMDDIKLYASSPEDLNELAIATDKFSSDIGMEFGIDKCKINSVRAGQTYEQSYITQSGETIDSLDENGTYKYLGYIQAKQIKHKTIKNKLTQQFKHRLKSILNTQLYSKNTIKAINTYAIPVLTYSFGIISWTKTELKSLQRVINTNLTKYRKHHPRSCVQRLTLPRKEGGRGIIDITNLHNKQISTLRKYFNTKSTTSTLHKAIVYNDRKLTPLNMSDKTTQINEKQTDRQTKISEWTQKSLHGRHRQDLCQPNVDKVASNEWLRRGDLFPETEGFMTAIQDQVIVTRNYQKHIMRVPLSTDICRRCHSSSETIQHITGACKAIVQTDYKHRHDQIANIIHQKLAIKYKLITTPPVPYYKYTPETVLENTTHKLYFDRAILTDRTTHYNRPDITLLDKINKTAQIIDIAVPNTHNLQNTIAEKLSKYTDLKIEISRMWRLGSVTIIPVVLSTTGVIPKQLHQSLKTLDVAPSTYQTLQKAAILNTCRIVRKFMQNDNDAQISHAQTSLTTATQNQNIIAPRHILSPIIT

SEQ ID NO: 31231 - protein, 1398 aa, Ochropleura plecta
MLTRSKTKKSIQANMPSVDDETSSVSSSSSPKSIFSSIVSSPPSYLSRSSRSSSILSSMAADVVSEANSANNPSPTAVSTTTRKKWSKEMNEFIWRNYLIITNLEADTKAYLTSLHHQFTEKFPNMKVSKQRIGDQRRAIVSKNLLPSTTLDAIRREVSNCLPTHSSDSQLESPPEILLSQTDTHHHSQSEPKRRMKWSNELNETLMKCYFRVTKMETDLTVWRKNLKEKFIECYPHLSHLSEQRISDQKRVIVNNNMIPEARLQILKSIVENELIETGSFQRQADSRGSNTEVGNLHTITNTDTLNIEIENREEPSQREHSGERTNVNNLGTDHPIHLNTQHTCQDRNPDIDEIFSQTLQYYKDTHPTERSYIPKQKTSKRLAKIVSYINTIILPEHVTSDTDFNALQTIIYCAAWTAAKANGSKISLKPLEDRSRLHQVYMPKWQKRLEHKIEVFRAKIGRLTHYMRGHRSRKLNKAVEAILKDYKTHTTHEQPNTQLEHFLDTLKQKLTVIKSRLNRYTKCTLRKTQNKQFRNNERQFYRSLKNSTTNQTTSNNNTHISFPTTEELQQFWAGIWENPVCHNAEAEWIKEEEAIHSNTEAMFFDQIEVGTFHDVLNRIHNWKAPGSDHIYNYWYKKFTHTHPHIFNHINNFIKDPTTLPSYITEGKTYMLPKDPSDSENPAKYRPITCLQTIYKIMTSCITNIIYKHLETQKILTEEQKGCKKLSQGCKEQLTIDAVIHKQVQRTKKDLHTMYIDYKKAYDSVPHSWLLEVLKIYKIHPQLIQFLGNIVEKWKTRLQLNTSTEIVQTEPIKIQRGIFQGDSLSPLWFCLALNPLSNKLNALIPGFQLQYNDIMTDTLTDQHNCKINHLLYMDDIKLYAASPDDLYELADVTEKFSNDIAMEFGIDKCKINSIKAGETYTHSYQMQTGVLIDSLDETGTYKYLGYIQGKQIMHKEIKTTLTKPFRHRLKTIFSTQINAKNTIKAINTYAIPILTYSFGIIKWNKTDLKNLQRIVNTTLTKHRRHHPRSCVQRLTLPRNEGGRGIIDITNLHNKQITTLRTYFDNKSSTSTLHKAIAYNDRKLTPLNLYDKTAQINEKQTDRQTKIAEWTQKSLHGRHRHDLNLPNVDKLASNEWLRRGELFPETEGFMIAIQDQVIETRNYRKHIMRVPQTIDVCRRCNSSSETIQHITGACKAVVQTDYKHRHDQIANIIHQKLAIKYNLISTPPVPYYKYQPEIVLENATHKLYFDRAIFTDRTIHYNRPDITLLDKHNKTAQIIDIAVPNTHNLQNTIAEKLSKYTDLKIEISRMWCLSNVTIVPIVVSTTGVIPKQLHQSLKTLDLPPYTYQNLQKAAILNTCRIVRKFLQNENESIVTTTHTQPPVTTHTLSSSHPITTFTG

SEQ ID NO: 31232 - protein, 1413 aa, Noctua fimbriata
MLTRSKTKKSIQANMPAVDDETSPVSSSSSPKSIFSSIASSPPSYLSRSSRSSSLLSPMTVEVVSEASLASNPSPTAVSTTTRKKWSKEMNEFIWRNYLIITNLEYDTKAYLTSLHHQFIEKFPNMKVSKQRIGDQRRAIVSKKLLPSTTLDTIRLEVSNHLRTHNNELELQSPPEFPTSQTDSQPHSQSEPKRRMKWSNELNETLMKCYFRATKMETDMTVWRKNLKEKFIECYPNLSHLSEQRISDQKRVIVNNSMIPVARLQVLKSIVEKELFETESFQRQVDSRMSNTDVENVHLHTNTETINIDIENIEPPQTENIGVGIDDGNINNLGPEHPIHLNTQHTSLVRNPEIDEIFSQTLQYYKDTQPTERSYIPKQKSSKKLANIVSYINKVILPEQVTSDTNFNHLQTVIYCAAWTAAKANGSKISLAPPVDRSSRLQQAHKPKWQKRLENKIESIRAKIGRLTQYIQGVRSRKLIKAVEIILKDYRIHTSHEQPNTQLEHFLDTLKQKLTVVKSRLNRYTKCTQRKTQNNQFRNNEKQFYRSLNKSTTNETISDNNTNTAFPTTEELQQFWAGIWESPVYHNTEAEWIKGEQVIQTNTEAMIYDHVEVATFHDVLTKIHNWKAPGSDYIHNYWYKKFTHIHPHIFNHINNFIKDPTTIPTYITEGKTYMLPKDPSDSANPAKYRPITCLQTVYKIMTSCISHIIYKHLETQKILTEEQKGCKKLSQGCKEQLTIDAVIHRHVQRTKKDLHTMYIDYRKAYDSVPHSWLLEVLNIYKIHPRLINCLGTIVEKWKTRLQLNTSTGTVETEFIKIQRGIFQGDSLSPLWFCLALNPLSNKLNALLPGYQLQYSDTMTDILTDQHYCKVNHLLYMDDIKLYASSPDDLYELADVSEQFSKDIAMEFGIDKCKINSIRAGKTFTHSYQMQTGATIDSLDETGTYKYLGYIQAKQILHKEIKTKLTKQFKRRLKTIFNTQINAKNTIKAINTYAIPILTYSFGIIKWNKTDLKNLQRIINTTLTKHRRHHPRSCVQRLTLPRNDGGRGIIDITNLHNKQITTLRKYFENKSSTSTLHKAIAYNDKKLTPLNMYDRTTQSNEQQTDRQTKIAEWTQKSLHGRHRHDLNLPNVDKLASNEWLKRGELFPETEGFMIAIQDQVIETRNYQKHIMRVPQTVDICRRCNSSSETIQHITGACKAIVQTDYKHRHDQIANIIHQKLAIKYNFISTPPVPYYKYQPETVLENTTHKLYFDRGIFTDKTIHYNRPDITLLDKCNKTALIIDIAVPNTHNLQNTIAEKLSKYVDLKIEISRMWRLNNVAIVPIVLSTTGVIPKQLHQSLKTLDLPPYTYQSLQKAAILNTCRIVRKFLQNENDTVISTSHTRPSITAQTQVNGHSSSHNLTLSSSHHITTLPG

SEQ ID NO: 31233 - protein, 1443 aa, Amphipyra berbera
MPTLENRGPPVLFTLATVNAGLCCGRLCKSLATRGIIMITRSKKRKAIQTNMLSTDDETTQVSASSSPRSIFSSIASSPPSYILASSRSSSSPLSVDVVSEATSARDPSPATVSTITRKKWSEEMNTFIWRTYLIITNLETDTSSYLTSLHQQFINRFPQMNVSKQRVGDQRRAIVYKKLLPTTTLDIIRLEVSNSLKTHNTVLHPQTQTLQSNMSQINTNSPSQPNRRMKWSTELNENLIKCYYICTKMETDMTVWRKKLKEMFIEIYPQLSHLSEQRISDQKRVVINNRMISETRLQELKTDVQNTLNQTNSYEQHQNSHVISDSIQTQPPFNNNIAQLHTQETELELRNEPNYLNRIDVEALTQHNSTNMETNQERNQELEETFLQTLQYFTNTHPTQRNYIPKQKSSKKFAKIVSYINNIILPNYLNSDIDFDTLQTIIYSAAWTAAKANGSKLLHVSAENMVNTGQKNHKPKWQRRLEYKIKDLRAKIGRLTQYIYGNRSRKLTQEVNTILKHYKIHSTHEEPNTQLTHFLDTLKQKLTLVNSRLKRYTKCTHRKTQNNQFRNNERQFYRTLKNSTTNQTTPTNNVNNVNSILPPIDEIKQFWSQIWERPIGHNTEADWIKVETENYINIEQMEFEHIKRDTFLDVLKKLHNWKAPGSDYIHNFWYKNFTHTHPYLYNHINNFISNPTTMPCYISEGITYMLPKDSNDRTNPAKYRPITCLQTIYKIITSCISHVIYKHLDRNKILAEEQKGCKKFSQGCKEQLTIDSVILNQVQRKKADIYTMYIDYKKAYDSVPHTWLLEVLNIYKIHPQITTFLSNIIKQWSTRLHLTSPTEIVETETIKIQRGIFQGDSLSPLWFCLALNPLSNKLNSLRPGYQLQFNDTLNDILTDDQNCKINHLLYMDDIKLYASSPDDLYELANTTEHFSKDIGMEFGIDKCKINSIRAGKTYEHSHTIQTGETIDSLDENGTYKYLGYIQNKQLKHKEIKTTLTQQFKHRLKSIFNTQLHSKNTVKAINTYAIPVLTYSFGIINWTKTELKNLQRVINTTLTKHRKHHPRSCVQRLTLPRKEGGRGIIDISNLHNKQITTLRKYFNSKSTTSSLHKAIVYNDQKLTPLNMFDKTTQNNEKQTTRQTKILEWTQKSLHGRHRKDLEQLNVDKLASNEWLCRGDLFPETEGFMVAIQDQVIETRNYQKYIMRVPHANDICRRCSSSSETIQHITGACKAIVQTDYKHRHDQIANIIHQRLAIKYDLITTPPTPYYKYNPEIVLENNTHKLYYDRAILTDKTTHYNRPDITLLDKINKTAQIIDIAVPNTHNLQSTIAEKLSKYTDLKIEISRMWRLSNATIIPIVISTTGVIPKQLHQSLRTLDLPPYLYTSLQKAAILNTCRIVRKFLQNDNETQMITPHSQASNTTRTQSLNQTNSSQSNIMSSHHITNQ

SEQ ID NO: 31234 - protein, 1414 aa, Phlogophora meticulosa
MITRSKTKKDIQANMPSVDDETSTTSSSASPRSIFSSIASSPPSYLSRSSRSSSTSSPTSVDVVSEAILANKPSPTADIKNTRKKWSIEMNEFIWRTYLIITNLESDKNAYLTSLHQQFIEKFPNMKVSKQRIGDQRRAIVSKKLLPSITLDSIRLEVINNLQTPNNDLQLQPQTPQEILTFQTNTQPYSQSEPKRRMKWSNELNETLMKCYFRATKLETDMTIWRKNLKEKFIECYPHLSHLSEQRISDQKRVIVNNSMISETRLQILKSIVENELLETASFNWQSDSIRRTTENVHSQPPQNTLNIDIENIEMSQTQQIGVETEGDNLNAIELEHPVHSNTQTSQERNLQIDEIFSETLQYYRDTYPTERSYIPVQKSSKRLANIVSYINKVILPEQVTQDTEFNHLQTIIYCAAWTAAKANGSKISLSPPEYRNRLQQDRKPKWQKRLDHKIEVIRAKIGRLTHYMQGHRSKKLTKEVNTILRDYKTHTSHEEPNTHLTHFLDTLKQKLTVVKSRLDRYTKCTLRKTQNNQFRNNEKLFYRKLKASTTNHTTPSNNTNTVWPATDELQQFWAGIWENPVSHNTEAEWIKEEEAYQTNVEAMDFDQVDVETFHDVLQKIHNWKAPGSDHIHNYWYKKFTHIHPYLYNCINNFIKDPNIIPSYITEGKTYMLPKDPNDTANPAKYRPITCLQTIYKILTSCITQIIYKHLETQHILTEEQKGCRKFSQGCKEQLTIDAVILKHVQRTKKDLCSMYIDYRKAYDSVPHSWLLKVLSLYKIHSQLINFLGNILDKWQTRLHLNTSIGIVETEHIKIPRGIFQGDSLSPLWFCLALNPLSNKLNALKPGYQLQYIDTTTDILTDQQTCKLNHLLYMDDIKLYASSPDDLYELANATEQFSNDIAMEFGIDKCKINSIRAGKTYSHSYYMQTGDTIESLDENGTYKYLGYIQAKQILHKEIKATLTKQFKHRLKTICHSQINARNTIKAINTYAIPVLTYSFAIINWNKTELKHLQRVINTTLTKHRRHHPRSCVQRLTLPRNEGGRGIIDITNLHNKQITILRTYFYTKSPISTLHKAIAFNDKKLTPLNMFEKTTQSNEQQTDRQTKIAEWSKKSLHGRHRHDLNQPNVDKLASNEWLRRGELFPETEGFMIAIQDQVIETRNYQKHIMRVPQTIDRCRRCNSSSETIQHITGACKAIVQTDYKHRHDQLANIIHQKLAIKYKLIPTPPVAYYKYQPETVLENSTHKLYFDRAILTDKTTHYNRPDITLLDKINKTAQIIDIAVPNTHNLQNTIAEKLSKYIDLKIEISRMWRLSNVTIVPIVLSTTGVIPKQLHQSLKTLDLPPYTYQTLQKAAILNTCRIVRKFLQNDNDTSIVSSHTRAAANARTQSHELTQSPSQNPNTPSSHHNITNSQG

SEQ ID NO: 31235 - protein, 1386 aa, Heliothis virescens
MRLRNRVLPQAGTGANRDGESRTRSSGLVCPSYSGGGDVSQLTAQSQTVAEQQENSSLSSSPKSLFSSVPSSPPSYLLRSLRSSPISLESVDVVAEVAQTNDPPPTTASTTTRKKWSQEMNEFIWRTYLIITKLETDTNAYLALLHQQFTDKFPNMIVSRQRIGDQRRAIVNKKLLPSNVLDKIKHEVRSILELESESHSEILELTRQENLTYQTQTQSHTQSEPKRRMKWSNILNETLMLCYFRVTKMETDMTAWRKNLKDSFVEHNPHLSHLSEQRISDQKRVIVNNNMISETRLQELKTIVESELVETNTLRNNEYQTHTNLLNDHSEQPINTPVLNSDRDNIEVAEGHQTQLEAEINRINNINLEHTTQETDSERNPEIDRIFKEVLLYYKDTQPTDRSYIPKQRSSAKLAKIISYIDNIILREHLSTEVEFNQLQTLIYCAAWTAAKVNGSKISLTPMENANRHKTKYIPKWQKRLEYKIEVLRAKIGRLTHFIRGQRSSKLTRQVDLILKQHRIHTLHEEPNTQLTHFLDTLKQKLTVLKSRLSRYKKCTLRKTQNHQFKYNEKQFYRTLKTTTTNQTTPNSTTHPPCPTPEQLHQFWAGIWENPVSHNAEAGWIEEEAEKQINTNQMQFDHVEVQSFQEVLGRLHNWKAPGSDHIHNFWYKKFRSTHSHLFNHINKFIKNPATIPAYITEGITYMLPKDPNDSSNPAKYRPITCLQTIYKIMTACITHIIYKHLETQNILTEEQKGCRKYSQGCKEQLTIDSVILKQVQRNKKDLYTMYIDYKKAYDSVPHSWLLQVLNIYKVHPQIINFLSSIIRQWNTRLHLNTPTGTVETELIKIQRGIFQGDSLSPLWFCLALNPLSNKLNALRPGYQLQYEDTTTETDIINQSCKINHLLYMDDIKLYASSSDDLVELANTTEQFSNDIAMEFGIDKCKINSIRAGKNHIHSYHLQTGETIDSLDENGTYKYLGYIQAKQILDKQIKTTLTKQFKHRLKTIFNTQIYAKHTIKAINTYAIPILTYSFGIINWNKTDLKNLQRIVNTTLTKHRRHHPRSCIQRLTLPRAEGGRGIIDITNLHSKQITTLRTYFNTKASNSNLHKAIVFSDKKLTPLNMADRSPQPTEKLTDRQTKIAEWTQKSLHGRHRHDLNQPNVDKLASNEWLRRGELFPETEGFIIAIQDQVIETRNYQKHIMKTSLPTDICRRCNSCSETIQHITGACKAIVQTDYKHRHDQIANIIHQKLAIKYKFITTPPVPYYKYQPETVLENTTHKLYYDRAILTDRTTHYNRPDITLLDKTNRTAQIIDIAVPNTHNIQNTIAEKLSKYTDLKIEISRMWQLQNVTIVPIVLSTTGVIPKQLHQSIRSNTRSTPTHSKSFRKRLY

SEQ ID NO: 31236 - protein, 1444 aa, Amphipyra berbera
MPTLENRGPPVLFTLATVNAGLCCGRLCKSLATRGIIMITRSKKKRKAIQTNMLSTDDETTQVSASSSPRSIFSSIASSPPSYILASSRSSSSSPLSVDVVSEATSARNPSPATVSTITRKKWSEEMNTFIWRTYLIITNLETDTSSYLTSLHQQFINRFPQMNVSKQRVGDQRRAIVYKKLLPTTTLDIIRLEVSNSLKTHNTVLHPQTQTLQSNMSQINTNSPSQPNRRMKWSTELNENLIKCYYICTKMETDMTVWRKKLKEMFIEIYPQLSHLSEQRISDQKRVVINNRMISETRLQALKTDVQNTLNQTNSYEQHQNSYVISDSIQTQPPFNNNIAQLHTQETELELRNEPNYLNRIDVEALTQHNSTNVETNQERNQELDETFLQTLQYFTNTHPTQRNYIPKQKSSKKFAKIVSYINNIILPNYLNSDIDFDTLQTIIYSAAWTAAKANGSKLLHVSAENMVNTRQKDHKPKWQRRLEYKIKDLRAKIGRLTQYIYGNRSRKITHEVNTILEHYKIHSTHEEPNTQLTHFLDTLKQKLTLVNSRLKRYTKCTHRKTQNNQFRNNERQFYRTLKNSTTNQTTPTNNVNNVNSILPPIDEIKQFWSQIWERPIGHNTEADWIKVETENYINIEQMEFEHIKRDTFLDVLKKLHNWKAPGSDYIHNFWYKNFTHTHPYLYNHINNFISNPTTMPCYISEGITYMLPKDSNDRTNPAKYRPITCLQTIYKIITSCISHVIYKHLDRNKILAEEQKGCKKFSQGCKEQLTIDSVILNQVQRKKADIYTMYIDYKKAYDSVPHTWLLEVLNIYKIHPQITTFLSNIIKLWSTRLHLTSPTGIVETETIKIQRGIFQGDSLSPLWFCLALNPLSNKLNSLRPGYQLQFNDTLNDILTDDQNCKINHLLYMDDIKLYASSPDDLYELANTTEHFSKDIGMEFGIDKCKINSIRAGKTYEHSHTIQTGETIDSLDENGTYKYLGYIQNKQLKHKEIKTTLTQQFKHRLKSIFNTQLHSKNTVKAINTYAIPVLTYSFGIINWTKTELKNLQRVINTTLTKHRKHHPRSCVQRLTLPRKEGGRGIIDISNLHNKQITTLRKYFNSKSTTSSLHKAIVYNDQKLTPLNMFDKTTQNNEKQTTRQTKILEWTQKSLHGRHRKDLEQLNVDKLASNEWLCRGDLFPETEGFMVAIQDQVIETRNYQKYIMRVPHANDICRRCSSSSETIQHITGACKAIVQTDYKHRHDQIANIIHQRLAIKYDLITTPPTPYYKYNPEIVLENNTHKLYYDRAILTDKTTHYNRPDITLLDKINKTVQIIDIAVPNTHNLQSTIAEKLSKYTDLKIEISRMWRLSNATIIPIVISTTGVIPKQLHQSLRTLDLPPYLYTSLQKAAILNTCRIVRKFLQNDNETQMITPHSQASNTTRIQSLNQTNSSQSHIMSSHHITN

SEQ ID NO: 31237 - protein, 1416 aa, Acronicta aceris
MSLATRGTNMITRSKTRKAIQANAATMDVEPSQSSRSSSPRSIFSSIASSPPSYLLSSSRSSSLSPRTVDVVMEATSARNPLPATVSTITRKKWSEEMNRFIWRTYLIITNLETDTNSYLTSLHQQFIDKFPQMNVSKQRVGDQRRAIVQKKLLPRTTLETIRLEVSNSLQIYNSDLHPHNNTSQQFIASHTGPTQQSQLKTRMKWSKEHNETLIKCYFIITKMETDMTVWRKKLKEKFVEFYPQLLHLSEQRISDQKRVIINNRMISEARLTELKLYAEGVLNQTDSYMESIGHISQSTTEDVQEILLTNNNTQLTNIEQSHTHETELENDPNYLNSIDIEALTNSTANTYHTDTNIEIRDQANPELEEIFANTLLHFTDTNPTKRNYIPKQKSSKKLAKIVTYIDNCILPKYVSNETDFKTLQTIIYSAAWTAAKANGSKLSYKTPENLANIHQRINKPKWQRRLEYKIKDLRAKIGRLTHYIHGNRSRKLDREVHKILEHYKIHSTHEEPNTQLTHFLDTLKQKLTLLSSRLNRYTKCTLRKSQNNQFNKNEKQFYRSIKKSTTNRTMASNSENNTTDTLPPTSEIHKFWSNIWERPMLHNTEAEWIRTETENLVNTEQMDFEHISIDTFHDVLKKLHNWKAPGSDYIHNFWFKKFTHIHPYLFNYINEFIKNPNTMPAYLTEGITYMLPKDFNDTNNPAKYRPITCLQTIYKIITSCITHIIYKHLDTNSILTEEQKGCRKYSQGCKEQLTIDAVILKQVQQKKKDLYTMYIDYKKAYDSVPHTWLIEVLNIYKIHPQIIAFLNNVIKQWTTRLYLPTPTGEAETEPIKIQRGIFQGDSLSPLWFCLALNPLSHKLKSVAPGYLLQYNDMSSDRLSDKQDCKINHLLYMDDIKLYASSPDDLYQLANITEQFSNDIGMEFGIDKCKINSVKGGQTFEHTHTIQTGETIESLDEHGTYKYLGYIQAKQIKHKQIKNQLTQQFKHRLKSIFNTQLYARNTIKAINTFAIPVLTYSFGIINWTKTELRKLQRIINTTLTKHRKHHPRSCVQRLTLPRKEGGRGIIDITNLHNKQISTLRTYFNYKSTTSNLHKAIVFNDRKLTPLNMSDKNKQSNETQTDGPTKILQWTQKSLHGRHRQDLCQPNVDKLASNEWLRRGDLFPETEGFMTAIQDQVIETRNYQKHIMRIPQIHDICRRCNSSPETIQHITGACKSIVQTDYKHRHDQIAKIIHQKLALKYNLISTSPVPYYKYNPEIILENNNHKLYYDRAILTDRTTHYNRPDITLLDKINKTAQIIDIAIPNTHNLQSTIAEKLTKYTDLKIEISRMWRLSHVSIIPIVLSTTGVIPKQLHQSLKSLDLAPYTYQSLQKAAILNTCRIVRKFLQNDNETLIPTSHPQVTTTINTRTQSRNHTQT

SEQ ID NO: 31238 - protein, 1431 aa, Eilema sororculum
MVNAGLCHGGPFMSPASRGNNMLELENHKRKYNLRPLPGGRRDPTRNDDRRAQCIRMNDNAVTNDQISLAGSSPTLFSSIPSSNQSFCTSPVPSTTESSTTYHSVQLVNVAQETHQVNEPVPTTSVVNKRKRWTYEMNEFILRTYLQLTNLETDTNSYLPPLHTKFLEKYPTMEVSRQRIGDQRRAIVRRKLLPQDSIDKIYNEVRTELRNIQKQVTRHSTQYSTQHFTQHSTKDPTQLSTQHFTQSNTGAKTQPERRLRWTTEYNEAIIRSYFKVTELETNKTLYRKNLHQEFIRLYPHLAHLTEQRIADQRRLIENNRYISKTRLEEIKKEVTDELLLTHRNSDIGYVNIEQTQNVRLESYETENNCNTFTNIEVERLLEETTEPTTHPTPTLEQNCKIEETFSQALQFYTNTDPTARNYIPKQKTSKSFTDTVNYINNFILPAYLNSDTSFETLQTIIYCAAWTAAKHNGAKLSLAPTEVTGQIQKDYKPKWQRRLERKILEYRAKIGRLTQYIEGNRNRKLVKQVNKTLEQYKIHTSHEEPNTQLTHFLDTLKQKLTVIKSRLNRYTACTQRKSQNNQFCNNEKQFYRKLKQSTTNRHTPNNTGSITNTPQLDDLQKFWSDIWEKPVRHNTEAEWIKTEKSSQANTSEMRFECVPIEIFQTTIQKSHNWKAPGSDYLHNYWYKKFTKSHPYLHNYINSFIIDSSKMPAYITDGVTYMLPKDPKDTANPAKYRPITCLQTIYKIITSCLTHMIYKHLETNNILTEEQKGCRKFSQGCKEQLTIDSVIHRQVQRSKKDLCTMYIDYKKAYDSVPHTWLKEVLQIYKVNPQIITFLSHVMERWTTRIHLNTRTGTVTTDSIKIKRGIFQGDSLSPLWFCMALNPLSKHLNSLDSGYLLDYLENPTDRLTEKRTCKINHLLYMDDIKLYATTPDDLDILAQFTETFSNDISMEFGLDKCKINSVILGKIHKHSYEVQTGETIDSLDENDTYKYLGYNQSKQIHHKETKYKLTHQFKHRLNSILNTQLNSRNLIKAVNAYAIPILTYSFGIINWTKTELKNLQRIINTTMTKHRKHHPRSCLQRLTLPREEGGRGIIDVINLHNKQITILKSYFSSKTTTSTLHKAIAYNDQKHTPLNMHDWTTQNNETIKSIQTKIAEWTQKSLHGRHRQDLCQPHVDKKASNEWLRGGYLFPETEGFMMAIQDQVIETRNYQKHIIRNHLVSDVCRRCNSSSETIQHITGACKAIVQTDYKHRHDQVANIIHQKIALKYNLITSTPLPYYKYVAETVLENQTHKLYFDRAILTDKTIHYNRPDITLIDKQNRTAQLIDIAVPNTHNLQTTISEKLSKYVELKMEVTRMWRLNNATIIPIVLSTTGVIPAQLHQSIKTIDLPCSIYKILQKAVILNTCRIVRKFLNNDNTSNTHSPTQTHQ

SEQ ID NO: 31239 - protein, 1414 aa, Xestia xanthographa
MLTRSKTKKNIQANMPAADDETSPVSSSSSPKSIFSSIASSPPSYLSRSSRSSSILSPMTVEVVSEANLANNPSPTAVTTTRKKWSKEMNEFIWRNYLIITNLESDTKAYLTSLHHQFIEKFPNMKVSKQRIGDQRRAIVSKKLLPSTTLDTIKLEVSNHLRTHNNDLELHFPPEIPSSQTDSQPHSQSEPKRRMKWSNELNETLMKCYFRVTKMETDMTVWRKNLKEKFIEGCPHLSHLSEQRISDQKRVIVNNSMISESRLQILKSFVENELCETESFQRQVHNIMSNIDVGNIHIDTNTETLNIDIENIGPSETENIGVGIDDGNTNNLGHEHPIHLNTQHTSPIRNPEIDEIFSQTLQYYKDTHPTERSYIPKQKSSKKLANIVSYINKVILPEQVTSDTDFNHLQTVIYCAAWTAAKANGSKITLAPPVDSSSRPHQAHKPKWQKRLENKIESIRAKIGRLTQYIQGVRSRKLIKAVEIILKDYRIHTLHEQPNTQLEHFLDTLKQKLTVVKSRLNRYTKCTLRKTQNNQFRNNEKQFYRSLRNSTTNETTSNNSTHTAIPTTEELQQFWAGIWENPVCHNTEAEWIKAEQVIHTNIEAMIFDQVEVATFQDVLTKIHNWKAPGSDYIHNYWYKKFTHTHPHIFNHINNFIKDPATIPTYITEGKTYMLPKDHSDSANPAKYRPITCLQTIYKIMTSCISHIIYKHLETQKILSEEQKGCKKLSQGCKEQLTIDAVIHRHVQHTKKDLHTMYIDYRKAYDSVPHSWLLEVLKIYKIHPQLIKFLGTIVEQWKTRLQLNTSTGTVETELIKIQRGIFQGDSLSPLWFCLALNPLSNKLNALIPGYQLQFSDTMTDILTDQQYCKVNHLLYMDDIKLYASSPDDLYELADVTEQFSKDIAMEFGIDKCKINSISAGKTYTHSYQMQTGATIDSLDETGTYKYLGYIQAKQIQHKEIKNTLTKQFKHRLKTIFNTQINAKNTIKAINTYAIPILTYSFGIIKWNKTDLKNLQRIINTTLTKHRRHHPRSCVQRLTLPRNDGGRGIIDITNLHNKQITTLRTYFDNKSSTSTLHKAIAYNDKKLTPLNMYDRTTQSNEQQTDRQTKIAEWTQKSLHGRHRHDLNLPNVDKLASNEWLKRGELFPETEGFMIAIQDQVVETRNYQKHIMRVPQTVDICRRCNSSSETIQHITGACKAIVQTDYKHRHDQIANIIHQKLAIKYNFISTPPVPYYKYQPETVLENATHKLYFDRGIFTDKTIHYNRPDITLLDKRNKTAQIIDIAVPNTHNLQNTIAEKLSKYIDLKIEISRMWCLSNVAIVPIVVSTTGVIPKQLHQSLRTLDLPPYTYPSLQKAAILNTCRIVRKFLQNENKSVVTTTNTEPRVTAHTQFTRHRHSSSQNSVISSSHHNTTFPG

SEQ ID NO: 31240 - protein, 1387 aa, Craniophora ligustri
MITRSKTKKAVQANNAAVDCGTSPGSSSASPRSIYSSIISSPPSYSRSLRSSSTSSPVSLDVVLEANSAEHPSPATDLTITRRKWSVEMNKFIWRTYLIVTKLETDTKAYLTSLHQQFIEIFPNMNVSKQRIGDQRRAIINKNLLPPSTIESIRIEVQNIIGTQATESHTNNLTPAQIPTSQAETQSQGQPNRRMKWSNELNETLMRCYFRATKMETDLTVWRKTLREKFIECYPHLSHLSEQRISDQKRVIMNNGMISELRLQVIKLMVEEELLETHTREQYLNSSNIHLQLFTNNNTPTEEGETEFNLFQDIDLDHLTQSETQHTITNPNISLERDDKIDELFSEALLHYTNTCPTQRPYIPKQKSSKHLAKIVSYINKIILPVHITNNTDFDNFQTVIYSAAWTAAKANGSKISLSCNENNYSYQKDQKPKWQKRLEHKIKIIRAKIGRLTHYMNGHRSRKLIRQVNLILDNCRTHTLHEEPNTQLQHFLDTLKQKLSVANSRLIRYKKCTLRKTQNYQFNNNERQFYRTLKKTTTNHTTPNNCRNNTHPTAPPEGELHRFWAGIWENPIYHNSEADWIKTEMSTNTEPMNFDKIEIEIFQDVLLRLHNWKAPGTDHIHNFWYKKFTYIHLHLFNHINNFITNPSTLPSYITEGITYMLPKDQNDTINPAKYRPITCLQTIYKIITSCVTRSIYSHLDTNCILAEEQKGCRKFSQGCKEQLTIDSVILKQVQRKKKDLCTMYIDYKKAYDSVPHSWLLEVLNIYKIHPLIKNFLKSIIDKWNTRLHLNTSTGSIETNPIKIKRGIFQGDSLSPLWFCLALNPLSKILNSLKPGYLLQYNDTAIDGLTNKQFCKINHLLYMDDIKLYASSPGELSELANMTEKFSNDIAMEFGIEKCKINSMIAGKTFRHSYEVETGETIDSLDESGTYKYLGYIQSKQILHKEIKSTLFKQFKHRLKTICNTQIYSRNTVKAINSYAIPILTYSFGIINWNKSELKNLQRIINTTLTKHRKHHPRSCVQRLTLPRKEGGRGIIDIRNLHNKQITTLRTYFNSKCTTSTLHKAIAYNDQKLTPLNMFDKTTQNNEALTDRQTKIFEWAQKSLHGRHHHDLNQTNVDKLASNEWLRRGELFPETEGFMTAIQDQVIETRNYQKYIIRAPLPTDTCRRCNSSSETIQHITGACKAIVQTDYKHRHDQIANIIHQKLAIKYKLISTPPTPYYKYTAETVLENNTHKLYYDRAILTDRTTHYNRPDITLLDKTNKTAHIIDIAVPNTHNLQNTIAEKLAKYTDLKIEIARMWRLSSVTIVPIVLSTTGVIPNQLHQSLKILDLPPYTYYNLQKAAILNTCRIVRKFLQNDTETEITITNTRTHHNTPITSSQHNIILSS

SEQ ID NO: 31241 - protein, 1409 aa, Apamea monoglypha
MITRSKTKHLIQANKPSADDETSPVTSSSSPRSIFSSIVSSPPSYLSRSLRSSSSSPMSVDVVSEASTAINPSPATVTTNTRKKWSKDMNQFIWRTYLILTNLDTETNSYLTSLHQQFIIRFPQMNVSKQRVGDQRRAIVHKKLLSATTLEKIRLEVSRELQTDTTNLDTHQLNTDQSNIHLQSGSKSRMRWSNEMNETLIKCYFITTKMETDMTVWRKKLREMFIEFYPQLSYLSEQRISDQKRVVLNNKMITEARLQDLKMYAENTLNEANPYRQTEYHNSLIVRNNTPTQVSTNNNTETAYFNNNQTHTQETEVGNEPNFLNCIDLGALTSTIINTEHNTTNDDISQERNQELEETFSHTLHHFTNVHPTKRSYIPKQKPSKKFAQIVSYINNVILPKYVNADTDYETLQTVIYTAAWTAAKTNGSKLSHITPESTTYIYQKNKKPKWQKRLELRIKDLRIKIGRLTAYIQGNRGWRLVREVQTILENYRIHSTHEEPNTQLTHFLDTLKQKLTLVNSRLNRYNNCTLRKIQNNKFRNNEKQFYRTLKNSTTNQTATSSNENNTNHSLTSVDALQQFWSRIWERPICHNTEAEWVKIETENHIHTEQMEFDQVPIETFHDVLQKLHNWKAPGSDYIHNFWYKKLTYTHPYLYNYINTFITNPTTMPTYIAEGITYMIPKDSNDSANPAKYRPITCLQTIYKIITSCITQIIYKHLESNSILSEEQKGCRKFSQGCKEQLTIDSVILKQVQRKKKDLYTMYIDYKKAYDSVPHTWLIEILHIYKINPQIITFLNNTITQWTTRLHLTTSTGIVESESIKIQRGIFQGDSLSPLWFCLALNPLSNKLNSLMPGYKLNYNDTIDDIRTDRQDCKINHLLYMDDIKLYAASPEDLNELANTTDKFSNDIGMDFGIDKCKINSVRTGQTYEHSYTTQSGETIDSLDENGTYKYLGYIQAKQIKHKTIKNKLTQQFKHRLKSILNTQLHSKNTIKAINTYAIPVLTYSFGIISWTKTELKNLQRVINTSLTKYRKHHPRSCVQRLTLPRKEGGRGIIDITNLHNKQISILRKYFNTKSTMSTLHKAIVYNDRKLTPLNMSDKTTQMNEKQTDRQTKISEWTQKSLHGRHRHDLCQPNVDKLASNEWLRRGDLFPETEGFMTAIQDQIIETRNYQKHIMRIPISTDICRRCHSSSETIQHITGACKAIVQTDYKHRHDQIANIIHQKLAIKFKLITTPPVPYYKYTPETVLENTTHKLYFDRAILTDKTTHYNRPDITLLDKINKTAQIIDIAVPNTHNLQNTIAEKLSKYIDLKIEISRMWRLGSVAIIPVVLSTTGVIPKQLHQSLKTLDVAPSTYQTLQKAAILNTCRIVRKFLQNDNDAQIAHPQTSFTTATQSEHIISPRHISSSIIT

SEQ ID NO: 31242 - protein, 1377 aa, Spodoptera frugiperda
MITRSKNKNKSTMQANVPPTDVDTSTVSLSSSPRSIFSSITPSSLSITSRSLRSSTSSTRSVDVVAEATSAKNSSSAAGSKNTRKKWTKEMNEFIWRTYLIITNLETDTNAYLNTLHIQFTQQFPDMVVSRQRIGDQRRAIINNKLLPTTTLDAIRLEVRNYLQTQNRTMHQNQNQSQHLTIPQVDPLTHTHSHSKTRMKWSNELNETLIKCYFEVTKMETDMTVWRKNLKEKFVECYPHLSHLSEQRISDQKRVIINNKMISDTRMQILKLTVEQKLRESGTVTPDRLNNSSSHTSTSNIHSASQIHIENTYTQPMTLESAEFSILQETNDNNIIEPQPTHTTENYERNPVIDQQFLEALQYFTDVHPTNRCYLPKQKTSKKLAQIVDYINKVILPEHVSTYTDFNQLQTIIYSAAWTAAKANGSRVTLSYAQDQINLRKDYKPKWQKRLERKLDTIRAKIGRLTYYMQGHRSRKLEKEVNRILRDYRTHTIHEEPNTQLTHFLDTLKQKLVVIKSRLCRYTKCTLRKTQNNQFKTNEKQFYRTLKNLTTNNTLPNNTTHTTFPTQESLRQFWAGIWENSVCHNNEAEWIKAEITEHNNIQQMPFEQIDIQTFHNALNKAHNWKAPGSDHIHNYWYKKFTTIHPHLYNHINDFIKDPINMPSYISEGITYMLPKDPNDTVNPAKYRPITCLQTIYKIMTSCLTQIIYKHIDSQKILTEEQKGCRKFSQGCKEQLIIDSVILKDVQRHKKDLYTMYIDYKKAYDSVPHSWLLQILNIYKIHPHIIYFLENIIRTWQTRLYLNTPTGTIATESIKIQRGIFQGDSLSPLWFCLALNPLSNKLRSLESGIQFQYRESMSTVQTDNENCKINHLLYMDDIKLYATTPEDLDLLADTTERFSTDIKMDFGIDKCKINSVKAGKTYTHSYQLQSGENIESLDENGTYKYLGYIQSKQILHKQIKSQLTKQFKHRLKVICNTQLNSRNTIKAINTYAIPSLTYSFGIINWSKTELQNLQRNINTTLTKHRRHHPRSCVQRLTLPRNDGGRGIIDITNLHNKQITTLRTYFFNRSTVSNLHRAIVQSDKKLTPLNMADQATQNNEKQTDRQTKISEWIQKSLHGRHYHDLSQPNVDKVASNEWLRRGELFPETEGFMIAIQDQVIETRNYQKHIMRIPIATDTCRRCNSAPETIQHITGACKSIVQTDYKHRHDQVANIIHQKIALKYNLISTPPVPYYKYQPETVLENSSHKLYFDRAILTDKTTHYNRPDITLIDKTNKTAQIIDIAIPNTHNLQNTIAEKLSKYTDLKIEITRMWRLNSVTIVPIVLSTTGVIPKQLHQSIKTLDLPSYTYQNLQKAAILNTCHIVRKFLSETDNVSFTRT

SEQ ID NO: 31243 - protein, 1424 aa, Heliothis virescens
MKMRLRNRVLPQAGTGANRNGESRPMASSLGCPSYSGGGNVSHPAAQSQTVAVPHDDSSSCSSSVSLFPSLPSSPPSYLLRSSRSSSMSVDVVEEVTSAKHPSPTTVTTTTRKKWSEDMNQFIWRTYLIITKLETETNSYLTSLHQQFTDKFPQMNVSKQRVGDQRRAIVRQKLLPSDTLDTIRLEVSKDLEKHQRGINSLPQTQHVTTLSSNTPTQSQTKGRMKWSNELNETLIECYYITTNMETDMTIWRKKLREKFIETYPELSHLSEQRISDQKRVIINNRMITETRLQEIKSRAAQQVEACRSPEHQNIHTIIENRINHTPTNDNTETTYHSHAQSTDIEIETRILNNIDLEEHTQHNEENAEIAQELEDTFTSALEYFTNIHPTKRNHIPKQKTSRRLAQIVSCLNCNILPKYINSETNFDNLQTVIYSAAWAAAKTNGSKIFLTPTENSTSTRHKINKPKWQKRLQKRIKDLRANIGRLTAYIQGNRSRKLVRTVNSILQNYKIHSTHEEPNTELFHFLDTLKQKLTLVNSRLSRYTKCTLRKTQNVKFRNNEKQFYRLLKSSTTNQVENNTENNTNISSPSTAELQQFWSGIWERPICHNTEAEWVKEEADNHKNIEEMTFEHIPIDTFLDVLSKLHNWKAPGTDNIHNFWYKKLTCTHPYLHNYINIFIKNPDEMPTYIAEGLTYMISKDNTDSNNPAKYRPITCLQTIYKIITSCITQLIYKHLEINTILSEEQKGCRKLSQGCKEQLTIDAVILQQVKKNKMDLYTMYIDYRKAYDSVPHTWLLKILSIYKINPQIISFLSNISTRWSTRLHLKTPTESIETQPIKIQRGIFQGDSLSPLWFCLALNPLSNKLNTNTPGFKLQINDSLNDIPTDRQEFKINHLLYMDDIKLYATSQEDLFELANITDQFSTDIGMEFGIDKCKINSVKGGQTYDHSYTTQTGDIINSLDENETYKYLGYIQDKQIKHKEIKQKLTLQFKHRLKSILNTQLNSKHIIKAINTYAIPILTYSFGIINWNKTELKNLQRIINTTLTKHRKHHPRSCIQRLTLPRKDGGRGIIDITNLHNKQISILRKYFDLKSANSDLHKAIVNNDRKLTPLNMHDKTPQNNERQTDRQTKLTEWARKSLHGRHLFDLNQQNVDKLASNEWLRRGDLFPETEGFMLAIQDQVIETRNYQKHIMRAAIPTDICRKCCSASENIQHITGACKAIVQTDYKHRHDQIANIVHQKLAIKYKLTSAPPVPYYKYNPQIVLENNTHKLYFDRAILTDRTVHYNRPDITLLDKINKTAQIIDIAVPNTHNLQHTISEKLSKYTDLKIEITRMWRLSSVSIIPVVLSTTGVIPRQLHQSLKTLDIAPTTYRTLQKAAILNTCRIVRKFLQNDNEGNTITPIPTDTHQRLQNTPHTSSRLHSLLT

SEQ ID NO: 31244 - protein, 1414 aa, Hydraecia micacea
MITRSKTKKLIQANQPTAGDETSPVSSSSSPRSIFSSIVSSPPSYLSRSLISSSSSSMSVDVVSEATTAINPSPATVTTNTRKKWSEDMNKFIWRTYLTITNLETETNSYLTSLHQQFTNRFPQMNVSKQRVGDQRRAIVHNKLLPATTLDTIRLEVSRELRTDITHLDIHTQTPLHLNTDQCNNTHLQSQPKSRMRWSNEMNEALIKSYFIATKMETDMTVWRKKLREMFIEFYPQLSHLSEQRISDQKRVILNNKMISDSRLQELKTYAENTLNQANSYRQLEHQNCFITTDNTPTQTPTNSNTETAYVDNNQTHTQETEVGHEPNFLNCIDLGALTSTIIDTEHNTTNGEISQERSQELEETFSHTLQHYTNIHPTKRNYIPKQKPSKKFAQIVSYINNVILPKYVNADTDFETLQTVIYTSAWTAAKTNGSKLSHITPESTSYINQKNKKPKWQKRLECRVKDLRTKIGRLTAYMQGNRGWRLVREVHTILENYRIHSTHEEPNTQLTHFLDTLKQKLTLVNSRLNRYNNCTLRKVQNNKFRNNEKQFYRTLKNATTNQTAPNSNENNTNLSLPSVDELQQFWSRIWERPICHNTEAEWVKIETENHMHTEQMEFEQVPINTFHDVLQKLHNWKAPGSDYIHNFWYKKLTYIHPYLYNYINAFIKNPTTMPTYIAEGITYMIPKDSNDSANPAKYRPITCLQTIYKIITSCITQIIYKHLESNSILSEEQKGCRKFSQGCKEQLTIDSVILKQVQRKKKDLYTMYIDYKKAYDSVPHTWLIEILHIYKINPQIITFLNNTITQWTTRLHLTTSTGIVESESIKIQRGIFQGDSLSPLWFCLALNPLSNKLNSLMPGYKLNYNDTIDDIRTDRHDCKINHLLYMDDIKLYASSPEDLNELANATDKFSSDIGMDFGIDKCKINSVRAGQTYEHSYTTQSGETIDSLDEHGTYKYLGYIQAKQIKHKAIKNKLTQQFKHRLKSILNTQLHSKNTIKAINTYAIPVLTYSFGIISWTKTELKNLQRVINTSLTKYRKHHPRSCVQRLTLPRKEGGRGIIDITNLHNKQISTLRKYFNTKSTTSTLHKAIVYNDRKLTPLNMSDQTTQINEKQTDRQTKISEWSQKSLHGRHRHDLCQPNVDKLASNEWLRRGDLFPETEGFMTAIQDQIIETRNYQKYIMRIPISTDICRRCHSSSETIQHITGACKAIVQTDYKHRHDQIANIIHQKLAIKYKLITTPPVPYYKYIPETVLENTTHKLYFDRAILTDRTTHYNRPDITLLDKINKTAQIIDIAVPNTHNLQNTIAEKLSKYTDLKIEISRMWRLCSVAIIPIVLSTTGVIPNQLHQSLKTLDVAPSTYQTLQKAAILNTCRIVRKFLQNDNDAQITHPQTSFTTATHSQNIISPRHISSTIT

SEQ ID NO: 31245 - protein, 1414 aa, Phlogophora meticulosa
MITRSKTKKDIQANMPSVDDETSTTSSSASPRSIFSSIASSPPSYLSRSSRSSSTSSPTSVDVVSEAILANKPSPTADIKNTRKKWSIEMNEFIWRTYLIITNLESDKNAYLTSLHQQFIEKFPNMKVSKQRIGDQRRAIVSKKLLPSITLDSIRLEVINNLQTPNNDLQLQPQTPQEILTFQTNTQPYSQSEPKRRMKWSNELNETLMKCYFRATKLETDMTIWRKNLKEKFIECYPHLSHLSEQRISDQKRVIVNNSMISETRLQILKSIVENELLETAYFNWQSDSIRRTTENVHSQPPQNTLNIDIENIEMSQTQQIGVETEGDNLNAIELEHPVHSNTQTSQERNLQIDEIFSETLQYYRDTYPTERSYIPVQKSSKRLANIVSYINKVILPEQVTQDTEFNHLQTIIYCAAWTAAKANGSKISLSPPEYRNRLQQDRKPKWQKRLDHKIEVIRAKIGRLTHYMQGHRSKKLTKEVNTILRDYKTHTSHEEPNTHLTHFLDTLKQKLTVVKSRLDRYTKCTLRKTQNNQFRNNEKLFYRKLKASTTNHTTPSNNTNTVWPATDELQQFWAGIWENPVSHNTEAEWIKEEEAYQTNVEAMDFDQVDVETFHDVLQKIHNWKAPGSDHIHNYWYKKFTHIHPYLYNCINNFIKDPNIIPSYITEGKTYMLPKDPNDTANPAKYRPITCLQTIYKILTSCITQIIYKHLETQHILTEEQKGCRKFSQGCKEQLTIDAVILKHVQRTKKDLCSMYIDYRKAYDSVPHSWLLKVLSLYKIHSQLINFLGNILDKWQTRLHLNTSIGIVETEHIKIQRGIFQGDSLSPLWFCLALNPLSNKLNALKPGYQLQYIDTTTDILTDQQTCKLNHLLYMDDIKLYASSPDDLYELANATEQFSNDIAMEFGIDKCKINSIRAGKTYSHSYYMQTGDTIESLDENGTYKYLGYIQAKQILHKEIKATLTKQFKHRLKTICHSQINARNTIKAINTYAIPVLTYSFAIINWNKTELKHLQRVINTTLTKHRRHHPRSCVQRLTLPRNEGGRGIIDITNLHNKQITILRTYFYTKSPISTLHKAIAFNDKKLTPLNMFEKTTQSNEQQTDRQTKIAEWTKKSLHGRHRHDLNQPNVDKLASNEWLRRGELFPETEGFMIAIQDQVIETRNYQKHIMRVPQTIDRCRRCNSSSETIQHITGACKAIVQTDYKHRHDQLANIIHQKLAIKYKLIPTPPVAYYKYQPETVLENSTHKLYFDRAILTDKTTHYNRPDITLLDKINKTAQIIDIAVPNTHNLQNTIAEKLSKYIDLKIEISRMWRLSNVTIVPIVLSTTGVIPKQLHQSLKTLDLPPYTYQTLQKAAILNTCRIVRKFLQNDNDTSIVSSHTRAAANARTQSHELTQSPSQNPNTPSSHHNITNSQG

SEQ ID NO: 31246 - protein, 1413 aa, Noctua fimbriata
MLTRSKTKKSIQANMPAVDDETSPVSSSSSPKSIFSSIASSPPSYLSRSSRSSSLLSPMTVEVVSEASLASNPSPTAVSTTTRKKWSKEMNEFIWRNYLIITNLEYDTKAYLTSLHHQFIEKFPNMKVSKQRIGDQRRAIVSKKLLPSTTLDTIRLEVSNHLRTHNNELELQSPPEFPTSQTDSQPHSQSEPKRRMKWSNELNETLMKCYFRATKMETDMTVWRKNLKEKFIECYPNLSHLSEQRISDQKRVIVNNSMIPVARLQVLKSIVEKELFETESFQRQVDSRMSNTDVENVHLHTNTETINIDIENIEPPQTENIGVGIDDGNINNLGPEHPIHLNTQHTSLVRNPEIDEIFSQTLQYYKDTQPTERSYIPKQKSSKKLANIVSYINKVILPEQVTSDTNFNHLQTVIYCAAWTAAKANGSKISLAPPVDRSSRLQQAHKPKWQKRLENKIESIRAKIGRLTQYIQGVRSRKLIKAVEIILKDYRIHTSHEQPNTQLEHFLDTLKQKLTVVKSRLNRYTKCTQRKTQNNQFRNNEKQFYRSLKKSTTNETISDNNTNTAFPTTEELQQFWAGIWESPVYHNTEAEWIKGEQVIQTNTEAMIFDHVEVASFHDVLTKIHNWKAPGSDYIHNYWYKKFTHIHPHIFNHINNFIKDPTTIPTYITEGKTYMLPKDPSDSANPAKYRPITCLQTIYKIMTSCISHIIYKHLETQKILTEEQKGCKKLSQGCKEQLTIDAVIHRHVQRTKKDLHTMYIDYRKAYDSVPHSWLLEVLNIYKIHPQLINCLGTIVEKWKTRLQLNTSTGTVETEFIKIQRGIFQGDSLSPLWFCLALNPLSNKLNALLPGYQLQYSDTMTDILTDQHYCKVNHLLYMDDIKLYASSPDDLYELADVTEQFSKDIAMEFGIDKCKINSIRAGKTYTHSYQMQTGATIDSLDETGTYKYLGYIQAKQILHKEIKTKLTKQFKHRLKTIFNTQINAKNTIKAINTYAIPILTYSFGIIKWNKTDLKNLQRIINTTLTKHRRHHPRSCVQRLTLPRNDGGRGIIDITNLHNKQITTLRKYFENKSSTSTLHKAIAYNDKKLTPLNMYDRTTQSNEQQTDRQTKIAEWTQKSLHGRHRHDLNLPNVDKLASNEWLKRGELFPETEGFMIAIQDQVIETRNYQKHIMRVPQTVDICRRCNSSSETIQHITGACKAIVQTDYKHRHDQIANIIQQKLAIKYNFISTPPVPYYKYQPETVLENATHKLYFDRGIFTDKTIHYNRPDITLLDKCNKTALIIDIAVPNTHNLQKTIAEKLSKYIDLKIEISRMWRLNNVAIVPIVLSTTGVIPKQLHQSLKTLDLPPYTYQSLQKAAILNTCRIVRKFLQNENDTVISTSHTRPSITAQTQVNGHSSSHNLTLSSSHHITTLPG

SEQ ID NO: 31247 - protein, 1402 aa, Amphipyra tragopoginis
MPSSPPSYLDKIHKSSSSISSPSPSYLLASPRTSPSSPLSVDVVSEATSAKNPSPATVTTITRKKWSREMNEFIWRTYLIITNLETDTKSYLSSLHQQFIDRFPQMNVSKQRVGDQKRAIIHKKLLPTTTLDKIRVEVSNRLQTHNTELHPHNQTLPQSNTVQNNSHPSSQPKRRMKWSNELNETLIKCYFISTKMETDMTVWRKKLREMFIEFYPQLSHLSEQRLSDQKRVILNNRMIPETRLQELKTHVENVLNQTDSYEQLQHHQEPHTTTENVQTQPTSTNNNVETTNITQSHTPETELENEPNFLNSIDVEALTHSTINTQHSSTNAEINQERNQELEETFSHTLEYFTNTDPTKRSYIPKQKSSRKFAKIVSYINNIVLPEYVNSDTDFETLQTIVYSAAWTAAKTNGSKLSYVPAEYDNIRQKNHKPKWQKRLEFKIKDLRAKIGRLTHYMHGSRSRKLNKEVNTILEHYRIHSTHEEPNTQLTHFLDTLKQKLTLLNSRLNRYTKCTHRKTQNNQFKNNERQFYRTLKNSTTNQTTPSNNTNNLNNSSPPIDELQQFWSRIWERPISHNTEADWIKIETENHKNIEQMDFEHVQIETFHEVLMKLHNWKAPGSDFIHNFWYKKLTHIHPYLHNYINDFIKNPITMPTYISEGITYMLPKDSDDRINPAKYRPITCLQTIYKIITSCITHIIYKHLETNKILTEEQKGCRKFSQGCKEQLTIDSVILKQVQRKKHDLYTMYIDYKKAYDSVPHTWLLEVLNIYKIHPQIVTFLTNIIKQWTTRLHLTTPTGIAETEPIKIQRGIFQGDSLSPLWFCLALNPLSNKLNSLNPGYILQLNDTTNDILTDKQDCKINHLLYMDDIKLYASSSDDLYELANTTDQFSNDIGMEFGIDKCKINSVRAGKSYEHSYTIHTGETIDSLDENGTYKYLGYIQSKQIKHKEIKTTLTQKFKHRLKSIFNTQLHSKNTIKAVNTYAIPVLTYSFGIIKWTKTELKTLQRVINTTLTKHRKHHPRSCVQRLTLPKKEGGRGIIDITNLHNKQISTLRKYFHAKSTSSTLHKAIVYNDQKMTPLNMFDKANQNNEKLIDKQTKILEWTQKSLHGRHRKDLGQPNVDKLASNEWLSRGELFPETEGFMMAIQDQVIETRNYQKYIMRAPLATDICRRCNSASETIQHITGACKAIVQTDYKHRHDQIANIIHQKLAIKYNLISTPLTPYYKYNPETVLENSTHKLYYDRAILTDRTIHYNRPDITLLDKINKTAQIIDIAVPNTHNLQNTIAEKLSKYTDLKIEISRMRRLSNVAIIPIVLSTTGVIPKQLHQSLKTLELAPYTYQSLQKAAILNTCRIVRKFLQNDNEPQIITSHSQASITPRTQSHDHTHTLQSRSISSHHIITNR

SEQ ID NO: 31248 - protein, 1444 aa, Amphipyra berbera
MPTLENRGPPVLFTLATVNAGLCCGRLCKSLATRGIIMITRSKKRKAIQTNMLSTDDETTQVSASSSPRSIFSSIASSPPSYILASSRSSSSSPLSVDVVSEATSARNPSPATVSTITRKKWSEEMNTFIWRTYLIITNLETDTSSYLTSLHQQFINRFPQMNVSKQRVGDQRRAIVYKKLLPTTTLDIIRLEVSNSLKTHNTVLHPQTQTLQSNMSQINTNSPSQPNRRMKWSTELNENLIKCYYICTKMETDMTVWRKKLKEMFIEIYPQLSHLSEQRISDQKRVVINNRMISETRLQALKTDVQNTLNQTNSYEQHQNSHVISDSIQTQPPFNNNIAQLHTQETELELRNEPNYLNRIDVEALTQHNSTNVETNQERNQELDETFLQTLQYFTNTHPTQRNYIPKQKSSKKFAKIVSYINNIILPNYLNSDIDFDTLQTIIYSAAWTAAKANGSKLLHVSAENMVNTRQKDHKPKWQRRLEYKIKDLRAKIGRLTQYIYGNRSRKLTHEVNTILEHYKIHSTHEEPNTQLTHFLDTLKQKLTLVNSRLKRYTKCTHRKTQNNQFRNNERQFYRTLKNSTTNQTTPTNNVNNVNSILPPIDEIKQFWSQIWERPIGHNTEADWIKVETENYINIEQMEFEHIKRDTFLDVLKKLHNWKAPGSDYIHNFWYKNFTHTHPYLYNHINNFISNPTTMPCYISEGITYMLPKDSNDRTNPAKYRPITCLQTIYKIITSCISHVIYKHLDRNKILAEEQKGCKKFSQGCKEQLTIDSVILNQVQRKKADIYTMYIDYKKAYDSVPHTWLLEVLNIYKIHPQITTFLSNIIKLWSTRLHLTSPTGIVETETIKIQRGIFQGDSLSPLWFCLALNPLSNKLNSLRPGYQRQFNDTLNDILTDDQNCKINHLLYMDDIKLYASSPDDLYELANTTEHFSKDIGMEFGIDKCKINSIRAGKTYEHSHTIQTGETIDSLDENGTYKYLGYIQNKQLKHKEIKTILTQQFKHRLKSIFNTQLHSKNTVKAINTYAIPVLTYSFGIINWTKTELKNLQRVINTTLTKHRKHHPRSCVQRLTLPRKEGGRGIIDISNLHNKQITTLRKYFNSKSTTSSLHKAIVYNDQKLTPLNMFDKTTQNNEKQTTRQTKILEWTQKSLHGRHRKDLEQLNVDKLASNEWLCRGDLFPETEGFMVAIQDQVIETRNYQKYIMRVPHANDICRRCSSSSETIQHITGACKAIVQTDYKHRHDQIANIIHQRLAIKYDLITTPPTPYYKYNPEIVLENNTQKLYYDRAILTDKTTHYNRPDITLLDKINKTAQIIDIAVPNTHNLQSTIAEKLSKYTDLKIEISRMWRLSNATIIPIVISTTGVIPKQLHQSLRTLDLPPYLYTSLQKAAILNTCRIVRKFLQNDNETQMITPHSQASNTTRTQSLNQTNTSQSHIMSSHHITNQ

SEQ ID NO: 31249 - protein, 1416 aa, Acronicta aceris
MSLATRGTNMITRSKTRKAIQANATTMDVEPSQSSRSSSPRSIFSSIASSPPSYLLSSSRSSSLSPRTVDVVMEATSARNPLPATVSTITRKKWSEEMNRFIWRTYLIITNLETDTNSYLTSLHQQFIDKFPQMNVSKQRVGDQRRAIVQKKLLPRTTLETIRLEVSNSLQIYNSDLHPHNNTSQQFIASHTGPTQQSQLKTRMKWSKEHNETLIKCYFIITKMETDMTVWRKKLKEKFVEFYPQLLHLSEQRISDQKRVIINNRMISEARITELKLYAEGVLNQTDSYMESIGHISQSTTEDVQEILLTNNNTQLTNIEQSHTHETELENDPNYLNSIDIEALTNSTANTYHTDTNIEIRDQANPELEEIFANTLLHFTDTNPTKRNYIPKQKSSKKLAKIVTYIDNCILPKYVSNETDFKTLQTIIYSAAWTAAKANGSKLSYKTPENLANIHQRINKPKWQRRLEYKIKDLRAKIGRLTHYINGNRSRKLDREVHKILEHYKIHSTHEEPNTQLTHFLDTLKQKLTLLSSRLNRYTKCTLRKSQNNQFNKNEKQFYRSIKKSTTNRTMASNSENNTTDTLPPTSEIHKFWSNIWERPMLHNTEAEWIRTETENLVNTEQMDFEHIPIDTFHDVLKKLHNWKAPGSDYIHNFWFKKFTHIHPYLFNYINEFIKNPNTMPAYLTEGITYMLPKDFNDTNNPAKYRPITCLQTIYKIITSCITHIIYKHLDTNSILTEEQKGCRKYSQGCKEQLTIDAVILKQVQQKKKDLYTMYIDYKKAYDSVPHTWLIEVLNIYKIHPQIIAFLNNVIKQWTTRLYLPTPTGEAETEPIKIQRGIFQGDSLSPLWFCLALNPLSHKLKSVAPGYLLQYNDMSSDRLSDKQDCKINHLLYMDDIKLYASSPDDLYQLANITEQFSNDIGMEFGIDKCKINSVKGGQTFEHTHTIQTGETIESLDEHGTYKYLGYIQAKQIKHKQIKNQLTQQFKHRLKSIFNTQLYARNTIKAINTFAIPVLTYSFGIINWTKTELRKLQRIINTTLTKHRKHHPRSCVQRLTLPRKEGGRGIIDITNLHNKQISTLRTYFNYKSTTSNLHKAIVFNDRKLTPLNMSDKNKQSNETQTDGPTKILQWTQKSLHGRHRQDLCQPNVDKLASNEWLRRGDLFPETEGFMTAIQDQVIETRNYQKHIMRIPQIHDICRRCNSSPETIQHITGACKSIVQTDYKHRHDQIAKIIHQKLALKYNLISTPPVPYYKYNPEIILENNNHKLYYDRAILTDRTTHYNRPDITLLDKINKTAQIIDIAIPNTHNLQSTIAEKLTKYTDLKIEISRMWRLSHVSIIPIVLSTTGVIPKQLHQSLKSLDLAPYTYQSLQKAAILNTCRIVRKFLQNDNETLIPTSHPQVTTTINTRTQSRNHTQT

SEQ ID NO: 31250 - protein, 1379 aa, Spodoptera frugiperda
MITRSKVKNTMQAKVPPADEEGSAVSLSSSPRSIFSSITPSPLSFTTRSLRSSISSTMSADVVSEASSAKNPSPAAGKKGTRKKWSTEMNEFIWRTYLIITKLETETNAYLSTLHNKFTQQFPHMAVSRQRIGDQRRAIVNNKLLPATTLDAIRLEVRNYLQNQNSTTQIQEQTHQERIRTQISPLTHTQSRTRMKWSNELNETLIKCYFMVTKMETDMTVWRKNLKDKFTQHYPHLSHLSEQRISDQKRVIMNNNMISEARLQRIKLIAQQELDEIGSIETSSFERVHSSNAHENTSNINLELHSHINITNREPMSPEFRNSNIIQLSDNSPDQQLSATNTQIDHFERNVEIDELFSQTLQHYSETHPTDRCYIPKQKTSKKLAKIVHYINQVILPDYVIRDIEFSQLQTILYVAAWTAAKANGSKISLSSAQNRNNPQRDYKPKWQKRLERKINAIRAKIGRLTYYIQGHRSRKLRKEVNKILRDYRIHTTHEEPNTHLAHYLDTLKQKLAVFKSRLSRYTKCTLRKTQNNQFRNNEKQFYRTLKQSTTNHTTSNSTANTSLPSEENLKSFWASIWQNPVCHNAEAAWIKMEENKYENIPQMQFEQVDIETFHDVINKLHNWKAPGSDCIHNYWYKKFTTIHPHLFNHINNFIKDPNNIPSYITEGITYMLPKDLNDTSNPAKYRPITCLQTIYKIMTSCITHIIYKHIDTQNILTEEQKGCRKFSQGCKEQLVIDSVILKDVQKQKKDLYTMYIDYKKAYDSVPHSWLLHVLNIYKIHPHITHFLEIIISKWQTRLHLNTPTGTIATEFIKIQRGIFQGDSLSPLWFCLAINPLSNKLNSLHSGFQLQYRDTTSTIETTRQLCKINHLLYMDDIKLYASSSEGLYDLADTTEKFSNDIVMEFGIDKCKINSVKAGKTYTHSYQLHTGDTIHSLDETETYKYLGYIQAKQILHKDIKNQLIKQFKHRLKVICNSELNSRNTIKAINTFAIPILTYSFSIINWSKTELQNLQRNINTTLTKHRRHHPRSCTQRLTLSRNDGGRGIIDITNLHNKQITTLRSYFFSKSLTSTLHYAIAQNDKKLTPLNMSDRETQNNEKQIDRQTKIAQWAQKSLHGRHYHDLNQPNVDKLASNEWLRRGELFPETEGFMIAIQDQVIETRNYQKHIMHITLPTDTCRRCNSASETIQHITGACKSIVQTDYKHRHDQVANIIHQKLALKYNLISTPPVPYYKYQPQTVLENSLYKLYFDRAILTDKTTHYNRPDITLIDKANKTAQIIDIAIPNTHNLQNTIAEKLSKYTDLKIEISRMWRLNNVAIIPIVLSTTGVIPKQLHQSIKTLDLPPYIYQSLQKAAILNTCRIVRKFLNESDNSSYTQTQI

SEQ ID NO: 31251 - protein, 1444 aa, Amphipyra berbera
MPTLENRGPPVLFTLATVNAGLCCGRLCKSLATRGIIMITRSKKRKAIQINMLSTDDETTQVSASSSPRSIFSSIASSPPSYILASSRSSSSSPLSVDVVSEATSARNPSPATVSTITRKKWSEEMNTFIWRTYLIITNLETDTSSYLTSLHQQFINRFPQMNVSKQRVGDQRRAIVYKKLLPTTTLDIIRLEVSNSLKTHNTVLHPQTQTLQSNMSQINTNSPSQPNRRMKWSTELNENLIKCYYICTKMETDMTVWRKKLKEMFIEIYPQLSHLSEQRISDQKRVVINNRMISETRLQELKTDVQNTLNQTNSYEQHQNSHVISDSIQTQPPFNNNIAQLHTQETELELRNEPNYLNRIDVEALTQHNSTNMETNQERNQELEETFLQTLQYFTNTHPTQRNYIPKQKSSKKFAKIVSYINNIILPNYLNSDIDFDTLQTIIYSAAWTAAKSNGSKLLHVSAENMVNTRQKNHKPKWQRRLEYKIKDLRAKIGRLTQYIYGNRSRKLTQEVNTILEHYKIHSTHEEPNTQLTHFLDTLKQKLTLVNSRLKRYTKCTHRKTQNNQFRNNERQFYRTLKNSTTNQTTPTNNVNNVNSILPPIDEIKQFWSQIWERPIGHNTEADWIKVETENYINIEQMEFEHIKRDTFLDVLKKIHNWKAPGSDYIHNFWYKNFTHTHPYLYNHINNFISNPTTMPCYISEGITYMLPKDSNDRTNPAKYRPITCLQTIYKIITSCISHVIYKHLDRNKILAEEQKGCKKFSQGCKEQLTIDSVILNQVQRKKADIYTMYIDYKKAYDSVPHTWLLEVLNIYKIHPQITTFLSNIIKQWSTRLHLTSPTGIVETETIKIQRGIFQGDSLSPLWFCLALNPLSNKLNSLRPGYQLQFYDTLNDILTDDQNCKINHLLYMDDIKLYASSPDDLYELANTTEHFSKDIGMEFGIDKCKINSIRAGKTYEHSHTIQTGETIDSLDENGTYKYLGYIQNKQLKHKEIKTTLTQQFKHRLKSIFNTELHSKNTVKAINTYAIPVLTYSFGIINWTKTELKNLQRVINTTLTKHRKHHPRSCVQRLTLPRKEGGRGIIDISNLHNKQITTLRKYFNSKSTTSSLHKAIVYNDQKLTPLNMFDKTTQKNEKQTTRQTKILEWTQKSLHGRHRKDLEQLNVDKLASNEWLCRGDLFPETEGFMVAIQDQVIETRNYQKYIMRVPHANDICRRCSSSSETIQHITGACKAIVQTDYKHRHDQIANIIHQRLAIKYDLITTPPTPYYKYNPEIVLENNTHKLYYDRAILTDKTTHYNRPDITLLDKINKTAQIIDIAVPNTHNLQSTIAEKLSKYTDLKIEISRMWRLSNATIIPIVISTTGVIPKQLHQSLRTLDLPPYLYTSLQKAAILNTCRIVRKFLQNDNETQMITPHSQASNTTRTQSLNQTNSSQSHIMSSHHITNQ

SEQ ID NO: 31252 - protein, 1417 aa, Agrochola circellaris
MITRSKTKKSIQANMPSVDDETSPDSSSASPRSIFSSIASSPPSYLSHSSHSSRSSSTSSPTSVDVVSEANLANKPAPTAVLKNTRKKWSKEMNEFIWRTYLIVTNLESDINAYLSSLHQQFIEKFPNMKVSKQRIGDQRRAIVSKKLLPSTALDSIRLEVRNSLQTPNNDLQLQLQTPQELLSFQTNTQPHSQSEPKRRMKWSNELNETLMKCYFRATKMETDMTVWRKNLKEKFIECYPHLSHLSEQRISDQKRVIINNSMISEPRLQILKTIVEKELLETGSFHWQSDSIRSNTENLHSQPPTNTLNFNIENIETSQGTQIGQETVVDNLNDIGSEHPVHLNTQTTHERNLEIDEIFFETLHYYRDTNPTERSYIPMQKSSKRLAKIVSYINRVILPEQVTRDTEFNHLQTVIYCAAWTAAKANGSKISLSPPEHRSRLQQGRKPKWQKRLEHKIEVIRAKIGRLTHYMQGHRSRKLIKEVNIILRDYKTHTSHEEPNTHLTHFLDTLKQKLTVVKSRLDRYTKCTLRKTQNNQFRNNEKLFYRKLKASTTNHTTPSNNTHTTWPATDELQQFWAGIWENPVCHNNEAQWVKEEEAYQENVEAMNFDQVEVETFHDVLKKIHNWKAPGSDHIHNYWYKKFTHVHPHLYNYINDFIKNPKIIPSYITEGKTYMLPKDPNDTSNPAKYRPITCLQTLYKILTSCITHLIYKHLETQQILTEEQKGCRKFSQGCKEQLTIDAVILKHVQRTKNDLYSMYIDYKKAYDSVPHSWLLKVLNLYKIHPQLINFLGNVIDKWQTRLHLNTSTGIVETEHIKIQRGIFQGDSLSPLWFCLALNPLSNKLNALKTGYQLQYSDTMTDILTDQQSCKINHLLYMDDIKLYASSPEDLNELADATEQFSNDIAMEFGIDKCKINSIRAGKTYSHSYHMQTGDTIESLDENDTYKYLGYIQAKQILHKEIKATLTKQFQHRLKTICHTQINARNTIKAINTYAIPILTYSFGIINWNKTELKHLQRIINTTLTKHRRHHPRSCVQRLTLPRNEGGRGIIDITNLHNKQITILRTYFNAKSTTSTLHKAITFNDKKLTPLNMFEKIAQSNEQQTDRQTKIAEWTQKSLHGRHRHDLNQPNVDKLASNEWLRRGELFPETEGFMIAIQDQVIETRNYQKHIMRVPQTIDRCRRCNSSTETIQHITGACKAIVQTDYKHRHDQIANIIHQKLAIKYKLIPTPPVAYYKYQPETVLENSTHKLYFDRAILTDKTTHYNRPDITLLDKNNKTAQIIDIAVPNTHNLQNTIAEKLSKYIDLKIEISRMWRLSNVTIVPIVLSTTGVIPKQLHQSLKTLDLPPYTYQTLQKASILNTCRIVRKFLQNDNHTSTVTSHTSAATTAQTQSPGQTHSPSQNPNTPTSHHNLTNFQG

SEQ ID NO: 31253 - protein, 1399 aa, Ochropleura plecta
MLTRSKTKKSIQANMPSVDDETSSVSSSSSPKSIFSSIVSSPPSYLSRSSRSSSILSSMAADVVSEANSANNPSPTAVSITTRKKCSKEMNEFIWRNYLIITNLEADTKAYLTSLHHQFTEKFPNMKVSKQRIGDQRRAIVSKNLLPSTTLDAIRREVSNCLPTHSSDSQLESPPEILLSQTDTHHHSQSEPKRRMKWSNELNETLMKCYFRVTKMETDLTVWRKNLKEKFIECYPHLSHLSEQRISDQKRVIVNNNMIPEARLQILKSIVENELIETGSFQRQADSRGSNTEVGNLHTITNTDTLNIEIENREEPSQREHSGERTNVNNLGTDHPIHINTQHTCQDRNPDIDEIFSQTLQYYKDTHPTERSYIPKQKTSKRLANIVSYINTIVLPEHVTSDTDFNALQTIIYCAAWTAAKANGSKISLTPLEDRSRLHQVYMPKWQKRLEHKIEVFRAKIGRLTHYMRGHRSRKLNKAVESILKDYKTHTTHEQPNTQLEHFLDTLKQKLTVIKSRLNRYTKCTLRKTQNKQFRNNERQFYRSLKNSTTNQTTSNNNTHNISFPTTEELQQFWAGIWENPVCHNAEAEWIKEEEAIHSNTEAMFFDQIEVGTFHDVLNRIHNWKAPGSDHIHNYWYKKFTHTHPHIFNHINNFIKDPTTLPSYITEGKTYMLPKDPTDSENPAKYRPITCLQTIYKIMTSCITNIIYKHLETQKILTEEQKGCKKLSQGCKEQLTIDAVIHKQVQRTKKDLHTMYIDYKKAYDSVPHSWLLEVLKIYKIHPQLIQFLGNIVEKWKTRLQLNTSTEIVQTEPIKIQRGIFQGDSLSPLWFCLALNPLSNKLNALIPGFQLQYNDIMTDTLTDQHNCKINHLLYMDDIKLYAASPDDLYELADVTEKFSNDIAMEFGIDKCKINSIKAGETYTHSYQMQTGVLIDSLDETGTYKYLGYIQGKQIMHKEIKTTLTKQFRHRLKTIFSTQINAKNTIKAINTYAIPILTYSFGIIKWNKTDLKNLQRIVNTTLTKHRRHHPRSCVQRLTLPRNEGGRGIIDITNLHNKQITTLRTYFDNKSSTSTLHKAIAYNDRKLTPLNLYDKTTQINEKQTDRQTKIAEWTQKSLHGRHRHDLNLPNVDKLASNEWLRRGELFPETEGFMIAIQDQVIETRNYRKHIMRVPQTIDVCRRCNSSSETIQHITGACKAVVQTDYKHRHDQIANIIHQKLAIKYNLISTPPVPYYKYQPEIVLENATHKLYFDRAIFTDRTIHYNRPDITLLDKHNKTAQIIDIAVPNTHNLQNTIAEKLSKYTDLKIEISRMWCLSNVTIVPIVVSTTGVIPKQLHQSLKTLDLPPYTYQNLQKAAILNTCRIVRKFLQNENESIVTTTHTQLPVTTHTLSSSHPITTFTG

SEQ ID NO: 31254 - protein, 1193 aa, Phlogophora meticulosa
MTIWRKNLKEKFIECYPHLSHLSEQRISDQKRVIVNNSMISETRLQILKSIVENELLETASFNWQSDSIRRTTENVHSQPPQNTLNMDIENIEMSQTQQIGVETEGDNLNAIELEHPVHSNTQTSQERNLQIDEIFSETLQYYRDTYPTERSYIPVQKSSKRLANIVSYINKVILPEQVTQDTEFNHLQTIIYCAAWTAAKANGSKISLSPPEYRNRLQQDRKPKWQKRLDHKIEVIRAKIGRLTHYMQGHRSKKLTKEVNTILRDYKTHTSHEEPNTHLTHFLDTLKQKLTVVKSRLDRYTKCTLRKTQNNQFRNNEKLFYRKLKASTTNHTTPSNNTNTVWPATDELQQFWTGIWENPVSHNTEAEWIKEEEAYQTNVEAMDFDQVDVETFHDVLQKIHNWKAPGSDHIHNYWYKKFTHIHPYLYNCINNFIKDPNIIPSYITEGKTYMLPKDPNDTANLAKYRPITCLQTIYKILTSCITQIIYKHLETQHILTEEQKGCRKFSQGCKEQLTIDAVILKHVQRTKKDLCSMYIDYRKAYDSVPHSWLLKVLSLYKIHSQLINFLGNILDKWQTRLHLNTSIGIVETEHIKIQRGIFQGDSLSPLWFCLALNPLSNKLNALKPGYQLQYIDTTTDILTDQQTCKLNHLLYMDDIKLYASSPDDLYELANATEQFSNDIAMEFGIDKCKINSIRAGKTYSHSYHMQTGDTIESLDENGTYKYLGYIQAKQILHKEIKATLTKQFKHRLKTICHSQINARNTIKAINTYAIPVLTYSFAIINWNKTELKHLQRVINTTLTKHRRHHPRSCVQRLTLPRNEGGRGIIDITNLHNKQITILRTYFYTKSPISTLHKAIAFNDKKLTPLNMFEKTTQSNEQQTDRQTKIAEWTKKSLHGRHRHDLNQPNVDKLASNEWLRRGELFPETEGFMIAIQDQVIETRNYQKHIMRVPQTIDRCRRCNSSSETIQHITGACKAIVQTDYKHRHDQLANIIHQKLAIKYKLIPTPPVAYYKYQPETVLENSTHKLYFDRAILTDKTTHYNRPDITLLDKINKTAQIIDIAVPNTHNLQNTIAEKLSKYIDLKIEISRMWRLSNVTIVPIVLSTTGVIPKQLHQSLKTLDLPPYTYQTLQKAAILNTCRIVRKFLQNDNDTSIVSSHTRAAANARTQSHELTQSPSQNPNTPSSHHNITNSQG

SEQ ID NO: 31255 - protein, 1381 aa, Mamestra brassicae
MITRSKTKKHIQANKPTSDDGTSSVSSPSSPRSIFSSIVSSPPSYILRSSRSSSILSIGSVDVVSEATTAKNPSPAAGITNTRKKWTKEMNEFIWRTYLIITNLETEISSYVTSLHQQFINKFPQMNVSKQRVGDQRRAIFNNKLLSATTLENIRSAVSKELQTDTGNLNLTLSQLDVDQNNTHLQSGPKSRMRWSNEMNETLIKCYFIVTKMETDMTVWRKKLRVIFIEHYPLLSYLSEQRISDQKRVIINNKMITETRLQDLKTYAENTLNLTNPFSQLEHPNTPIATENTQAQASIEYANQTNTQEAVVENGLSYLNSIDVEAIIPTNTNTNKEPGTTNSEINWERSQELDETFTQTLQHFTNIHPTKRNYIPKQRTSKKLAQIVGYIDNVILPKHVNIDTDFETLQTVIYSAAWTAAKINGSKLSYTTSKNAINMNQKNRKPKWQKRLELTVKDLRTKIGRLTAFIQGNRGWRLVREVHTILESYRIHSMHEEPNTQLTHFLDTLKQKLTLVNSRLNRYNSCTLRKTQTNKFRNNEKQFYRSLKNSTTNTTALNNNENNTNYSLPSVDELRQFWSRIWERPICHNMEAEWIKTETENHKHTEQMEFEHVPIDTFHDVLQKLHNWKSPGSDCIHNFWYKKFTFIHPHLYNFINNFIKDPTTMPTYIAEGITYMISKDSNDSANPAKYRPITCLQTIYKIITSCITQIIYTHLESNSILSEEQKGCRKFSQGCKEQLTIDSVILKQVQARKKDLYTMYIDYKKAYDSVPHTWLLEILKIYKINPQIIAFLNTTMTHWTTRLHLTTLTGIVETESIKIQRGIFQGDSLSPLWFCLALNPLSNKLNSLMPGYNLHYNDTTDDIRTDHRDCKINHLLYMDDIKLYASLPEDLNELANATDQFSSDIGMEFGIDKCKINSVKAGKTYDHSYTTHSGETIDSLDEHGTYKYLGYIQAQQIKHKPIKNKLTQQFKHRLKSIFNTQLNSKHTIKAVNTFAIPVLTYSFGIISWTKTELKNLQRVINTTLTKHRKHHPRSCVQRLILPRKEGGRGIIDITNLHNKQISTLRKYFNSKSTTSTIHKAIVYNDRKLTPLNMFDKTTQTNEKQTDRQTKILEWTQKSLHGRHRQDLCQPNVDKLASNEWLRRGDLFPETEGFMTAIQDQVIETRNYQKHIMRIPISTDFCRRCHSSPETIQHITGACKAIVQTDYKHRHDQVANIIHQKLAIKYKLITTPSVPYYKYNPETVLENATHKLYFDRAILTDKTTHYNRPDITLVDKINKTAQIIDIAVPNTHNLQNTIAEKLSKYTDLKIEISRMWRLSSVAIIPVVLSATGVIPKQLHQSLKSLEIAPSTYQNLQKAVILNTCRIVRKFLQSDNDAQTTNT

SEQ ID NO: 31256 - protein, 1373 aa, Spodoptera exigua
MITRSKLKNTMQAKVPPADDESSTVSLSSSPRSIFSSITPSSLSITSRSLRSSTSSARSVDVVTEASPAKNPPSATGSKITRKKWTKEMNEFIWRTYLIITNLETDTNAYLSTLHTKFTQQFPDMVVSKQRIGDQRRAIVNNNLLPRTTLDAIRLEVRNHLQTQNGIRHQSQQHQTETQADPLNHTNSHTKTRMKWSNELNETLIKCYFEVTKMETDMTIWRKSLKEKFVEYYPHLSHLSEQRISDQKRVIINNKMISETRIQFLKLAVEQKLNELGIAITERPNNLNLHQTTNAYLESQIHIQNTNNQPTTLGSEQINTVEECDHINDIDQQLTLNNTHTETHERYPEIDEQFLQALQFFNETHPTNRCYIPKQKTSKKLAKIVEYINKVILQEHVSADTDFNQLQTFIYVAAWTAAKANGSRVTLSHAQDQSYSQKDYKPKWQKRLENKLDTIRAKVGRLTNYIQGYRSRKLEKEVRRILTDYRTHTIHEQPNIQLTHYLDTLKQKLAVIKSRLCRYTKCTLRKTQNNQFKNNEKQFYRKLKNLTTNNTISNSTTHTSFPTEGSMRQFWAGIWQNPVCHNEEAEWIKNEISSHNNIQEMQFEQVDVETFHNALDKAHNWKAPGSDRIHNYWYKKFTTTHPHLYNHINDFIKNPTNIPSYVTEGVTYMLPKDLNDTVNPAKYRPITCLQTIYKIMTSCVTSLLYKHIDNQKILTEEQKGCRKFSQGCKEQLVIDSVILQDVQRHKKDLYTMYIDYKKAYDSVPHTWLIHILKIYKIHPHLTHFLESIIKTWQTRLHLNTPMGTLTTESIKIQRGIFQGDSLSPLWFCLALNPLSNKLNSLEPGLQLRYGERRTTGTGQEICKINHLLYMDDIKLYASTPEGLHRLADTTQTFSNDIMMEFGIDKCKINSVKAGKSCQHSYQLQTGDKIDSLDEGETYKYLGYIQAKQILHKPVKSQLSKQFKHRLKIICNTQLNTRNTIKAINTYAIPILTYSFGIISWSKTDLQNLQRSINTTLTKHRKHHPRSCLQRLTLPRNDGGRGIIDITNLHNKQVTTLRTYFFSRSATSTLHNAIVQCDKKLTPLNMADQTTQNNEKQRDRQTKISEWIQKSLHGRHYHDLSQPNVDKVASNEWLRRGELFPETEGFMIAIQDQVIETLNYQKHIMHIPIPTDICRRCNSASETIQHITGACKSIVQTDYKHRHDQIANIIHQKLALKYNLISTPAVPYYKYQPEIVLENLSHKLYFDRAILTDKTTHYNRPDITLIDKINKTAKIIDIAIPNTHNLQNTIVEKLSKYTDLKNEITRMWRLNNVTIVPIVLSTTGVIPKQLHQSIKTLQLPSYIYQNLQKAAILNTCHIVRKFLNETDMIPYTST

SEQ ID NO: 31257 - protein, 1417 aa, Hypena proboscidalis
MENTNKKQYNFRPRSERCYYPTRAKTQSQSRNTRIGSNLSRGDEIYNRGSDSSLFSSISSTTPSYRKSPARSVTESTNTIASIQLADVAQETNFVNEPVPTTSSTGIRRKWTTEMNEFILRTYFLLTNLETDTNAYLPPLHTKFIEKYPAMQVDRQRIGDQRRAIVNKKLLPQDSIDRIYNDVKLELTAIQRDITQHTLQNNTISNSQPRMRWTTEMNETIMREYYKITRLETNRTIYRKYLHEQFITIYPNLAHITEQRVADQRRAIIEKKYISKTRLQEIRTEISEELLILSNNINQDNTTQTRVQTNLQEIETQMPSFLANMDIESLSQINVDHTQVENQVELEQNKAIDDTFTHTLQHFTNTHPTSRQYIPKQKTSKRFKNIVQYINNSILPQHINKDTDFITLQTVIYSAAWTAAKVNGSKISLLANTMVTSIGQNNKPKWQLRLERKLNDLRAKIGRLTQYMRGNRSPNLVKEVEKVLAQYKIHSTHELPNTQLSHFLDTLKQKLTVVKSRLQRYRKCSLRKSQNNQFSKNEKQFYRTLKTSSTNNTLPGSNTNQPTRDELQGFWANIWENPVSHNSEVEWITSEKLRHSHIQEMNFEYVPIDVFQDVLKKIHNWKAPGSDALHNYWYKKFTHIHPYLHNYINDFIKAPEKIPTYIMEGITFMLPKDYNNTKDPAKYRPITCLQTLYKIITSCISHIIYTHLDNNNILTEEQKGCRKSSQGCKEQLIIDSVIQKQVQSSKSDLCTMYIDYKKAFDSVSHTWLLETLKIYNIHSILLSFLSNIMTHWKTRLRLMTPAGNLDTKPIKIQRGIFQGDSLSPLWFCLALNPLSNQLNSSGLGYSFKYTDLTHDRLTDDNENKINHLLYMDDIKLYTTTPQDLVILGNITEQFSNDIKMEFGIDKCRINSYLDGKLQQHSYELQNGATIKSLEINEAYKYLGYLQSNQIHQKEIKNNLTQQFKQRLNSIFNTQLHARNTTKAINTFAIPILTYSFGIIGWTKNELTKLQRVINTTMTKNRKHHPRACIQRLTLPRREGGRGIIDISNLHNKQISTLRHYFREKSTTSYLHKTVVLNDRKLTPLNMFDTNQQSNGKQIDMQAKITAWTQKSLHGRHRQELNQPTVDKVASNEWLNSGDIFPETEGFMQAIQDQIIETRNYRRYIMRVPQTLDICRRCNSASETIQHITGACKAIAQTDYKHRHDQIANIIHQKLAIKYSLISTPPIPYYKYVPEIVLENSFYKLYFDRAILTDRTTHYNRPDITLLDKVNKTVQLIDIAVPNTHNLQSTIAEKLSKYIDLKLEISRMWQLNSTTIIPIVLSTTGVIPKQLHQSIKSLDLHSQTYKSLQKAAILNTCRIVRKFLQTDSQVTLEPSQLLPNTQQANTQHLSTSHLNTPHLNTPHLNTLHLNTTHSNIPH

SEQ ID NO: 31258 - protein, 1345 aa, Hypena proboscidalis
MENTNKKQYNFRPRSERCYYPTRAKTQSQSRNTRIGSNLSRGDEIYNRGSDSSLFSSISSTTLSYRKSPASVTESTNTIASIQLADVAQETNFVNEPVPTTSSTGIRRKWTTEMNEFILRTYFHLTNLETDTNAYLPPLHTKFIEKYPAMQVDRQRIGDQRRAIVNKKLLPQDSIDRIYNDVKLELTAIQRDITQHTLQNNTISNSQPRMRWTTEMNETIMREYYKITRLETNRTIYRKYLHEQFITIYPNLAHITEQRVADQRRAIIEKKYISKTRLQEIRTEISEELLILSNNINQDNTTQTIVQTNLQEIETQMPSFLANMDIESLSQINVDHTQVENQVELEQNKAIDDTFTHTLQHFTNTHPTSRQYIPKQKTSKRFKNIVQYINNSILPQHINKDTDFITLQTVIYSAAWTAAKVNGSKISLLANTMVTSIGQNNKPKWQLRLERKLNDLRAKIGRLTQYMRGNRSPNLVKEVEKVLAQYKIHSTHELPNTQLSHFLDTLKQKLTVVKSRLQRYRKCTLRKSQNNQFSKNEKQFYRTLKTSSTNNTLPGSNTNQPTRDELQGFWANIWENPVSHNSEVEWITSEKLRHSHIQEMNFEYVPIDVFQDVLKKIHNWKAPGSDALHNYWYKKFTHIHPYLHNYINDFIKAPEKIPTYIMEGITFMLPKDYNNTKDPAKYRPITCLQTLYKIITSCISHIIYTHLDNNNILTEEQKGCRKSSQGCKEQLIIDSVIQKQVQSSKSDLCTMYIDYKKAFDSVPHTWLLETLKIYNIHSTLLSFLSNIMTHWKTRLRLMTPAGNLDTEPIKIQRGIFQGDSLSPLWFCLALNPLSNQLNSSGLGYSFKYTDLTHDRLTDDNENKISHLLYMDDIKLYTTTPQDLVILANITEQFSNDIKMEFGIDKCRINSYLDGKLQQHSYELQNGATIESLEINEAYKYLGYLQSNQIHQKEIKNNLTQQFKQRLNSIFNTQLHARNTTKAINTFAIPILTYSFGIIGWTKNELTKLQRVINTTMTKNRKHHPRACIQRLTLPRREGGRGIIDISNLHNKQISTLRHYFREKSTTSYLHKTVVLNDRKLTPLNMFDTNQQSNEKQIDMQAKITAWTQKSLHGRHRQELNQPTVDKVASNEWLNSGDIFPETEGFMQAIQDQIIETRNYRRYIMRVPQTLDICRRCNSASETIQHITGACKAIAQTDYKHRHDQIANIIHQKLAIKYSLISTPPIPYYKYVPEIVLENSFYKLYFDRAILTDRTTHYNRPDITLLDKVNKTVQLIDIAVPNTHNLQSTIAEKLSKYIDLKLEISRMWQLNSTTIIPIVLSTTGVIPKQLHQSIKSLDLHSQTYKS

SEQ ID NO: 31259 - protein, 1409 aa, Mesoligia furuncula
MITRSKTKKQIQANKPSADEISPVSSSASPRSIFSSIVSSPPSYLSHSSRSSSSSSPMSVDVVSEATTAMNPSPAIVKSNTRKKWSEDMNQFIWRTYLIITKLDTETNSYLTSLHQQFINRFPQMNVSKQRVGDQRRAIVQKKLLSATTLEKIRLEVSRELQSDTTNLDTHMRTPSQLNTDQNNTHLQSGSKSRMRWSNEMNETLIKCYFITTKMETDMTVWRKKLREMFIEFYPQLSHLSEQRISDQKRVVLSNKMITEARLQDLKTYAENTLNHANPYRQTEYHNSLIAPDITPTQASTNNNTETAYINNQTYTQDTEVGSEPNFLNSIDVGSLTSTIINTEHNTLNVETSQELKETFSHTLQHFTNVQPTKRNYIPKQKPSKKFAQIVSYINNEILPKYVNADTDFETLQTVVYSAAWSAAKTNGSKLSRITSENTANLNQKNKKPKWRKRLELRVKDLRTKIGRLTAYMQGNRGWRLVREVHTVLENYRIHSIHEEPNTQLTQFLDTLKQKLTLVNSRLDRYNKCTSRKIQNNKFRNNEKQFYRTLKNSTNNQTLPNNNENNSNHSLPSVDELQNFWSRIWERPICHNADADWIKIESENYRHTEQMEFEHVPIDTFHDVLQKLHNWKAPGSDYIHNFWYKKFTHIHPYLYNYINNFIQNPISMPTYIAEGITYMIPKECNDRTNPAKYRPITCLQTIYKIITSCITQIIYKHLEENTILSEEQKGCRKFSQGCKEQLTIDSVILKQVQRKKKDLYTMYIDYKKAYDSVPHTWLLEVLKIYKINPQIITFLNNTMTQWTTRLHLTSSTGTVETEPIKIQRGIFQGESLSPLWFCLALNPLSNKLNSLLPGYNLRYNDTADDIQTDRQNCKINHLLYMDDIKLYASTSDDLYLLAKTTDQISSDIGMEFGIDKCKINSVKAGRTYEHTYTLQTGETIDSLDENGTYKYLGYIQAKQIKQREIKNKLTQQFKHRLKSIFNTQLYSRHTTKAINTYAIPVLTYSFGIISWTKTELKSLQRIINTSLTKYRKHHPRSCVQRLTLPRKEGGRGIIDITNLHNKQISTLRKYFYTKSTTSILHKAIVYNDQKLTPLNMADQTTQINEKQTDRQTKILEWTQKSLHGRHRQDLCQPNVDKLASNEWLRHGDLFPETEGFMTAIQDQVIETRNYQKHIMRVPLSTDICRRCHSSSETIQHITGACKAIVQTDYKHRHDQIANIIHQKLGIKYKLITTPQVPYYKYNPETVLENATHKLYFDRAILTDRTTHYNRPDITLLDKINKTAQIIDIAVPNTHNLQNTIAEKLSKYTDLKIEITRMWHLGGVAIIPVVLSTTGVIPKQLHLSLKTLDLAPSTYQTLQKAAILNTCRIVRKFLQNDNDAQMSHAQTSSTIATQSHNIPSSRHTLSSTIT

SEQ ID NO: 31260 - protein, 1399 aa, Hypena proboscidalis
MSLATRGNNMENVTNKSKYNLRPRPERRCHLARTSVHGHSRSTRIDSNLYRSDELSVLGSNSSLFSSIPSKTPSYCKSSSTSISTNTIPSIQLVDVAQETISVNEPVPTTNSSGIRRKWTTEMNEFILRTYFHLTNLGTDTNAYLPPLHIKFIEKYPTVQVDRQRIGDQRRAIIYKKLLPQESIDRIYNEVKLELTAIQTDIAQHTLQCNNTIANTQPDKRMRWTKEMNEAIIREYLKITRLETNRTIYRKYLHQQFITTFPNLGHITEQRIADQRRAIIKKRYIRAARLQEIRSEIAEELQIRPNSIHQDNTLQIREQISSQESEPLIQSFLANMDIESLLESNMIHTQVENQIGHERIQAIDDTFTLTLLHFTDTNPTNRQHIPKQRTSKKFTNIIQYINCHILPEYITKDTDFKTFQTIIYSAAWTAAKMNGTKISLLPTATGNSFKRNTKPKWQIRLEYKLNDLRAKIGRLTHYIRGNRGTNLVREVDKIFTQYKIHSTHESPNTHLTHFLDTLKQKLTVVKSRLQRYKKCTLRKTQNSQFTNNEKHFYRALKTSTTNHTIQSNNGNQPATDELQRFWANIWEKPVSHNIEADWIEAERLRHVNVEQMNFECVSIDIFQNVLKKLHNWKAPGSDALHNYWYKKFTYIHPYLHYHINTFIKTPVEMPTYITEGITYMLPKDNNDRTNPAKYRPITCLQTIYKIITSCLTHLIYTHIDSNNILAEEQKGCRRFSQGCKEQLLIDSVIQKQVHLTKSNLCSMYVDYKKAFDSVPHTWLIEALRIYNIHPTLLSFLSNIMVNWKTRLRLTTPTGNLETEPIRIQRGIFQGDSLSPLWFCLALNPLSNQLNSRGLGYSFKYKDSTNNRPTDMIDFRVNHLLYMDDIKLYTTTPEDLVILANITEQFSKDIKMEFGIDKCKINSVLAGNIHQHSYELQTGDTIDSLDENETYKYLGYIQSKQMHHREIKNKLIHQFKQRLNSILNTQLHARNIVKAINTYAIPILTYSFGIISWTKNELKNLQRVINTTMTKHRKHHPRACIQRLTLPRKEGGRGIIDISNLHNKQITILRTYFLAKTSTSNLHKTIVYNDRKLTPLNMFDNTQQSNEKQIELQEKIAAWIQKALHGRHRQDLNQPTVDKVASNEWLSSGDMFPETEGFMQAIQDQVIETRNYRKHIMRIPQTLDICRRCNSATETIQHITGACKAIVQTDYKHRHDQIANIIHQKLAIKYNLLSTPPIPYYKYVPEIVLENDSYKLYFDRAILTDKTTHYNRPDITLLDKVNKTAQLIDIAVPNTHNLQSTIAGKLSKYTDLKLEISRMWQLNNVSIIPVVLSTTGVIPKQLHLSIKSLDLHPYTYKSLQKAAILNTCRIVRKFLQTDNQINSTPSQRSPTTLHNDTLNT

SEQ ID NO: 31261 - protein, 1417 aa, Hypena proboscidalis
MENTNKKQYNFRPRSERCYYPTRAKMQSQSRNTRIGSNLSRGDEIYNRGSDSSLFSSISSTTPSYRKSPARSVTESTNTIASIQLADVAQETNFVNEPVPTTSSTGIRRKWTTEMNEFILRTYFHLTNLETDTNAYLPPLHTKFIEKYPAMQVDRQRIGDQRRAIVNKKLLPQDSIDRIYNDVKLELTAIQRDITQHTLQNNTISNSQPRMRWTTEMNETIMREYYKITRLETNRTIYRKYLHEQFITIYPNLAHITEQRVADQRRAIIEKKYISKTRLQEIRTEISEELLILSNNINQDNTTQTRVQTNLQEIETQMPSFLANMDIESLSQINVDHTQVENQVELEQNKAIDDTFTHTLQHFTNTHPTSRQYIPKQKTSKRFKNIVQYINNSILPQHINKDTDFITLQTVIYSAAWTAAKVNGSKISLLANTMVTSIGQNNKPKWQLRLERKLNDLRAKIGRLTQYMRGNRSPNLVKEVEKVLAQYKIHSTHELPNTQLSHFLDTLKQKLTVVKSRLQRYRKCTLRKSQNNQFSKNEKQFYRTLKTSSTNNTLPGSNTNQPTRDELQGFWANIWENPVSHNSEVEWITSEKLRHSHIQEMNFEYVPIDVFQDVLKKIHNWKAPGSDALHNYWYKKFTHIHPYLHNYINDFIKAPEKIPTYIMEGITFMLPKDYNNTKDPAKYRPITCLQTLYKIITSCISHIIYTHLDNNNILTEEQKGCRKSSQGCKEQLIIDSVIQKQVQSSKSDLCTMYIDYKKAFDSVPHTWLLETLKIYNIHSTLLSFLSNIMTHWKTRLRLMTPAGNLDTKPIKIQRGIFQGDSLSPLWFCLALNPLSNQLNSSGLGYSFKYTDLTHDRLTDDNENKISHLLYMDDIKLYTTTPQDLVILGNITEQFSNDIKMEFGIDKCRINSYLDGKLQQHSYELQNGATIESLEINEAYKYLGYLQSNQIHQKEIKNNLTQQFKQRLNSIFNTQLHARNTTKAINTFAIPILTYSFGIIGWTKNELTKLQRVINTTMTKNRKHHPRACIQRLTLPRREGGRGIIDISNLHNKQISTLRHYFREKSTTSYLHKTVVLNDRKLTPLNMFDTNQQSNEKQIDMQAKIIAWTQKSLHGRHRQELNQPTVDKVASNEWLNSGDIFPETEGFMQAIQDQIIETRNYRRYIMRVPQTLDICRRCNSASETIQHITGACKAIAQTDYKHRHDQIANIIHQKLAIKYSLISTPPIPYYKYVPEIVLENSFYKLYFDRAILTDRTTHYNRPDITLLDKVNKTVQLIDIAVPNTHNLQSTIAEKLSKYIDLKLEISRMWQLNSTTIIPIVLSTTGVIPKQLHQSIKSLDLHSQTYKSLQKAAILNTCRIVRKFLQTDSQVTLEPSQLLPNTQQANTQHLSTSHLNTPHLNTPHLNTLHLNTTHSNIPH

SEQ ID NO: 31262 - protein, 1385 aa, Lymantria monacha
MRTLNTWGPSVLMYPCRSECWALLRLIFMSLATRGNGMQNYTNTYNLRSSRGIRRDPYIRNATIVQLSPRASSTVCRSNTSTPYHIPSIPSETNSTNLGIQLEDVAQETTFVNETVPTTISIGIRRKWTADMNEFILRTYLHLTNLDTDTNAYLLPLHTKFLEKYPNMQISRQRVGDQRRAIMRNKLLPQENIDRIYQEVKGEIQVLQNNIINHTTQYTTTTITQSDQRIRWTKEYNEAIIKAYFKVTRLETDKTMYRKKLHHEFITLFPNLSYLTEQRIADQRRAIQKNTYISENRIADIRKEVGDELQIIITPNSNTDNTSNYETNHQEYEALTVLESVASEINTQYSNIETSHNENKLIDEIFTTSLQHFTNIHPTERQYIPRQKTSKKLACTMRYINNVILRKRVNTDTDFGTLQTVIYSAAWTAAKVNGAKISIEDTNNVNDCQKEIKPKWQKRLEHKLTTLRARIGQLTQYIQGNKSNKVIKAVSHILEHHKIHTIHEDPNTQLTHFLDTLKQKLSVVKSRLSRYKKCTLRKTQNNQFRNNEKLFYRNLKISTTNLTKSNTLTRHPSVEELQRFWSDMWANPVNHNTSAEWIKYEKDSNTNIEPMKFEYVSLDTFQMVIKKLHNWKAPGSDALHNFWYKKFTHLHPYLHNHINNFIKNPKLMPKYITEGITYMIPKDSNDTINPAKYRPITCLQTIYKIITACLTHIIYTHLDTYKILTEEQKGCRKFSQGCKEQLIIDSVIQKHVNKHKKDLCTMYIDYKKAYDSVPHSWLIEVLKIYKIHPQITEFLSKIMRGWTTRLRLTTHTGILETKYIKIRRGIFQGDALSPLWFCIALNPLSKQLNLRQAGYVLKYKDTIELTTNNSIMKINHLLYMDDIKLYATAPDELITLANTVEQISNDIKMEFGIDKCKINSILAGKTHQHSYIIQTGETIGALDEGEVYKYLGYIQSKQIHHKEIKINLASQFKQRLRAIFNSQLNSLHSVKATNAYAIPVLTYSFGVINWTRTELNNLQRLINTSLTSHRKHHPRACTQRLTLPREEGGRGIIDLINLHNRQITTLRTYFKSKSTSSILHRAIVYNDKKYTPLNMFDSNIQNNEKQIANQEKIDIWIKKSLHGRHCLDVNQPTVDKIASNKWLSSGELFPETEGFMQAIQDQVIETRNYQKHIMHIPTTDICRRCNSASETIQHITGACKSIVQTDYKHRHDQIVNIIHQNLAIKYDLISAPSVPYYKYTPDAVLENNKHKMYFDRAILTDRTTHHNRPDITILDKINKTAYIIDIAIPNTHNLQNTISEKMSKYLDLKIEMTRMWQLSKVTIVPIVLSTTGVIPKQLHQSIKTLNLPPYIYKNLQKAAILNTCRIVRKFLQTDNQSSTHPVIPT

SEQ ID NO: 31263 - protein, 1385 aa, Lymantria monacha
MRTLNTWGPSVLMYPCRSECWALLRLIFMSLATRGNGMQNYTNTYNLRSSRGIRRDPYIRNATIVQLSPRASSTVCRSNTSTPYHIPSIPSETNSTNLGIQLEDVAQETTFVNETVPTTSSIGIRRKWTADMNEFILRTYLHLTNLDTDTNAYLLPLHTKFLEKYPNMQISRQRVGDQRRAIMRNKLLPQENIDRIYQEVKGEIQVLQNNIINHTTQYTTTTITQSDQRIRWTKEYNEAIIKAYFKVTRLETDKTMYRKKLHHEFITLFPNLSYLTEQRIADQRRAIQKNTYISENRIADIRKEVGDELQIIITPNSNTDNTSNYETNHQEYEALTVLESVPSEINTQYSNIETSHNENKLIDEIFTTSLQHFTNIHPTERQYIPRQKTSKKLACTMRYINNVILRKRVNTDTDFGTLQTVIYSAAWTAAKVNGAKISIEDTNNVNDCQKEIKPKWQKRLEHKLATLRARIGQLTQYIQGNKSNKVIKAVSHILEHHKIHTIHEDPNTQLTHFLDTLKQKLSVVKSRLSRYKKCTLRKTQNNQFRNNEKLFYRNLKISTTNLTKSNTLTRHPSVEELQRFWSDMWANPVNHNTSAEWIKYEKDSNTNIEPMKFEYVSLDTFQMVIKKLHNWKAPGSDALHNFWYKKFTHLHPYLHNHINNFIKNPKLMPKYITEGITYMIPKDSNDTINPAKYRPITCLQTIYKIITACLTHIIYTHLDTYKILTEEQKGCRKFSQGCKEQLIIDSVIQKHVNKHKKDLCTMYIDYKKAYDSVPHSWLIEVLKIYKIHPQITEFLSKIMRGWTTRLRLTTHTGILETKYIKIRRGIFQGDALSPLWFCIALNPLSKQLNLHQAGYVLKYKDTIELTTNNSIMKINHLLYMDDIKLYATAPDELITLANTVEQISNDIKMEFGIDKCKINSILAGKTHQHSYIIQTGETIGALDEGEVYKYLGYIQSKQIHHKEIKINLASQFKQRLRAIFNSQLNSLHSVKAINAYAIPVLTYSFGVINWTRTELNNLQRLINTSLTSHRKHHPRACTQRLTLPREEGGRGIIDLINLHNRQITTLRTYFKSKSTSSILHRAIVYNDKKYTPLNMFDSNIQNNEKQIANQEKIDIWIKKSLHGRHCLDVNQSTVDKIASNKWLSSGELFPETEGFMQAIQDQVIETRNYQKHIMHIPTTDICRRCNSASETIQHITGACKSIVQTDYKHRHDQIVNIIHQNLAIKYDLISAPSVPYYKYTPDTVLENNKHKMYFDRAILTDRTTHHNRPDITILDKINKTAYIIDIAIPNTHNLQNTISEKMSKYLDLKIEMTRMWQLSKVTIVPIVLSTTGVIPKQLHQSIKTLNLPPYIYKNLQKAAILNTCRIVRKFLQTDNQSSTHPVIPT

SEQ ID NO: 31264 - protein, 1385 aa, Lymantria monacha
MRTLNTWGPSVLMYPCRSECWALLRLIFMSLATRGNGMQNYTNTYNLRSSRGIRRDPYIRNATIVQLSPRASSTVCRSNTSTPYHIPSIPSETNSTNLGIQLEDVAQETTFVNETVPTTSSIGIRRKWTADMNEFILRTYLHLTNLDTDTNAYLLPLHTKFLEKYPNMQISRQRVGDQRRAIMRNKLLPQENIDRIYQEVKGEIQVLQNNIINHTTQYTTTTITQSDQRIRWTKEYNEAIIKAYFKVTRLETDKTMYRKKLHHEFITLFPNLSYLTEQRIADQRRAIQKNTYISENRIADIRKEVGDELQIIITPNSNTDNTSNYETNHQEYEALTVLESVASEINTQYSNIETSHNENKLIDEIFTTSLQHFTNIHPTERQYIPRQKTSKKLACTMRYINNVILRKRVNTDTDFGTLQTVIYSAAWTAAKVNGAKISIEDTNNVNDCQKEIKPKWQKRLEHKLTTLRARIGQLTQYIQGNKSNKVIKAVSHILEHHKIHTIHEDPNTQLTHFLDTLKQKLSVVKSRLSRYKKCTLRKTQNNQFRNNEKLFYRNLKISTTNLTKSNTLTRHPSVEELQRFWSDMWANPVNHNTSAEWIKYEKDSNTNIEPMKFEYVSLDTFQMVIKKLHNWKAPGSDALHNFWYKKFTHLHPYLHNHINNFIKNPKLMPKYITEGITYMIPKDSNDTINPAKYRPITCLQTIYKIITACLTHIIYTHLDTYKILTEEQKGCRKFSQGCKEQLIIDSVIQKHVNKHKKDLCTMYIDYKKAYDSVPHSWLIEVLKIYKIHPQITEFLSKIMRGWTTRLRLTTHTGILETKYIKIRRGIFQGDALSPLWFCIALNPLSKQLNLRQAGYVLKYKDTIELTTNNSIMKINHLLYMDDIKLYATAPDELITLANTVEQISNDIKMEFGIDKCKINSILAGKTHQHSYIIQTGETIGALDEGEVYKYLGYIQSKQIHHKEIKINLASQFKQRLRAIFNSQLNSLHSVKATNAYAIPVLTYSFGVINWTRTELNNLQRLINTSLTSHRKHHPRACTQRLTLPREEGGRGIIDLINLHNRQITTLRTYFKSKSTSSILHRAIVYNDKKYTPLNMFDSNIQNNEKQIANQEKIDIWIKKSLHGRHCLDVNQPTVDKIASNKWLSSGELFPETEGFMQAIQDQVIETRNYQKHIMHIPTTDICRRCNSASETIQHITGACKSIVQTDYKHRHDQIVNIIHQNLAIKYDLISAPSVPYYKYTPDAVLENNKHKMYFDRAILTDRTTHHNRPDITILDKINKTAYIIDIAIPNTHNLQNTISEKMSKYLDLKIEMTRMWQLSKVTIVPIVLSTTGVIPKQLHQSIKTLNLPPYIYKNLQKAAILNTCRIVRKFLQTDNQSSTHPVIPT

SEQ ID NO: 31265 - protein, 788 aa, Lymantria dispar
MKFDDVPIDTFKMVINKLHNWKAPGSDALHNYWYKKFTRLHAYLHHHINNFIKNPTLMPKYIMEGITYMIPKDSNDTINPAKYRPITCLQTIYKIITACLTNIIYTHLEKYKILTEEQKGCRKFSQGCKEQLIIDSVIQRKVKKNKNDLCTMYIDYKKAYDSVPHSWLIEALEIYKIHPEILEFLSKTMSEWTTRLRLSTHTGILETKGIKIKRGIFQGDALSPLWFCIALNPLSKQLNLCQSGYVLKYKDTVDGTTNIVKINHLLYMDDIKLYATTPDALITLANTIEQISNDIKMEFGIDKCKINSVLAGKTYQHSYTIQTGETIDALDEGGVYKYLGYIQSKQIHHKEIKINLTSQFKQRLRAIFSSQLNSLHSIKAINSYAIPILTYSFGVINWTQSELNNLQRLINTNLTSHRKHHPRACVQRLTLSREEGGRGIIDLTNLHNKQITILRTYFRSKSTSSILHRAILYNDKKHTPLNMSDSNIQNNEKQIDTQAKIDVWAKKSLHGRHCIDLSQPTVDKIASNKWLSCGELFPETEGFMQAIQDQVIETRNYQKHIMHTTTTDICRRCNSASETIQHITGACKSIVQTDYKHRHDQIANIIHQNLAIKYDLRSTPPIPYYKYIPDAVLENSTHKMYFDRAILTDRTTHYNRPDITVLDKVSKTAYIIDIAIPNTHNLQNTIAEKMSKYLDLKIEITRMWQLSNVTIVPIVLSATGVVPKQLHQSIKTLNLPPYTYKNLQKAAILNTCRIVRKFLQTDSQPNTHHAHNHLSPYENLHNSITNTS

SEQ ID NO: 31266 - protein, 1340 aa, Lymantria dispar
MRNTTNATSDQLSIRSNSTIFRSNDSDSLSYHIPSIASDTSVDIQLVDVPQETTSVYEPVPTTSSRGTRRKWTADMNEFILRTYLHLTNLDTDTNAYLLPLHTKFLEKYPAMSVSRQRVGDQRRAIIRNKLLPQESIDRIYQEVREELQALQNDIIHRSTQSSTTVNTHNHVQSDQRIRWTKEYNESIIKAYFKVTRLEIDKTMYRKKLHHEFITLFPNLSYLAEQRIANQMRAILKNKYICESRIADIRSQVGEELQIIITPHTDNTTNYETNDRIFEALTTTESVTSEMNTQYPNVDIDRNKLIDETFTQSLQHFINIQPTKRQYIPKQKTTKKLAYIVSYINDVILRQQVDIDTDFCRLQTILYSAAWTAAKLNGLKISIQHTNTLNTCQKEVRPKWQKRLEHKLEVLRARIGQLTQYIQGNKSNKLVKAVNHILEYYKIYSIHEEPNSQLTHFLDTLKQKLSVVKSRLSRYKKCTLRKTQNSQFRNNEKLFYRNLKTCSTNLTRPNTSTSHPSVDELQRFWSDIWANPVTHNNKAEWIKCEIASNTNIEPMKFDDVPIDTFKMVIKKLHNWKAPGSDALHNYWYKKFTRLHAYLHHHINNFIKNPTLMPKYIMEGITYMIPKDSNDTINPAKYRPITCLQTIYKIITACLTNIIYTHLEKYKILTEEQKGCRKFSQGCKEQLIIDSVIQRKVKKNKNDLCTMYIDYKKAYDAVPHSWLIEALEIYKIHPEILEFLSKTMSEWTTRLRLSTHTGILETKGIKIKRGIFQGDTLSPLWFCIALNPLSKQLNLCQSGYVLKYKDTVDGTTNIVKINHLLYMDDIKLYATTPDALITLANTIEQISNDIKMEFGIDKCKINSVLAGKTYQHSYTIQTGETIDALDEGGVYKYLGYIQSKQIHHKEIKIKLTSQFKQRLRAIFSSQLNSLHSTKAINSYAIPILTYSFGVINWTQSELNNLQRLINTNLTSHRKHHPRACVQRLTLSREEGGRGIIDLTNLHNKQITILRTYFRSKSTSSILHKAILYNDKKHTPLNMSDSNIQNNEKQIDTQAKIYVWAKKSLHGRHCIDLSQPTVDKIASNKWLSCGELFPETEGFMQAIQDQVIETRNYQKHIMHTTTTDICRRCNSASETIQHITGACKSIVQSDYKHRHDQIANIVHQNLAIKYDLRSTPPIPYYKYTPDAVLENSTHKMYFDRAILTDRTTHYNRPDITVLDKVSKTAYIIDIAIPNTHNLQNTIAEKISKYLDLKIEITRMWQLSNVTIVPIVLSATGVVPKQLHQSIKTLNLPPYKHLQKAAILNTCRIVRKFLQTNSQPNTHHAHNHLSPYENLHNSITNTS

SEQ ID NO: 31267 - protein, 972 aa, Lymantria dispar
MTAAKLNGAKISIQHTNTLNTCQKEVRPKWQKRLEHKLEVLRARIGQLTQYIQGNKSNKVVKAVSHILEYYKIHSIHEEPNSQLTHFLDTLKQKLSVVKSRLSRYKKCTLRKTQNSQFRNNEKLFYRNLKTCSTNLTRPNTSTSHPSVDELQSFWSDIWANPVTHNNKAEWIKCEIASNTNIESMKFDDVPIDTFKMVINKLHNWKAPGSDALHNYWYKKFTRLHAYLHHHINNFIKNPTLMPKYIMEGITYMIPKDTNDTINPAKYRPITCLQTIYKIITACLTNIIYTHLEKYKILKEEQKGCRKFSQGCKEQLIIDSVKQRKVKKNKNDLCTMYIDYKKAYDSVPHSWLIEALEIYKIHPEILEFLSKTMSEWTTRLRLSTHTGILETKGIKIKRGIFQGDALSPLWFCIALNPLSKQLNLCQSGYVLKYKDTVDGTTNIVKINHLLYMDDIKLYATTPDALITLANTIEQISNDIKMEFGIDKCKINSVLAGKTYQHSYTIQTGETIDALDEGGVYKDLGYIQSKQIHHKEIKINLTSQFKQRLRAIFSSQLNSLHSIKAINSYAIPILTYSFGVINWTQSELNNLQRLINTNLTSHRKHHPRACVQRLTLSREEGGRGIIDLTNLHNKQITILRTYFRSKSTSSILHRAILYNDKKHTPLNMSDSNIQNNEKQIDTQAKIDVWAKKSLHGRHCIDLSQPTVDKIASNKWLSCGELFPETEGFMQAIQDQVIETRNYQKHIMHTTTTDICRRCNSASETIQHITGACKSIVQTDYKHRHDQIANIIHQNLAIKYDLRSTPPIPYYKYTPDAVLENSTHKMYFDRAILTDRTTHYNRPDITVLDKVSKTAYIIDIAIPNTHNLQDTIAEKMSKYLDLKIEITRMWQLSNVTIVPIVLSATGVVPKQLHQSIKTLNLPPYTYKNLQKAAILNTCRIVRKFLQTDSQPNTHHAHNHLSPYENLHNSITNTS

SEQ ID NO: 31268 - protein, 1407 aa, Lymantria dispar
MRTLNTGGPSVLIYPCRSECWALLRLIFKSLATRGIRMQNLTKTYNLRSFHGARRKPIIDNKRNDMRNTTNATSDQLSIRSSSTIFRSNDSDSLSYHIPSIASDTSIDIQLVDVAQETTSVYEPVPTTSSRGTRRKWTADMNEFILRTYLHLTNLDTDTNAYLLPLHTKFLEKYPAMSVSRQRVGDQRRAIIRNKLLPQESINRIYQEVREELQTLQNDIIHRSTQSSTTVNTHNHVQSDQRIRWTKEYNESIIKAYFKVTRLEIDKTMYRKKLHHEFITLFPNLSYLTEQRIADQMRAILKNKYISESRIADIRSQVGEELQIIITPHTDNTTNYETNDRIFEALTTTESVTSEMNTQYPNVDIDRNKLIDETFTQSLQHFINIQPTKRQYIPKQKTTKKLAYIVSYINDVILRQQVDIDTDFCRLQTILYSAAWTAAKLNGAKISIQHTNTLNTCQKEVRPKWQKRLEHKLEVLRARIGQLTQYIQGNKSNKVVKAVSHILEYYKIHSIHEEPNSQLTHFLDTLKQKLSIVKSRLSRYKKCTLRKTQNSQFRNNEKLFYRNLKTCSTNLTRPNTSTSHPSVDELQSFWSDIWANPVTHNNKAEWIKCEIASNTNIESMKFDDVPIDTFKMVINKLHNWKAPGSDALHNYWYKKFTRLHAYLHHHINNFIKNPTLMPKYIMEGITYMIPKDSNDTINPAKYRPITCLQTIYKIITACLTNIIYTHLEKYKILTEEQKGCRKFSQGCKEQLIIDSVIQRKVKKNKNDLCTMYIDYKKAYDSVPHSWLIEALEIYKIHPEILEFLSKTMSEWTTRLRLSTHTGILETKGIKIKRGIFQGDALSPLWFCIALNPLSKQLNLCQSGYVLKYKDTVDGTTNIVKINHLLYMDDIKLYATTPDALITLANTIEQISNDIKMEFGIDKCKINSVLAGKTYQHSYTIQTGETIDALDEGGVYKYLGYIQSKQIHHKEIKINLTSQFKQRLRAIFSSQLNSLHSIKAINSYAIPILTYSFGVINWTQSELNNLQRLINTNLTSHRKHHPRACVQRLTLSREEGGRGIIDLTNLHNKQITILRTYFRSKSTSSILHRAILYNDKKHTPLNMSDSNIQNNEKQIDTQAKIDVWAKKSLHGRHCIDLSQPTVDKIASNKWLSCGELFPETEGFMQAIQDQVIETRNYQKHIMHTTTTDICRRCNSASETIQHITGACKSIVQTDYKHRHDQIANIIHQNLAIKYDLRSTPPIPYYKYTPDAVLENSTHKMYFDRAILTDRTTHYNRPDITVLDKVSKTAYIIDIAIPNTHNLQNTIAEKMSKYLDLKIEITRMWQLSNVTIVPIVLSATGVVPKQLHQSIKTLNLPPYTYKNLQKAAILNTCRIVRKFLQTDSQPNTHHAHNHLSPYENLHNSITNTS

SEQ ID NO: 31269 - protein, 1407 aa, Lymantria dispar
MRTLNTGGPSVLIYPCRSECWALLRLIFKSLATRGIRMQNLTKTYNLRSFHGARRKPIIDNKRNDMRNTTNATSDQLSIRSSSTIFRSNDSDSLSYHIPSIASDTSVDIQLVDVAQETTSVYEPVPTTSSRGTRRKWTADMNEFILRTYLHLTNLDTDTNAYLLPLHTKFLEKYPAMSVSRQRVGDQRRAIIRNKLLPQESIDRIYQEVREELQALQNDIIHRSTQSSTTVNTHNHVQSDQRIRWTKEYNESIIKAYFKVTRLEIDKTMYRKKLHHEFITLFPNLSYLTEQRIADQMRAILKNKYISESRIADIRSQVGEELQIIITPHTDNTTNYETNDRIFEALTTTESVTSEMNTQYPNVDIDRNKLIDETFTQSLQHFINIQPTKRQYIPKQKTTKKLAYIVSYINDVILRHQVDIDTDFCRLQTILYSAAWTAAKLNGAKISIQHTNTLNTCQKEVRPKWQKRLEHKLEVLRARIGQLTQYIQGNKSNKVVKAVSHILEYYKIHSIHEEPNSQLTHFLDTLKQKLSVVKSRLSRYKKCTLRKTQNSQFRNNEKLFYRNLKTCSTNLTRPNTSTSHPSVDELQSFWSDIWANPVTHNNKAEWIKCEIASNTNIESMKFDDVPIDTFKMVINKLHNWKAPGSDALHNYWYKKFTRLHAYLHHHINNFIKNPTLMPKYIMEGITYMIPKDSNDTINPAKYRPITCLQTIYKIITACLTNIIYTHLEKYKILTEEQKGCRKFSQGCKEQLIIDSVIQRKVKKNKNDLCTMYIDYKKAYDSVPHSWLIEALEIYKIHPEILEFLSKTMSEWTTRLRLSTHTGILETKGIKIKRGIFQGDALSPLWFCIALNPLSKQLNLCQSGYVLKYKDTVDGTTNIVKINHLLYMDDIKLYATTPDALITLANTIEQISNDIKMEFGIDKCKINSVLAGKTYQHSYTIQTGETIDALDEGGVYKYLGYIQSKQIHHKEIKINLTSQFKQRLRAIFSSQLNSLHSIKAINSYAIPILTYSFGVINWTQSELNNLQRLINTNLTSHRKHHPRACVQRLTLSREEGGRGIIDLTNLHNKQITILRTYFRSKSTSSILHRAILYNDKKHTPLNMSDSNIQNNEKQIDTQAKIDVWAKKSLHGRHCIDLSQPTVDKIASNKWLSCGELFPETEGFMQAIQDQVIETRNYQKHIMHTTTTDICRRCNSASETIQHITGACKSIVQTDYKHRHDQIANIIHQNLAIKYDLRSTPPIPYYKYTPDAVLENSTHKMYFDRAILTDRTTHYNRPDITVLDKVSKTAYIIDIAIPNTHNLQNTIAEKMSKYLDLKIEITRMWQLSNVTIVPIVLSATGVVPKQLHQSIKTLNLPPYTYKNLQKAAILNTCRIVRKFLQTDSQPNTHHAHNHLSPYENLHNSITNTS

SEQ ID NO: 31270 - protein, 1394 aa, Dalla cyprius
MRLRSRNIVPQAGTSNGESRPEPAGSGSPTYSGEGAVLLPLVYSNDHDITINRNSSSPTSSIHNISQSPNSSTHSFQNSSTSRSSTVSPMPIDVVEEANAKKPSPATGKISTRKKWSVEMNEFIWRTYLTITNLETDTNSYLTLLHQQFINRFPEMNVSKQRVGDQRRAIVHKKMLPSTTLDTIRLEVSNSLQRQHTNIHSLQVHTQHTTQAKSRMRWSNEQNETLIKCYLITTKLETDMTMWRRKLRNMFIELYPDLSHLSEQRISDQKRVIINNKRITEERFQTLKMYADKEINQTSSFKHTEHSTSQTAANTQTQLLSNNNVESAYTEQQLPTPHTMLESEFNTSIPTDVEALQHNNINIEIHQEPNQELEETFHQTLKFYTNTHPTNRIYIPKQKTSRKFARIVSYINNIILPKYINTDTDFETLQTIIYSAAWTAAKSNGSKISLATAENMSTNLQNNHKPKWQKRLQNKIKDLRAKIGKLTHYIHGFRSIKLVKDVNIILKNYRIHTIHEGPNTQLTDYLDTLKQKLSLVSSRLSRYTKCTLRKTQNNQFTNNERQFYRTLKNATTNQTPLTDQTSTKNNLPSIDELQQFWAGIWENPVCHNPKADWIIKEAENQSSTDQMQFDHVPIDIFNDTIKNLHNWKAPGSDYIHNFWYKKFTHIHPYLYNHINSLIQNPANIPAYIAEGITYMLPKDSTDTNNPAKYRPITCLQTVYKIISSCITYLIYEHTKNYEILTEEQKGCRKFSQGCKEQLIIDSVIHKHAQCNKKDLYTMYVDYKKAYDSVPHTWLLDVLNIYKIHPKITSFLSQVIKQWTTRLHLKTPSGIVQTEPIKIQRGIFQGDSLSPLWFCLALNPLSNHLNSLRPGYTLQLPDTRNDILTDQRNLCKINHLLYMDDIKLYASTPDNLNELARSTEQFSSDIRMEFGIEKCKINSVKAGQTHQHSYTLHTGETIDSLDENDTYKYLGYIQAKQIKHKEIKTKLTQQFKHRLRSIFNSELQAKNTVKAINTFAIPVLTYSFGIISWTKTELINLQRIINTSMTQHRKHHPKSCTQRLTLPRKEGGRGIVDITNLHNKQISTLRTYFKYRSTTSNLHKSIVYNDSKFTPLNMLDKSNQTNEKQTDTQTKIVEWTRKSLHGRHRQDLGQPNVDKIASNEWLSHGDLFPETEGFMIAIQDQVIATRNYRKHIMRIPQTIDTCRRCNSSSETIQHVTGACKALAQNDYKHRHDQLAKIIHQKIAMKYGLISPPTIPYYKYNPETVLENNTHKLYYDRAILTDKTTHYNRPDITLIDKIRNTAQIIDIAVPNTHNLQNTIAEKLAKYIDLKIEIRRMWKLSEVTIIPVVLSTTGVIPNQLHQSLKSLGLSPFTYRSLQKAAILNTCRIVRKFLQNDT

SEQ ID NO: 31271 - protein, 1355 aa, Spodoptera frugiperda
MITRSKTKSTMQAKVPPTDVETSTASLSSSPRSLFSSITPSSLSFTSRSLRSSVSSTISVDVVSEATAANNPTPATGTKNTRKKWSNEMNEFIWRNYLIITNLETETNAYLSTLHTKFTQQFPNMSVSKQRIGDQRRAIVNNKLLPTTTLDAIRLEVQTLLLTQNQTLSHQQHFTQNNTLEHMQTKTRMKWSNELNETLIKCYFEVTKMETDMTIWRKNLRDKFIEYYPHLSHLSEQRISDQKRVIINNKMISETRLQMIKTAVEQKLHERDVTVFQRSNSPILEQSTHFTHTQPQINLENTHSLEVELQEVDFIDENLHQQPNTNNTHTVNYERDPEIDELFLQALQYYTDTHPTNRCYIPKQRTSKKLAKIVQYVDKVILPDHVLRDIDFNQLQTIIYSAAWTVAKVNGSKISLSSAQDRNNPRSDRKPRWQKRLERKLEVIRSKIGRLTYYMQGHRSRKLEREVSRIIRDYKTHTIHEEPNIQLTHFLDTLKQKLTVIKSRLNRYTKCTLRKTQNSQLRNNEKQFYRTLKQSTTNHTTSNNTTHTVFPAEEDLRQFWAGIWENPVCHNTQADWIKTEEIKYDSSPQMQFEQIDPETFHDALNKAHNWKAPGTDHIHNFWYKKFTTVHPHLYNHINNFIEDPTNIPPYLTEGITYMLPKDPNDTTNPAKYRPITCLQTLYKIMTSCITNIIYKHIDTHKILTEEQKGCRKFSQGCKEQLLIDSVILKDVQKHKKDLYTTYIDYKKAYDSVPHSWLLHILKIYKIHPRITHFLENIVSKWQTRLHVNTSAGVIETEFIKIQRGIFQGDSLSPLWFCLALNPLSNQLNSLNSGFQLKYSNTITTETSHQHYTINHLLYMDDIKLYASSTEDLHQLADTTEIFSNDIGMEFGIDKCKINSVKAGKTYTHSYQLQTGDTIDSLDESGTYKYLGYIQTKQILHKEIKSQLTKQFKHRLKIICNTQLNARNTIKAINTYTIPILTYSFGIINWSKTELQNLQRNINTTLTKHRRHHPRSCTQRLTLPRNDGGRGIIDITNLHNKQITALRSYFYSKSPISILHNAIAQNDKKLTPLNMADQSTQNNETQTDRQTKLAAWAQKSLHGRHYHDLSQPNVDKVASNEWLRRGELFPETEGFMLAIQDQVIETRNYQKHIMRIPIPTDICRRCNSASETIQHVTGACKTIVQSDYKHRHDQVANIIHQKLALKYNLISGPPTPYYKYQPEIVLENSSYKLYFDRAILTDKTTHFNRPDITLIDKTNKSAQIIDIAIPNTHNLQNTIAEKLSKYTDLKIEIARMWRLNSVTIVPIVLSTTGVIPKHLHQSIKTLELPPYTYRILQKAAILNTCHIVRKFLAETD

SEQ ID NO: 31272 - protein, 1355 aa, Spodoptera frugiperda
MITRSKTKSTMQAKVPPTDVETSTASLSSSPRSLFSSITPSSLSFTSRSLRSSVSSTISVDVVSEATAANNPTPATGTKNTRKKWSNEMNEFIWRNYLIITNLETGTNAYLSTLHTKFTQQFPNMSVSKQRIGDQRRAIVNNKLLPTATLDAIRLEVQALLLTQNQTLSHQQHFTQNNTLEHMQTKTRMKWSNELNETLIKCYFEVTKMETDMTIWRKNLRDKFIEYYPHLSHLSEQRISDQKRVIINNKMISETRLQMIKTAVEQKLHERDVTVFQRSNNPILEQSTHFTHTQPQINLENTHSLEVELQEVDFIDENLHQQPNTNNTHTVNYERDPEIDELFLQALQYYTDTHPTNRCYIPKQRTSKKLAKIVQYVDKVILPDHVLRDIDFNQLQTIIYSAAWTVAKVNGSKISLSSAQDRNNPRSDRKPRWQKRLERKLEVIRSKIGRLTYYMQGHRSRKLEREVSRIIRDYKTHTIHEEPNIQLTHFLDTLKQKLTVIKSRLNRYTKCTLRKTQNSQFRNNEKQFYRTLKQSTTNHTTSNNTTHTVFPAEEDLRQFWAGIWENPVCHNTQADWIKTEEIKYDSSPQMQFEQIDPETFHDALNKAHNWKAPGTDHIHNFWYKKFTTVHPHLYNHINNFIEDPTNIPPYLTEGITYMLPKDPNDTTNPAKYRPITCLQTLYKIMTSCITNIIYKHVDTHKILTEEQKGCRKFSQGCKEQLLIDSVILKDVQKHKKDLYTMYIDYKKAYDSVPHSWLLHILKIYKIHPRITHFLENIVSKWQTRLHVNTSAGVIETEFIKIQRGIFQGDSLSPLWFCLALNPLSNQLNSLNSGFQLKYSNTIITETSHQHYTINHLLYMDDIKLYASSTEDLHQLADTTEIFSNDIGMEFGIDKCKINSVKAGKTYTHSYQLQTGDTIDSLDESGTYKYLGYIQTKQILHKEIKSQLTKQFKHRLKIICNTQLNARNTIKAINTYAIPILTYSFGIINWSKTELQILQRNINTTLTKHRRHHPRSCTQRLTLPRNDGGRGIIDITNLHNKQITALRSYFYSKSPTSILHNAIAQNDKKLTPLNMADQSTQNNETQTDRQTKLAAWAQKSLHGRHYHDLSQPNVDKVASNEWLRRGELFPETEGFMLAIQDQVIETRNYQKHIMRIPIPTDICRRCNSASETIQHVTGACKTIVQSDYKHRHDQVANIIHQKLALKYNLISGPPTPYYKYQPEIVLENSSYKLYFDRAILTDKTTHFNRPDITLIDKTNKSAQIIDIAIPNTHNLQNTIAEKLSKYTDLKIEIARMWRLNSVTIVPIVLSTTGVIPKHLHQSIKTLELPPYTYRILQKAAILNTCHIVRKFLAETD

SEQ ID NO: 31273 - protein, 901 aa, Spodoptera frugiperda
MQGHRSRKLEKEVNRILRDYRTHTTHEEPNTQLTHFLDTLKQKLTVIKSRLCRYTKCTLRKTQNNQFKTNEKQFYRTLKNLTTNNTLSNNIAHTSFPTQESLRQFWAGIWENSVCHNNEAEWIEAEITKHNNIQQMPFEQIDIQTFHNALNKAHNWKAPGSDHIHNYWYKKFTTIHPHLYNHINDFIKDPSNIPSYITEGITYMLPKDPNDTVNPAKYRPITCLQRIYKIMTSCLTQIIYKHIDSQKILTEEQKGCRKFSQGCKEQLIIDSVILKDVQRHKKDLYTMYIDYKKAYDSVPHSWLLQVLNIYKIHPHIIYFLENIIRTWQTRLHLNTPTGTIATESIRIQRGIFQGDSLSPLWFCLALNPLSNKLSSLESMSTVQTDQENCKINHLLYMDDIKLYATTPEDLHLLADTTERFSTDIKMDFGIDKCKINSVKAGKTYTHSYQLQSGENIESLDENGTYKYLGYIQSKQILHKQIKSQLTKQFKHRLKVICNTQLNSRNTIKAINTYAIPILTYSFGIINWSRTELQNLQRNINTTLTKHRRHHPRSCVQRLTLPRNDGGRGIIDITNLHNKQITTLRSYFFNRSTVSNLHRAIVQSDKKLTPLNMADQATQSNEKQTDRQTKISEWIQKSLHGRHYHDLSQPNVDKVASNEWLRRGELFPETEGFMIAIQDQVIETRNYQKHIMRIPIATDTCRRCNSAPETIQHITGACKSIVQTDYKHRHDQVANIIHQKIALKYNLISTPPVPYYKYQPETVLENSSHKLYFDRAILTDKTTHYNRPDITLIDKTNKTAQIIDIAIPNTHNLQNTIAEKLSKYTDLKIEITRMWRLNSVTIVPIVLSTTGVIPKQLHQSIKTLDLPSYTYKNLQKAAILNTCHIVRKFLSETDRHQQFILR

SEQ ID NO: 31274 - protein, 1412 aa, Noctua fimbriata
MLTRSKTKKSIQANMPAVDDETSPVSSSSSPKSIFSSIASSPPSYLSRSSRSSSLLSPMTVEVVSEASLASNPSPTAVSTTTRKKWRKEMNEFIWRNYLIITNLEYDTKAYLTSLHHQFIEKFPNMQVSKQRIGDQRRAIVSKKLLSSTTLDTIRLEVSNHLRTHNNELELQSPPEFPTSQTDSQPHSQSEPKRRMKWSNELNETLMKCYFRATKMETDMTVWRKNLKEKFIECYPNLSHLSEQRISDQKRVIVNNSMIPVARLQVLKSIVEKELFETESFQRQVDSRMSNTDVENVHLHTNTETINIDIENIEPPLTENIGVGIDDGNINNLGPEHPIHLNTQHTSLVRNPEIDEIFSQTLQYYKDTQPTERSYIPKQKSSKKLANIVSYINKVILPEQVTSDTNFNHLQTVIYCAAWTAAKANGSKISLAPPVDRSSRLQQAHKPKWQKRLENKIESIRAKIGRLTQYIQGVRSRKLIKAVEIILKDYRIHTSHEQPNTQLEHFLDTLKQKLTVVKSRLNRYTKCTQRKTQNNQFRNNEKQFYRSLKKSTTNETISDNNTNTAFPTTEELQQFWAGIWESPVYHNTEAEWIKGEQVIQTNTEAMIFDHVEVATFHDVLTKIHNWKAPGSDYIHNYWYKKFTHIHPHIFNHINNFIKDPTTIPTYITEGKTYMLPKDPSDSANPAKYRPITCLQTIYKIMTSCISHIIYKHLETQKILTEEQKGCKKLSQGCKEQLTIDAVIHRHVQRTKKDLHTMYIDYRKAYDSVPHSWLLEVLNIYKIHPQLINCLGTIVEKWKTRLQLNTSTGTVETEFIKIQRGIFQGDSLSPLWFCLALNPLSNKLNALLPGYQLQYSDTMTDILTDQHYCKVNHLLYMDDIKLYASSPDDLYELADVTEQFSKDIAMEFGIDKCKINSIRAGKTYTHSYQMQTGATIDSLDETGTYKYLGYIQAKQILHKEIKTKLTKQFKHRLKTIFNTQINAKNTIKAINTYAIPILTYSFGIIKWNNTDLKNLQRIINTTLTKHRRHHPRETQRLTLPRNDGGRGIIDITNLHNKQITTLRKYFENKSSTSTLHKAIAYNDKKLTPLNMYDRTTQSNEQQTDRQTKIAEWTQKSLHGRHRHDLNLPNVDKLASNEWLKRGELFPETEGFMIAIQDQVIETRNYQKHIMRVPQTVDICRRCNSSSETIQHITGACKAIVQTDYKHRHDQIANIIHQKLAIKYNFISTPPVPYYKYQPETVLENATHKLYFDRGIFTDKTIHYNRPDITLLDKCNKTALIIDIAVPNTHNLQNTIAEKLSKYIDLKIEISRMWRLNNVAIVPIVLSTTGVIPKQLHQSLKTLDLPPYTYQSLQKAAILNTCRIVRKFLQNENDTVISTSHTRPSITAQTQVNGHSSSHNLTLSSSHHITTLPG

SEQ ID NO: 31275 - protein, 804 aa, Xestia c-nigrum
MIFDQIEVATFHDVLTKIHNWKAPGSDYIHNYWYKKFTHTHPHIFNHINNFIKDPATIPTYITEGKTYMLPKDPSDPTNPAKYRPITCLQTIYKIMTSCISHVIYKHLETQKILTEEQKGCKKLSQGCKEQLTIDAVIHRHVQRTKKDLHTMYIDYRKAYDSVPHSWLLEVLKIYKIHPQLINCLGTIVEKWKTRLQLNISTGTVETELIKIQRGIFQGDSLSPLWFCLALNPLSNKLNALLPGYQLQFSDTMTDTPTDQQYCKVNHLLYMDDIKLYASSPDDLYELAVTEQFSKDIAMEFGIDKCKINSIKAGKTFTHSYQMQTGATIDSLDETGTYKYLGYIQAKQILHKEIKTTLTKQFKHRLNTIFNTQINAKNTIKAINTYAIPILTYSFGIIKWNKTDLKNLQRIINTILTKHRRHHPRSCVQRLTLPRNDSGRGIIDITNLHNKQISTLRTYFDNKSSTSTLHKAIVYNDKKLTPLNMYDRTTQSNEQQTDRQTKIAEWTQKSLHGRHRHDLNLPNVDKLASNEWLRRGELFPETEGFMIAIQDQVIETRNYQKHIMRVPHTIDICRRCNSSSETIQHVTGACKAIVQTDYKHRHDQIANIIHQKLAIKYKFISTPPVPYYKYHPETVLENATHKLYFDRGIFTDKTIHYNRPDITLLDKCNKTALIIDIAVPNTHNLQNTIAEKLAKYIDLKLEITRMWNLKNVAIVPIVLSTTGVIPKQLHQSLKSLDLPPYTYQSLQKAAILNTCRIVRKFLQNDNEAIITTSHTQPSQTQFNEHSSSHNLTRSSSHYITTLLG

SEQ ID NO: 31276 - protein, 1376 aa, Spodoptera frugiperda
MITRSKVKNTMQAKVPPADDEASAVSLSSSPRSIFSSLTPSPCSFTTRSLRSSVSSILSTDVVSEATVANNPSPAVGTKSTRKKWSSEMNEFIWRTYLIITNLETETNAYLSTLHSKFIQQFPEMAVSRQRVGDQRRAIVNNKLLPDTTLDAIRLEARNYLQNQNNTNQQINNQTQPELITTQTNPLTHTQSNTRMKWSNELNETLIKCYFIVTKMETDMTVWRQNLKDKFIQHYPHLSHLSEQRISDQKRVIINNRMISETRLQSIKLAAQQELDEIGSVTFDRSNSPNPHLNTSIRLELQTNINTINREHMISELQNTNITQEQNDNRQQLAVTNTHTNSERNLEIDELFSQALQHYTETHPTNRCYIPKQKTSKKLAEIVDYINKVILPDYVISDIEFSQLQTILYVAAWTATKANGSRVTLASAQDRNNPQRDYKPKWQKRLERKIEVIRAKIGRLTYYIQGHRSRKLKKEVNRILRDYRIHTTHEEPNTHLAHYLDTLKQKLAVFKSRLNRYTKCTLRKTQNNQFRNNEKQFYRTLKKSTTNHTTSSNTTTNTPFPSEDNLRHFWAGIWQNPVSHNAEAEWIKAEETKYNNIPQMQFDQVDIETFHDVLSRVHNWKAPGSDHIHNYWYKKFTTIHPHLFNHINTFIRDPNKIPSYITEGITYMLPKDPNDTANPAKYRPITCLQTIYKIMTACITHVIYKHIDTQKILTEEQKGCRKFSQGCKEQLIIDSVILKDVEKHKKDLYTMYIDYKKAYDSVPHSWLLHILRIYKIHPHIAHFLETIISKWQTRLHLNTPTGTIATEFIKIQRGIFQGDSLSPLWFCLAINPLSNTLNSLQSGLQLQYRDTIINTLESNQQHCKINHLLYMDDIKLYASSPEDLYQLADTTEIFSSDIAMEFGIDKCKINSVKAGKIYTHSYQLQTGDTIHSLDESGTYKYLGYIQAKQILHKEIKTELTKQFKHRIKVICNTELNARNTIKAINTYAIPILTYSFGIINWSKTELLTLQRNINTTLTKHRRHHPRSCTQRLTLSRNDGGRGIIDVTNLHNKQITTLRSYFYSKSTTSILHHAIAQNDKKLTPLNMSDRETQNNEKQVDRQTKIAEWAQKSLHGRHYHDLNQPNVDKTASNDWLRRGELFPETEGFMLAIQDQVIETRNYQKHIMHTPIPTDICRRCNSASETIQHITGACKAIVQTDYKHRHDQIANIIHQKLAAKYNLISTPTVPYYKYQPETVLENSSHKLYFDRAILTDKTIHYNRPDITLIDKINKTAQIIDIAVPNTHNLQNTIAEKLSKYTDLKNEITRMWRLNSVTIIPIVLSTTGVIPRQLHQSIQSLALPSYIYHSLQKAAILNTCRIVRKFLNDTDHDMYIQSQN

SEQ ID NO: 31277 - protein, 1372 aa, Spodoptera frugiperda
MITRSKVKNTMQANVPPADDEASAVSLSSSPRSIFSSLTPSPLSFTTRSLRSSISSTLSTDVVSEATVANNPSPAVGTKSTRKKWSSEMNEFIWRTYLIITNLETETNAYLSTLHSKFIQQFPEMAVSRQRVGDQRRAIINNKLLSDTTLDAIRLEARNYLRNQNNTTQQIHNQTQPEPITTQINPTHTQPNTRMKWSNELNETLIKCYFIVTKMETDMTVWRKNLRDKFIQHYPHLSHLSEQRISDQKRVIINNRMISEMRLQSIKLAAQQELGEIGSVTFERLNSPNLHLNTSIRLELQTNINTINREHMTLELQNTNITQEQNDNRQQPAITNTHTNSERNLEIDELFSQALQHYTETHPTNRCYIPKQKTSKKLAEIVDYINKVILPDYVISDIEFSQLQTILYVAAWTAAKANGSRVTLASAQDRDNPQRDYKPKWQKRLERKIDVIRAKIGRLTYYIQGHRSRKLKKEVNRILRDYRIHTTHEEPNTHLAHYLDTLKQKLAVFKSRLNRYTKCTLRKTQNNQFRNNEKQFYRTLKKSTTNHTTSSNTTTNTPFPSEDNLRHFWAGIWQNPVSHNAEAEWIKAEETKYDNIPQMQFDQVDIETFHDVLSRVHNWKAPGSDHIHNYWYKKFTTIHPHLFNHINTFIRDPNKIPSYITEGITYMLPKDPNDTANPAKYRPITCLQTIYKIMTACITHIIYKHIDTQKILTEEQKGCRKFSQGCKEQLIIDSVILKDVEKHKKDLYTMYIDYKKAYDSVPHSWLLHILRIYKIHPHIAHFLETIISKWQTRLHLNTPTGTIATEFIKIQRGIFQGDSLSPLWFCLAINPLSNTLNSLQSGLQLQYRDTINSLESNQQHCKINHLLYMDDIKLYASSPEDLYQLVDTTETFSSDIAMEFGIDKCKINSVKAGKIYTHSYQLQTGDTINSLDESGTYKYLGYIQGKQILHKEIKTELTKQFKHRIKVICNTELNARNTIKAINTYAIPILTYSFGIINWSKTELLTLQRNINTTLTKHRRHHPRSCTQRLTLSRNDGGRGIIDVTNLHNKQITTLRSYFYSKSTTSILHHAIAQNDKKLTPLNMSDRETQNNEKQVDRQTKIAEWAQKSLHGRHYHDLNQPNVDKSASNDWLRRGELFPETEGFMLAIQDQVIETRNYQKHIMHTPIPTDICRRCNSASETIQHITGACKAIVQTDYKHRHDQIANIIHQKLAAKYNLISTPTVPYYKYQPETVLENSSHKLYFDRAILTDKTIHYNRPDITLIDKINKTAQIIDIAVPNTHNLQNTIAEKLSKYTDLKNEITRMWRLNSVTIIPIVLSTTGVIPRQLHQSIQSLALPSYIYHSLQKAAILNTCRIVRKFLNDTDHDMYTQS

SEQ ID NO: 31278 - protein, 1375 aa, Spodoptera frugiperda
MITRSKVKNTMQAKVPPADEEASAVSLSSSPRSIFSSLTPSPLSFTTRSLRSSISSTLSTDVVSEATVANNPSPAVGTKSTRKKWSSEMNEFIWRTYLIITNLETETNAYLSTLHSKFIQQFPEMAVSRQRVGDQRRAIVNNKLLPDTTLDAIRLEARNYLQNQNNTTQQINNQTQPEPITTQTNPLTHTQSNTRMKWSNELNETLIKCYFIVTKMETDMTVWRKNLKDKFIQHYPHLSHLSEQRISDQKRVIINNRMISEMRLQSIKLAAQQELDEIGSVTFERSNSPNPHLNTSIRLELQTNINTINREHTISELQNTNITQEQNDNRQQLAVTNTHTNSERNLEIDELFSQALQHYTETHPTNRCYIPKQKTSKKLAEIVDYINKVILPDYVISDIEFSQLQTILYVAAWTAAKANGSRVTLASAQDRNNPQRDYKPKWQKRLERKIDVIRAKIGRLTYYIQGHRSRKLKKEVNRILRDYRIHTTHEEPNTHLAHYLDTLKQKLAVFKSRLNRYTKCTLRKTQNNQFRNNEKQFYRTLKKSTTNHTTSSNTTTNTPFPSEDNLRHFWAGIWQNPVSHNAEAEWIKAEETKYNNIPQMQFDQVDIETFHDVLSKVHNWKAPGSDHIHNYWYKKFTTIHPHLFNHINTFITDPNKIPSYITEGITYMLPKDPNDTANPAKYRPITCLQTIYKIMTACITHIIYKHIDTQKILTEEQKGCRKFSQGCKEQLIIDSVILKDVEKHKKDLYTMYIDYKKAYDSVPHSWLLHILRIYKIHPHIAHFLETIISKWQTRLHLNTPTGTIATEFIKIQRGIFQGDSLSPLWFCLAINPLSNTLNSLQSGLQLQYRDTINTLESNQQHCKINHLLYMDDIKLYASSPEDLYQLADTTEIFSSDIAMEFGIDKCKINSVKAGKIYTHSYQLQTGDTIHSLDESGTYKYLGYIQAKQILHKEIKTELTKQFKHRIKVICNTELNARNTIKAINTYAIPILTYSFGIINWSKTELLNLQRNINTTLTKHRRHHPRSCTQRLTLSRNDGGRGIIDVTNLHNKQITTLRSYFYSKSTTSILHHAIAQNDKKLTPLNMSDRGIQNNEKQVDRQTKIAEWAQKSLHGRHYHDLNQTNVDKTASNDWLRRGELFPETEGFMLAIQDQVIETRNYQKHIMHIPIPTDICRRCNSASETIQHITGACKAIVQTDYKHRHDQIANIIHQKLAAKYNLISTPTVPYYKYQPETVLENSSHKLYFDRAILTDKTIHYNRPDITLIDKINKTAQIIDIAVPNTHNLQNTIAEKLSKYTDLKNEITRMWRLNSVTIIPIVLSTTGVIPRQLHQSIQSLALPSYIYHSLQKAAILNTCRIVRKFLNDTDHDMYTQSQN

SEQ ID NO: 31279 - protein, 1379 aa, Spodoptera exigua
MITRSKVKNTMQAKVPPADDDSSAVSLSSSPRSTFSSITPSSLSFTSRSLRSSISSTMSADVVSEATLAKNPSSAAGTKSTRKKWSKEMNEFIWRTYLIITNLETETNAYLSILHSKFIQQFPDMVVSKQRVGDQRRAILNNQLLPTSTLDAIRLEVSIYLQNENYTSQPTQTLITSQIDPLIHRQSKTRMKWSNELNETLIKCYFIATKMETDMTVWRKNLKDKFTQYFPHLSHLSEQRISDQKRVIMNNKMISETRLQMIKLTAQQELDQIGSITIGRLNSPNSYQNTSSPYLEQQTNINIVNKEPMTSVLQDTNITQELNDNRSDQPRANTDTHTQNIQRNCEIDELFAQTLQFYSETHPTSRCYIPKQRTSKKLAKIVDYINQVILPDYVIRDIEFPELQTIIYSAAWTAAKVNGSRINLSSTQDRNNPRKDYKPKWQKRLERKIDAIRAKLGRLTHYIQGHRSRKLEIEVNKILRDYRIHTTHEAPNTHLAHYLDTLKQKLSVYKSRLNRYIKCTLRKTQNNKFRNNEKQFYRTLKKSTTNHTTSSNTANTLYPTGENLRSFWAGIWQNPVCHNAEAEWIRAEESKHVNITQMQFEQVDIETFHNVINKAHNWKAPGSDHIHNFWYKKFTTIHPHLFNHINNFIKYPTNIPTYITEGITYMLPKDLNDPTNPAKYRPITCLQTIYKIMTACITHVIYKHIDTQKILTEEQKGCRKFSQGCKEQLIIDSIILKDIQKHKKDLYTMYIDYKKAYDSVPHSWLLHILKIYKIHPDISHFLEVIISKWQTRLHLNTPIRTITTEFIKIQRGIFQGDSLSPLWFCLAINPLSNILNSLQSGFQLQYRETITDTESNQQLCKINHLLYMDDIKLYAASQEDLYQLADNTEIFSSDIAMEFGIDKCKINSVKAGKTYTHSYQLQTGDTIESLDEGGTYKYLGYIQAQQILHKEIKSQITKQFKHRLKIICNTELNARNTIKAINTYAIPTLTYSFGIVNWTKTELQTLQRNINTTLTKYRRHHPRSCTQRLNLPRNDGGRGIIDITNLHNKQITTLRSYFFNKSETSILHQAIVQNDRKLTPLNMSDPETQINEKQIDRQTKIAEWAQKSLHGRHYHDLNQPNVDKSASNEWLRRGELFPETEGFMMAIQDQVIETRNYQKHIMRTTIPTDTCRRCGAASETIQHITGACKAIVQTDYKHRHDQVANIIHQSLAIKYNLIPSPPVPYYKYQPQAVLENLSHKLYYDRAILTDKTTHFNRPDITLINKTTKTAQIIDIAIPNTHNLQNTIAEKLSKYTDLKIEISRMWRLNNVTIVPIVISTTGVIPKQLHQSIKTLDLPFYTYHNLQKAAILNTCRIVRKFLNETDTMSYTNNQNRHIHVG

SEQ ID NO: 31280 - protein, 1261 aa, Mesoligia furuncula
MITRSKTKKLIEANKPSADDEISPVSSSSSPRSIFSSIVSSSPSYLSHSSRSSSSSSPPMSVDVVSEATTAMNPSPATVKSNTRKKWSEDMNQFIWRTYLIITNLDTETNSYLTSLHQQFINRFPQMNVSKQRVGDQRRAIVHKKLLSATTLEKISLDVRRELQTDNTNLDTHIRTPLQLNTDQSNIHLQSEPKSRMRWSNEMNETLIKCYYITTKMETDMTVWRKKLREMFIEFYPQLSHLSEQRISDQKRVVLNNRIISDARLQDLKTYAENTLNQTTPYRHSEYHYSHIAAENTPTQTSISNNTETAYVNQSHTQEVEVENEPNFLNSIDFEPLTNNIINTEHNIPNVEISQERSQELEETFSHTLQHFTNIHATKRNYIPKQKPSKKLAQIVSYINNVILPKYANADTDFETLQTVIYSAAWTAARMNGSKLSHVTSDNPTNINLPQFKKPKWQRRLELRVKDLRTNIGRLTAYMQGNRGWKLVRKVHTILENYKIHSTHEEPNTQLTQFLDTLKQKLTLVNSRLNRYNKCTLRKTQNNKFRNNEKQFYRTLKQSTTNQTVHSESENNTNQSLPSIDELQQFWSRIWERPICHNTEAEWIKIETENHKHTEQMEFEHVSIETFHDVLQNLHNWKAPGSDNIHNFWYKKFTHIHPYLYNYINTFIKNPSMMPSYIAEGITFMIPKDSSDSTNPAKYRPITCLQTIYKIITSCITHSIYQHLETNTILAEEQKGCRKFSQGCKEQLTIDSVILKQVQRKKRDLYTMYIDYKKAYDSVPHTWLLEVLKIYKVNPLIVTFLNNTMAQWTTRLHLKSPSGIVETEAIKIQRGIFQGDSLSPLWFCLALNPLSNKLNTLKPGYNLPFNDTIDDLQTDRQNCKINHLLYMDDIKLYASTQDDLNKLAETTDQFSRDIKMEFGIDKCKINSVRAGQTYEHSYIIQTGEIIDSLNENETYKYLGYIQAQQIKHKEIKNKLTQQFKHRLKSIFNTQLHSRHTVKAINTFAIPVLTYSFGILSWTKTELKNLQRVINTTLTKNRKHHPRSCVQRLTLPRKEGGRGIIDITNLHNKQISTLRTYFNTKRTTSTLHKAIVHNDKKLTPLNMFDKTTQSNEKQTDRQTKILEWTQKSLHGRHRQDLCQPNVDKLASNEWLRRGDLFPETEGFMTAIQDQVIETRNYQKHIMRIPISTDICRRCYSSSETIQHITGACRAIVQTDYKHRHDQIANIIHQKLAIKYKLINTPPVPYYKYNPEIVGYVDLWFSM

SEQ ID NO: 31281 - protein, 1412 aa, Mesoligia furuncula
MITRSKTKKLIEANKPSADDEISPVSSSSSPRSIFSSIVSSSPSYLSHSSRSSSSSSPPMSVDVVSEATTAMNPSPATVKSNTRKKWSEDMNQFIWRTYLIITNLDTETNSYLTSLHQQFINRFPQMNVSKQRVGDQRRAIVHKKLLSATTLEKISLEVRRELQTDNTNLDTHIRTPLQLNTDQSNIHLQSEPKSRMRWSNEMNETLIKCYYITTKMETDMTVWRKKLREMFIEFYPQLSHLSEQRISDQKRVVLNNRIISDARLQDLKTYAENTLNQTTPYRHSEYHYSHIAAENTPTQTSISNNTETAYVNQSHTQEVEVENEPNFLNSIDFEPLTNNIINTEHNIPNVEISQERSQELEETFSHTLQHFTNIHATKRNYIPKQKPSKKLAQIVSYINNVILPKYANADTDFETLQTVIYSAAWTAARMNGSKLSHVTSDNPTNINLPQFKKPKWQRRLELRVKDLRTNIGRLTAYMQGNRGWKLVRKVHTILENYKIHSTHEEPNTQLTHYLDTLKQKLTLVNSRLNRYNKCTLRKTQNNKFRNNEKQFYRTLKQSTTNQTVHSESENNTNQSLPSIDELQQFWSRIWERPICHNTEAEWIKIETENHKHTEQMEFEHVSIETFHDVLQNLHNWKAPGSDNIHNFWYKKFTHIHPYLYNYINTFIKNPSMMPSYIAEGITFMIPKDSSDSTNPAKYRPITCLQTIYKIITSCITHSIFQHLEINTILAEEQKGCRKFSQGCKEQLTIDSVILKQVQRKKRDLYTMYIDYKKAYDSVPHTWLLEVLKIYKVNPLIVTFLNNTMAQWTTRLHLKSPSGIVETEAIKIQRGIFQGDSLSPLWFCLALNPLSNKLNTLKPGYNLPFNDTIDDLQTDRQNCKINHLLYMDDIKLYASTQDDLNKLAETTDQFSRDIKMEFGIDKCKINSVRAGQTYEHSYIIQTGEIIDSLNENETYKYLGYIQTQQIKHKEIKNKLTQQFKHRLKSIFNTQLHSRHTVKAINTFAIPVLTYSFGILSWTKTELKNLQRVINTTLTKNRKHHPRSCVQRLTLPRKEGGRGIIDITNLHNKQISTLRTYFNTKSTTSTLHKAIVHNDKKLTPLNMFDKTTQSNEKQTDRQTKILEWTQKSLHGRHRQDLCQPNVDKLASNEWLRRGDLFPETEGFMTAIQDQVIETRNYQKHIMRIPISTDICRRCYSSSETIQHITGACRAIVQTDYKHRHDQIANIIHQKLAIKYKLINTPPVPYYKYNPEIVLENTTHKLYFDRAILTDRTTHYNRPDITLLDKINKTAQIIDIAVPNTHNLQNTIAEKLSKYTDLKIEISRMWRLGSVAIIPVVVSTTGVIPKQLHQSLKTLDLSPSTYQTLQKAAILNTCRIVRKFLQNDNDAQISHPQTSPTTQSLNISSHHNTLSSIA

SEQ ID NO: 31282 - protein, 1295 aa, Helicoverpa zea
MRLRNRVIIPQAGTGANRDGESRPTASSLGCPSYSGGGNVSQRAAQSQIVAAQHDDDTSSTSSTSLFPSLPSSPPSYLLRSSPTSSLMSVDVVTEATLADNPSPTTVPTSTRKKWSEDMNTFIWRTYLTITKLETDTNSYLTSLHQQFINKFPHMDVSKQRIGDQRRAIVNKKLLTPTTLDTIRSEVSTDLQTNTNCTQNQTPFQLNTTQINSTSHTTTLPKSRMKWSNELNETLIKCYYITTNMETDMTMWRKKLRDMFIERYPELSHLSEQRISDQKRVIINNKMISESRLLEIKNHALHQLGTYRETQNLPTQTVIENTSRLSTNTFEQNPHTQATEVETVTHFLNSIDPDALTHTLVNVQNIPHNDTDTDVIRKIEETFSLALQHYTNIHPTKRDYIPKQKPSRKLAKTVSHINEHILPKHTSKDTEFDQLQTIIYSAAWTAAKTNGSRLSLGASDNTTTVRHKIRKPKWQKRLESRAADLRAKIGRLTAYMQGYRSRKLNEKVNIILESYKIHSTHEEPNTELVHFLDTLKQKLTLITSRLNRYVKCTLRKTQNNKFKSNEKQFYRSLKQSTTNQTINSNESNTNASLPRTDEFHQFWAGIWERPMSHNSQAEWIKTERESLKNLEEMSFEHIPIDTFHDVLSKLHNWKAPGSDYIHNFWYKKFTHIHPYLYNYINSFIKNPNTLPTYIAEGLTYMIPKDTNDSSNPAKYRPITCLQTIYKIITSCITHIVYKHLETNLILSEEQKGCRKLSQGCKEQLTIDSVILQQVRRQKKDLFTMYIDYKKAYDSVPHTWLLEVLEIYKINPQIVSFLGNIITQWTTRLHVTTPTGSTETEPIKIQRGIFQGDAFSPLWFCLALNPLSKALNISAPGFKLILGDNTHDTHKINHLLYMDDIKLYASSQEDLYTLADITDSFSQDIKMEFGIDKCKINSVMGGNNYEHTYTTQTGETIDSLSEHETYKYLGYIQATQIKHKDIKNKLTQQFKHRLKSILNTQLHARHTIKAINTYAIPVLTYSFGIISWTKTELKNLQRIINTTLTRHRKHHPRSCIQRLTLPRKDGGRGIIDIMNLHNKQITTLRTYFNTKTTHSTLHKAIVFNDHKLTPLNMHDKTPQNNEKQTDRQTKIIEWARKSLHGRHRLDLDQENVDKLASNDWLRRGDLFPETEGFMVAIQDQVIETRNYQKHIMRAPIPTDVCRRCSSASETIQHITGACKAIVQTDYKYRHDQIANVIHQKLAIKYKLILSPPVPYYKYKPEAVLENATHKLYFDRAILTDKTVHYNRPDITLIDKT

SEQ ID NO: 31283 - protein, 946 aa, Helicoverpa armigera
MQGYRSRKLNEKVNNILESYKIHSTHEEPNTELVHFLDTLKQKLTLITSRLNRYVKCTLRKTQNNKFKSNEKQFYRSLKQSTTNQTINSNESNTNASLPRIDEFHQFWAGIWERPMSHNSQAEWIKTERESLKNLEEMSFEHIPIDTFHDVLSKLHNWKAPGSDYIHNFWYKKFTHIHPYLYNYTNSFIKNPNTLPTYIAEGLTYMIPKDTNDSSNPAKYRPITCLQTIYKIITSCITHIVYKHLETNLILSEEQKGCRKLSQGCKEQLTIDSVILQQVRRQKKDLFTMYIDYKKAYDSVPHTWLLEVLEIYKINPQILSFLGNIITQWTTRLHVTTPTGSTETEPIKIQRGIFQGDAFSPLWFCLALNPLSKALNISAPGFKLILGDNTHDTHKINHLLYMDDIKLYASSQEDLYTLADITDSFSQDIKMEFGIDKCKINSVMGGNNYEHTYTTQTGETIDSLSEHETYKYLGYIQATQIKHKEIKNKLTQQFKHRLKSILNTQLHARHTIKAINTYAIPVLTYSFGIISWTKTELKNLQRIINTTLTRHRKHHPRSCIQRLTLPRKDGGRGIIDIMNLHNKQITTLRTYFNTKTTHSTLHKAIVFNDHKLTPLNMHDKTPQNNEKQIDRQTKLIEWTRKSLHGRHRLDLDQENVDKLASNDWLSRGDLFPETEGFMVAIQDQVIETRNYQKHIMRAPIPTDVCRRCSSASETIQHITGACKAIVQTDYKYRHDQIANVIHQKLAIKYKLILTPPVPYYKYKPEAVLENATHKLYFDRAILTDKTVHYNRPDITLIDKTNKTAQIIDIAVPNTHNLQNTIAEKLSKYTDLKIEITRMWRLGSVTIIPIVLSTTGVIPKQLHQSLKTLDLPPNTYQTLQKAAILNTCRIVRKFLQNETNDTRTTASHTAHIQSHFQSHFQSHIQSHSQHTHNHTTLNTHTTRNQDT

SEQ ID NO: 31284 - protein, 1564 aa, Hypolimnas misippus
MALTLLKPTVPKQSTNMVNTRSTLKRPQVPGVPSNSPGSDGSQPIAVTRGAKNLRVGKISRQMTPASNKDIDTQSDNDSTTTSHSLFESPPSSPHSFETSSSSHPSTHISIDVEHEAEVLEHVPLLDNAKRTRQIWTIEMYKFIWRTYLLITKLEKNRRYINLLYTKFTEKYPDVQISKQKIGEIKRAIIKNKLLTDEMLHGIKEEVKDILQKQDPKETHRTPKNSKSNLNAPHIFTHAPQPQVNLEAERVNTETNNSRRIWTEDMNKFIYRTYQIVTKLNTCRRGYLAPLFQQFTQKYPQMNVTKQRLGDQYRAILRNKLVSQEVIDRIKEEVASNLQNLTPNLQPYNIFIEPGQRMRWTTEHNEAIMKSYYKLTQLETNLTSYRTLLHKDFIRMFPYLSHITEQRVADQRRLIVTNKGRYLSENRLNQIRQEIAEELRTTQYQINNSHTTALDHSNTFNTHNRSSITHTNLFETIESQNNDPFIDTQSHTQSSFLEDKSHEENVFKITNNDIYNNHTQTQNTTQTIIQLDREENREIDQVFEQALQFYKNTNPTERQYIPKQKTSKKLAIIINYIDIKILPSYVNKETSFNTLQTILYCAAWTAAKMNGAKLEIPPRIHIYKNNPNKKPKWQIRLEKKVEDLRVKIGRLTQYTKGNRADNLTKHIQKILQHYKIHTSHEEPNTQLDHFLDTLKQKLTVTSSRLKRYKICTMRKTQNNQFTTNEKQFYRTLKSSTCNETPKNFSTTNLHTTPQAKNLHTFWSKLWENPVLHNSEAEWINTEKLSLNIEPMSYEVISTDIFYNIIKKLHNWKAPGNDYIHNYWYKKFTLIHPYLHNHINKFIHSPETMPKYITEGVTYMLLKDQNDPANPAKYRPITCLQTIYKIITACLAEVINKHIGSNNILTEQQKGCRKFSQGCKEQLVIDSVILGQTRQRKQDLFTMYIDYRKAFDSVPHSWLLQILEIYKIHPTITSFLQSTMKKWTTRLRLTTPKEVIETDIIKIQRGIFQGDTLSPLWFCLALNPLSNLLNNMKVGFPLEYYDTNINMHTDTRQIQQQYKINHLLYMDDIKLYASTQYNLNQLAETTERFSRDIKMDLGIEKCKINSIKAGQHYGHYYELQNGERIEHLNENETYKYLGYLQSKQINHKEIKTNLKQQFLHRLKSILKTHLYSKNTIKAINTYAVPILTYSFGIINWTKTDLQRLQRLINTTMTNNRKHHPRSCVQRLTLPRVEGGRGLIDLSNLHNVQITNLRTYFYKKTLTSILHATIAQNDLKLTPLNLHNRTTQKNETQIDKNNKMDQWARKSLHGRHYHDLRLPHVDKTASNEWLNRGELFPETEGFILAIQDQVIETRNYQKYIMKKVNLTTDICRRCNSSSETIQHITGACKSIVQTDYKHRHDQVANIIHQKLAINFKLITPQSRTAYYKYKPEVVLENQSHKLYFDRAILTDRTIPYNRPDITVIDKINKTGYIIDITIPNTHNLQNSIAEKLGKYADLKDEITRNWHLQKVIIVPIVLSTTGVIPYQLHQSLRTLNLPANTFSQLQKAVILNTCRIVRKFLQSHSI

SEQ ID NO: 31285 - protein, 1546 aa, Colias croceus
MMNTRSSKKWPQVPGGPSFSSGTDGSRPRTGTRGAKNLRVASISRQTTSAMNMDTEEASDISITSTRSLFESPRSSLHSYECLSNCSSPTSTSSQITCDVEQEANSHQLAPIIGKNQRTRQKWNIEMYKFIWRTYLLITQLETKKRYMTELHLQFKAKYNHIQVTKQKIGEIKRAIIRDNLLKDDTLRDIREEVKNILKSDSQIPNTTQITHINRIDNNIHIIESSSCLHNTLNTTEEPTTNRRTWTEEMNKFIYRNYLIITKLDTSRQGYLEPLHNQFLQKFPDMNVSRQRLGDQYRAIIRNKLLPTTVLNEIKAEVTANLNSLTQDLIIPNSTLQPGRRMRWTTEHNEAIMRSYFRVTNLETNLTMYRTTMYREFIKTFPHLAEHVTEQRVADQRRLIINNKGRYITEKRLNEIKQEVNKELQSQQRRSNKPIAQNQTEMVHEYNSSSNIETQIPDIEQDLTQSNNIETFSHSEPETSHNMNTNIIAQINLTDQQDEVTVTDHDQCSDINNTFNTALKYFLQLEPTKRQYIPKQKTSKKLTSIVNYINTKILPIHIKSETTYDTFQTILYSAAWTAAKLNGSKITIPSGTQTRNSYSHRKPKWQIRLEKKIEDLRAKIGRLTQYIRGHRNTKLSNHVHNILAYYKIHTTHEDPNTELNQFLDTLKQKLAVACSRLKRYKTCTQRKNQNNQFNNNEKQFYRTLKATTTNQGQQPTDIHMQTHIDEFHQFWSKIWESPTLHNTEAKWIETETNNINAEPMSFESITLETFNSVINKLHNWKTSGSDNIHNYWYKKFTHIHPYLHSYINNFITNPETIPKYVTEGITFLIPKDPNNLRDPAKYRPITCLQTIYKIITACLSQVIYKFIERNNLLTEEQKGCRKFSRGCKEQLIIDSVILRRAQQKKQNLFSMYIDYQKAYDSVPHSWLIEVLKIYKIHPTIISFLESTITKWTTRLRLNTSDSTIETDTIKIQRGIFQGDTLSPLWFCLALNPLSNLLNNEDAGYPAIYINTDQQTDIQIEQKHNINHLMYMDDIKLYASTQEELDQLAEITERFSNDIGMKFGIDKCRINSIRAGQYYGHQYELQNGQLIEPLKENEMYKYLGYHQARQIPQKEIKDQLKQQFKHRLNSILKTNLNSKNTIKAINTYAIPVLTYSFGIINWSKTQLKSLQRLINTTMTYNRKHHPRSCVQRLTLPRYEGGRGLIDIINLHNKQITGLRSYFHHKINSSNLHKAIVKNDVKLTPLNLNSQLTQTNEVQVNKATKHNDWSRKPLHGRHYHDLNLQHVDKLASNEWLRRGELFPETEGFMIAIQDQVIETRNYRKHIMKIPTTQDICRKCHNSTETIQHITGACSAIVQTDYKHRHDQIANIIHQKLAIKHKLIDKTPVPYYKYIPETILENCNHKLYFDRAILTDRTVHYNRPDITLIDKVNKVAYLIDIAIPNTHNIQSTISHKINKYLELKDEITRMWNLRKVSIIPIVLSTTGIVPTQLHQAVKSLDLPKSLFILLQKAVILNTCRITRKFLQTDQFSTPIHTTHIVDENDAHLA

SEQ ID NO: 31286 - protein, 1546 aa, Colias croceus
MMNTRSSKKWPQVPGGPSFSSGTDGSRPRTGTRGAKNLRVASISRQTTSAMNMDTEETSDISITSTRSLFESPRSSLHSYECLSNCSSPTSTSSQITCDVEQEANSHQLAPIIGKNQRTRQKWNIEMYKFIWRTYLLITQLETKKRYMTELHLQFKAKYNHIQVTKQKIGEIKRAIIRDNLLKDDTLRDIREEVKNILKSDSQIPNTTQITHINRIDNNIHIIESSSCLHNTLNVTEEPTTNRRTWTEEMNKFIYRNYLIITKLDTARQGYLEPLHNQFLQKFPDMNVSRQRLGDQYRAIIRNKLLPTTVLNEIKAEVTANLNSLTQDLIIPNSTLQPGRRMRWTTEHNEAIMRSYFRVTNLETNLTMYRTTMYREFIKTFPHLAEHVTEQRVADQRRLIINNKGRYITEKRLNEIKQEVNKELQSQQRRSNKPIAQNQTEMVHEYNSSSNIETQIPDIEQDLTQSNNIETFSHSEPETSHNVNTNINAQINLTDQQDEVTVTDHDQCSDINNTFNTALKYFLQLEPTKRQYIPKQKTSKKFASIVNYINTKILPIHIKSDTTYDTFQTILYSAAWTAAKLNGSKITIPSGTQTRNSYSHRKPKWQIRLEKKIEDLRAKIGRLTQYIRGHRNTKLSNHVHNILAYYKIHTTHEDPNTELNQFLDTLKQKLAVACSRLKRYKTCTQRKNQNNQFNNNEKQFYRTLKATTTNQGQQPTDIHMQTHIDEFHQFWSKIWESPTLHNTEAEWIVTETNNINAEPMSFESITLETFNSVINKLHNWKTSGSDNIHNYWYKKFTHIHPYLHSYINNFITNPETIPKYVTEGITFLIPKDPNDLRDPAKYRPITCLQTIYKIITACLSQVIYKFIERNNLLTEEQKGCRKFSRGCKEQLIIDSVILRRAQQKKQNLFSMYIDYQKAYDSVPHSWLIEVLKIYKIHPTIISFLESTITKWTTRLRLNTSDSTIETGTIKIQRGIFQGDTLSPLWFCLALNPLSNLLNNEDAGYPAIYINTDQQTDIQIEQKHNINHLMYMDDIKLYASTQEELDQLAEITERFSNDIGMKFGIDKCRINSIRAGQYYGHQYELQNGQLIEPLKENEMYKYLGYHQARQIPQKEIKDQLKQQFKHRLNSILKTNLNSKNTIKAINMYAIPVLTYSFGIINWSKTQLKSLQRLINTTMTYNRKHHPRSCVQRLTLPRYEGGKGLIDIINLHNKQITGLRSYFHHKINSSNLHKAIVKNDVKLTPLNLNSQLTQTNEVQVNKATKHNDWSRKPLHGRHYHDLNLQHVDKLASNEWLRRGELFPETEGFMIAIQDQVIETRNYRKHIMKIPTTQDICRKCHNSTETIQHITGACSAIVQTDYKHRHDQIANIIHQKLAIKHNLIDKTPVPYYKYIPETILENCNHKLYFDRAILTDRTVHYNRPDITLIDKVNKVAYLIDIAIPNTHNIQSTISHKINKYLELKDEITRMWNLRKVSIIPIVLSTTGIVPTQLHQAVKSLDLPKSLFILLQKAVILNTCRITRKFLQTDQFSTPIHTTHIVDENDAHLA

SEQ ID NO: 31287 - protein, 1546 aa, Colias croceus
MMNTRSSKKWPQVPGGPSFSSGTDGSRPRTGTRGAKNLRVASISRQTTSAMNMDTEEASDISITSTRSLFESPRSSLHSYECLSNCSSPTSTSSQITCDVEQEANSHQLAPIIGKNQRTRQKWNIEMYKFIWRTYLLITQLETKKRYMTELHLQFKAKYNHIQVTKQKIGEIKRAIIRDNLLTDDTLRDIREEVKNILKSDSQIPNTTQITHINRIDNNIHIIESSSCLHNTLNITEEPTTNRRTWTEEMNKFIYRNYLIITKLDTARQGYLEPLHNQFLQKFPDMHVSRQRLGDQYRAIIRNKLLPTTVLNEIKAEVTANLNSLTQDLIIPNSTLQPGRRMRWTTEHNETIMRSYFRVTNLETNLTMYRTTMYREFIKTFPHLAEHVTEQRVADQRRLIINNKGRYITEKRLNEIKQEVNKELQSQQRRSNKPIAQNQTEMVHEYNSSSNIETQIPDIEQDLTQSNNIETFSHSEPETSHNVNTNINAQINLTDQQDEVTVTDHDQCSDINNTFNTALKYFLQLEPTKRQYIPKQKTSKTFASIVNYINTKILPIHIKSDTTYDTFQTILYSAAWTAAKLNGSKITIPSGTQTRNSYSHRKPKWQIRLEKKIEDLRAKIGRLTQYIRGHRNTKLSNHVHNILAYYKIHTTHEDPNTELNQFLDTLKQKLAVACSRLKRYKTCTQRKNQNNQFNNNEKQFYRTLKATTTNQGQQPTDIHMQTHIDEFHQFWSKVWESPTLHNTEAEWIETETNNINAEPMSFESITLETFNSVINKLHNWKTSGSDNIHNYWYKKFTHIHPYLHSYINNFITNPETIPKYVTEGITFLIPKNPNDLRDPAKYRPITCLQTIYKIITACLSQVIYKFIERNNLLTEEQKGCRKFSRGCKEQLIIDSVILRRAQQKKQNLFSMYIDYQKAYDSVPHSWLIEVLKIYKIHPTIISFLESTITKWTTRLRLNTSDSTIETDTIKIQRGIFQGDTLSPLWFCLALNPLSNLLNNEDAGYPAIYINTDQQTDIQIEQKHNINHLMYMDDIKLYASTQEELDQLAEITERFSNDIGMKFGIDKCRINSIRAGQYYRHQYELQNGQLIEPLKENEMYKYLGYHQARQIPQKEIKDQLKQQFKHRLNSILKTNLNSKNTIKAINTYAIPVLTYSFGIINWSKTQLKSLQRLINTTMTYNRKHHPRSCVQRLTLPRYEGGRGLIDIINLHNKQITGLRSYFHHKINSSNLHKAIVKNDVKLTPLNLNSQLTQTNEVQVNKATKHNDWSRKPLHGRHYQDLNLHHVDKLASNEWLRRGELFPETEGFMIAIQDQVIETRNYRKHIMKIPTTQDICRKCHNSTETIQHITGACSAIVQTDYKHRHDQIANIIHQKLAIKHNLIDKTPVPYYKYIPETILENCNHKLYFDRAILTDRTVHYNRPDITLIDKVNKVAYLIDIAIPNTHNIQSTISHKINKYLELKDEITRMWNLRKVSIIPIVLSTTGIVPTQLHQAVKSLDLPKSLFILLQKAVILNTCRITRKFLQTDQFNTPIHTTHIVDENDAHLA

SEQ ID NO: 31288 - protein, 1546 aa, Colias croceus
MMNTRSSKKWPQVPGGPSFSSGTDGSRPRTGTRGAKNLRVASISRQTTSAMNMDTEEASDISITSTRSLFESPRSSLHSYECLSNCSSPTSTSSQITCDVEQEANSHQLAPIIGKNQRTRQKWNIEMYKFIWRTYLLITQLETKKRYMTELHLQFKAKYNHIQVTKQKIGEIKRAIIRDNLLKDDTLRDIKEEVKNILKSNSQIPNTTQITHINRIDNNIHIIESSSCLHNTLNVTEEPTTNRRTWTEEMNKFIYRNYLIITKLDTSRQGYLEPLHNQFLQKFPDMNVSRQRLGDQYRAIIRNKLLPTTVLNEIKAEVTANLNSLTQDLIIPNSTLQPGRRMRWTTEHNEAIMRSYFRVTNLETNLTMYRTTMYREFIKTFPHLAEHVTEQRVADQRRLIINNKGRYITEKRLNEIKQEVNKELQSQQRRSNKSIAQNETEMVHEYTLSSNTEIQTPDTEQDLTQFNNIEIFSHAEPETNYNVNTNINAQTNLTDQQDEVTITDHDQCSDINNTFNTALKYFLQLEPTKRQYIPKQKTSKKLASIVKYINTKILPIHIKPDTTYDTFQTILYSAAWTAAKLNGSKITIPSSTQTRNSYSHRKPKWQIRLEKKIEDLRAKIGRLTQYIRGHRNTKLSNHVHNILAYYKIHTTHEDPNTELNQFLDTLKQKLAVACSRLKRYKTCTQRKNQNNQFNNNEKQFYRTLKATTTNQGQQPTDIHMQTHIDEFHQFWSKIWESPTLHNTEAEWIETETNNINAEPMSFESITLETFNSVINKLHNWKTSGSDNIHNYWYKKFTHIHPYLHSYINNFISNPETIPKYVTEGITFLIPKDPNDLRDPAKYRPITCLQTIYKIITACLSQVIYKFIERNNLLTEEQKGCRKFSRGCKEQLIIDSVIMRRAQQKKQNLFSMYIDYQKAYDSVPHSWLIEILKIYKIHPTIISFLESTITKWTTRLRLNTSASTIETDTIKIQRGIFQGDTLSPLWFCLALNPLSNLLNSEDAGYPAIYIHTDQQTDIQIEQKHNINHLMYMDDIKLYASTQEELDQLAEVTERFSNDIGMKFGIDKCRINSIRAGQYYGHQYELQNGQLIEPLKENEMYKYLGYHQARQIPQKEIKDQLKQQFKHRLNSILKTNLNSKNTIKAINTYAIPVLTYSFGIINWSKTQLKSLQRLINTTMTYNRKHHPRSCIQRLTLPRYEGGRGLIDIINLHNKQITGLRSYFHHKINSSNLHKAIVKNDVKLTPLNLNSQLTQTNEVQVNKATKHNDWSRKPLHGRHYHDLNLQHVDKLASNEWLTRGELFPETEGFMIAIQDQVIETRNYRKHIMKIPTTQDICRKCHNSTETIQHITGACSAIVQTDYKHRHDQIANIIHQKLAIKHNLIDKTPVPYYKYIPETILENCNHKLYFDRAILTDRTVHYNRPDMTLIDKVNKVAYLIDIAIPNTHNIQSTISHKINKYLELKDEITRMWNLRKVSIIPIVLSTTGIVPTQLHQAVKSLDLPKSLFILLQKAVILNTCRITRKFLQMDQFSTPIHTTHIVDENDAHLA

SEQ ID NO: 31289 - protein, 768 aa, Anthocharis cardamines
MVFDYISIEIFYNVLNKLQNWKAPGSDNIHNYWYKKFTHTHPYLHKYLNLFIRCPENIPNYITEGITFMLPKDPNNLANPAKYRPITCLQTFYKIITACLSQVIYKYIDENNILTEQQKGCRKFSQGCKEQLIIDSVILKQVQKQKQNLFTMYIDYQKAYDSVPHSWLLKVLEIYKIHPTIIIFLKSLMTKWTTRLRLTTFTKTIETDSIKIQRGIFQGDTLSPLWFCLALNPLSNLLNNKNIGYPIKYHDVDRDSETDIQTKQYTINHLMYMDDIKLYASSQEHLNQLAKITEYFSKDIRMEFGIDKCRLNSVTAGQYFEHRYDLQNGKYIESLNEEETYKYLGYQQARQIQYKEVKIQLKQQFKHRLNSILKTQLYSKNTVKAINTFAIPILTYSFGIINWSKSELKGLQRLINTIMTSNRKHHPRSCMQRLTMSRNDGGRGLIDISNLHSKQVTSLRTYFHHKIHTSTLHTAIVQNDIKFTPLNLHNKLPQTNEVLIDRITKQNDWARKSLHGRHYHDLNLQHVDKTASNEWLSRGELFPETEGFMIAIQDQVIETRNYRKHIMKIPGTHDICRRCNHSTETIQHITGACSAIVQTEYKHRHDQVANIIHQKLALKYKLSNAQPIPYYKYTPEIILESPIHKLYFDRAILTDKTIHYNRPDITLIDKVNKEAYIIDIAIPNTHNIQSTIAQKLSKYLELKDEITRMWNLRKVVVVPIVLSTTGIIPKQLHQSLKTIDLPKFTYTTLQKAVILNTCRIVRKFLQTD

SEQ ID NO: 31290 - protein, 1341 aa, Hestina assimilis
MNTRSKHRPLVPGDGSSSQTDPDGSRNDTGFRGVYNLRARKISRQTTQARISDTDTLSDSDSLYSIENVVQEAPADNPAPVSSGRRRKWTNDMNKFIVRTYLTVTNLDTCKQGYLDPLHKHFIRKFPNMTVSKQRLGDQFRAIMRNKMISEEDFNQIKMEVTEKLNSSQITQTLTNSDPIPHLGSQRMRWTSEHNEHIIRSYFKITMLEKNRTSYRAAIHQAFINRFPHLSHITEQRIADQRRLIVSNKYISEDKLNKIRDEVANELCVSLQETDPNEQTQLVNITPKNGTLNVDNSLNNVELMSVNIENDIEPYNSDKISERNADIDDSFRQTLEYYKNIHPTKRNYIPKQKCSKKLAATIHYLNTNILPLHVDNNTDYNTLQTVLYCAAWTAAKINGAKLLIPPPQKTHNRKIKNKPKWQIRLERRIEKLRANIGRLTQYINGHRSNKLNRHVIDILNNYKIHATYELPNSQLTHFLDTLKQKLSLTSSRLKRYRTCTERKTQNLQFSSNERNFYRNLKLTSNNNNQGSNYNNTPTPKPADLHKFWSNIWENSIQHNSNAEWINHEELKTFNIKDMEFESLPIELFRNVINRLQNWKAPGTDYIQNYWYKKFTYLHLFIHNHINNFIQNPQLMPEYITDGITYMLPKDQNDLINPAKYRPITCLQTIYKIITGCISELIYTHIDKNNILADQQKGCRKFSRGCKEQLLIDSVILKQVQQLKKDLYTMYIDYKKAFDSVPHSWLLKILNIYKINPILVSFLNRTMANWTTQLRINTPEGVIDTEIIKIQRGIFQGDSLSPLWFCLALNPLSSELNASSIGYTLEYSNNIDQLTHKYYINHLLYMDDIKLYAQHQEDLTKLVNITENISLDMGMEFGIDKCKINTVKSGQTHKHSYETKTGQTIDALNDIETYKYLGYHQSKLIQHKQIKSILKQQFKHRLNSILKTQLDSKNTIKAINTYAIPVLTYSFGIIHWTKLDLKYLQRLVNTTMTNNRKHHPRSCVQRMTLPRKVGGRGLIDITNLHNSQIANLRSYFHNKISPLHVSIAENDKKLTPLNLQDRNRQKTEDQIDNQTKLEEWARKSLHGRHYSDLNLPFVDKIASNEWLSRGVLFPETEGFILAIQDQVVETRNYKKYIMKLPNLQTDMCRRCNSSSETIQHITGACKTLVQKDYKHRHDQIANIIHQKLAHKTKLIESDKLTAYYKYVPETVLENESFKLYFDRTILTDRTVPYNRPDITLLDKNNKTCYIIDIAVPNTHNLQNTIVEKLAKYTDLKDEIIRNWNLQKVTIVPIVVSTTGVIPKQLHQSLKLLDSPPSTFIQLQKAAILNTCRIVRKFLHSET

SEQ ID NO: 31291 - protein, 1341 aa, Hestina assimilis
MNTRSKHRPLVPGDGSSSQTDPDGSRNDTGFRGVYNLRARKISRQTTQARISDTDTLSDSDSLYSIENVVQEAPADNPAPVSSGRRRKWTNDMNKFIVRTYLTVTNLDTCKQGYLDPLHQHFIRKFPNMTVTKQRLGDQFRAIMRNKMISEEDFNQIKTEVTEKLNSSQITQTLTNSDPIPHLGSQRMRWTSEHNEHIIRSYFKITMLEKNRTSYRAAIHQAFINRFPHLSHITEQRIADQRRLIVSNKYISEDKLNKIRDEVANELCVSLQETDPNEETQLVNITPKNGTLNVDNSLNNVELMSVNIENDIQPYNSDKISERNADIDDSFRQTLEYYKNIHPTKRNYIPKQKCSKKLAATIHYLNTNILPLHVDNNTDYNTLQTVLYCAAWTAAKINGAKLLIPPPQKTHIRKIKNKPKWQIRLERRIEKLRANIGRLTQYINGHRSNKLNRHVIDILNNYKIHATYELPNSQLTHFLDTLRQKLSLTSSRLKRYRTCTERKTQNLQFSSNERNFYRNLKLTSNNNNQGSNYNNTPTPKPADLHKFWSNIWENSIQHNSNAEWIKREELKTFNIKDMEFESLPIELFRNVINRLQNWKAPGTDYIQNYWYKKFTYLHLFIHNHINNFIQNPQLMPEYITDGITYMLPKDQNDLISPAKYRPITCLQTIYKIITGCISELIYTHIDKNNILADQQKGCRKFSRACKEQLLIDSVILKQVQQLKKDLYTMYIDYKKAFDSVPHSWLLKILNIYKINPILVSFLNRTMANWTTQLRINTPEGVIDTEIIKVQRGIFQGDSLSPLWFCLALNPLSSELNASSIGYTLEYSNNIDQLTHKYYINHLLYMDDIKLYAQHQEDLTKLVNITENISMDMGMEFGIDKCKINSVKSGQTHKHSYETKTGQTIDPLNDIETYKYLGYHQSKLIQHKQIKSTLKQQFKHRLNSILKTQLDSKNTIKAINTYAIPVLTYSFGIIHWTKSDLKYLQRLVNTTMTNNRKHHPRSCVQRMTLPRKVGGRGLIDITNLHNSQIANLRSYFHNKISPLHVSIAENDKKLTPLNLQDRNRQKTEDQIDNQTKLEEWARKSLHGRHYSDLNLPFVDKIASNEWLSRGVLFPETEGFILAIQDQVVETRNYKKYIMKLPNLQTDMCRRCNSSSETIQHITGACKTLVQKDYKHRHDQIANIIHQKLAHKTKLIESDKLTSYYKYVPETVLENESFKLYFDRTILTDRTVPYNRPDITLLDKNNKTCYIIDIAVPNTHNLQNTIVEKLAKYTDLKDEIIRNWNLQKVTIVPIVVSTTGVIPKQLHQSLKLLDIPSSTFIQLQKAAILNTCRIVRKFLHSET

SEQ ID NO: 31292 - protein, 1340 aa, Hestina assimilis
MNTRSKHRPLVPGDGSSSQTDPDGSRNDTGFRGVYNLRARKISRQTTQARISDTDTLSDSDSLYSIENVVQEAPADNPAPVSSGRRRKWTNDMNKFIVRTYLTVTNLDTCKQGYLDPLHQHFIRKFPNMTVSKQRLGDQFRAIMRNKMISEEDFNQIKMEVTEKLNSSQITQTLTNSDPIPHLGSKMRWTSEHNEHIIRSYFKITMLEKNRTSYRAAIHQAFINRFPHLSHITEQRIADQRRLIVSNKYISEDKLNKIRDEVANELCVSLQETDPNEQTQLVNITPKNGTLNVDNSLNNVELMSVNIENDIEPYNSDKISERNADIDDSFRKTLEYYKNIHPTKRNYIPKQKCSKKLAATIHYLNTNILPLHVDNNTDYNTLQTVLYCAAWTAAKINGAKLLIPPPQKTHNRKIKNKPKWQIRLERRIEKLRANIGRLTQYINGHRSNKLNRHVIDILNNYKIHATYELPNSQLTHFLDTLRQKLSLTSSRLKRYRTCTERKTQNLQFSSNERNFYRNLKLTSNNNNQGSNYNNTPTPKPADLHKFWSNIWENSIQHNSNAEWINREELKTFNIKDMEFESLPIELFRNVINRLQNWKAPGTDYIQNYWYKKFTYLHLFIHNHINNFIQNPQLMPEYITDGITYMLPKDQNDLINPAKYRPITCLQTIYKIITGCISELIYTHIDKNNILADQQKGCRKFSRGCKEQLLIDSVILKQVQQLKKDLYTMYIDYKKAFDSVPHSWLLKILNIYKINPILVSFLNRTMANWTTQLRINTPEGVIDTEIIKIQRGIFQGDSLSPLWFCLALNPLSSELNASSIGYTLEYSNNIDQLTHKYYINHLLYMDDIKLYAQHQEDLTKLVNITENISLDVGMEFGIDKCKINSVKSGQTHKHSYETKTGHTIDALNDIETYKYLGYHQSKLIQHKQIKSTLKQQFKHRLNSILKTQLDSKNTMKAINTYAIPVLTYSFGIIHWTKSDLKYLQRLVNTTMTNNRKHHPRSCVQRMTLPRKVGGRGLIDITNLHNSQIANLRSYFHNKISPLHVSIAENDKKLTPLNLQDRNRQKTEDQIDNQTKLEEWARKSLHGRHYSDLNLPFVDKIASNEWLSRGVLFPETEGFILAIQDQVVETRNYKKYIMKLPNLQTDMCRRCNSSSETIQHITGACKTLVQKDYKHRHDQIANIIHQKLAHKTKLIESDKLTAYYKYVPETVLENESFKLYFDRTILTDRTVPYNRPDITLLDKNNKTCYIIDIAVPNTHNLQNTIVEKLAKYTDLKDEIIRNWNLQKVTIVPIVVSTTGVIPKQLHQSLKLLDIPPSTFIQLQKAAILNTCRIVRKFLHSET

SEQ ID NO: 31293 - protein, 1249 aa, Hestina assimilis
MNKFIVRTYLTVTNLDTCKQGYLDPLHQHFIRKFPNMTVSKQRLGDQFRAIMRNKMISEEDFNQIKMEVTEKLNSSQITQTLANSDPIPHLGSQRMRWTSEHNEHIIRSYFKITMLEKNRTSYRAAIHQAFINRFPHLSHITEQRIADQRRLIVSNKYISEDKLNKIRDEVANELCVLLQETDPNEQTQLVNITPKNGTLNVDNSLNNVELMSVNIENDIEPYNSDKISETNADIDDSFRQTLEYYKNIHPTKRNYIPKQKCSKKLAATIHYLNTNILPLHVDNNTDYNTLQTVLYCAAWTAAKINGAKLLIPPPQKTHNRKIKNIPKWQIRLERRIEKLRVNIGRLTQYINGHRSNKLNRHVIDILNNYKIHATYELPNSQLTHFLDTLRQKLSLTSSRLKRYRTCTERKTQNLQFSSNERNFYRNLKLTSNNNNQGSNYNNTPTPKPADLHKFWSNIWENSIQHNSNAEWINREELKTFNIKDMEFESLPIELFRNVINRLQNWKAPGTDYIQNYWYKKFTYLHLFIHNHINNFIQNPQLMPEYITDGITYMLPKDQNDLINPAKYRPITCLQTIYKIITGCISELIYTHIDKNNILADQQKGCRKFSRGCKEQLLIDSVILKQVQQLKKDLYTMYIDYKKAFDSVPHSWLLKILNIYKINPILVSFLNRTMANWTTQLRINTPEGVIDTEIIKIQRGIFQGDSLSPLWFCLALNPLSSELNASSIGYTLEYSNNIDQLTHKYYINHLLYMDDIKLYAQHQEDLTKLVNITENISLDMGMEFGIDKCKINSVKSGQTHKHSYETKTGQTIDALNDIETYKYLGYHQSKLIQHKQIKSTLKQQFKHRLNSILKTQLDSKNTIKAINTYAIPVLTYSFGIIHWTKSDLKYLQRLVNTTMTNNRKHHPRSCVQRMTLPRKVGGRGLIDITNLHNSQIANLRSYFHNKISPLHVSIAENDKKLTPLNLQDRNRQKTEDQIDNQTKLEEWARKSLHGRHYSDLNLPFVDKIASNEWLSRGVLFPETEGFILAIQDQVVETRNYKKYIMKLPNLQTDMCRRCNSSSETIQHITGACKTLVQKDYKHRHDQIANIIHQKLAHKTKLIESDKLTAYYKYVPETVLENKSFKLYFDRTILTDRTVPYNRPDITLLDKNNKTCYIIDIAVPNTHNLQNTIGEKLAKYTDLKDEIIRNWNLQKVTIVPIVVSTTGVIPKQLHQSLKLLDIPPSTFIQLQKAAILNTCRIVRKFLHSET

SEQ ID NO: 31294 - protein, 1406 aa, Blastobasis lacticolella
MKATRKNNKLPQAGTTVRGGESRPESRPDSGCPSYSGEGTVSHSLVHRYNLRRRPNGGLDRKGEGISQSPESLGVPQSPESLFSSIPSNNSSYHSSPISSSSSVQPNSPLGLVEAAATISAPTTRAKRTRLKWTQDINAFIMRAYLKITKMEINTKGYLDNLYPQFKTKFPDMDVTRQRIGDQLRAINRNKLLPPEIIEQIRLEVSTQLQLEESDSNPPTITIQHSQASNQLASTTTQVNNNKRIRWTDEYNEAIIRTYYRITKLETDLTTYRTMLHQDFISKFPHLAHVTEQRVADQKRLIINNKYISEDRLYTIKQEVSDELELNANMSILDTNDNNEHNQPYCALESPNSTNIDVHNHTETINVTSNTADIQILTSEQQPNCRNEKIDNIFYESLEYFKNTDPTKRYHIPKQNSSKKLAMIVYYINSKLLPENIKSETDYDSLQTIIYVAAWTAAKSNGAKLCLPQLHPTTRKQRGKAKWQVRLEKRIDTLRAKISRVIHYMNGHRSRRLTNHVNSIMEQYKIHSAHEEPNTQLSHTLDTLKQKLAVGSNRLNRYKACTLRKAQNTQFSINEKLFYRNLKATTSNDTNRNSDSTNNSPRAEDLRNFWAGIWENPVQHNKDAEWLQEQQFNNNEAIEPMQFENISGDVFANVIKKLHNWKSPGSDNIHNYWYKHFTYIHPYLLHHINNFIQNPHTMPNYITAGITYMLPKDSNDPTNPAKYRPITCLQTIYKLMSACLAQLIYDHIDEKSILAEQQKGCRKFSQGCKEQLIIDSVILKQVQQKKTNLFTMYIDYKKAFDSVPHTWLLKVLELYKINPQLVFFLQSTMTNWTTRLRLNTPNQTIETEPITIQRGIFQGDALSPLWFCLALNPLSNILNSTNTGYQLTYQDHNTNRVTIYKLNHLLYMDDIKLYASTENELNHLASITESFSNDIQMEFGIDKCQINSVKVGQNYKHEYQIQTGELIHALDENTGYKYLGYHQSKQLHSKEIKRTLTQQFRHRINSILKTHLNARNTCKAINSYAVPVLTYSFGVIDWSQSQLKNLQRIINTTMTHNRKHHPRSCVQRLTLPRDDGGRGIVDIVNLNSKQITNLRAYFYNKMTSSTLHNCIVQNDRKCTPLNLYDKTTQKYEAITDRQTKLLEWSQKSLHGRHYHDISQINVDKLASNDWLKSGVLFPETEGFMLAIQDQVIETRNYRKYIIKDRSIRDDKCRRCLSAPETIQHITGACRTIVQTDYKFRHDQVAKIIHQKLALKYNLIQQPPLPYYKYIPETILENAKHRLYFDRAILTDRTIHFNRPDITLIDKQSQTADLIDIAIPNTHNLQSTIIEKLTKYTDLKDEISRIWKLKKVTIVPIVLSTTGIIPNQLHHSILALDIPRPVYKELQKAVILNTCRIVRKFLQTTLT

SEQ ID NO: 31295 - protein, 1410 aa, Blastobasis lacticolella
MKATRKNNKLPQAGTTVRGGESRPESRPDSGCPSYSGEGTVSQSLVHRYNLRRRPNGGLDRKGECISQSPESLGVPQSPESLFSSIPSNNSSYHSSPISSSSSIQPNSPSGLVDVAQEAAATISAPTTRAKRKRLKWTQDINAFIMRAYLKITKMEINTKGYLDNLYPQFKTKFPDMDVTRQRIGDQLRAINRNKLLPPEIIEQIRLEVSTQLQLEQSDSNPPTITIQHSQATNQLASTTTQANNNKRIRWTDEYNEAIIRAYYRITKLETDLTTYRTMLHQDFISKFPHLAHVTEQRVADQKRLIINNKYISEDRLYTIKQEVSDELELNTNRSILDTNDNNEHNQPYCALESPNSTNIDVHNHTETINVTSNTAYIQILTSEQQPNCRNKKIDNIFYESLEYFKNTDPTKRYYIPKQNSSKKLANIVYYINSKLLPENIKSETDYDSLQTIIYVAAWTAAKSNGSKLCLSQLLPTTRKQRGKAKWQVRLEKRIDTLRAKISRVIHYMNGHRSRRLTNHVNSIMEQYKIHSAHEEPNTQLPHTLDTLKQKLAVASNRLNRYKACTLRKAQNTQFSINEKLFYRNLKATTSNDTNRNTDSSNNSPRAEDLRNFWAGIWENPVQHNKDAEWLQEQQFNNNEAIEPMQFENISGDVFANVIKKLHNWKSPGSDNIHNYWYKHFTYIHPYLLHHINNFIQNPHTMPNYITAGITYMLPKDTNDPTNPAKYRPITCLQTIYKLMSACLAQLIYDHIDEKSILAEQQKGCRKFSQGCKEQLIIDSVILKQVQQKKTNLFTMYIDYKKAFDSVPHTWLLKVLELYKINPQLVFFLQSTMTNWTTRLRLNTPNQTIETEPITIQRGIFQGDALSPLWFCLALNPLSNILNSTNTGYQLTYQEHNTNRVTIYKLNHLLYMDDIKLYASTENDLNHLASITESFSNDIQMEFGIDKCQINSVKLGQNYKHEYQIQTGELIHALDENTGYKYLGYHQSKQLHSKEIKRTLTQQFRHRINSILKTHLNARNTCKAINSYAVPVLTYSFGVIDWSQSQLKNLQRIINTTMTHNRKHHPRSCVQRLTLPRDDGGRGILDIVNLNSKQITNLRAYFYNKMTSSSLHNCIVQNDRKCTPLNLYDKTTQKYEAITDRQTKLLEWSQKSLHGRHYHDISQINVDKLASNDWLKCGVLFPETEGFMLAIQDQVIETRNYRKYIIKDRSIRDDKCRRCLSAPETIQHITGACRTIVQTDYKFRHDQVAKIIHQKLALKYNLIQQPPLPYYKYIPETILENATHRLYFDRAILTDRTIHFNRPDITLIDKQSQTADLIDIAIPNTHNLQSTIIEKLTKYTDLKDEISRIWKLKKVTIVPIVLSTTRIIPNQLHHSILALDLPRPVYKELQKAVILNTCRIVRKFLQTTLT

SEQ ID NO: 31296 - protein, 973 aa, Tuta absoluta
MTSLPTPSDTVSSAATVFEVATQDEYIKCDQCARPRFFRGRRGLKIHTSMVHKPSTSSSTSASVQAVPVPASSAPTDVSLPLCKLLGSYKSKLPIVKRIPRGARLAVAGALKRAVDRVVCENDVASWEFLLTFSYRVLNVRRDDNSALSLTQKIKDNCDVSTLDNFCEVDARVSSRNHFNIFKKIEGKVNDGDLKGAAKIIFSSDSLAPNCIETVEALKSKHPASSPTSQLPNPPSNSDFAPQISADDILAGIMSFRSGSASGLDGLSPQHLKDLVCNATGDSGRALLVSLVSLVNLMLSGRVPSEIAEILYGANLCALKKKDGGIRSIAVGNTLRRLVSKICCSHILPGLSSRFQPKQLGFGCKGGAEAAVHAARTFINSDGGQVLLKVDVKNAFNTVDRGVILNEVEKNVPSMYPYIWQCYSQPTKLLYKDHVLSSAVGCQQGDPLGPAIFSMAIHPIISDLKSPFNVWYLDDGTLGGEASTVMGDLGTLITAFSAIGLDFNFSKCELFIFPSVSTLSRGEIVSKFTELAPGIKILTADSLRLLGAPVLGDSIPFYVDDQIEKFKQSSDLLLKVNAHMAFFILRYCLFVPKFTYVLRCSHLWQHQGQLQRLDDVIKNTLVVMLNCSMDDLTWVQASLPIRFGGLGVRRTTDVALPAFLASAHASNLLCGKILSPSLGSVEVSGLVDARDAWQARCSEELPVSPNTQRQWDEPLCKLVQRNLVGSSLNTADRARLLAVSERESGLWLQAYPSSNVGTLLDNITFSLAVRLRLGVKSSEGHRCACGEMVGELAYHGLSCQRSAGRIPRHASLNDIIRRALMSANVPAILEPSGVSRSDGKRPDGMSLVPWRFGKSLVWDATCVDTMPPSHLPSTSAQAGAAASSAEVLKRRKYSCLGDVYFFVPFAVETMGPWGPAAKGFLNDISGRLIEASGDPRAGSYFAQRISLAIQRGNAASLLGTLPRCEVLEDIFYL

SEQ ID NO: 31297 - protein, 973 aa, Tuta absoluta
MTSLPTPSDTVSSAATVFEVATQDEYIKCDQCARPRFFRGRRGLKIHTSMVHKPSTSSSTSASVQAVPVPASSAPTDVSLPLWKLLGSYKSKLPIVKRIPRGARLAVAGALKRAVDRVVCENDVASWEFLLTFSYRVLNVRRDDNSALSLTQKIKDNCDVSTLDNFCEVDARVSSRNHFNILKKIEGKVNDGDLKGAAKIIFSSDSLAPNCIETVEALKSKHPASSPTSQLPNPPSNSDFAPQISADDILAGIMSFRSGSASGLDGLSPQHLKDLVCNATGDSGRALLVSLVSLVNLMLSGRVPSEIAEILYGANLCALKKKDGGIRPIAVGNTLRRLVSKICCSHILPGLSSRFQPKQLGFGCKGGAEAEVHAARTFINSDGGQVLLKVDVKNAFNTVDRGVILNEVEKNVPSMYPYIWQCYSQPTKLLYKDHVLSSAVGCQQGDPLGPAIFSMAIHPIISDLKSPFNVWYLDDGTLGGEASTVMGDLGTLITAFSAIGLDFNFSKCELFIFPSVSTLSRGEIVSKFTELAPGIKILTADSLRLLGAPVLGDSIPFYVDDQIEKFKQSSDLLLKVNAHMAFFILRYCLFVPKFTYVLRCSHLWQHQGQLQRLDDVIKNTLVVMLNCSMDDLTWVQASLPIRFGGLGVRRTIDVALPAFLASAHASNLLCGKILSPSLGSVEVSGLVDARDAWQARCSEELPVSPNTQRQWDEPLCKLVQRNLVGSSLNTADRARLLAVSERESGLWLQAYPSSNVGTLLDNITFSLAVRLRLGVKSCEGHRCACGEMVGELAYHGLSCQRSAGRIPRHASLNDIIRRALMSANVPAILEPSGVSRSDGKRPDGMSLVPWRFGKSLVWDATCVDTMAPSHLPSTSAQAGAAASSAEVLKRRKYSCLGDVYFFVPFAVETMGPWGPAAKGFLNDISGRLIEASGDPRAGSYFAQRISLAIQRGNAASLLGTLPRCEVLEDIFYL

SEQ ID NO: 31298 - protein, 981 aa, Tuta absoluta
MSLSLPAPAPPDSVQIVEDTIHLTGFVNNNYLKCDLCIPPGYFRGKRGLKIHTTRIHKSTSSDATVQAAAATPSFITASASAPATQIDQPLWKSLGIYKTNLPLVKRIPRGARFTVAGALKKTIDKVVSLNNVASWKLLLTFSFCVLHVRKDVESPLSLTQRIKNNCDDFAPNSVLYKPGPRQQKPFNVIKKIESKVNDGDLKGAAQLIFSQDSLAPDCPETLAALESKHPSPLPSLQLPDPPSDPVSPPSVTADDVLAVLNSFKTGSASGLDGLSPQHLKDLVSVTTGDTGRALLASLSSLVNLMLSGKVPREITEVLYGANLCALKKKDGGIRPIAIGNTLRRLVSKLCCRNILASLSGRFQPKQVGFGSKGGCEASVHAARTFLNSDYAQVLLKVDIKNAFNTVDRGALLKEVKEQVPSIYPYAWQCYSEPSKLIYRDHYLNSSSGCQQGDPLGPAIFSLAIHPVVAELKSRFNVWYLDDGTMGGQSSEVLEDLKTLISAFAAIGLELNFSKCELFIHPSVSHSLKEDIITKFNELAPNIKIEDENSLRLLGAPVLDASIPLYVEEQIDKFQQSSARLFQINAHMALFIIRFCLFVPKFTYVLRCTQFWKYSNHLRNLDNIIKETLVKILNCSLEESAWVQASLPVRLGGLGVRRASDVALPAFLSSVHALSPLIGSILNPALGTVEALGLTDAGNAWRTLSSEEFPTHSHSQRQWDEPLAKMHQKSLIASSSSAADRARLLAVSEKESGMWLHAYPSSHIGTLLDNCSLSIAVRLRLGSKTNESHRCQCGEMVGQLGHHGLSCQKSAGRIPRHSNLNDIVRRALVTANVPAVLEPKGIIRTDGKRPDGMSIVPWKNGKCLVWDATCTDTLAPSHLSTTSLRAGAAASAAEILKTRKYSSLGELFIFVPLAFETMGPWGPLAKDFIKDLSGRLIEATGDPRAGSYLGQRISLTIQRGNAASLLGTLPRCAALGEIFYL

SEQ ID NO: 31299 - protein, 1536 aa, Dysdera silvatica
MLIVNSVGNVNILNNSQAKQASALSAWTVEKATPVRNMEANEYASFILLNTGAPEPKTSRVRPTASERRRRAGKSLCPPSPERGTRASRVGREPGFKPTGTGAEQNGSSPAHPTTQMEKPSRSGDLASTGLRLQNFKRTPVPTPRLSKLSKVDSPHKRIITSSASIRDPTNTPLNKHHYSPEGKVYIYPWSCHLCDRTFKAKKQGKKHRAWHRRNGGFTPPSQDTSHQERPSCTPAIPPAQPWSCDECGQDFSDSKSASSHRAIHTKYTIAHTLEEQGDYVGALGVIDRPHSDFSSQAMNHAGRTTSASDKPTHTTVQSPAIDENLQGPLIPSIASTDCLPRGKDIQRHGKELYFLYPLTLPMLCPEPGCRFASSAVAWTSSKKSVERHVEQVHMIQTKSKSFCKLCGRQVSEKVSTHSCFAKSDFIIAPPAPRCWTKCPECEFRAPSRIALNNHCKKHKRDTIRAASSVTIPKPGTRKNKGKKAPQIKTVREPVSPKGVTTSPVAVDSTPRMTYPTPHSPSLSCSQSISGVLNDENGENGSSAANGLSAASGIGEDEEADMELPFDEIDPDEFFRISQIPVASMHTFRRDAPCEDAEEPAIAALTRRGRDLMGLLATETGWDNFETLVEDATNFAFTTNNLKPFVDPPDNRHHNTIDPRNCKMIQRLYRRNRRRAVRLITGDESPRCNIPIATLEGHFTEVWGPSEVDHSLYGVPEPEVGGRFSCRQLEPEFVLSTLKACENSAPGPDRLTYYHWRMADPNAKLLTAIYNGCLKAGRIPQAWKKSKTILLPKTSTPSGIHDWRPIALTQTIYKVFARCLATLLSSYIQENGSLCQSQKGFMPHDGVFEHNFVLNSRIEDARSGKGDLAIAWLDCSNAFGSVSHDAIAPALLAIGVDDHLTQLIVDIYRSSSTQLVTEEGLTSEIPINSGVKQGCPLSGLLFNIIIDPVLRAIQADDCNRHQVLAYADDLTILACSESELQALVDRTCMELRKLRILVNGKKCAAMYMSGRKPVGTRKLSIRIGNSTIRCLSDGGHYAFLGKPVGFMVPSQGSEMLRLIDMGKAITSSRLAPWQRLDALKSFFYPALTHAMRTAQFQKTEWEKLDNIMRAEIKKTAGIPQEAANEYLYGPPRAGCLGIPIAAEEYELHTICNVSRLLLSDDTIIADLARARVVNMCSRRIGKTPSNDDISEFLSGKCDGPYRSTSNALANEFTRARASTRRLGVAWDFANGTPSVILNDKTLKTSKKNTLSKQIRENLRHKRLIDLIAHPHQGKVTECTSLDPASNHFLQNGDYCRFADWRFIHKARLGLVPLNGYNRERDGPDALCRHCNRNTRETLPHVLNHCGPSSALIIKRHNAIQERVRKAAAYKFDILSDNKQIHSTKLRPDLILQHKVTRKVYIVDITIPFDNRGSAFAKARDAKINKYKSLIPLLAEKHRAPEALIVPFVIGALGSWDPGNNGFLKILCSRKYGQNFKKLCVSDAIAWSRDIYAFHTDPKARTDFYTSKPFLTPKQITPEMVLRLQKRLLPHLWRTNT

SEQ ID NO: 31300 - protein, 970 aa, Alatina alata
MITMRIIFPTLMRNRKVFPKCRNWKMLSGVKLPKNSEEWSLANDYFKQLLAYCENINNLNDIISSVQRTVYDYFLLRCGPVTKHNLSKFEAKYSDKSNRQLKVALRLLKSGTNLQEVQFVSKLLRTRLSKNTINCQSTLSHEEKIKTNFWKYCKATFEPSTEANQPSFDEATCWTYFKSKLKSLNPRRSFVIPSWIPKLPSPTYKFDLSSPKFTEIRKIIGRMRSASSPCPLDQISVIMLKRCPILQTILVKILDKAWSSREFPAIWKNATTVLIHKKGPTSDPENFRPITLQNVFSKVFTSWIRNRLCKFLVANGFVDCSIQKGFWSGISGTIEHVSVMSSIINHARRHQRSVNITLLDLKNAFGEVHHNLIKSVLHYHHIPDDFQAIIASLYQDFSISITAKKFTTCPIPVKRGVLQGDCLSPILFNMCFNTLMQTIKQDKLTKLGYMLNTQGAPINCLQFADDTAIISSTPSDNQLLLNLFYKWSVWADFKFRIEKCQAFGLKKSRTMIEQYEPYLLLNTQQIPVVAIGSSFKYLGKQFNFKMTNGHAKSDIINKLQDLLPAVDKLPIHPRFKLKILNSYVYSKLRWILSIYSFELSWLKSSCDSLVSYYIRRWFRYHPGGNISHLQLPSKYLGLKICLLTDIFKLCQASTRSLLRFSKDPKIVEIFQNTSCKNIITNSMVLSNSIVAAEPHTRSKKLTQVLTDQREQKIWSDFIQLKKQSILIKYLTQTCSVSHIRKWQDISSKLPANIFTFCRRALILALPSNANLKVWNMIPSNLCNLCKTKAQTQFHILANCETSVNQGRFKWRHDSVLNTIATHLSNVVSNTVTIFIDLPGYRCPSTFFESLRPDIIIFKKEGSKTKLTAIELTVCFETNLDKSRNYKIQKYSSLQNDLKQRVDHFELLTMEVSTLGFYGRNITDVAKVFTEFDLDTERILKKCSEVAVRSSYYLFNRRNKDWTFPSNLCFY

SEQ ID NO: 31301 - protein, 1121 aa, Alatina alata
MFSLRLLAFIGLLFLCCQFSYATICDFCGRDFVTVNRHIWRCKQRLQDPDGNLNSVHRGLVSPRSGTLSLQSTTVVPLQIERTFANLNGEIEDQQDPPDIRNDENHPSQRLTVDKFTCLCGKKCKGLRGLQAHKRACKIIDSDDFKELFNLQDNHEDYISESFEEQESFPDMQKLEMLSGVKLPKNSEEWSLANDFFKQLLSYCDNIDNLNDTISAVQRTVYEYFLLRCGPVSKANLSKFEAKYSDLSNRQLKIALRTLKSGNNLQEVQFVSKLLRTRLSKHTSIHQSSLNHEEKVKCNFWKYCKTTFEPSTEANQPSFDESTCWSYFKSKLKSLNPRRSFVIPAWIPKLPSPTHEFDLSSPTFTEIRKIIGRMRSASSPCPLDQISVIMLKRCPILQTIVVKILDKAWSSREFPAIWKNATTVLIHKKGATSDPENFRPITLQSVLSKVFTSWMRNRLCKFLVANGFVDRSIQKGFWSGISGSVEHVSVMSSIINHARRHQRSVNITLLDLKNAFGEVHHNLIKSVLQYHHIPDDFQALIVSLYQEFSISVTARKFTTYPIPVNRGVLQGDCLSPILFNMCFNTLMQTIKQEKLTRLGYVLNNQGAPINWLQFADDTAIISSTPSDNQLLLNLFYKWSIWADFKFRIEKCQAFGLKKSRTMIEQYEPYLLLNTQQIPAVAIGISFKYLGKQFNFKMTNGHAKSDIINKLQDLLPAVDKLPIHPRFKLKILNSYVYSKLRWILSIYSFDLSWLKSSCDSLVSYYVRRWLRYHPGGNISHLQLPSKYLGLKICLPTDIFKLCQASTRSLLRFSKDPTIVEIFQNTSCKNIITDSMVLSNSIVAAEPHTRSKKLTQVLTDQREQKIWSDFIQLKKQSILIRFLTQTCSVSHIRKWQDISSKLPANIFTFCRRALILALPSNANLKVWNMIPSNLCNLCKTKSQTQFHILANCETSVNQGRFKWRHDSVLNTIATHLSNVVSNTVTIFIDIPGYRCPSTLFESLRPDIVIFKKEGSKRKLTAIELTVCFETNLEKSRNYKIQKYSSLRHDLKQRVDHFELLTMEISTLGFYGRSITDVAKVFTEFDLNTERILRKCSEVAIRSSYYLFNRRNKNWTFPSNLCFY

SEQ ID NO: 31302 - protein, 944 aa, Photinus pyralis
MLPNYLTNTSTLEHLNLLIYTAALTVVTLNKQTITLVQTINRSNRKPKWQLRLEKRIKDLRQTIGRLTQYAQGNSSKRIIKHVQKIIHNDKETLIEALDTYKQKLAVYTTRLRRYKDSRLTKIQNTQFSRNEKSFYRNLEDCEELNVTPPSGKEIQQFWENIWSRHKTHNLEGTWIVTEQERNKNLAQQLDHVVTQEELQQTLQKSYNWKTPGIDYIQNFWYKNFTSLHKLLTEHINKVIMEPQTMPSFLTQGKTFIKPKNGDTQNPANYRPITCLCTLYKIITSIITNKIEKHLTKHSILTAEQKGGRKHSRGCKEPIIIDSIIMQQTQKQHRNLVACYIDYKKAFDSIPHSWLLKVLNIYKIDRHIQNFLHTIMQTWKTKILVANSSTKIETESIEINTGIFQGDSLSSLWFCLCLNPLSNLLNDTTYGFKIKDQQAGQYTINHLMYMDDIKVYANNKTHMQALLRIIGEFTKDTGMEFGINKCKLLYIRKGTYETNQTPETLNNETLQNMAPEETYKYLGFEQNTNINHSRLKQQLKDKYKHRLTLLLKSKLNSKNLFKAINTYAAPVIGYSFGIIRWSHTDIDELNRLNRTQLTRYRKLHPNSCIERITISRPEGGRGLVDFHTLYNSEIDNLRQYFHSKDTPLHRTITKADRRYTPLNLHEEHAQLERSHTITQKKEEWSRKTLHGKHYNIVQNPYIDQELTYKWLTMGQIYPETEGFILAIQDNVIATRNYRKFIIKEAIESDTCRKCHQTTENIDHITGSCKLLAGTDYTERHNAAAKIIHQELAHKHNLIQTKRVPYYTYLPDNVLENETHRLYWDRTIYTDKTVTSNRPDITLIDKVAKQTYIIDIAVPNDVNVIKKEQEKVTKYTPLAIELKEVWRQEGVNIVPLVISVTGITSKNFTRHLKTLDLNTYTHTNMQKAIILKTSSIVRTFLHQIQ

SEQ ID NO: 31303 - protein, 909 aa, Lichenostomus cassidix
MEEYNDDLLKVRKEKKDKGSKHLKKGKPPGKGKATQWMKKRAVKRGHYLRFQKLFHKDRGKLARIILDDIEALKCEIPASEVYTAFKSRWEYIQYSNLDGIFKGFGKFRGRAGANNTAFHDLITDKEIEKNIKETAKRTAPRPDDISLEELERLDTDFSRLVEIYNLWLMTAIIPDSIKECRTATDVYTVFKSQWESLGTFKGFGEFCGTATADNSVFVSLITAKEVQKNFSEMARRTAAGPDGISLDELEKLDTGFSRLAEMYNLWLMSTNIPDTIKQCRMVLLPKSNQQERLKDINNWRSITIGLVILRLFSRILTARLTKACPLHPRQRGFIRAVGCSENLKLLQLLIKNAKKDRKAIGVVFVDIAKAFDTVSHDHIIKGLQQRKIDSHVVQLIQNMYENTITRIVTKEEKSTPIKILKGVKQGDPMSPLLFNLALDPLLCKLEEKGKGFHQGGHTVTSMAFADDLVLLSDSWEGMKRNIEILEQFCDLTGLKMQGGKCHGFYIKPTSEPYTINDCPAWTINNVQLNMITPGEAEKYLGMLVDPWVGIVKQDIVDKIKIWIEKIEQSPLKPFQKLDILKVYTLPRLFYLADHMDTPLGILEAVDLQVKSAVKKWLHLPACTCDALLYSSTRDGGLGITKLAGLIPSIQARRLHRLVHLSDQVLKDILRNEDVQLIYNKLWTRAGGSLDVIPSIWDQPPVLVGPDLEGLEKLSEWERPTPKPKFPSPRNYRNLEFERWTDLVSQGRSIIVFKNDTTSNFWINNYRYIPHRKLLTALQLRANVYPTREFLARGRQEQIYKNCRHCNASIETCSHVIGKCPSTQDARIKRHNDICSVLSKEAANYNWTVFEESHIRDDSGQLFKPDPVFVKEGTAYVVDVTIRCEKSDTYLEKAAEEKVNKYHHLRTQI

SEQ ID NO: 31304 - protein, 1121 aa, Lichenostomus cassidix
MTMGRLWLYHVSIGTQTDPNDWKDIKVRTLERVECDIQLPKRLEFINTHMNVERGSDYVSDYRSLMDFPEIYEELPLQSSDILSLRVEHTGDVDDRKGGDVPSKGGEELEAGEIPARAPLKGGERSDVGETPIMVVPVKNPTCPKCGTITNKILGLMDHLLRSHGIRTVNFQCAKCGKTDQRFHSIICHHAKCRGPAIVTSQGGLLCEICQQSFRSKSGLSQHKRWKHPNERNQERIEAAQPLQKGAPRSVWTLGEENIMLQLLKEHQGDKNVNKLIAERIPSKTLKQIRDKKRTLLKRLEASVMPDPGEEEQVPQGAFAEVAPKITSEGEMGSPSNVMVKYQEQARTLIEQDTICYYKDVYENILSGGGGDLMGLMVNTLEELNDDLTMVQKGQRERGSKYLARGKPSGRGKATQWMKKRAVKRGHYLRFQKLFYKDRSKIARIILDNVEALKCEIPATDVYTVFKSRWESPSTFKGLGEFCGTSMADNSAFESLITAKEVRKNFMEMTKRTAAGPDGISLVELEKMDTDFSRLAEMYNLWLMSTNIPDTIKECRTVLLPKSNLQERLADINNWRPITIGSVILRLFSRILNARLTKACPIHPRQRGFICAAGCSENLKLLQLLLKNAKKYRKAIGVVFVDFAKAFDTVSHGHIIEGLQQRKVDSHIVQLIRNMYENTTTRIITKDEKSAPINILKGVKQGDPMSPLLFNLALDPLLCELEKNGKGFHLDGHTVTSMAFADDLVLLSDSWDGMKENIKILERFCNLTGLRMQGEKCHGFYIKPTSESYTINDCPAWTIDNIQLNMITPGEAEKYLGVLVDPWVGIVKQDIVDKIKIWTERIGQSPLKPLQKVDILKVYTLPRLFYLADHMDTPLGILEAVDLHVKAAVKQWLHLPACTCDALLYSSTRDGGLGITKLAGLIPSIQARRLHRLVQLSDQTLKDVLRMEDVQLMYNKLWTRAGGSLEMIPSIWDQPPVWVGADLEGTEELSEWERSTPKPKFPSPCNYKNLEFKRWTEFMSQGRGIIVFKNDAISNSWINNYRYIPHRKLLTALQLRANVYPTREFLARGRQEQISRNCRYCNASIETCSHVIGKCPSTQDARIKRHNDICSVLSKEAATYN

SEQ ID NO: 31305 - protein, 1261 aa, Lichenostomus cassidix
MTMGRLWLHHISIGTQTDPNDWNDKNVEILERVECDIQLPKKLEFINTYMNVERGSDYASNYRSLVDFPEVYEELPLQSSDLLSLRAEHTDDVDDRKGREVPSKGGEDLDAGETPARAPSKGGDRSDADETPIMVVPVKNPTCPKCGTITNKILGLMDHLLRSHGIRTVNFQCAKCGKTDQRFHSIICHHAKCKGPAIVTSQGGMICDICQQSFRSKSGLSQHKRWKHPKERNQERIEAAQPLQKGAPRSVWTLGEENVMLQLLKEHQGDKNVNKLIAEHIPTKTLKQIRDKKRTLLKRLEVPVMPDPGEEEQVPQGAFAEVAPKITSEGVMGSPSNVMVKYQDQVRTLLERDTICYYKEVYENILSGGGGDLMGWMVNTLEELNDDLTMVQKGQRERGSKYLARGRPPGRGKATQWMKKRAVKRGHYLRFQKLFYKDRSKIARIILDNVDALKCEIPAIDVCTVFKSRWESSSNFKGLGEFCSTSMADNSAFESLITANEVRKNFMEMNKCTAAGPDGISLGELEKLDTDFSRLAEIYNLWLMSTIIPDTIKECRTVLLPKSNLRERLKDINNWRPITIGSVILRLFSRILNVRLMKACPIHPRQRGFISAAGCSENLKLLQLLLKNAKKHRKEIGVVFVDFAKAFDTVSHGHIIEGLQQRKVDSHIVRLIRNMYENTTTRIITKDEKSAPINILKGVKQGDPMSPLLFNLALDPLLCELEKNGKGFHLYGHTVTSMAFADDLVLLSDSWEGMKENIKILERFCHLTGLRMQGEKCHGFYIKPTLESYTINDCPAWTIDNIQLNMITPGEAEKYLGVLVDPWVGIVRQDIVDKIKLWTERIGQSPLKPLQKVDILKVYTLPRLFYLADHMDTPLGILEAVDLHVKAAVKQWLHLPACTCDALLYSSTRDGGLGITKLAGLIPSMQARRLHRLAQLSDQTLKDVLRMEDVQLMYNKLWTRAGGPLEMIPSIWDQPPVWVGADLEGAEELSEWERSTPKPKFPSPCNYRNLEFKRWTELMSQGRGIIVFKNDAISNSWITNYRYIPHRKLLTALQLRANVYPTREFLARGRQEQIFKNCRYCNASIETCSHVIGKCPSTQDARIKRHNDICSVLSKEAATYNWTVFEEPHIRDDSGQLFKPDLVFVKEGTAYVVDVTIRYEKSDTYLENAAEEKVNKYHHLKTQIQELTNADEIHFKGFPIGARGKWPPANSGLLVALGLPKTRRAKTSRALATRALMTSVDIVHMFASKSVPIVTSIPTVP

SEQ ID NO: 31306 - protein, 1164 aa, Entomyzon cyanotis
MVRSLRLYHVSIGTQTDPMDWKEIRKPRMLLGMVEREIQLPKRLEFINTFMNIEVGSDYNSDFTSLTDFPDVYEDLPPMSSDTSSLDVEHIGNVADRDGGHVPSIVGGELEIGETPIMIVPVKNPSCPKCGTVTNKILGLMDHLLRSHGIRKVNFQCAKCGKIDQKFHSVICHHAKCKGPTQATTQGDLMCEICKQPFRTKSGLSQHKRWKHPDERNQERIAASQPLQKGAPKTVWTLGEENIMLQLLREHPGDKNINKLIAERIPTKTLKQIRDKKRSLLKRLETSATPGPGEGDQATQETFTDITQGAIAEGDVGSPSMLMELYQRQARTLIEEDVICHHKTIYENILSGTGGDLFGLVSNMLEELNDDILMMRKVRKDKGIIHLKKEKPTGGDKVTQWMRKRAVKRGHYLRFQKLFYKDRSKIARIILDNVEALKCEISTTEIYAVFQSRWESPGNFKGLGEFCGTVKADNSVFTSLITAKEVKKNFDEMVRRTAPGPDGILLEELQKLDTEFSRLMEIYNLWLMSTIIPDTIKECRTVLLPKSIHPEKLKDINNWRPITIGSIILRLFSRILTARLTKACPIHPRQRGFVRAAGCSENLKLLQLLIKNAKKDRREIGVVFVDIAKAFDTVSHDHIIKGLQHRQVDSHIVRLIQNMYENSITRIVTKDENSAPIKMLKGVKQGDPMSPLLFNLALDPLLCYLEENGKGFHQVGHKITTMAFADDLVLLSDSWGGMKWNIEILERFCDYTGLKMQGEKCHGFFIKPTTESYTINDCPAWTINDTQLNMITPGESEKYLGLLVDPWVGIVKQDIVDKIKTWTDKIEQSPLKPFQKLDLLKVYTLPRLYYLADHMDTPLGILEAVDLHVKSTVKKWLHLPACTCDALLYSSTRDGGLGITKLAGLIPSVQARRLHRLVQLSDQVLKDVLKNEDVQLIYNKLWIRAGGNAEEIPSIWDQPPIMVGHEWEGLEELTEWERPRLTPKFPNPCKYKDLEFKRWTDLVSQGRGIIVFKNDTISNSWITNYRYIPHRKLLTALQLRANVYPTREFLARGRQEQVYKNCRYCNASIETCSHVIGKCPSTQDARIKRHNDICGVLSQAAAEYNWTVFEEPHIRDEAGQLFKPDLVFVKERTAFVVDVTIRYEKSDTYLEKAAEEKASKYQHL

SEQ ID NO: 31307 - protein, 1244 aa, Nothocercus nigrocapillus
MLQSQGFGIVRFISVATQTGEFPIEVARRVPVPVTSAPESGGHFSLTVTIYNSDYGEWGGDLLTNPSNMDCFKDLPEVYEVLATGATPPRVVEEARPTEPVTPSGPAIQPELATPTLGAEGGATEVSTPIVKIPQDHPACPCCGTRVAKITALHDHLRRAHGRRRVLYQCSRCGRTNEKHHSIACHFPKCQGKPTEVEEGPLDASEWRCGECNAAFKTKSGLSQHKRFVHPSTRNVERIEGTRPKGQGLRGKHRSCWTEEETVQLIQLEERFKNTRFINKLIAEHLPTKTAKQISDKRRQLLAAAKTSSPIKGAAAARKGDSSPEMVVVEGLRMEYRRCIGERVSAGSLSAPGLFQRILEGVEDCSEIVTSPMRELVTLARGKLAAARERYHQKHPAKAGPAKKERRWMKRRAVKRGQYLRYQRLFALDRKKLAGIILDNIKAVKCPLPVEDVYEVFRKRWEEVTPYSGLRSFRSVGMADNAAFRLMISPGEVRKNVAEMSKRSAPGPDGLSLRDVLNVDPQGSRLAEAFNLWLMARKVPDELKAARTVLIPKSADPTKLEDINNWRPITIGSVILRLFSRILSARLQRACPMNKRQRGFIAAPGCSENLKLLQALIRSAKKDQRTLGVVFVDLAKAFDTVHHQHIFQVLGQKGVDKHIIDLIRDLYTNCGTTVEVGGQRSERIKILGGVKQGDPLSPILFNLALDPLLCSLEGRGVGFRCGEQLVTSLAFADDLALLSDSWEGMQKNIKVVEDFCQLTGLRVQASKCHGFLIRPTKESYTINDCDPWTIADMQLNMIEPGSSEKYLGLGIDPWIWLSKPELHEALSRWINNIGGAPLKPLQKVDILRGYAVPRLLYSADHAGLSATHLQSLDQTIKSAIKSWLHLPPSTCDAILYVSYRDGGLGLPRLASLIPSIQARRLLRIAQSEDDITRNVVLQEGIQEEVRKAWISAGGRPDKVPSVTEEFPTAAVEAQVAGEASSEWERVAPRTIYPVPCRWRKREMENWANLRSQGRGIKNFENDRISNDWLIHYRGIPHRKLITAIQLRANVYPTREFLARGLGEGASRGCRHCPAEWESCAHIIGYCPAVQEARIKRHNNLCGLLAEEARKLGWEIYMEPHLRDNTNELFKPDLVVVKGIRAIVVDVTIRYESGTTTLSDAAAEKVGKYQHLSEEVRALTSASEIEFVGFPIGARGKWHTGNEILLSNLGLSSGRIKRIARVFSQRALLSSVDIIHIFASWARQV

SEQ ID NO: 31308 - protein, 1222 aa, Cryptolaemus montrouzieri
MMYNLRNKRVNRHCTTITSCRVQDSGRRSCSESESQSPSVSDGSSVISSRNTATQNQVGNNIDTSQPTLDVSTAAQAIMPTTTRAGLPRKRMKWTPEMNAFIMRSYYKITNLESEMRAYRYALHLAFIEKYPELQHISEQRISYQRRTIVKNRLLSSGTLQSIREEVIMELRSENDTHNGIPAGVNENVTDNIEATETNINMERPPEPNQQNKNMYLARSEFNRATTEFSGSNPTKRPKLPELKTNKNTNIILASVNAVFEEYTDLNTLEKIHTLIYCGAVAVLRLHKQQISTTLIQAEPKSVRKPPWQKRLEKDIDYIRAEIGRLTEFLRNRKPSRRLKSHIRNIYRKIGTNTKHPNHKQHIDVYMDTLKQKLQAKAKRLSRYVKCTERKHQNQRFLQNAANFHKENNKTATNNNREVPDAQCLTDYWSSLWSNPNEHNRDAEWITNEEERLDIRRMDFDGITEEEITIVVRATNNWKATGIDNIHNYWYKKFDKLHGALAKQLTYVLQHPKKTPTFLTQGLTYMLPKSDRTQDPSQYRPITCLPTLYKILTSCISNRIYQHLDDNNILAEEQKGCRKKHQGCKEQLIIDSVIMKQAHVRHRNVHSAFLEYLKAFDSTAHSWLVEVLQIYKIHPALVEFLKTTMTHWRTCLQVNMNNTSIETDEIPIRRGIFQGDVLSPLWFCLAMNPLSSMLNRTGYGFRIKAERNYHTISHLLYMDDIKLYASNKKQLDDLLKTVCEFSADVHMKFGIEKCKTLNIQRGKVKDGETQLPNGDIIQCMRDGETYKYLEYQQARLLNQKQSKEKICSEYSQRLKSVLKSMLNSGNVVKAINTYAIPVLLNSFGIIRWTKTELDDIQRQTRTTLTKYNNHHPKSSVIRTTLKLKEGGRGLIDVVNLHTEQIKTRREFFSAKAVTYDLHRVVSLSDRRYTPLNLTRDYLLNLPFRSDTEEQEQWSRKELHGRHHHEINQPHIDKEASNKWLMKGKLLAETEEFLMAIQDQVIATNNYKKFIMKDGTLQTDKCRKCHIRSETIQHITSGCEQLANTEYLHRHNQVCNIIHQKLAHKYGLLNTFQPYYKYQPAPVLENDSIRLYYDRPVITDRMVTNNRPDIVVYDKRARTAMLVDVAIPNNNNVLNKFQEKKSKYTDLAFEIEQMWHLDKIYIVLVIVSLTGLIPKTLHDSLNKLELHKNTYIEMQKAVILKGLHGFPRAKNGLFSIIFFTYRK

SEQ ID NO: 31309 - protein, 900 aa, Cryptolaemus montrouzieri
MFEEYTDQNTLEKIHTLIYCGAVAVLRLHKQQISTTLIQSEPKSVRKPPWQKRLEKDIDNIRAEIGRLTEFLRNRKPSRRLKSHIRKIYRKIGTNTKHPDHKQHIDVYMDTLKQKLQAKAKRLSRYVKCTERKHQNQRFLQNAANFHKGNNKTATNNNREVPDAQCLTDYWSSIWSNPKEHNRDAEWITNEKERLDIRHMDFDEITEEEITTVIGATNNWKATGIDNIHNYWYKKFDKLHGALAKQLTYVLQHPKKTPTFLTQGLTYMLPKSDRTQDPSQYRPITCLPTLYKILTSCISNRIYQHLDDNNILAEEQKGCRKKHHGCKEQLIIDSVIMKQAHVGHRNVHSAFLDYLKAFDSTAHSWLVEVLQIYKIHPALVEFLKTTMTHWRTSLQVNMNNKSIKTDEIPIRRGIFQGDSLSPLWFCLAMNPLSSMLNRTGYGFRIKAERNYHTISHLLYMDDIKLYASNKKQLDDLLKTVSEFSADVHMKFGIEKCKTLNIQRGKVIDGETQLPNGDIIQCMRDGETYKYLGYQQARLLDQKQSKEKIRSEYSQRLKSVLKSMLNSGNLVKAINTYAIPVLLYSFGIIRWTKTELDDIQRQTRTMLTKYNNHPKSSVIRTTLKRKEGGRGLIDVVNLHTEQIRNLREFFSAKALTSDLHRVVSLADKGYTPLNLAIRDDLLNLPFLSDTEKQEQWSRKELHGRHHHEINQPHIDKEASNKWLMKGELFAETEGFLMAIQDQIIATNNYKKFIMKDGTLQTDRCRKCHIRSETIQHITSGCEQLANTDYLHRHNQVCNIIHQKLAHKYGLLNTFQPYYKYQPAPVLENDSIRLYYDRPIITDRMVTNNRPDIVVYDKRAKTAMLVDVAIPNNNNVLNKFQEKSPNTQTLLLRSSRCGTSTK

SEQ ID NO: 31310 - protein, 927 aa, Cryptolaemus montrouzieri
MPKTTGENIDNIRAEIGHLTEFLRNRKPSRRLKSHIRKIYRKIGTNTKHPDHKQHIDVYMDTLKQKLQAKAKRLSRYVKCTERKHQNQRFVQNAAHFHKGNNKTATNNNREVPDAQCLTDYWSSLWSNPKEHNRDAEWITNEKESLDIRHMDFDGITEKEITTVIRATNNWKATGIDNIHNYWYKKFDKLHGALAKPLTYFLQHPKKTPTFLTQGLTYMLPKSDRTHDPSQYRPVTCLPTLYKILTSCISNRIYQHLDDNNILADEQKGCRKKQHGCKEQLIIDSVIMKQAHVGHRNVHSAFLDYLKAFYSTAHSWLVELLQIYKIHPALVEFLKTTMTHWRTSLQVNMNNKSIKTDEINIRRGIFQGDSLSPLWFCLAMIPLSSMLNSTGYGFRIKAERNYNTISHLLYMDDIKLYASNKKQLDDLLKTVSEFSADVHMKFGIEKCKTLNIQRGKVIDGETQLPNGDIIQCMRDGKTYKYLGYQQARLLDQKQSKGKIRSEYSKRLKSVLKSMLNSGNLVKAINTYAIPVLLYSFGIIRWTKTELDDIQRQTRTMLTKYNNHHPKSSVIRTTLKRKEGGRGLIDVVNLYTEQIRNLREFFSAKALPADPHRVVSLADEGYTPLNLATRDDLLNLPFLSDTEKQEQWSRKKLHGRHHHEINQRHIDKEASNKWLMKGELFAETEGFLMAIQDQVITTNNYKKFIMKYGTLQTDKWRECHIRSETIQHITSGCEQLANTEYLHRHNQVCNIIHQKLAHKYGLLNTFQPYYKYQPAPVLENDSIRLYYDRPVITDRMVTNNRPDIVVYDKGARPAMLVDVAIPNNNNVLNKFQEKKSKYTDLAIEIKQMWHLDKIDIVPVIVSSTGLISKTLHDCLKKLELHKKTYIEMQKAVILNTCRIVRKFMSSILSSLFPLIAKSGEGKLYPANS

SEQ ID NO: 31311 - protein, 848 aa, Cryptolaemus montrouzieri
MDTLKQKLQAKAKRLSRYVKCTERKHQNQRFLQNTANFHKGNNKTATNNNREVPDAQCLTDYWSSLWSNPKEHNRDAEWITNEKERLDIRHMDFDGITEEEITTVIGATNNWKATGIDNIHNYWYKKFDKLHGALAKQLTYVLQHPNKTPTFLTQGLTYMLPKSYRTQDSSQYRPITCLPTLYKILTSCISNRIYQHLDDNNILAEEQKGCRKKHHGCKEQLIIDSVIMKRAHVGHRNVHSAFLDYLKAFDSTAHSWLVEVLQIYKIHPALVEFLKTTMTHWRTSLQVNMNNKSIKTDEIPIRRGIFQGDSLSPLWFCLAMNPLSSMLNRTGYGFRIKAERNYHTISHLLYMDDIKLYASNKKQLDDLLKTVSEFSADVHMKFGIEKCKTLNIQRGKVIDGETQLPNGDIIQCMRDCETYKYLGYQQARLLDQKQSKEKIRSEYSQRLKTVLKSMLNSENLIKAINTYAIPVLLYSFGIIRWTKTELDDIQRQTRTMLTRYNNHHPKSSVIRTTLKRKEGGRGLIDVVNLHTEQIRNLSEFFSAKALTSDLHRVVSLADKGYTPLNLATRDDLLNLPFLSDTEKQEQWSRKELHGRHHHEINQPPIDKEASNKWLMKGELFAETEGVLMAIQEQVIATNNYKKFIMKDGTLQTDKWSKCHLRSETIQHITSGCEQLANTEYLHRHNQVCNIIHQKLAHKYGLLNTFQPYYKYQPAPVLENDSIRLYYDRPVITDRMVTNNKPDIVVYDRRARTAMLVDVAIPNNNNVLNKFQEKKSKYIDLAIEIKQMWHLDKIDIVPVIVSSTGLIPKTLHDCLKKLELHKNIYIEMQKAVILNTCRIVRKFMSSIL

SEQ ID NO: 31312 - protein, 1159 aa, Cryptolaemus montrouzieri
MMYNLRNKRVNRHCTTITSCRVQDLGRGSCSESESQSPSVSDGSSVISSRDTATQNRVGNNINTSQPTLDVSTAAQAIMPTTTRAGLPRKRMKWTPEMNTFIMRSYYKITNLESEMTAYRFALHLAFIEKYPELQHISKQRISDQRRTIVKNRLLSSETLQSLREEVIMELRSENDTHNGIPAGVNESVTDNIEATETNINMERPLEPNQQNEYTYLARSELNRAITEFSGSNPTKRPKLPKLKTNKNTNIILASVNSMFEEYTDQNTLEKIHTLIYCGAVAVLRLHKQQISTTLIQAEPKSVRKPPWQKRLEKDIDNIRAEIGRLTEFLRNRKPSRRLKSHIRKIYRKIGTNTKHPDHKQHIDVYMDTLKQKLQAKAKRLSRYVKCTERKHQNQRFLQNAANFHKGNNKTATNNNREVPDAQCLTDYWSSIWSNPKEHNRDAEWITNEKERLDIRHMDFNGITEEEITTVIGATNNWKATGIDNIHNYWYKKFDKLHGALAKQLTYVLQHPKKTPTFLTQGLTYMLPKSDRTQDPSQYRPITCLPTLYKILTSCISNRIYQHLDDNNILAEEQKGCRKKHHGCKEQLIIDSVIMKQAHVGHRNVHSAFLDYLKAFDSTAHSWLVEVLQIYKIHPALVEFLKTTMTHWRTSLQVNMNNKSIKTDEIPIRRGIFQGDSLSPLWFCLAMNPLSSMLNRTGYGFRIKAERNYHTISHLLYMDDIKLYASNKKQLDDLLKTVSEFSADVHMKFGIEKCKTLNIQRGKVIDGETQLPNGDIIQCMRDGETYKYLGYQQARLLDQKQSKEKIRSEYSQRLKSVLKSMLNSGNLVKAINTYAIPVLLYSFGIIRWTKTELDDIQRQTRTMLTKYNNHHPKSSVIRTTLKRKEGGRGLIDVVNLHTEQIRNLREFFSAKALTSDLHRVVSLADKGYTPLNLATRDDLLNLPFLSDTEKQEQWSRKELHGRHHHEINQPHIDKEASNKWLMKGELFAETEGFLMAIQDQVITTNNYKKFIMKDGTLQTDRCRKCHIRSETIQHITSGCEQLANTDYLHRHNQVCNIIHQKLAHKYGLLNTFQPYYKYQPAPVLENDSIRLYYDRPIITDRMVTNNRPDIVVYDKRAKTAMLVDVAIPNNNNVLNKFQEKSPNTQTLLLRSSRCGTSTK

SEQ ID NO: 31313 - protein, 1214 aa, Cryptolaemus montrouzieri
MMYNLRNKRVNRHCTTITSCRVQDLGRRSCSESESQSPSVSDGSSVISSRDTATQNQVGNNINTSQPILDVSTAAQAIMPTTTRAGLPRKRMKWTPEMNTFIMRSYYKITNLESEMTAYRYALHLAFIEKYPELQHISEQRISDQRRTIVKNRLLSSETLQSLREEVIMELRSENDTHNGIPAGVNESVTDNIETTETNINMERPPEPNQQNEYMYLARSELNRAITEFSGSNPTKRPKLPKLKTNKNTNIILASVNSVFEEYTDQNTLEKIHTLIYCGAVAVLRLHKQQISTTLIQAEPKSVRKPPWQKRLEKDIDNIRAEIGRLTEFLRNRKPSRRLKSHIRKIYRKIGMNTKHPDHKQHIDVYMDTLKQKLQAKAKRLSRYIKCTERKHQNQRFLQNAANFHKGNNKTATNNNREVPDAQCLTDYWSSLWSNPKEHNRDAEWITNEKERLDIRHMDFEGITEEEITTVVRATNNWKATGIDNIHNYWYKKFDKLHGALAKQLTYVLQHAKKTPTFLTQGLTYMLPKSDRTQDPSQYRPITCLPTLYKILTSCISNRIYQHLDDNNILAEEQKGCRKKHHGCKEQLIIDSVIMKQAHVGHRNVHSAFLDYLKAFDSTAHSWLVEVLQIYKIHPALVEFLKTTMTHWRTSLQVNMNNKSIKTDEIPIRRGIFQGDSLSPLWFCLAMNPLSSMLNRTGHEFKIKTERNYHTISHLLYMDDIKLYASNKKQLDGLLKTVSEFSADVHMKFGIEKCKTLNIQRGRVIDGETQLPNGDIIQCIKNGETYKYLGYQQARLLDQKQSKEKIRSEYSQHLKTLLKSMLNLGNLVKAINTYAISVLLYSFRIIRWTKTELDDIQRQTRTMLTKYNNHHPKSSVIRTTLKRKEGGRGLIDVVNLHIEQIRNLREFFSAKALTSDLHRVVSLADKGYTPLNLATRDDLLNLPFLSDTEKQEQWSRKELHGRHHHEINQPHIDKEASNKWLMKGELFAETEGFLMTIQDQVIATNNYKKLIMKDGTLQTDKCRKCHIRSETIQHITSGCEQLANTDYLHGHNQVCNIIHQKLAHKYGLLNTFQQYYKYQPAPELENDSIRLYYDRPVITDRMVTNNRPDIVVYDKRVRTAMLVDVAIPNNNNVLNNFQEKKSKYTDLAIEIKQMWHLDKIDIVPVIVSSTGLIPKTLHDSLKKLELHKNTYIEMQKAVILNTCRIVRKFMSSIL

SEQ ID NO: 31314 - protein, 848 aa, Cryptolaemus montrouzieri
MDTLKQKLQAKAERLSRYVKCTERKHQNQKFLQNAANFHEGNNKTATNNNREVPDAQCLTDYWSSLWSNPKEHNRDAEWITNEKERLDIRHMDFDGITEEEITTVVRATNNWKATGIDNIHNYWYKKFDKLHGALAKQLKYVLQHPKKTPTFLTQGLTYMLPKNDRTQDPSQYRPITCLPTLYKILTSCISNRIYQHLDDNNILAEEQKGCRKKHHGCKEQLIIDSVIMIQAHVGHRNVHSAFLDYLKAFDSTAHSWLVEVLQIYKIHPSLVEFLKTTMTHWSTSLQVNMNNKSIKTDEIPIRRGIFQGVSLSPLWFCLAMNPLSSMLNRTGYGFRIKAQRNYHTISHLLYMDDFKLYASNKKQLDDLLKTVSEFSADVHMKFGIEKCKTLNIQRGQVIDGETQLPNGDIIQCIRDGETYKYLGYQQARLLDQKQSKEKIRSEYSQRLKSVLKSMLNSGNLVKAINTYAIPVLLYSFGIIRWTKTKLDDIQRQTRTILTKYNNHHPKSSVIRTTLKRKEGGRGLIDVINLHTEQIKNLREFFSEKALTSDLHRAVSLADKGYTPLNLATGDDLLNLPFLSDTEKQEQWSRMELHGRHHHEINQPHIDKEASNKWLMKGELFAKTEGFLMAIQDQVIATNNYKKFIMKDGTLQTDRCRKCHIRSETIQHITSGCEQLANTDYLHRHNQVCNIIHQKLAYKYGLLNTFQPYYKYQPAPVLENDSIRLYYDRPIITDRMVTNNRPDIMVYDNRAKTAMLVDVAIPNNNNVLNKFQEKKSKYTDLAIEIKQMWHLEKIDIVPVIVSSTGLIPKTLHDSLKKLELHKNTYIEMQKAVILNTCRIVRKFMSSLL

SEQ ID NO: 31315 - protein, 1136 aa, Cryptolaemus montrouzieri
MPTTTRAGLPRKRMKWTPEMNTLIMRSYYKITNLESEMTAYRYALHLAFIEKYPELQHISEQRISDQRRKIVKNRLLSSETLQSLREEVIMELRSENDTHNGIPAGVNESVTDNIEVTETNINMERPLEPNQQNEYTYLARSEFNRAITEFSGSNPTKRPKLPKLKTNKNTNIILASVNSMFEEYTDQNTLKKIHTLIYCGAVAVLRLHKQQISTTLIQAEPKSVRKPQWQKRLEKDIDNIRAEIGRLTEFLRNRKPSRRLKSHIRKIYRKIGTNTKHPDHKQHNHVYMDTLKQKLQAKAKRLSRYVKCTERKHQNQRFLQNAANFHKGNNKTATNNNREVPDAQCLTDYWSSLWSNPKEHNRDAEWITNEKERLDIKHMDFDGITEEEITTVIRATNNWKATGIDNIHNYWYKKFDKLHGALAKQLTYVLQHPKKTPTFLMQGLTYMLPKSDRTQDPSQYRPITCLPTLYKILTSCISNRIYQHPDDNNILAEEQKGCRKKHHGCKEQLIIDSVIMKQAHVGHRNVHSAFLDYLKAFDSTAHSWLVEVLQIYKIHPALVEFLKTTMTHWRTSLQVNMNNKSIKTDEIPIRRGIFQGDSLSPLWFCLAMNPLSSMLNRTGYGFRIKAEINYHTISHLLYMADIKLYASNKKQLDDLLKTVSEFSADVHMKFGIEKCKTLNIQRGKVIDGETQLPNGDIIQCMGDGETYKYLGYQQARLLNQKQSKEKIRSEYSQRLKSVLKSMLNSGNLVKAINTYAIPVLLYSFGIIRWTKTELDDIQRQTRTMLTKYNNHHPKSSVIRTTLKRKEGGRGLIDVVNLHTEQIRNLREFFSAKALTSDLHRVVSLADRGYTPLNLATRDDLLNLPFLSDTEKQEQWSRKELHGRHHHEINQPHIDKEASNKWLMKGELFAETEGFLMAIQDQVIATNNYKKFIMKDGTLQTDKCRKCHIRSETIQHITSGCEQLANTEYLHRHNQVCNIIHQKLAHKYGLLNTFQPYYKYQPAPVLENDSIRLYYDRPVITDRMVTNNRPDIVVYDKRARTAMLVDVAIPNNNNVLNKFQEKKSKYTDLAIEIKQMWHLDKIDIVPVIVSSTGLIPKTLHDSLKKLELHKNTYIEMQKAVILNTCRIIRKFMSSIL

SEQ ID NO: 31316 - protein, 848 aa, Cryptolaemus montrouzieri
MDTLKQKLQAKAKRLSRYVKCTERKHQNQRFLQNAANFHKRNNKTATNNNREVSDAQCLTDYWSSLWSNPKEHNRDAEWITNEKERLDIRHMDFDGITEEEITTVVRATNNWKATGIDNIHNYWYKKFDKLHGALAKQLTYVLQHPKRTPTFLTQGLTYMLPKSDRIQDPSQYRPITCLPTLYKILTSCISNRIYQHLDDNNILAEEQKGCRKKHHGCKEQLIIDSVIMKQAHVGHRNVHSAFLDYLKAFDSTAHSWLVEVLQIYKIHPSLVEFLKTTMTHWRTSLQVNMNNKSIKTDEIPIRRGIFQGDSLSPLWFCLAMNPLSSMLNRTGYGFRIKAERNYHTISHLLYMDDIKLYASNKKQLDDLLKTVSEFSADVHMKFGIEKCKTLNIQRGKVIDGKTQLPNGDIIQCIRDGETYKYLGYQQARLLDQKQSKEKIRSEYSQRLKSVLKSMLNSGNLVKAINTYAIPVLLYSFGIIRWTKTELDDIQRQTRTMLTKYNNHHPKSSVIRTTLKRKEGGRVLIDVVNLHTEQIKNLREFFSEKALTSDLHRAVSLADKGYKPLNLATRDDLLKLPFLSDTEKQEQWSRKELHGRHHHEINQPHIDKEASNKRLMKGELFAETEGFLMAIQDQVIATNNFKKFIMKDGTLQTDRCRKCHIRSETIKHITSECVQLANTDYLHRHNQVCNIIHQKLAHKYGLLNTFQPYYKYQPAPVLENDSIRLYYNRPIITDRMVTNNRPDIVVYDKRAKTAMLVDVAIPNNNNVLNKFQEKKSKYTDLAIEIKQMWHLEKIDIVPVIVSSTGLIPKPLHDSLKKLESHKNTYVEMQKAVILNTCRIVRKFMSSIL

SEQ ID NO: 31317 - protein, 1213 aa, Cryptolaemus montrouzieri
MMYNLRNKRVNRHCTTITSCRVQDLGRGSCSESESQSPTVSDGSSVISSRDTATRNQVGNNINTSQPTLDVSTAAQAIMPTTTRAGLPRKRMKWTPEMNSFIMRSYYKITNLESEMTAYRYALHLAFVEKYPELQHISEQRISDQRRTIVKNRLLSSETLQSIREEVIMELRSENDTHNGIPAGVNESVTDNIEATETNINMERPPEQNQQDEYMYLARSELNRAITEFSGSNPTKRPKLPKLKTNKNTNIILASVNSVFEKYTDQNTLEKIHTLIYCGAVAVLRLHKQQIYTTLIQAEPKSVRKPPWQKRLKDIDNIRAEIGRLPEFLRNRKPSRRLKSHIRKIYRKIGTNTKHPDHKQHIDVYMDTLKQKLQAKAKRLSRYVKCTERKHQNQRFLQNAANFHKGNNKTATNNNREVPDAQCLTDYWSSLWSDPKEHNRDAEWITNEKERLDIRHMDFDGITEEEITTVVRATNNWKATGIDNIHNYWYKKFDKLHGALAKQLTYVLQHPKKTPTFLTQGLTYMLPKSDRTQDPSQYRPITCLPTLYKILTSCISNRIYQHLDDNNILAEEQKGCRKKHHGCKEQLIIDSVIMKQAHVGHRNVHSAFLDYLKAFNSTAHSWLVEVLQIYKIHPSLVEFLKTTMTHWRTSLQVNMNNKSIKTDEIPIRRGIFQGDSLSPLWFCLAMNPLSSMLNRTEYGFRIKAERNYHTISHLLYMDDIKLYASNKKQLDDLLKTVSEFSADVHMKFGIEKCKTLNIQRGKVIDGETQLPNGDIIQCMRDGETYKYLGYQQARLLDQKQSKEKIRLEYSQRLKSVLKSMLNSGNLVKAINTYAIPVLLYSFGIIRWTKTELDDIQRQTRTMLTKYNNHHPKSSVIRTTLKRKEGGRGLIDVVNLHTEQIKNLREFFSEKVLTSDLHRAVLLADKGYTPLNLATRDDLLNLPFLSDIEKQEQWSRKELHGRHHHEINQPHIDKEASNKWLMKGELFAETEEFLMAIQDQVIATNNYKKFIMKDGTLQTDRCRKCHIRSETIQHITSGCEQLANTDYLHRHNQVCNIIHQKLAHKYGLLNTFQPYYKYQPAPVLENDSIRLYYDRPIITDRMVTNNRPDIVVYDKRAKTAMLVDVAIPNNNNVLNKFQEKKSKYTDLAIEIKQMWHLEKIDIVPVIVSSTGLIPKTLHDSLKKLELHKNTYVEMQKAVILNTCRIVRKFMSSIL

SEQ ID NO: 31318 - protein, 848 aa, Cryptolaemus montrouzieri
MDTLKQKLQAKAKRLSRYVKCTERKHQNQRFLQNAANFHKGNNKTATNNNREVPDAQCLTDYWSSIWSNPKEHNRDAEWITNEKERLDIRHMDFDGITEEEITTVIGATNNWKATGIDNIHNYWYKKFDKLHGALAKQLTYVLQHPKKTPTFLTQGLTYMLPKSDRTQDPSQYRPITCLPTLYKILTSCISNRIYQHLDDNNILAEEQKGCRKKHHGCKEQLIIDSVIMKQAHVGHRNVHSAFLDYLKAFDSTAHSWLVEVLQIYKIHPALVEFLKTTMTHWRTSLQVNMNNKSIKTDEIPIRRGIFQGDSLSPLWFCLAMNPLSSMLNRTGYGFRIKAERNYHTISHLLYMDDVKLYASNKKQLDDLLKTVSEFSADVHMKFGIEKCKTLNIQRGKVIDGETQLPNGDIIQCMRDGETYKYLGYQQARLLDQKQSKEKIRSEYSQRLKSVLKSMLNSGNLVKAINTYAIPVLLYSFGIIRWTKTELDDIQRQTRTMLTKYNNHHPKSSVIRTTLKRKEGGRGLIDVVNLHTEQIRNLREFFSAKALTSDLHRVVSLADKGYTPLNLATRDDLLNLPFLSDTAKQEQWSRKELHGRHHHEINQPHIDKEASNKWLMKGELFAETEGFLMAIQDQVIATNNYKKFIMKDGTLQTDRCRKCHIRSETIQHITSGCEQLANTDYLHRHNQVCNIIHQKLAHKYGLLNTFQPYYKYQPAPVLENGSIRLYYDRPIITDRMVTNNRPDIVVYDKRAKTAMLVDVAIPNNNNVLNKFQEKKSKYTDLAIEIKQMWHLDKIDIVPVIVSSTGLIPKTLHDSLKKLELHKNTYIEMQKAVILNTCRIVRKFMSSIL

SEQ ID NO: 31319 - protein, 1062 aa, Cryptolaemus montrouzieri
MNTFIMRSYYKITNLESEMTAYRYALHLAFIEKYPELQHISEQRISDQRRTIVKNGLLSSETLQSLREEVIMELRSENDTHNGIPAGVNESVTDNIEATETNINMECPLEPNQQNEYTYSARSELNRAITEFSGSDPTKRPKLPKLKTNKNTNIILASVNSMFEEYTDQNTLEKIHTLIYCGAVAVLRLHKQQISTTLIQAEPKSVRKPPWQKRLEKDIDNIRAEIGRLTEFLRNRKPSRRLKSHIRKIYRKIGTNTKHPDHKQHINVYMDTLKQKLQAKAKRLSRYVKCTERKHQNQRFLQNAANFHKGNNKTATNNNREVPDAQCLTDYWSSIWSNPKEHNRDAEWITNEKERLDIRHMDFDGITEEEITTVIGATNNWKATGIDNIHNYWYKKFDKLHGALAKQLTYVLQHPKKTPTFLTQGLTYMLPKSDRTQDPSQYRPITCLPTLYKILTSCISNRIYQHLDDNNILAEEQKGCRKKHHGCKEQLIIDSVIMKQAHVGHRNVHSAFLDYLKAFDSTAHSWLVEVLQIYKIHPALVEFLKTTMTHWRTSLQVNMNNKSIITDEIPIRRGIFQGDSLSPLWFCLAMNPLSSMLDRTGYGFRIKAERNYHTISHLLYMDDIKLYASNKKQLDDLLKTVSEFSADVHMKFGIEKCKTLNIQRGKVIDGETQLPNGDIIQCMRDGETYKYLGYQQARLLDQKQSKEKIRSEYSQRLKSVLKSMLNSGNLVKAINTYAIPVLLYSFGIIRWTKTELDDIQRQTRTMLTKYNNHHPKSSVIRTTLKRKEGGRGLIDVVNLHTEQIRNLREFFSAKALTSDLHRVVSLADKGYTPLNLATRDDLLNLPFLSDTEKQEQWSRKELHGRHHHEINQPHIDKEASNKWLMKGELFAETEGFLMAIQDQVIATNNYKKFIMKDGTLQTDRCRKCHIRSETIQHITSGCEQLANMEYLHRHNQVCNIIHQKLAHKYGLLNTFQPYYKYQPAPVLENDSIRLYYDRPIITDRMVTNNRPDIVVYDKRAKTAMLVDVAIPNNNNVLNKFQEKSPNTQTLLLRSSRCGTSTK

SEQ ID NO: 31320 - protein, 1159 aa, Cryptolaemus montrouzieri
MMYNLRNKRVNRHCTTITSCRVQDLGRGSCSESESQSPSVSDGSSVISSRDTATQNQVGNNINTSQPTLDVSTAAQAIMPTTTRAGLPRKRMKWTPEMNSFIMRSYYKITNLESEMTAYRYALYLAFIEKYPELQHISEQRISDQRRTIVKNRLLSSETLQSLREEVIMELRSENDTHNGIPAGVNESVTDNIEATETNINMERPPEPNQQNEFTYLARSELNRAITEFSGSNPTKRPKLPKLKTNKNTNIILASVNSMFEEYTDQNTLEKIHTLIYCGAVAVLRLHKQQISTTLIQAEPKSVRKLPWQKRLEKDIDNIRAEIGRLTEFLRNRKPSRRLKSHIRKIYRKIGTNTKHPDHKQHIDVYMDTLKQKLQAKAKRLSRYVKCTERKHQNQRFLQDAANFHKKNNKTATNNNREVPDAQCLTDYWSSLWSNPKEHNRDAKWITNEKERLDIRHTDFDGITEEEITTVIRATNNWKATGIDNIHNYWHKKFDKLHGALAKQLTYVLQHPKKTPTFLTQGLTYLLPKSDRTQDPSQYRPITCLPTLYKILTSCISNRIYQHLDNNNILAEEQKGCRKKHHGCKEQLIIDSVIMKQAHVGHRNVYSAFLDYLKAFDSTAHSWLVEVLQIYKIHPALVEFLKTTMTHWRTSLQVNMNNKSIKTDEIPIRRGIFQGDSLSPLWFCSAMNPLSSMLNRTGYGFRIKAERNYHTISHLLYMDDIKLYASNKKQLDDLLKTVSEFSADVHMKFGIEKCKALNIQRGKVIDGETQLPNGDVIQCIRDGETYKYLGYQQARLLEQKQSKEKIRTEYSQRLKSVLKSMLNSGNLVKAVNTYAIPVLLYSFGIIRWTKTELDDIQRQTRTMLTKYNNHHPKSSVIRTTLKRKEGGRGLIDVVNLLTEQIRNLREFFSAKALTSDLHRVVSLADKGYTPLNLATRENLLNLPFLSDTEKQEQWSRKELHGRHHHEINQPHIDKEASNKWLMKGELFAETEGFLMAIQDQVIATNNYKKFIMKDGTLQTDRCRKCHIRSETIQHITSGCEQMANTEYLHRHNQVCNIIHQKLAHKYRLLNTFQPYYEYQPAPVLENDSIRLYYDRPVITDRMVTNNRPDIVVYDKRARAAMLVDVAIPNNNNVLNKFQEKSPNTQTLLLRSSRCGTSIK

SEQ ID NO: 31321 - protein, 1214 aa, Cryptolaemus montrouzieri
MMYNLRNKRVNRHCTTITSCRVQDLGRGSCSESESQSPSVSDGSSVISSRDTATQNQVGNNINTSQPTLDVSTVAQAIMPTTTRAGLPRKRMKWTPEMNSFIMRSYYKITNLESEMTAYRYALHLAFVEKYPELQHISEQRISDQRRTIVKNRLLSSETLQSIREEVIMELRSENDTHNGIPAGVNESVTDNIEATETNINMERPPEQNQQDEYMYLARSELNRAITEFSGSNPTKRPKLPKLKTNKNTNIILASVNSVFEEYTDQNTLEKIHTLIYCGAVAVLRLHKQQIPTTLIQAESKSVRKPPWQKRLEKDIDNIRAEIGRLTEFQRNRKPSRRLKSHIRKIYRKIGTNTKHPDHKQHIDVYMDTLKQKLQAKAKRLSRYVNCTERKHQNQRFLQNAANFQKGNNKTATNNNREVPGAQCLTDYWSSLWSNPKEHNRDAEWITNEKERLDIRHMDFDGITEEEITTVVRATNNWKATGIDNIHNYWYKKFDKLHGALAKQLTYVLQHPKKTPTFLTQGLTYMLPKSDRTQDPSQYRPITCLPTLYEILTSCISNRIYQHLDDNNILAEEQKGCRKKHHGCKEQLIIDSVIMKQAHVGHRNVHSAFLDYLKAFDSTAHSWLVEVLQIYKIHPSLVEFLKTTMTHWRTSLQVNMNNESIKTDEMPIRRGIFQGDSLSPLWFCLAMNPLSSMLNRTGYGFRIKAERNYHTISHLLYMDDIKLYASNKKQLDDLLKTVSEFSADVHMKFGIEKCKTLNIRRGKVIDGETQLRNGDIIQCMRDGETYKYLGYQQARLLDQKQSKEKIRSEYSQRLKSVLKSMLNSGNLVKAINTYAIPVLLYSFGIIRWTKTELDDIQRQTRTMLTKYNNHHSKSSVIRTTLKRKEGGRGLIDVVNLHTEQIRNLREFFSAKALTSDLHRVVSLADKGYTPLNLATRDDLLNLPFLSDTEKQEQWSRKELHGRHHHEINQPHIDKEASNKWLMKGELFAETERFLMAIQDQVIATNNYKKFIMKDGTLQTDRCRKCHIRSETIQHITSGCEQLANTDYLHRHNQVCNIIHQKLAHKYGLLNTFQPYYKYQPAPVLENDSIRLYYDRPIITDRMVTNNRPDIVVYDKRAKTAMLVDVAIPNNNNVLNKFQEKKSKYTDLAIEIKQMWHLDKIDIVPVIVSSTGLIPKTLHDSLKKLELHKNTYIDMQKALILNTCRIVRKFMSSIL

SEQ ID NO: 31322 - protein, 848 aa, Cryptolaemus montrouzieri
MDTLKQKLQAKAKRLSRYVKCTERKHQNQRFLQNAANFHKGNNKTATNNNREVPDARCLTDYWSSLWSNPKEHNRDAEWITNEKERLDIRHMDFDGITEEEITTVIGATNNWKATGIDNIHNYWYKKFDKLHGALAKQLTYVLQHPKKTPTFLTQGLTYMLPKSDRTQDPSQYRPITCLPTLYKILTSCISNRIYQHLDDNNILAEEQKGCRKKHHGCKEQLIIDSVIMKQAHVGHRNVHSAFLDYLKAFDSTAHSWLVEVLQIYKIHPALVESLKTTMTHWRTSLQVNMNNKSIKTDEIPIRRGIFQGDSLSPLWFCLAMNPLSSMLNRTGYGFRIKAERNYHTISHLLYMDEIKLYASNKKQLDDLLKTVSEFSADVHMKFGIEKCKTLNIQRGKVIDGETQLPNGDIIQCMRDGETYKYLGYQQARLLDQKQSKEKIRSEYSQRLKSVLKSMLNSGNLVKAINTYAIPVLLYSFGIIRWTKTELDDIQRQTRTMLTKYNNHHPKSSVIRTTLKRKEGGRGLIDVVNLHTEQIRNLREFFSAKALTSDLHRVVSLADKGYTPLNLATRDDLLNLPFLSDTEKQEQWSRKELHGRHHHEINQPHIDKEASNKWLMKGELFAETEGFLMAIQDQVIATNNYKKFIMKDGTLQTDRCRKCHIRSETIQHITSGCEQLANTDYLHRHNQVCNIIHQKLAHKYGLLNTFQPYYKYQPAPVLENDSIRLYYDRPIITDRMVTNNRPDIVVYDKRAKTAMLVDVAIPNNNNVLNKFQEKKSKYTDLAIEIKQMWHLDKIDIVPVIVSSTGLIPKTLHDSLKKLELHKNTYIEMQKAVILNTCRIVRKFMSSIL

SEQ ID NO: 31323 - protein, 1197 aa, Cryptolaemus montrouzieri
MMYNLRNKRVNRHCTTITSCRVQDLGRGSCSESESQSPSVSDGSSVISSRDTATQNRVGNNINTSQPTLDVSTAAQAIMPTTTRAGLPRKRMKWTPEMNTFIMRSYYKITNLESEMTAYRYALHLAFIEKYPELQHISEQRISDQRRTIVKNGLLSSETLQSLREEVIMELRSENDTHNGIPAGVNESVTDNIEAMETNINMERPLEPNQQNEYTYLARSELNRAITEFSGSNPTKRPKLPKLKTNKNTNIILASVNSMFEEYTDQNTLEKIHTLIYCGAVAVLRLHKQQISTTLIQAEPKSVRKPPWQKRLEKDIDNIRAEIGRLTEFLRNRKPSRRLKSHIRKIYRKIGTNTKHPDHKQHIDVYMDTLKQKLQAKAKRLSRYVKCTERKQQNQRFLQNAANFHKGNNKTATNNNREVPDAQCLTDYWSSLWSNPKEHNRDAEWITNEKERLDIRHMDFDGITEEEITAVIGATNNWKATGIDNIHNYWYKKFDKLHGALAKQLTYVLQHPKKTPTFLTQGLTYMLPKSDRTQDPSQYRPITCLPTLYKILTSCISNRIYQHLDDNNILAEEQKGCRKKHHGCKEQLIIDSVIMKQAHVGHRNVHSAFLDYLKAFDSTAHSWLVEVLQIYKIHPALVEFLKTTMTHWRTSLQVNMNNKSIKTDEIPIRRGIFQGDSLSPLWFCLAMNPLSSMLNRTGYGFRIKAERNYHTISHLLYMDDIKLYASNNKQLDDLLKTVSEFSADVHMKFGIEKCKTLNIQRGKVIDGETQLPNGDIIQCMRDGETYKYLGYQQARLLDQKQSKEKIRSEYSQRLKSVLKSMLNSGNLVKAINTYAIPVLLYSFGIIRWTKTELDDIQRQTRTMLTKYNNHHPKSSVIRTTLKRKEGGRGLIDVVNLHTEQIRNLREFFSAKALTSDLHRVVSLADKGYTPLNLATRDDLLKLPFLSDTEKQEQWSRKELHGRHHHEINQPHIDKEASNKWLMKGELFAETEGFLMAIQDQVIATNNYKKFIMKDGTLQTDRCRKCHIRSETIQHITSGCEQLANTDYLHRHNQVCNIIHQKLAHKYGLLNTFQPYYKYRPAPVLENDSIRLYYDRPIITDRMVTNNRPDIVVYDKRAKTAMLVDVAIPNNNNVLNKFQEKKSKYTDLAIEIKQMWHVDKIDIVPVIVSSTGLIPKTLHDSLKKLELHKNTYIEMQKL

SEQ ID NO: 31324 - protein, 1214 aa, Cryptolaemus montrouzieri
MMYNLRNKRVNRHCTTITSCRVQDLGRGSCSESESQSPSVSDGSSVISSRDTATQNQVGNNINTSQPTLDVSTVAQAIMPTTTRAGLPRKRMKWTPEMNSFIMRSYYKITNLESEMTAYRYALHLAFVEKYPELQHISEQRISDQRRTIVKNRLLSLETLQSIREEVIMELRSENDTYNGIPAGVNESVTDNIEATETNINMERPPEQNQQDEYMYLARSELNRAITEFSGSNPTKRPKLPKLKTNKNTNIILASVNSVFEEYIDQNTLEKIHTLIYCGAVAVLRLHKQQISTTLIQAEPKSVRKPPWQKRLEKDIDNIRAEIGRLTEFLRNRKPSRRLKSHIRKIYRKIGTNTKHPDHKQHIDVYMDTLKQKLQAKAKRLSRYVKCTERKHQNQRFLQNAANFHKGNNKTATNNNREVPDAQCLTDYWSSLWSNPKEHNRDAEWITNEKERLDIGHMDFDGITEEEITTVVRATNNWKATGIDNIHNYWYKKFDKLHGALAKQLTYVLQHPEKTPTFLTQGLTYMLPKSDRTQDPSQYRPITCLPTLYKILTSCISNRIYQHLDDNNILAEEQKGCRKKHHGCKEQLIIDSVIMKQAHVGHRNVHSAFLDYLKAFDSTAHSWLVEVLQIYKIHPSLVEFLKTTMTHWRTSLQVNMNNKSIKTDEIPIRRGIFQGDSLSPLWFCLAMNPLSSMLNRTGYGFRIKAERNYHTISHLLYMDDIKLYASNKKQLDDLLKTVSEFSADIHMKFGIEKCKTLNIQRGKVIDGETQLPNGDIIQCMRDGETYKYLGYQQARLLDQKQSKEKIRSEYSQRLKSVLKSMLNSGNLVKAINTYAIPVLLYSFGIIRWTKTELDDIQRQTRTMLTKYNNHHPKSSVIRTTLKRKEGGRGLIDVVNLHTEQIKNLREFFSEKALTSDLHRAVSLADKGYTPLNLATGDDLLNLPFLLDTEKQEQWSRKELHGRHHHEINQPHIDKEASNKWLMKGELFAEIEGLLMAIQDQVIATNNYKKFIMKDGTLQTDKCRKCHIRSETKQHITSGCEQVANTDYLHRHNQVYNIIHQKLAHKYGLLNTFQPYYKYEPAPVLENDSIRLYYDRPVITDRMVTNNRPDIVVYDKRARTAMLVDVVIPNNNNVLNKFQEKKSKYTDLAIEIKQMWHLEKIDIVPVIVSSTGLIPKTLHDTLKKLELHKNTYIEMQKAVILNTCRIVRKFMSSIL

SEQ ID NO: 31325 - protein, 1136 aa, Cryptolaemus montrouzieri
MLTTTRAGLPRKRMKWTPEMNTFIMRSYYKITNLESEMTAYRYALHLAFIEKYPELQHISEQRISDQRRTIVKNRLLSLETLQSIREEVIMELRSENDTYNGIPAGVNESVTDNIEATETNINMEHPPEQNQQDEYMYLARSELNRAITEFSGSNPTKRPKLPKLKTNKNTNIILASVNSVFEEYTDQNTLEKIHTLIYCGAVAVLRLHKQQISTTLIQAEPKSVRKPPWQKRLEKDIDNIRAEIGRLTEFLRNRKPSRRLKSHIRKIYRKIGTNTKHPDHKQHIDVYMDTLKQKLQAKAKRLSRYVKCTERKHQNQRFLQNAANFHKGNNRTATNNNREVPDAQCLTHYWSSLWSNPKEHNRDAEWITNEKERLDIRHMDFDGITEEEITAVIGATNNWKATGIDNIHNYWYKKFDKLHGALAKQLTCVLQHPKKTPTFLTQGLTYMLPKSDRTQDPSQYRPITCLPTLYKILTSCISNRIYQHLDDNNILAEEQKGCRKKHHGCKEQLIIDSVIMKQAHVGHRNVHSAFLDYLKAFDSTAHSWLVEVLQIYKIHPALVEFLKTTMTHWRTSLQVNMNNKSIKTDEIPIRRGIFQGDSLSPLWFCLAMNPLSSMLNRTGYGFRIKAERNYHTISHLLYMDDIKLYASNKKQLNDLLKTVSEFSADVHMKFGIEKCKTLNIQRGKVIDGETQLPNGDIIQCMRDGETYKYLGYQQARLLDQKQSKEKIRSEYSQRLKSVLKSMLNSGNLVKAINTYAIPVLLYSFGIIRWTKTELDNIQRQTRTMLTKYNNHHSKSSVIRTTLKRKEGERGLIDVVNLHTEQIKNLREFFSEKALTSDLHIAVSLADKGYTPLNLATRDDLLNLPFLSDTEKQEQWSRKELHGRHHHEINQPHIDKEASNKWLMKGELFAETEGFLMAIQDQVIATNNYKKFKMKDGTLQTDRCRKCHIRSETIQHITSGCEQMANTEYLHRHNQVCNIIHQKLAHKYGLLNTFQPYYKYQPAPVLENDSIRLYFDRPVITDRMVTNNRPDIVVYDKRARAAMLVDVAIPNNNNVLNKFQEKKSKYTDLAIEIKQMWHLEKIDIVPVIVSSTGLIPKTLHDSLKKLELHKNTFIEMQKAVILNTCRIVRKFMSSLL

SEQ ID NO: 31326 - protein, 1213 aa, Cryptolaemus montrouzieri
MMYNLRNKRVNRHCTTITSCRVQDLGRGSCSESESQSPSVSDGSSVISSRDTATQNQVGNNINTSQPTLDVSTVAQAIMATTTRAGLPRKRMKWTPEMNSFIMRSYYKITNLESEMTAYRYALHLAFVEKYPELQHISEQRISDQRRTIVKNRLLSSETLQSIREEVIMELRSENDTHNGIPAGVNESVTDNIEATETNINMERPPERNQQDEYRYLARSELNRAITEFSGSNPTKRPKLPKLKTNKNTNIILESVNSVFEEYTDQNTLEKIHTLIYCGAVAVLRLHKQQISTTLIQAEPKSVRKPPWQKRLERDIDNIRAEIGRLTEFLRNRKPSRRLKSHLRKIYRKIGTNTKHPDHKQHIDVYMDTLKQKLQAKAKRLSRYVKCTERKHQNQRFLQNAANFHRGNNKTATNNNREVPDAQCLTDYWSSLWSNPKEHNRDAEWITNEKERLDIRHMDFDGITEEEITTVVRATNNWKATGIDNIHNYWYKKFDKLHGALAKQLTYVLQHPKKTPTFLTQGLTYMLPKSDRTQDPSQYRPITCLPTLYKILTSCISNRIYQHLDDNNILAEEQKGCRKKHHGCKEQLIIDSVIMKQAHVGHRNVHSAFLDYLKAFDSTAHSWLVEVLQIYKIHPALVEFLKTTMTHWRTSLQVNMNNKSIKTDEIPIRRGIFQGDSLSPLWFCLAMNPLSSMLNRTGYGFRIKAERNYHTISHLLYMDDIKLYASNKKQLDDLLKTVSEFSADVHMKFGIEKCKTLNIQRGKVIDGETQLPNGDIIQCMRDGETYKYLGYQQARLLDQKQSKEKIRLEYSQRLKTVLKSMLNSGNLVKAINTYAIPVLLYSFGIIRWTKTELDDIQRQTRTMLTKYNNHHPKSSVIRTTLKRKEGGSGLIDVVNLHTEQIKNLREFFSEKALTSDLHRAVSLADKGYTPLNLATRDDLLNLPFLSDIEKQEQWSRKELHGRHHYEINQPHIDKEASNKWLMKGELFAETEGFLMAIQDQVIATNNYKKFIMKDGTLQTDRCRKYHIRSETIQHITSRCEQLANTDYLHRHNQVCNIIHQKLAHKYGLLNTFQPYYKYQPAPVLENDSIRLYYDRPIITDRMVTNNRPDIVVYDKRAKTAMLDVAIPNNNNVLNKFQEKKSKYTDLAIEIKQMWHLQKIDIVPVIVSSTGLIPKTLHNSLKKLELHKNTYIEMQKAVILNTCRIVRKFMSSYL

SEQ ID NO: 31327 - protein, 1046 aa, Cryptolaemus montrouzieri
MELRSENDTHNGISAGSNESVTDNIEATETNINMERPPEQNQQDEYMYLARSELNRAITEFSGSNPTKRPKLPKLKTNKNTNIILASVNSVFEEYTDQNTLEKIHTLIYCGAVAVLRLHKQQISTTLIQAEPKSLRKPPWQKRLERDIDNIRAEIGRLTEFLRNRKPSRRLKSHIRKIFRKIGTNTKHPDHKQHIDVYMDTLKQKLQAKAKRLSSYFKCTERKHQNQRFLQNAANFHRGNKKTATNYNREVPDAQCLTDYWSSLWSNPKEHNRDAEWITNEEERLDIRHMDFDGITEEEITTVVRATNNWKATGIDNIHNYWYKKFDKLHGALAKHLTYVLQHPKKTPTFLTQGLSYMLPKSDRTQDPSQYKPITCLPTIYKILTSCISNRIYQHLDDNNIRAEEQKGCRKKHHECKEQLIIDSVIMKQAHVGHRNVHSAFLDYLKAFDSTAHSWLVEVLQIYKIHPSLVEFLKTTMTHWHTSLQVNMNNESIKTDEIPIHFGIFQGDSLSPLWFCLAMNPLSSMLNRTAYGFRIKAERNYHTISHLLYMDDIKLYASNKKQLDDLLKTVSEFSADVHMKFGIEKCKTPNIQRGKVIDGETQFPNGDIIQCMRDGETYKYLGYQQARLLDQEQSKEKIRSEYSQRLKSVLKSMLNSGNLVKAINTYAIPVLLYSFGIIRWTKTELDDIQRQTRTMLTKYNNHHPKSSVIRTNLKRKEGGRGLIDVVNLHTEQIKNLREFFSEKAFTSDLHRAVSLADKGYIPLSLATRDDLLNLPFLSDTEKQEQCSRKELHGRHHHEINQPHIDKEASNKWLMKGELFAETEGFLMAIQDQVIATNNYRKFIMKYGTLQTDRCRECHIRSETIQHIMSGCEQLANTDYLHRHNQVCNIIHQKLAHKYGLLNTFQPYYKYQPAPVLENDSIRLYYDRPIITDRMVTNNRPDIVVYDKRAKTAMLVDVAIPNNNNVLNKFQERKSKYTDLAIEIKQMWHLEKIDIVPVIVSSTGLIPKTLHDSLKKLELHKNTYVEMQKAVILNTCRIVRKFMSSIL

SEQ ID NO: 31328 - protein, 931 aa, Cryptolaemus montrouzieri
MYLARSELNRAITEFNGSNQTKRPKLPKLKTNKNTNIILTSVNSVFEEYTDQNTLEKIHTLIYCGAVAVLRLHKQRISTTLIQAEPKSVRKPPWQKRLERDIDNIRAEIGRLTEFLRNRKPSRHLKSHIRKIYRKIGTNTKHPDHKQHIDVYMDTLKQKLQAKAKRLSRYVKCTERKHQNQRFLQNAANFHKGNNKTATNNNREVPDAQCLTDYWSSLWSNPKEHNTDAEWITNGLDIRHMDFDGITEEEITAVIRATNNWKATGIDNIHNYWYKKFDKLHGALAKQLTYVLQHPKKTHTFLTQGSTYMLPKSDRTQDPSQYRPITCMPTLYKILTSCISNRIYQHLDDNNILAEEQKGCRKKHHGCKEQLIIDSVIMKQAHVGHRNVHSAFLDYLKAFDSTAHSWLVEVLQIYKIHPALVEFLKTTMTHWRTSLQVNMNNKSIKTDEIPIRRGIFQGDSLSPLWFCLAVNPLSSMLNRTGYGFRIKAERNYHTISHLLYMDDIKLYASNKKQLDDLLKTVSEFSADVHMKFGIEKCKTLNIQRGKVIDGETQLPNGDIIQCMGDGETYKYLGYQQARLLDQKQSKEKIRSEYSQRLKSVLKSMLNSGNLVKAINTYAIPVLLYSFGIIRWTKTELDDIQRQTRTMLTKYNNHHPKSSVIRTTLKRKEGGRGLIDVVNLHTEQIRNLREFFSAKALTSDFHRVVSLADKGYTPLNLATRDDLLNLPFLSDTEKQEQWSRKELHGRHHHEINQPHIDKEASNKWLMKGELFSETEGFLMAIQDQVIATNNYKKFIMKDGTLQTDKCRKCHIKSENIQHITSECEQLVNTEYLHRHNQVCNIIHQKLAHKYGLLNTFQPYYKYQPAPVLENDSIRLYYDRPVITDRMVTNNRPDIVVYDKRARTAMLEDVAIPNNNNVLNKFQEKKSKYRPCY

SEQ ID NO: 31329 - protein, 1046 aa, Cryptolaemus montrouzieri
MELRSENDTHNGIPAGVNESVTDNIEATETNINMERPLEPNQQNEYTYLARSELNRAITEFSGSNPTKRPKLPKLKTNKNTNIILASVNSMFEEYTDQNTLEKIHTLIYCGAVAVLRLHKQQISTTLIQAEPKSVRKPPWQRRLERDIDNIRAEIGRLTEFLRNRKPSRRLKSHIRKIYRKIGTNTKHPDHKQHIDVYMDTLKQKLQAKAKRLSRYVKCTERKHQNQRFLQNATNFHKGNNKTATNNNREVPDAQCLTDYWSSLWPNPKEHNRDAEWITNEKERLDIRHMDFDGITEEEITTVIRATNNWKATGIDNIHNYWYKKFDKLHGALAKQLTYVLQHPKKTPTFLTQGLTYMLPKSDRTQDPSQYRPITCLPTLYKILTSCISNRIYQHLDDNNILAEEQKGCRKKHHGCKEQLIIDSVIMKQAHVGHRNVHSAFLDYLKAFDSTAHSWLVEVLQIYKIHPALVEFLKTTMTHWRTSLQVNMNNKSIKTDEIPIRRGIFQGDSLSPLWFCLAMNLLSSMLNRTGYGFRIKAERNYHTISHLLYMDDIKLYASNKKQLDDLLKTVSEFSADVHMKFGIEKCKTLNIRRGKVIDGVTQLPNGDIIQCMGDGETYKYLGYQQARLLDQKQSKEKIRSEYSQRLKSVLKSMLNSGNLVKAINTYAIPVLLYSFGIIRWTKTELDDIQRQTRTMLTKYNNHHPKSSVIRTTLKRKEGGRGLINVVNLHTEQIRNLREFFSAKALTSDLHRVVSLADKGYTPLNLATRDDLLNLPFLSDTEKQEQWSRKELHGRYHHEINQPHIDKEASNKWLMKGELFAETEGFLMAIQDQVIATNNYKKFIMKDGTLQTDKCRKCHIRSETIQHITSGCEQLANTEYLHRHNQVCNIIHQKLAHKYGLLNTFQPYYKYQQAPVLENDSIRLYYDRPVITYRMVTNNRPDIVVYDKRARTAMLVDVAIPNNNNVLNKFQEKKSKYTDLAIEIKQMWQLDKIDIVPVIVSSTGLIPKTLHDSLKKLELHKNTYIEMQKAVILNTCRIFRKFMSSIL

SEQ ID NO: 31330 - protein, 848 aa, Cryptolaemus montrouzieri
MDTLKQKLQAKAKRLSRYVKCTERKHQNQRFLQNAANFHKGNNKTATNNNREAPDAQCLTDYWSSLWSNPKEHNRDAEWITNEKERLDIRHMDFDGITEEEITTVVRATNNWKATGIDNIHNYWYKKFDKLHGALAKQLTYVLQHPKKTPTFLTQGLTYMLPKSDRTQDPSQYRPITCLPTLYKILTSCISNRIYQHLDDNNILAEEQKGCRKRHHGCKEQLIIDSVIMKQAHVGHRNVHSAFLDYLKAFDSTAHSWLVEVLQIYKIHPSLVEFLKTTMTHWRTSLQVNMNNKSIKTDDIPIRRGIFQGDSLSPLWFCLAMNPFSSMLNRTGYGFRIKAERNYHTTSHLLYMDDIKLYASNKKQLDDLLKTVSEFSADVHMKFGIEKCKTLNIQRGKVIDGDTQLPNGDIIQCMRDGETYKYLGYQQARLLDQKQSKEKIRSEYSQRLKSVLKSMLNSGNLVKAINTYAIPVLLYSFRIIRWTKTELDDIQRQTRTMLTKYNNHHPKSSVIRTTLKRKEGGRGLIDVVNLHTEQIKNLREFFSEKSLTSDLHRAVSLADRGHTPLNLATRDDLLNLPFLSDTEKQEQWSRKELHGRHHHEINQPHIDKEASNKWLMKGELFAETEGFLMAIQDQVIATNNYKKFIMKDGIIQTDRCRKCHIRSETIQHITSGCEQLANTDYLHRHNQVCNIIHQKLAHKYGLLNTFQPYYKYQPAPVLENDSIRLYYDRPIITDRMVTNNRPDIVVYDKRAKTAMLVDVAIPNNNNVLNKFQEKKSKYTDLAIEIKQMWHLEKIDIVPVIVSSTGLIPKTLHDSLKKLELHKNTYIEMQKAVILNTCRIVRKFMSSLL

SEQ ID NO: 31331 - protein, 958 aa, Cryptolaemus montrouzieri
MERPPEQNQQDEYMYLARSELNRAITEFSGSNPTKRPKLPKLKTNKNTNIILAIVNSVFEEYTDQNTLEKIHTLIYCGAVAVLRLHKQQISTTLIQAEPKSVRKPPWQKRLERDIDNIRAEIGRLTEFLRNRKPSRRLKSHIRKIYRKIGTNTKHPDHKQHIDVYMDTLKQKLQAKAKRLSRYVKCTERKHQNQRFLQNAANFHKGNNKTATNNNREVPDAQCLTDYWSSLWSNPKEHNRDAEWITNEKERLDIRHMDFDGITEEEITTVVRATNNWKATGIDNIHNYWYKKFDKLHEALAKQLTYVLQHPKKTPTFLTQGLTYMLPKSDRTQDPSQYRPITCLPTLYNILTSCISNRIYQHLDDNNILAEEQKGCRKKHHGCKEQLIIDSVIMKQAHVGHRYVHSAFLDYLKAFDSTAHSWLVEVLQIYKIHPALVEFLNTTMTHWRTSLQVNMNNKSIKTDEIPIRRGIFQGDSLSPLWFCLAMNPLSSMLNRTGYGFRIKAERNYHTISHLLYMDDIKLYASNKKQLDDLLKTVSEFSADVHMKFGIEKCKTLNIQKGKVIDGETQLPNGDIIQCMRDGETYKYLGYQQARLLDQKQSKEKIRSEYSQRLKSVLKSMLNSGNLVKAINTYAIPVLLYSFGIIRWPKTELDDIQRQTRTMLTKYNNHHPKSSVIRTTLKRKEEGRGLIDVVNLHTEQIKNLREFFSEEALTSDLHRAVSLADKGYTPLNLATSDDLLNLPFLSDTEKQEQWSRKELHGRHHHEINQPHIDKEASNKWLMKGELFAETEGFLMAIQDQVIATNNYKKFIMKDGTLQTDRCRKCHIRSETIQHITSGCEQLANTDYLHRHNQVCNIIHQKLAHKYGLLNTFQPYYKYQPAPVLENDSIRLYYDRPIITDRMVTNNRPDIVVYDKRAKTAMLVDVAIPNNNNVLNKFQEKSPNTQTLLLRSSRCGTSRK

SEQ ID NO: 31332 - protein, 848 aa, Cryptolaemus montrouzieri
MDTLKQKLQAKAKRLSRYVKCTERKHQNQRFLQNPANFHKGNNKTATNNNREVPDAQCLTDYWSSLWSNPKEHNRDAEWITNEKERLDIRHMDFDGITVEEITTVVRATNNWKATGIDNIHNYWYKKFDKLHEALAKQLTYVLQHPKKTPTFLTQGLTYMLPKSDRTQDPSQYRPITCLPILYKIFTSCISNRIYQHLDDNNILAEEQKGCRKKHHGCKEQLIIDSVTMKQAHVGHRNVHSAFLDYLKAFDSTAHSWLVEVLQIYKIHPSLVEFLKTTMTHWRTSLQVNMNNKSIKTDEILIRRGIFQGDSLSPLWFCLAMNPLSSMLNRTGYGFRIKAERNYHTISHLLYMDDIKLYALNKKQLDDLLKTVSEFSADVHMKFGIEKCKTLNIQRGKVIDGETQLPNGDIIQCMRDGETYKYLGYQQARLLDQKQSKEKIRSEYSQRLKSVLKSMLNSGNLVKAINTYSIPVLLYSFGIIRWTKTELDDIQRQTRTMLTKYNNYHPKSSVIRTTLKRKEGGRGLIDVVNLHTEQIKNLREFFSEKALTSDLHRAVSLADKGYTPLNLATRDDLLNLPFLSDTEKQEQWSRKELHGRHHHEINQPHIDKEASNKWLMKGELFAETEGFLMAIQDQVIATNNYKKFIMKDGTLQTDRCRKCHIRSETIQHITSGCEQLANTDYLHRHNQVCNIIHQKLAHKYGLLNTFQSYYKYQPAPVLENDSIRLYYDRPVITDRMVTNNRPDIVVYDKRARTAMLVDVAIPNNNNVLNKFQEKKSKYTDLAIEIKQMWYLDKIDIVPVIVSSTGLIPKTLHDSLEKLELHKNTYIEMQKAVILNTCRIVRKFMSSLL

SEQ ID NO: 31333 - protein, 982 aa, Cryptolaemus montrouzieri
MERPPEQNQQDENMYLVRSELNRAITEFSGSNPTKRPKLPKLKTNKNTNIILASVNSVFEEYTDQNTLEKIHTLIYCGAVAVLRLHKQQISTTLIQAEPKSVRKPPWQKRLEKDIDNIRAEIGRLTEFMRNRKPSSRLKSHIRKIYRKIGTNTKHPDHKQHIDVYMDTLKQKLQAKAKRLSRYVKCTERKHQNQRFLQNAANFHKGNNKTATNNNREVPDAQCLNDYCSSLWSNPNEHNRDAEWITNEKERLDIRHMDFDGITEEEITTVVRATNNWKATGIDNIHNYWYKKFDKLHGALAKQLTYVLQHPKKTPTFLTQGLTYMLPKSDRKQDPSQYRPITCLPTLYKILTSCISNRIYQHLDDNNILAEEQKGCRKKHHGCKEQLIIDSVIMKQAHVGHRNVHSAFLDYLKAFDSTAHSWLVEVLQIYKIHPSLVEFLKTSMTHWRTSLQVNMNNKSIKTDEIPIRRGIFQGDSLSPLWCCLAMNPLSSMLNRTGYGFRIKAERNYHTISHLLYMDDIKLYASNKKQLDDLLKTVSEFSADVHMKFGIEKCKTLNIQRGIVIDGETQLSNDDIIQCMRDGETYKYLGYQQARLLDQKQSKEKIRSEYSQRLKSVLKSMLNSGNLVKAINTYAIPVLLYSFGIIRWTKTELDDIQRQIRTMLTKYNNHHPKSSVIRTTLKRKEGGRGLIDVVNLHTEQIKYLREFFSEKAHTSDLHRAVSLADKGYTPLNLATRDDLLNLPFLSDTEKQEQWSRKELHGRHHHEIYQPHIDKEASNKWLMKGELFAETEGFLMAIHDQVIATNNYKKFIMKDGILQTDRCRKCHIRSETIQHITSGCEQLANTDYLHRHNQVCNIIHQKLANKYGLLNSFQPYYKYQPAPVLENDSIRLYYDRPIITDRMVTNNRPDIVVYDKRAKTAMLVDVAIPNNNNVLNKFHEKKSKFTDLAIEIKQMWHLEKIDIVPVIVSSTGLIPKTLHDSLRN

SEQ ID NO: 31334 - protein, 956 aa, Cryptolaemus montrouzieri
MFEEYTDQNTLEKIHTLIYCGAVAVLRLHKQQISTTLIQAEQKSVRKPPWQKRLEKDIDNIRAEIGRLTEFLRNRKPSRRLKSHIRKIYRKIGTNTKHPDHKQHIDVYMDTLKQKLQAKAKRLSRYVKCTERKHQNQRFLQNDANFHKGNNKTATNNNREVPDAQCLTDYWSSIWSNPKEHNRDAEWITNEKERLDIRHMDFDGITEEEITTVIGATNNWKATGIDNIHNYWYKKFDKLHGALAKQLTYVLQHPKKTPTFLTQGLTYMLPKSDRTQDPSQYRPITCLPTLYKILTSCISNRIYQHLDDNNILAEEQKGCRKKHHGCKEQLIIDSVIMKQAHVGHRNVHSAFLDYLKAFDSTAHSWLVEVLQIYKIHPALVEFLKTTMTHWRTSLQVNMNNKSIKTDEIPIRRGIFQGDSLSPLWFCLAMNPLSSMLNRTGYGFRIKAERNYHTISHLLYMDDIKLYASNKKQLDNLLKTVSEFSADVHMKFGIEKCKTLNIQRGKVMDGETQLPNGDIIQCMRDGETYKYLGYQQARLLEQKQSKEKIRSEYSQRLKSVLKSMLNSGNLVKAINTYAIPVLLYSFGIIRWTKTELDDIQRQTRTMLTKYNNHHPKSSVIRTTLKRKEGGRGLIDVVNLHTEQIKNLREFFSEKALTSDLHRAVSLADKGYTPLNLATRDDLLNLPFLSDTEKQEQWSRKELHGRHHHEINQPHIDKEASNKWLMKGELFAETEGFLMAIQDQVIATNNYKKFIIKDGTLQTDRCRKCHIRSETIQHITSGCEQLANTEYLHRHNQVCNIVHQKLAHKYGLLNTFQPYYKYQPAPVLENDSIKLYYDRPIITDRMVTNNRPDIVVYDKRAKTAMLVDVAIPNNNNVLNKFQEKKSKYTDLAIEIKQMWHLEKIDIVPVIVSSTGLIPKTLHDSLKKLELHKNTYIEMQKAVILNTCRIVRKFMSSIL

SEQ ID NO: 31335 - protein, 1099 aa, Cryptolaemus montrouzieri
MTAYRYALHLAFIEKYPELQHISEQRISDQRRTIVKNRLLFSETLQSLREDVIMELRSENDTHNGIPAGVNESVTDNIEATETNINMERPPEPNQQNEYMYLARSELNRAITEFSGSNPTKRPKLPKLKTNKNTNIILASVNSVFEEYTDKNTLEKIHTLIYRGAVAVLRLHKQQISTTLIQAEPKSVRKPPWQKRLEKDIDNIRAEISRLTEFLRNRKPSRRLKSHIRKIYRKIGTNTKHPDHKQHIDVYMDTLKQKLQAKAKRLSRYVKCTERKYQNQRFLQNAANFHKGNNKTATNNNREVPDAQCLTDYWSSLWSNPKEHNRDAEWITNEKERLDIRHMDFDGITEEEITTVVRATNNWKATGIDNIPNYWYKKFDKLHGDLAKQLTYVLQHPKKTPTFLTQGLTYTLPKSDRTQDPSQYRPITSLPTIYKILTSCISNRIYQHLDDNNILAEEQKRCRKKHHGCKEQLIIDSVIMKQAHVGHRNVHSAFLDYLKAFDSTAHSWLVEVLQIYKIHPALVEFLKTTMTHWRTSLQVNMNNKSIKTDEIPIRRGIFQGDSLSPLWFCLAMNPLSSMLNRTGYRFRIKAERNYHTISHLLYMDDIKLYASNKKQLDDLLKTVSEFSADVHMKFGIEKCKTLNIQRRKVIDGETQLPNGDIIQCMRDGETYKYLGYQQARLLDQKQSKDKIRSEYSQRLKSVLKSMLNSGNLVKAINTYAIPVLLYSFGIIRWTKTELDDIQRQTRTMLTKYNNHHPKSSVIRTTLKRKEGGRGLIDVVNLHTEQIKNLREFFSAKAFTSDLHRVVSLADRGYTPLNLATRDDLLNLPFLSDTEKQEQWSRKELHGRHHHEINQPHIDKEASNKWLMKGELFAEKERFLMAIQDQVIATNNYKKFIMKDGTLQTDKCRKCHIRSETIQHITSGCEQLANTEYLQRHNQVCNIIHQKLAHKYGLLNTFQPYYKYQPAPVLENDSIRLYYDRPVITDRMVTNNRPDIVVYDKRARTAMLVDVAIPNNNNVLNKFQEKKSKYTDLAIEIKQMWHLDKIDIVPVIVSSTGLIPKTLHDSLKKLELHKNTYIEMQKAVILNTCRIVRKFMSSIL

SEQ ID NO: 31336 - protein, 1005 aa, Cryptolaemus montrouzieri
MEATETNINMERPLEPNQQNEYTYLARSELNRAITEFSGSNPTKRPKLPKLKTNKNTNIILASVNSMFEEYTDQNTLEKIHTLIYCGAVAVLRLHKQQISTTLIQAEPKSVRKPPWQKRLEKDIDNIRAEIGRLKEFLRNRKPSRRLKSHIRKIYRKIGTNTKHPDHKQHIDVYMDTLKQKLQAKAKRLSRYVKCTERKHQNQRFLQNAANFHKGNNKTATNNNREVPDAQCLTDYWSSIWSNPKEHNRDAEWITNERERLDIRHMDFDGITEEEITTVIGATNNWKATGIDNIHNYWYKKFDKLHGALAKQLTYVLQHPKKTPTFLTQGLTYMLPKSDRTQDPSQYRPITCLPTLYKILTSCISNRIYQHLDDNNILAEEQKGCRKKHHGCKEQLIIDSVIMKQAHVGHRNVHSAFLDYLKAFDSTAHSWLVEVLQIYKIHPALVEFLKTTMTHWRTSLQVNMNNKSIKTDEIPIRRGIFQGDSLSPLWFCLAMNPLSSMLNRTGYGFRIKAERNYHTISHLLYMDDIKLYASNKKQLDDLLKTVSEFSADVHMKFGIEKCKTLNIQRGKVIDGETQLPNGDIIQCMRDGETYKYLGYQQARLLDQKQSKEKIRSEYSQRLKSVLKSMLNSGNLVKAINTYAIPVLLYSFGIIRWTKTELDDIQRQTRTMLTKYNNHHPKSSVIRTTLKRKEGGRGLIDVVNLHTEQIRNLREFFSAKALTSDLHRVVSLADKGYTPLNLATRDDLLNLPFLSDTEKQEQWSRKELHGRHHHEINQPHIDKEASNKWLMKGELFAETEGFLMAIQDQVIATNNYKKFIMKDGTSQTDRCRKCHIRSETIQHITSGCEQLANTDYLHRHNQVCNIIHQKLAHKYGLLNTFQPYYKYQPAPVLENDSIRLYYDRPIITDRMVTNNRPDIVVYDKRAKTAMLVDVAIPNNNNVLNKFQEKKSKYTDLAIEIKQMWHLDKIDIVPVIVSSTGLIPKTLHDSLKKLELHKNTYIEMQKL

SEQ ID NO: 31337 - protein, 1068 aa, Cryptolaemus montrouzieri
MKWTPEMNTFIMRSYYKITNLESEMTAYRYALHLAFIEKYPELQHISEQRISDQRRTIVKNRLLSSETLQSLREEVIMELRSENDTHNGIPAGVNESVADNIEATETNINMERPLEPNQQNEYTYLARSELNRAITEFSGSNPTKRPKLPKLKTNKNTNIILASVNSMFEEYTDQNTLEKIHTLIYCGAVAVLRLHKQQISTTLIQAEPKSVRKPPWQKRLEKDIDNIRAEIGRLTEFLRNRKPSRRLKSHIRKIYRKIGTNTKHPDHKQHIDVYMDTLKQKLQAKAKRLSRYVKCTETKHQNQRFLQNAANFHKGNNKTATNNNSEVPDAQCLTDYWSSIWSNPKEHNRDAEWITNEKERLDIRHMDFDEITEEEITTVIGATNNWKATGIDNIHNYWYKKFDKLHGALAKQLTYVLQHPKKTPTFLTQGLTYMLPKSDRTQDPSQNRPITCLPTLYKILTSCISNRIYQHLDDNNILAEEQKGCRKKHHGCKEQLIIDSVIMKQAHVGHRNVHLAFLDYLKAFDSTAHSWLVEVLQIYKIHPALVEFLKTTMTHWRTSLQVNMNNKSIKTDEIPIRRGIFQGDSLSPLWFSLAMNPLSSMLNRTGYGFRIKAERNYHTISHLLYMDDIKLYASNKKQLDDLLKTVSEFSADVHMKFGIEKCKTLNIQRGKVIDGETQLPNGDIIQCMRDGETYKYLGYQQARLLDQKQSKEKIRSEYSQRLKSVLKSMLNSGNLVKAINTYAIPVLFYSFGIIRWTKTELDDIQRQTRTMLTKYNNHHPKSSVIRTTLKRKEGGRGLIDVVNLHTEQIRNLREFFSAKALTSDLHRVVSLADKGYTPLNLATRDDLLNLPFLSDTEKQEQWSRKELHGRHHHEIDQPHIDKEASNKWLMKGELFAETEGFLMAIQDQVIATNIYKKFIMKDGTLQTDRCRKCHIRSETIQHITSGCEQLANTDYLHRHNQVCNIIHQKLAHKYGLLNTFQPYYKYQPAPVLENDSIRLYYDRPIITDRMVTNNRPDIVVYDKRAKTAMLVDVAIPNNNNVLNKFQEKSPNTQTLLLRSSRCGTSTK

SEQ ID NO: 31338 - protein, 1013 aa, Cryptolaemus montrouzieri
MERPPEPNQQNEYMYLARSELNRATTEFSGSNPTKRPKLPKLKTNKNTNIILASVNSVFEEYTDLNTLEKIHTLIYSGAVAVLRLHKQQISTNLIQAEPKSARKPPWQKRLEKDIDNIGAEIGRLTEFLRKRKPSRRLKSHIRKIYRKIGTNTKHPDHKQHIDVYMDTLKQKLQAKAKRLARYVKCTERKHQNQRFLQNAANFHKGNNKLATNNNREVPDAQCLTDYWSSLWSHPKEHNRDAEWITNEKERLDIRHMDFDGITEEEITIVVRATNNWKATGIDNIHNYWYKKFDKLHGALAKQLTYVLQHPKKKPSFLTQGLTYMLPKSDRTQDPSQYRPITCLPTLYKILTSCISNRIYQHLDDNNILAEEQKGCRKKHHGCKEQLIIDSVIMKQAHAGHRNVHSAFLDYLKAFDSTAHSWLVEVLQIYKIHPALVKFLKTTTTHWRTSLQVNMNNKSIKTDEIPIRRGIFQGDSLSPLWFCLAMNPLSLMLNRTGYGFRIKAERNYHTIYHLLYMDDIKLYASNKKQLDDLLKTVSEFSADVHMKFGIEKCKTLNIQRGKVIDGETQLPNGDIIQCMRDGETYKYLGYQQARLLDQKQSKEKIRSEYSQRLKSVLKSMLNSGNLVKAINTYAIPVLLYSFGIIRWTETELDDIRRQTRTMLTKYNNHHPKSSVIRTTLKRKEGGPGLIDVVNLHTEQMKNLREFFSAKALTSDLHRVVSLADKGYTPLNLATRDDLLNLPFLSDTEKQEQWSRKELHGRHHHEINQPHIDKEASNKWLMKGELFAETEGFLMAIQDQAIATNNYKKFIMKDGTLQTDRCRKCHIRSETIQHITSGCEQLANTDYLHRHNQVCNIIHQKLAHKYGLLNAFQPYYKYHSAPVLEIDSIRLYYDRPIITDRMVTNNRPDIVVYDKRAKTAMLVDVAIPNNNNVLNKFQEKKSKYTDLAIEIKQMWHLDKIDIVPVIVSSTGLIPKTLHDSLKKLELHKNTYIEMQKSVILNTCRIIRKFMSIIL

SEQ ID NO: 31339 - protein, 1131 aa, Cryptolaemus montrouzieri
MMYNLRNKRVNRHCTTITSCRVQDLGRGSCSESESQSLSVSDGSSVISSRDTATQNQVGNNINTSQPTLDVSTVAQAIMPTTTRAGLPKKRMKWTPEMNSFIMRSYYKITNLESETTAYRYALHLAFVEKYPELQHEQRISDQRRTIVKNRLLSSETLQSIREEVIMELRSENDTHNGIPAGVNESVTDNIEATETNINMECPPEPNQQDEYRYLARSELNRAITEFSGSNPTKRPKLPKLKTNKNTNIILASVNSVFEEYIDQNTLEKIHTLIYCGAVAVLRLHKQQISTTLIQAEPKSVRKPPCQKRLERDIDNIRAEIGRLTEFQRNRKPSRRLKSHIRKIYRKIGTNTKHPDNKQHIDVYMDTLKQKLQAKAKRLSRYVKCTERKHQNQRFLQNAANFHKGNNKNSTNNNREVPDAQCLTDYWSSLWSHPKEHNRDAEWITNEKERLDIRYMDFDGITEEEITTVVRATNNWKATGIDNIHNYWYKKFDKLHGALAKQLTYVLQHPKKTPTFLTQGLTYMLPKSDRTQDPSQYRPITCLPTLYKILTSCISNRIYQHLDDNNILAEEQKGCRKKHHGCKEQHIIDSVIMKQTHVGHRNVHSAFLDYLKAFDSTAHSWLVEVLQIYKIHPALVEFLKTTMTHWRTSLQVNMNNKSIKTDEIPIRCGIFQGDSLSPLWFCLAMNPLSSMLNRTGYGFRIKAGRNYHTISHLLYMDDIKLYASNKKQLDDLLKTVSEFSADVHMKFGIEKCKTLNIQRGKVIDGETQLPNGDIIQCMRDGETYKYLGYKQARLLDQKQSKEKICSEYSQRLKSVLKSMLNSGNLVKVINTYAIPVLLYSFGIIRWTKTELDDIQRQTRTMLTKYNNHHPKSSVIRTTLKRKEGGRGLIDVVNLHTEQIKNLREFFSAKALTSDLHRVVSLADKGYTPLNLATRDDLLNLPFLSDTEKQEQWSRKELHGRHHHEINQPHIDKEASNKWLMKGELFAETEGFPMAIQDQVIATNNYKKFIMKDGTLQTDKCRKCHIRSETIQHITSGCEQLANTEYLHRHNQVCNIIHQKLAHKYGLLNTFQPYYKYQPAPVLENDSIRLYYDRPVITDRMVTNNRPDIVVYDKEPEQQCWWMSPYRIITTC

SEQ ID NO: 31340 - protein, 1214 aa, Cryptolaemus montrouzieri
MMYNLRNKRVNRHCTTITSCRVQDLGRGSCSESESQSPSVSDGSSVISSRDTATQNQVGNNINTSQPTLDVSTAAQAIMPTTTRAGLPRKRMKWTPEMNSFIMRSYYKITNLESEMTAYRYALHLAFVEKYPELQHISEQRISDQRRTIVKNRLLSSETLQSIREEVIMELRSENDTHNGIPAGVNESVTDNIEATETNINMERPPEQNQQDEYMYLARSELNRAITEFSGSNPTKRPKLPKLKTNKNTNIILESVNSVFQEYTDQNTLEKIHTLIYCGAVAVLRLHKQQISTTLIQAEPKSVRKPPWQKRLEKDIDHIRAEIGRLTEFLRNRKPSRRLKSHIRKIYRKIGRNTKHPDHKQHIDVYMDTLKQKLQAKAKRLSRYVKCTERKQQNQRFLQNAANFHKGNNKTATNNNREVPDAQCLTDYWSSLWSNPKEHNRDAEWITNEKERLDIRHMDFDGITEEEITTVVRTTNNWKATGIDNIHNYWYKKFDKLHGALAKQLTYVLQHPKKTPTFLTQGLTYMLPKSDRTQDPSQYRPITCLPTLYKILTSCISNRIYQHLDDNNILAEEQKGCRKKHHGCKEQLIIDSVIMKQAHVGHRNVHSAFLDYLKAFDSTAHSWLVEVLQIYKIHPSLVEFLKTTMTHWRTSLQVNMNNKSIKTDEIPIRRGIFQGDSLSPLWFCLAMNPLSSMLNRTGNGFRIKAERNYHTISHLLYMDDIKLYASNKKQLDDLLKTVSEFSADVHMNFGIEKCKTLNIQRGKVIDGETQLPNGDIIQCMRDGETYKYLGYQQARLLDQKQSKEKIRSEYSQRLKSVLKSMLNSGNLVKAINTYAIPVLLYSFGIIRWTKTELDDIQRQTRTMLTKYNNHHPKSSVIRTTLKRKEGGRGLIDVVNLHTEQIKNLREFFSEKALTSDLHRAVSLADKGYTPLNLATRDDLLNLPFLSDTEKQEQWSRKELHGRHHHEINQPHIDKEASNKWLMKGELFAETEGFLMAIQDQVIATNNYKKFIMKDGTLQTDRCRKCHMRSETIQHITSGCEQLANTDYLHRHNQVCNIIHQKLAHKYGLLNTFQPYYKYQPAPVLENDSIRLYYDRPIITDRMVTNNRPDIVVYDKRTKTAMLVDVAIPNNNNVLNKFQEKKSKYTDLAIEIKQMWHLDKIDIVPVIVSSTGLIPKTLHDSLKKLELHKNTFIEMQKAVILNTCRIVRKFMSSIL

SEQ ID NO: 31341 - protein, 1136 aa, Cryptolaemus montrouzieri
MPTTTRAGLPRKRMKWTPEMNSFIMRSYYKITNLESEMTAYRYELHLAFVEKYPELQHISEQRISDQRRTIVKNRLLSSETLQSIREEVIMELRSENDTHNGIPAGVNESVTDNIEATETNINMERPPEQNQQDEYMYLARSELNRAITEFSGSNPTKRPKLPKLKTNKNTNIILASVNSVFEEYTDQNTLEKIHTLIYCGAVAVLRLHKQQISTTLIQAEPKSDRKPPWQKRLERDIDNIRAEIGRLTEFLRNRKPSRRLKSHIRKIYSKIGTNTKHPDHKQHIDVYMDTLKQKLQAKAKRLSRYVKCTERKHQNQRFLQTAANFHKGNNKTATNNNREVPDAQSLTDYWSSLWSNPKEHNRDAEWITNEKERLDTRHMDFDGITEEEITTVVRATNNWKATGIDNIHNYWYKNFDKLHGTLAKQLTYVLQQPKKTPTFLTQGLTYMLPKSDRTQDPSQYRPITCLPTLYKILTSCISNRIYQHLDDNNILAEEQKGCRKKHHGCKEQLIIDSVIMKQAHVGHRSVHSAFLDYLKAFDSTAHSWLVEVLPIYKIHPSLVEFLKTTMTHWRTSLQVNMNNKSIKTDEIPIRRGIFQGDSLSPLWFCSAMNPLSSMLNRTGYGFRIKAERNYHTISHLLYMDDIKLYASNKKQLDDLLKTVSEFSADVHMKFGIEKCKTLNIQRGKVIDGETQLQNADIIQCMRDGETYKYLGYQQARLLDQKQSEEKIRSEYSQRLKSVLKSMLNSGNLVKAINTYAIPVLLYSFGIIRWTKTELDDIQRQTRTMLTKYNNHHPKSSVIRTTLKRKERGRGLIDVVNLHTEQMKNLREFFSEKALTSDLHRAVSLADKGYTPLNLATRDDLLNLPFLSDTEKQEQWSRKELHGRHHDEINQPHIDKEASNKWLMKGELFAETEGFLMAIQNQVIATNNYKKFIMKDGTLQTDRCRKCHIRSETIQHITSGCEQLANTDYLHRHNQVCNIIDQKLAHKYGLLNTFQPYYKYQPAPVLENDSIRLYYDRPIITDRMVTNNRPDIVVYDKRAKTAMLVDVAIPNNNNVLNKFQEKKSKYTDLAIEIKQMWHLEKIDIVPVIVSSTGLIPKTLHDSLKKLELHKNTYVEMQKAVILNTCRIVRKFMSSIL

SEQ ID NO: 31342 - protein, 954 aa, Cryptolaemus montrouzieri
MFEEYTDQNLEKIHTLIYCGAVAVLRLHKQQISTTLIQAEPKSFRKPPWQKRLEKDIDNIRAEIGRLTEFLRNRKPSRRLKSHIRKIYRKIGTNTKHPDHKQHTDVYMDTLKQKLQAKAKRLSRYVKCTERKHQNQRFLQNAANFHKGNNKTATNNNREVPDAQCLTDYWSSLWSNPKEYNRDAEWITNEKERLDIRHMDFDGITEEEITTVIRATNNWKATGIDNIHNYWYKKFDKLHGALAKQLTYVLQHPKKTPAFLTQGLTYMLPKSDRTQDPSQYRPITCLPTLYKILTSCISNRIYQHLDDNNILAEEQKGCRKKHHGCKEQLIIDSVIMKQAHVGHRNVHSAFLDYLKAFDSTAHSWLVEVLQIYKIHPALVEFLKTTMTHWRTSLQVNMNNKSIKTDEIPIRRGIFQGDSLSPLWFCSAMNPLSSMLNRTVYGFRIKAERNYHTISHLLYMDDIKLYASNKKQLDDLLKTVSEFSADVHMKFGIEKCKTLNIQRGKVIDSETQLPNGDVIQCLRDGETYKYLGYQQARLLDQKQSKEKIRSEYSQRLKSVLKSMLNSGNLVKAINTYAIPVLLYSFGIIRWTKTELDDIQRQTRTMLTKYNNHHPKSSVIRTTLKRKEGGRGLIDVVNLHTEQIRNLREFFSAKALTSDLHRVVSLADKGYIPLNLATRDDLLNLPFLSDTEKQEQWSRKELHGRHHHEVNQPHIDKEASNKWLMKGELFAETEGFLMAIQDQVIATNNYKKFIMKDGTLQTDKCRKCHIRSETIQHITSGCEQLANTEYLHRHNQVCNIIHQKLAQKYGLLNTFQPYYKYQPAPVLENDSIRLYYDRPVITDRMVTNNRPDIVVYDKRARTAMLVDVAIPNNNNVLNKLQEEKSKYTDLAIEIKQMWHLDKIDIPVIVSSTGLIPKTLHDSLKKLELHKNTYIEMQKAVILNTCRIVRQFMSSIL

SEQ ID NO: 31343 - protein, 996 aa, Cryptolaemus montrouzieri
MERPLEPNQQNEYTYLARSELNRAITEFSGSNPTKRPKLPKLKTNKNTNIILASVNSMFEEYTDQNTLEKIHTLIYCGAVAVLRLHKQQISTTLIQAEPKSVRKPPWQKRLEKDIDNIRAEIGRLTEFLRNRKPSRRLKSHIRKIYRKIGTNTKHPDHKQHIDVYMDTLKQKLQAKAKRLSRYVKCTERKHQNQRFLQNAANFHKGNNKTATNNNREVPDAQCLTDYWSSIWSNPKEHNRDAEWITNEKERLDIRHMDFDGITEEEITTVIGATNNWKATGIDNIHNYWYKKFDKLHGALAKQLTYVLQHPNKTPTFLTQGLTYMLPKSDRTQDPSQYRPITCLPTLYKILTSCISNRIYQHLDDNNILAEEQKGCRKKHHGCKEQLIIDSVIMKQAHVGHRNVHSAFLDYLKAFDSTAHSWLVEVLQIYKIHPALVEFLKTTMTHWRTSLQVNMNNKSIKTDEIPIRRGIFQGDSLSPLWFCLAMNPLSSMLNRTGYGFRIKAERNYHTISHLLYMDDIKLYASNKKQLDDLLKTVSEFSADVHMKFGIEKCKTLNIQRGKVIDGETQLPNGDIIQCMRDGETYKYLGYQQARLLDQKQSKEKIRSEYSQRLKSVLKSMLNSGNLVKAINTYAIPVLLFSFGIIRWTKTELDDIQRQTRTMLTKYNNHHPKSSVIRTTLKRKEGGRGLIDVVNLHTEQIRNLREFFSAKALTSDLHRVVSLADKGYTPLNLATRDDLLNLPFLSDTEKQEQWSRKELHGRHHHEINQPHIDKEASNKWLMKGELFAETEGFLMAIQDQVIATNNYKKFIMKDGTLQTDRCRKCHIRSETIQHITSGCEQLANTDYLHRHNQVCNIIHQKLAHKYGLLNTFQPYYKYQPAPVLENDSIRLYYDRPIITDRMVTNNRPDIVVYDKRAKTAMLVDVAIPNNNNVLNKFQEKKSKYTDLAIEVKQMWHLDKVDIVPVIVSSTGLIAKTLHDSLKKLELHKNTYIEMQKL

SEQ ID NO: 31344 - protein, 1062 aa, Cryptolaemus montrouzieri
MKWTPEMNTFIMRSYYKITNLESEMTAYRYALHLAFIEKYPELQHISEQRISDQRRTIVKNRLLSSETLQSLREEVIMELRSENDTHNGIPAGGNESVTDNIEATETNINMERPLEPNQQNEYTYLARSELNRAITEFSGSNPTKRPKLPKLKTNKNTNIILASVNSMFEEYTDQNTLEKIHTLIYCGAVAVLRLHKQQISTTLIQAEPKSVRKPPWQKRLEKDIDNIRAEIGRLTEFLRNRKPSRRLKSHIRKIYRKIGTNTKHPDHKQHIDVYMDTLKQKLQAKAKRLSRYVKCTERKHQNQRFLQNAANFHKGNNKTATNNNREVPDAQCLIDYWSSLWSNPKEHNRDAEWITNEKERLDIRHMDFDGITEEEITTVIGATNNWKATGIDNIHNYWYKKFDKLHGALAKQLTYVLQHPKKTPTFLTQGLTYMLPKSDRTQDSSQYRPITCLPTLYKILTSCISNRIYQHLDDNNILAEEQKGCRKKHHGCNKQLIIDSVIMKQAHVGHRNVHSAFLDYLRAFDSTAHSWLVEVLQIYKIHPALVEFLKTTMTHWRTSLQVNINNKSIKTDEIPIRRGIFQGDSLSPLWFCLAMNPLSSMLNRTGYGFRIKAERNYHTISHLLYMDDIKLYASNKKQLDDLLKTVSEFSADVHMKFGIEKCKTLNIQRGKVIDGETQLPNGDIIQCMRDGETYKYMGYQQARLLDQKQSKEKIRSEYSQRLKSVLKSMLNSWNLVKAINTYAIPVLLYSFGIIRWTKTELDDIQRQTRTMLIKYNNHHPKSSVIRTTLKRKEGGRGLIDVVNLHTEQIRNLREFFSAKALTSDLHRVVSSADKGYTPLNLATRDDLLNLPFLSDTEKQEQWSRKELHGRHHHEINQPHIDKEASNKWLMKGELFAETEGFLMAIQDQVIATNNYKKFIMKDGTLRTDRCRKCHIRSETIQHITSGCEQLANTDYLHRHNQVCNIIHQKLAHKYGLLNTFQPYYKYQPAPVLENDSIRLYYDRPIITDRMVTNNRPDIVVYDKRAKTAMLVDVAIPNNNNVLNKFQEKSPNTQTLLLRSSR

SEQ ID NO: 31345 - protein, 838 aa, Cryptolaemus montrouzieri
MDTLKQKLQAKAKRLSRYVKCTERKHQNQRFLQNAANFHKGNNKTATNNNREVPDAQCLTDYWSSLWSNPKEHNRDAEWITNEKERLDIRHMDFDGITEEEITTVVRATNNWKATGIDNIHNYWYKKFDKLHGALAKQLTYVLQHPKKTPTFLMQGLTYMLPKSDRTQDPSQYRPITCLPTLYKILTSCISNRIYQHLDDNSILAEEQKGCRKKHHGCKEQLIIDSVIMKQAHVGHRNVHSAFLDYLKAFDSTAHSWLVEVLQIYKIHPSLVEFLKTTMTHWRTSLQVNMNNKSIKTDEIPIRRGIFQGDSLSPLWFCLAMNPLSSMLNRTGYGFRIKAERNYHTISHLLYMDDIKLYASNKKQLDDLLKTVSEFSADVHMKFGIEKCKTLNIQRGKVIDGETQLPNGDIIQCMRDGETYKYLGYQQARLLDQKQSKEKIRSEYSQRLKSVLKSMLNSGNLVKAINIYAIPVLLYSFGIIRWTKTELDDIQRQTRTMLTKYNNHHPKSSVIRTTLKRKEGGRGLIDVVNLHTEQIKNLREFFSEKALTSDLHRAVSLADKGYTPLNLATRDDLLNLPFLSDTEKQEQWSRKELHGRHHHEINQPHIDKEASNKWLMKGELFAETEGFLMAIQDQVIATNNYKKFIMKDGTLQTDRCRKCHIRSETIQHITSGCEQLANTDYLHRHNQVCNIIHQKLAHKYGLLNTFLPYYKYQPAPVLENNSIRLYYDRPIITDRMVTNNRPDIVVYDKRAKTAMLVDVAIPNNNNVRNKFQEKKSKYTDLAIEIKQMWHLEKIDIVPVIVSSTGLIPKTLHDSLKKLELHKNTYVEMQKLLFLIHVE

SEQ ID NO: 31346 - protein, 1214 aa, Cryptolaemus montrouzieri
MMYNLRNKRVNRHCTTITSCRVQDLGRGSCSESESQSPSVSDGSSVISSRDTATQNQVGNNINTSQPTLDVSTVAQAIMPTTTRAGLPRKRMKWTPEMNSFIMRSYYKITNLESEMTAYRYALHLAFVEKYPELQHISEQRISDQRRTIVKNRLLSLETLQSIREEVIMELRSENDTHNGIPAGVNEIDTDNSEATETNINMERPPEPNQQDEYRYLARSELNRAITEFSGSNPTKRPKLPKLKTNKNTNIILASVNSVFEEYTDQNTLEKIHTLIYCGAVAVLRLHKQQISTTLIQAEPKSVRKPPWQKRLERDIDNIRAEIGRLTEFQRNRKPSRRLKSHIRKIYRKIGTNTKHPDHKQRIDVYMDTLKQKLQAKAKRLSRYVKCTERKHQNQRFLQNAANFHKGNKKNATNNNREVPDAQCLTDYWSSLWSHPKEHNRDAEWITNEKERLDIRHMDFDGITEEEITTVVRATNNWKATGIDNIHNYWYKKFDKLHGALAKQLTYVLQHPKKTPTFLTQGLTYMLPKSDRTQDPSQYRPITCLPTLYKILTSCISNRIYQHLDDNNILAEEQKGCRKKHHGCKEQLIIDSVIMKQAHVGHRNVHSAFLDYLKAFDSTAHSWLVEVLQMYKIHPALVEFLKTTMTHWRTSLQVNMNNKSIKTDEIPIRRGIFQGDSLSPLWFCLAMNPLSSMLNRAGYGFRIKAERNYHTISHLLYMDDIKLYASNKKQLDDLLKTVSEFSADVHMKFGIEKCKTLNIQRGKVIDGETQLPNGDIIQCMRDGETYKYLGYQQARLLDQKQSKEKIRSEYSQRLKSVLKSMLNSGNLVKAINTYAIPVLLYSFGIIRWTKTELDDIQRQTRTMLTKYNNHHPKSSVIRTSLKRKEGGRGLIDVVNLHTEQIKNLREFFSAKALTSDLHRVVSLADKGYTPLNLATRDDLLNLPFLSDTEKQEQWSRKELHGRHPHEINQPHIDKEASNKWLMKGELFAETEGFLMAIQDQVIATNNYKKFIMKDGTLQTDRYRKCHIRSETIQHITSGCEQLANTDYLHRHNQVCNIIHQKLAHKYGLLNTFQPYYKYQPAPVLENDSIRLYYDRPIITDRMVTNNRPDIVVYDKRAKTAMLVDVAIPNNNNVLNKFQEKKSKYTDLAIAIKQMWHLEKIDIVPVIVSSTGLIPKTLHDSLKKLELHKNTYVEMQKAVILNTCRIVRKFMSSIL

SEQ ID NO: 31347 - protein, 848 aa, Cryptolaemus montrouzieri
MDTLKQKLQAKAKRLSRYVKCTERKHQNQRFLQNAANFHKGNNKTATNNNREVPDAQCLTDYWSSLWSDPNEHNRDAEWITNEKERLDIRHMDFDGITEEEITTVVRATNNWKATGIDNIHNYWYKKFDKLHGALAKQLTYVLQHPKKTPTFLTHGLTYMLPKSDRTQDPSQYRPITCLPTLYKILTSCISNRIYQHLDDNNILAEEQKGCRKKHHGCKEQLIIDSVIMKQAHVGHRNVHSAFLDYLKAFDSTAHSWLVEVLQIYKIHPSLVEFLKTTMTHWRTSLQVNMNNKSIKTDEIPIRRGIFQGDSLSPLWFCLAMNPLSSMLNRTGYGFRIKAERNYHTISHLLYMDDIKLYASNKKQLDDLLKTVSEFSADVHMKFGIEKCKTLNIQRGKVIDGETQLPNGDIIQCMRDGETYKYLGYQQARLLDQKQSKEKIRSEYSQRLKSVLKSMLNSGNLVKAINTYAIPVLLYSFCIIRWTKTELDDIQRQTRTMLTKYNNHHPKSSVIRTTLKRKEGGRGLIDVVNLHTEQIKNLREFFSEKALTSDLHRAVSLADKGYTPLNLATRDDLLNLPFLSDTEKQEQWSRKELHGRHHHEINQPHIDKEASNKWLMKGELFAETEGFLMAIQDQVIATNNYKKFIMKDGTLQTDRCRKCHIRSETIQHITSGCEQLANTDYLHRHNQVCNIIHQKLAHKYGLLNTFQPYYKYQPAPVLENDSIRLYYDRPIITDRMVTNNRPDIVVYDKRAKTAMLVDVAIPNNNNVLNKFQEKKSKYTDLAIEIKQMWHLEKIDIVPVIVSSTGLIPKTLHDSLKKLELHKNTYVEMQKAVILNTCRIVRKFMSSIL

SEQ ID NO: 31348 - protein, 838 aa, Cryptolaemus montrouzieri
MDTLKQKLQAKAERLSRYVKCTERKHQNQRFLQNAANFHKGNNKTATNNNREVPDAQCLTDYWSSLWSNPKEYNRDAEWITNEKERLDIRHMDFDGITEEEITTVVRATNNWKATGIDNIHNYWYKKFDKLHGALAKQLTYVLQHPKKTPTFLTQGLTYMLPKSDRTQDPSQYRPITCLPTLYKILTSCISNRIYQHLDDNNILAEEQKGCRKKHHGCKEQLIIDSVIMKQAHVGHRNVHSAFLDYLKAFDSTAHSWLVEVLQIYKIHPSLVEFLKTTMTHWRTSLQVNMNNKSIKTDEIPIRRGIFQGDSLSPLWFCLAMNPLSSMLNRTGYGFRIKAERNYHTISQLLYMDDIKLYASNKKQLDDLLKTVSEFSADVHMKFGIEKCKTLNIQRGKVIDGETQLPNGDIIQCMRDGETYKYLGYQQARLLDQKQSKEKIRSEYSQRLKSVLKSMLNSGNLVKAINTYAISVLLYSFGIIRWTKTELDEIQRQTRTMLTKYNNHHPKSSVIRTTLKRKEGGRGLIDVVNLHTEQIKNLREFFSEEALTSDLHRVISLADRGYTPLNLATRNDLLNLPFLSDTEKQEQWSRKELHGRHRHEINQPHIDKEASNKWLMKGELFAETEGFLMAIQDQVIATNNYKKFIMKDGTLQTDRCRKCHIRSETIQHITSGCEQLANTDYLHRHNQVCNIIHQKLAHKYGLLNTFQPYYKYQPVPVLENDSIRLYYDRPIITDRMVTNNRPDIVVYDKRAKTAMLVDVAIPNNNNVLNKFQEKKSKYTDLAIEIKQMWHLEKIDIVPVIVSSTGLIPKTLHDSLKKLELHKNTYVEMQKLLFLIHVE

SEQ ID NO: 31349 - protein, 1038 aa, Cryptolaemus montrouzieri
MNTFIMRSYYKITNLESEMTAYRYALLLAFIEKYPELEHISEQRISDQRRTIVKNRLLSSETLQSLRKEVIMELRSENDTHNGIPAGVNESVTDNIEVMETNINMERPLEPNQQNEFMYLARSELNRAITEFSGSNPTKRPKLPKLKTNKNTNIILASVNSMFEEYTYQNTLEKILTLIYCEAVAVLRLHKQQISTTLIQAEPKTVRKPPWQKRLEKDIDNIRAEIGRLTEFLRNRKPSRRLKSHIRKIYRKIGTNTKHPDHKQHIDVYMDTLKQKLQAKAKRLSRYVKCTERKHQNQRFLQNAANFHKGNNKTATNNNREVPDAQCLTDYWSSLWANPKEHNRDAEWITNEKERLDIRHMDFDGITEEEITTVVRATNNWKATGIDNIHNYWYKKFDKLHGALAKQLTYVLQHPKKTPTFLTQGLTYMLPKSDRTQDPSQYRPITCLSTLYKILTSCISNRIYQHLDDNNILAEEQKGCRKKHHGCKEQLIIDSVIMKQAHVGHRNVHSAFLDYLKAFDSTAHSWLVEVLQIYKIHPSLVEFLKTTMTHWRTSLQVNMNNKSIKTDEIPIRRGIFQGDSLSPLWFCLAMNPLSSMLNRTGYGLRIKAERNYHTISHLLYMDDIKLYASNKKQLDDLLKTVSEFSVDVHMKFGIEKCKTLNIQRGKVIDGETQLPNGDIIQCMKDGETYKFLGYQQARLLDQKQSKEKIRSEYSQCLKSVLKSMLNSGNLVKAINTYAIPVLLYSFGIIRWTKTELDEIQRQTRTMLTKYNNHHPKSSVIRTTLKRKEGGRGLIDVVNLHTEQIKNLREFFSEKALTSDLHRAVSLADKGYTPLNLATRDDLLNLPFLSDTEKQEQWSRKELHGRHHHEINQPHIDKEASNKWLMKGELFAETEGFLMAIQDQVIATNNYKKFIMKDGTLQTDRCRKCHIRSETIQHITSGCEQLANTDYLHRHNQVCNIIHQKLAHKYELLNTFQPYYKYQPAPVLENDSIRLYYDRPIITDRMVTNNRPDIVVYDKRAKTAMLVDVAIPNNNNVLN

SEQ ID NO: 31350 - protein, 757 aa, Cryptolaemus montrouzieri
MDFDGITEEEITTVVRETNNWKATGIDNIHNYWYKKFDKLHGALAKQLTYVLQHPKKTPTFLTQGLTYMLPKSDRTQDPSQYRPITCLPTLYKILTSCISSRIYQHLDDNNILAEEQKGCRKKHHGCKEQLIIDSVIMKQAHVGHRNVHSAFLDYLKAFDSTAHSWLVEVLQIYKIHPSLVEFLKTTMTHWRTSLQVNMNNKSIKTDEIPISRGIFQGDSLSPLWFCLAMNLLSSMLNRTGYGFRIKAERNYHTISHLLYMDEIKLYASNKKQLDDLLKTVSEFSADVHMKFGIEKCKTLNIQRVKVIDGETQLPNGDIIQCMRDGETYKYLGYQQARLLDQKQSKEKIRSEYSQRLKSVLKSMLNSGNLVKAINTYAIPVLLYSFGIIRWTKTELDDIQRQTRTMLTKYNNHHPKSSVIRTTLKRKEGGRGLIDVVNLHTEQIKNLREFFSEKALTSDLHRAVSLADKGYTPLNLATRDDLLNIPFLSDTEKQEQWSRKELHGRHHHEINQPHIDKEASNKWLMKGELFAETEGFLMAIQDQVIATNNYKKFIMKDGTLQTDRCRKCHIRSETIQHITSGCEQLANTDYLHRHNQVCNIIHQKLAHKYGLLNTFQPYYKYQPAPVLENDSIRLYYDRPIITDRMVTNNRPDIVVYDKRAKTAMLVDVAIPNNNNVLNKFQEKKSKYTDLAIEIKQMWHLDKIDIVPVIVSSTGLIPKTLHDSLKKLELHKNTYVEMQKAVILNTCRIVRKFISSIL

SEQ ID NO: 31351 - protein, 848 aa, Cryptolaemus montrouzieri
MDTLKQKLQAKAKRLSRYVKCTERKHQNQRFLQNAANFHKGNNKTATNNNREVPDAQCLTDYWSSLWSDPKEHNRDAEWITNEKERLDIRHMDFDGITEEEITTVVRATSNWKATGIDNIHNYWYKKFDKLHGALAKQLTYVLQHPKKTPTFLTQGLTYMLPKSYRTQDPSQYRPITCLPTLYKILTSCISNRIYQHLDDNNILAEEQKGCRKKHHGCKEQLIIDSVIMKQAHVGHRNVHSAFLDYLKAFDSTAHSWLVEILQIYKIHPALVEFLKTTMTHWRTSLQVNMNNKSIKTDEIPIRRGIFQVDSLSPLWFCLAMNPLSSMLNRTGYGLRIKAERNYHTISHLLYMDDIKLYASNKKQLDDLLKTVSEFSADIHMEFGIEKCKTLNIQRGKVIDGETQLPNGDIIQCMRDGETYKYLGYQQARLLDQKQSKEKIRSEYSQRLKSVLKSMLNSGNLVKAINTYAIPVLLYSFGIIRWTKTELDDIQRQTRTMLTKYNNHHPKSSVIRITLKRKEGGRGLIDVVNLHTEQIRNLREFFSAKALTSDLHRVVSLADKGYTPLNLATRDDLLNLPFLSDTEKQEQWSRKELHGRHHHEINQPHIDKEASNKWLMKGELFAETEGFLMAIRDQVIATNNYKKFIMKDGTLQTDKCRKCHIRSETIEHITSGCEQLANTEYLHRHNQVCNIIHQKLAHKYGLLNTFQPYYKYQAAPVLENDSIRLYYGRPIITDRMVTNNRPDIVVYDKRARTAMLVDVGIPNNNNVLNKFQEKRSKYTDLAIEIKQMWHLEKIDIVPVIVSSTGLIPNTLHDSLKKLELHKNTYIEMQKAVILNTCRIVRKFMSSIL

SEQ ID NO: 31352 - protein, 1006 aa, Cryptolaemus montrouzieri
MELRSENDTHNGIPAGVNESVTDNIEATETNINMERPLEPNQQNEYTYLARSELNRAITEFSGSNPTKRPKLPKLKTNKNTNIILASVNSMFEEYTDQNTLEKIHTLIYCGAVAVLRLHKQQISTTLIQAEPKSVRKPPWQKRLEKDIDNIRAEIGRLTEFLRNRKPSRRLKSHIRKIYRKIGTNTKHPDHKQHIDVYMDTLKQKLQAKAKRLSRYVKCTERKHQNQRFLQNAANFHKGNNKTATNNNREVPDAQCLTDYWSSIWSNPKEHNRDAEWITNERERLDIRHMDFDGITEEEITTVIGATNNWKATGIDNIHNYWYKKFDKLHGALAKQLTYVLQHPKKTPTFLTQGLTYMLPKSDRTQDPSQYRPITCLPTLYKILTSCISNRIYQHLDDNNILAEEQKGCRKKHHGCKEQLIIDSVIMKQAHVGHRNVHSAFLDYLKAFDSTAHSWLVEVLQIYKIHPALVEFLKTTMTHWRTSLQVNMNNKSIKTDEIPIRRGIFQGDSLSPLWFCLAMNPLSSMLNRTGYGFRIKAERNYHTISHLLYMDDIKLYASNKKQLDDLLKTVSEFSADVHMKFGIEKCKTLNIQRGKVIDGETQLPNGDIIQCMRDGETYKYLGYQQARLLDQKQSKEKICSEYSQRLKSVLKSMLNSGNLVKAINTYAIPVLLYSFGIIRWTKTELDDIQRQTRTMLTKYNNHHPKSSVIRTTLKRKEGGRELIDVVNLHTEQIRNIREFFPAKALTSDLHRVVSLADKGYTPLNLATRDDLLNLPFLSDTEKQEQWSRKELHGRHHHEINQPHIDKEASNKWLMKGELFAETEGFLMAIQDQVIATNNYKKFIMKDGTLQTDKCRKCHIRSETIQHITSGCEQLANTEYLYRHNQGCNIIHQKLAHKYLLLNTFQPYYKYQPAPVLENDSIRLYYDRTVITDRMVTNNRPDIVVYDKRARTAMLVDVAIPNNNNVLNKSQEKKSKYTDLAIEIKQMWHLDKIEIVHLYRNAKSCNS

SEQ ID NO: 31353 - protein, 848 aa, Cryptolaemus montrouzieri
MDTLKQKLQAKAKRLSRYVKCTERKHQNQRFLQNAANFHKGNNKTASNNNKEVPDAQCLTDYWSSLWSNPKEHNRDAEWITNEKERLLIRHMDFDGITEEEITTVIRATNNWKATGIDNIHNYWYKKFDKLHGALAKQLTYVLQHPKKTPTFLTQGLTYMLPKSDRTQDPSQYRPITCLPTLYKILTSCISNRIYQHLDDNNILAEEQKGCRKKYHGCKEQLIIDSVIMKQAHVGHPNVHSAFLDYLKAFDSTAHSWLVEVLKIYKIHPSLVEFLKTTMTHWRTSLQVNMNNKSIKTDKIPIRRGIFQGDSLSPLWFCLAMNPLSSMLNRTGYGFRIKAERNYHTISHLLYMDDIKLYASNKKQLDDLLKTVSEFSADVHMKFGIEKSKTLNIQRGKVIDGETQLPNGDIIQCLRGGETYKYLGYQQARLLDQKQSEEKIRSEYSQRLKSVLKSMLNSGNLVKAINTYAIPVLLYSFGIIRWTKTELDDIQRQTRTMLTKYNNHHPKSSVIRTTLKRKEGGRGLIDVVNLHTEQKKNLREFFSEKALTSDLHRAVSLADKGYTPLNLATRDDLLNLPFLSHTEEQEQWSRNELHGRHHHEINQPHIDKEASNKWLMKGELFAETEGFLMAIQDQVIATNNYKKFIMKDGTLQTDRCRKCHIRSETIQHITSGCEQLANTDYLHRHNQVCNIIHQKLAHKYGLLNTFQPYYKYRPAPVLENDSIRLYYDRPIITDRMVTNNRPDIVVYDKRAKTAMLVDVAVPNNNNVLNKFQEKKSKYTDLSIEIKQMWHLEKIDIVPVIVSSTGLIPKTLHDSLKKLELHKNTYVEMQKAVILNTCRIVRKFMSSIL

SEQ ID NO: 31354 - protein, 1046 aa, Cryptolaemus montrouzieri
MELRSENDTHNGIPAGVNESVTDNIEATETNINMERPLEPNQQNEYTYLARSELNRAITEFSGSNPTKRPKLPKLKTNKNTNIILASVNSMFEEYTDQNTLEKILTLIYCGAVAVLRLHKQQISTTLIQAEPKSVRKPPWQKRLEKDIDNIRAEIGRLTEFLRNRKPSRRLKSHIRKIYRKIGTNTKHPDHKQHIDVYMDTLKQKLQAKAKRLSRYVKCTERKHQNQRFLQNAANFHKGNNKTATNNNREVPDAQCLTDYWSSLWSNPKEHNRDAEWITNEKERLDIRHMDFDGITEEEITTVIKATNNLKATGIDNIHNYWYKKFDKLQGALAKQLTYVLQHPKKTPTFLTQGLTYMLPKSDRTQDPSQYRPITCLPTLYKILTSCISNRIYQHLDDNNILAEEQKGCRKKHHGCKEQLIIDSVIMKQAHVGHRNVHSAFLDYLKAFDSTAHSWLVEVLQIYKIHPALVEFLKTTMTHWRTSLQVNMNNKSIKTDEIPIRRGIFQGDSLSPLWFCLAMNPLSSMLNRTGYGFRIKAERNYHTISHLLFMDDIKLYASNKKQLDDLLKTVSEFSADVHMKFGIEKCKTLNIQRGKVIDGETQLPNGDIIQCMRDGETYKYLGYQQARLLDQKQSKEKIRSEYSQRLKTVLKSMLNSGNLLKAINTYAIPVLLYSFGIIRWTKTELDDIQRQTRTMLTKYNNHHPKSSVIRTTLKRKEGGRGLIDVVNLHTEQIRNLREFFSAKALTSDLHRVVSLADKGYTPLNLATRDDLLNLPLLSDTEKQEQWSRKELHGRHHHEINQPHIDKEASNKWLMKGELFAETEGFLMAIQDQVIATNNYKKFIMKNGTLQTDKCRKCHIRSETIQHITSGCEQLANTEYLHRHNQVCNIIHQKLAHKYGLLNTFQPYYKYQPAPVLENDSIRLYYDRPVITDRMVTNNRPDIVVYDKRARTAMLVDVAVPNNNNVLNKFQEKKSKYTDLAIEIKQMWHLDKIDIVPVIVSSTGLIPKTLHDSLKKLELHRNTYIEMQKAVILNTCRIVRKFMSSIL

SEQ ID NO: 31355 - protein, 907 aa, Cryptolaemus montrouzieri
MAKTTGEDIDNIRAEIGRLTEFLRNRKPSRRLKSHIRKIYRKIGTNTKHPDHKQHIDVYMDTLKQKLQAKAKRLSRYVKYTERKHQNQRFLQNAANFHKGNNKTATNNNREVPDAQCLTDYWSSLWSNPKEHNRDAEWITNEKERLDIRHMDFDGITEEEITTVVRATNNWKATGIDNIHNYWYKKFDKLHGALAKQLTYVLQHPKKTLTFLTQGLTYMLPKSDRTQDPSQYRPITCLPTLYKILTSCISNRIYQHLDDNNILAEEQKGCRKKHHGCKEQLIIDSVIIKQAHVGHRNVHSAFLDYLKAFDSTAHSWLVEVLQIYKIHPSLVEFLKTTMTHWRTSLQVNMNNKSIKTDEIPIRRGIFQGDSLSPLWFCLAMNPLSSMLNRTGYGFRIKAERNYHTISHLLYMDDIKLYASNKKQLDDLLKTVSEFSADVHMKFGIEKCKTLNIQRGKVIDGETQLPNGDIIQCMRDGETYKYLGYQQARLLNQKQSKEKMRSEYSQRLKSVLKSMLNSGNLVKAINTYAIPVLLYSFGIIRWTKTELDDIQRQTRTMLTKYNNHHPKSSVIRTTLKRKEGGRGLIDVVNLHTEQIKNLREFFSEKAFTSDLHRAVSLAGKGYTPLNLATRDDLLNLPFLSDTAKQEQWSRKELHGRHHHEINQPHIDKEASNKWLMKGELFAEIEGFLMAIQDQVIATNNYKKFIMKDGTLQTDRCRKCHIRSETIQHITSGCEQLANTDYLHRHNQVCNIIHQKLAHKYGLLNTFQPYYKYQPAPVLENDSIRLYYDRPIITDRMVTNNRPDIVVYDKRAKTAMLVDVAIPNNNNVLNKFQEKKSKYTDLAIEIKQMWHLEKIDIVPVIVSSTGLIPKTLHDSFKKLELHKNTYVEMQKAVILNTCRIVRKFMSSIL

SEQ ID NO: 31356 - protein, 1197 aa, Cryptolaemus montrouzieri
MMYNLRNKRVNRHCNTQSQSPSVSYESSVISSRDTATQNQVGNNINTSQPTLDVSTAAQAIMPTTTRAGLPRKRMKWTPEMNTFIMRSYYKITNLESEMTAYRYALHLAFIEKYPELQHISEQRISDQRRTIVKNRLLSSETLQSLREEVIMELRSENDTHNGIPARVNESVTDNIEATKTNINMERPLEPNQQNEYTYLARSELNRAITEFSGSNPTKRPKLPKLKTNKNTNIVLASVNSMLEEYTDQNTLEKIHTLIYCGAVAVLRLHKQQISTTLIQAEPKSVRKPPWQKRLEKDIDNIRAEIGRLTEFLRNRKPSRRLKSHIRKIYRKIGTNTKHPDHKQHIDVYMDTLKQKLQAKAKRLSRYVKCTERKHQNQRFLQNAANFHKGNNKTTTNNNRDVPDAQCLTEYWSSIWSNHKEHNRDAEWITNEKERLDIRHMDFDGITEEEITTVIGATNNWKATGIDNIHNYWYKKFDELHGALAKQLTYVLQHPKKTLTFLTQGLTYMLPKSDRTHDPSQYRPITCLPTLYKIHSSCISNRIYQHLDDNNILAEEQKGCRKKHHGCKEQLIIDSVIMKLAHVAHRNVHSAFLDYLKAFDSTAHSWLVEVLQIYKIHPALVEFLKTTMTHWRTSLQVNMNNKSIKTDEIPIRRGIFQGESLSPLWFCLAMNPLSSMLNRTGYGFRIKAERNYHTISHLLYMDDIKLYASNKKQLDDLLKTVSEFSADVHMKFGIEKYKTLNIQRGKVIDGETQLPNGDIIQCMRDGETYKYLEYQQARLLDQKQSREKIRSEYSQRLKSMLKSMLNSGNLVKAINTYAIPVLLYSFGIIRWTKTELDDIQRQTRTMLTKYNNHHPKSSVIRTTLKRKEGGRGLIDVVNLHTEQIKNLREFFSEKALTSDLHRAVSLADKGYTPLNLATRDDLLNLPFLSDTEKREQWSRKELHGRHHHEINQPHIDKEASNKWLMKGELFAETEGFLMAIQDQVIATNNYKKFIMKDGTLQTDRCRKCHIRSETIQHITSGCEQLANTDYLHRHNQVCNIIHQKLAHKYELLNTFQPYYKYQPAPVLENDSIKLYIDRPVITDRMVTNNRPDIVVYDKRAKTAMLVDVAIPNNNNVLNKFQEKKSKYTDLAIEIKQMWHLEKIDIVPVIVSSTGLIPKTLHDSLKKLELHKNTYIEMQKAVILNTCRIVRKFMSSIL

SEQ ID NO: 31357 - protein, 1197 aa, Cryptolaemus montrouzieri
MMYNLRNKRVNRHCTTITSCRVQDLGRGSCSESESQSPSVSDGSSVISSRDTATQNRVGNNINTSQPTLDVSTAAQAIMPTTTRAGLPRKRMKWTPEMNTFIMRSYYKITNLESEMTAYRYALHLAFIEKYPELQHISEQRISDQRRTIVKNRLLSSETLQSLREEVIMELRSENDTHNGIPAGVNESVTDNIEATETNINMERPLEPKQQNEYTYLARSELNRAITEFSGSNPTKRPKLPKLKTNKNTNIILASVNSMFEEYTDQNTLEKIHTLIYCGAVAVLRLHKQQISTTLIQAEPKSVRKPPWQKRLEKDIDNIRAEIGRLTEFLRNRKPSRRLKSHIRKIYRKIGTNTKHPDHKQHIDVYMDTLKQKLQVKAKRLSRYVKCTERKHQNQRFLQNAANFHKGNNKTATNNNREVPDAQCLTDYWSSIWSNPKEHNRDEEWITNEKDRLDIRHMDFDGITEEEITTVIGATNNWKATGIDNIHNYWYKKFDKLHGALAKQLTYVLQHPKKTPTFLTQGLTYMLPKSDRTQDPSQYRPITCLPTLYKILTSCISNRIYQHLDDNNILAEEQKGCRKKHHGCKEQLIIDSVIMKQAHVGHRNVHSAFLDYLKAFDSTAHSWLVEVLQIYKIHPALVEFLKTTMTHWRTSLQVNMNNKSIKTDEIPIRRGIFQGDSLSPLWFCLAMNPLSSMLNRTGYGFRIKAERNYHTISHLLYMDDIKLYASNKKQLDDLLKTVSEFSADVHMKFGIEKCKTLNIQRGKVIDGETQLPNGDIIQCMRDGETYKYLGYQQARLLDQKQSKEKIRSEYSQRLKSVLKSMLNSGNLVKAINTYAIPVLLQSFGIIRWTKTELDDIQRQTRTMLTKYNNHHPNSSVIRTTLKRKEGGRGLIDVVNLHTEQIRNLREFFSAKALTSDLHRVVSLADKGYTPLNLATRDDLLNLPFLSDTEKQEQWSRQELHGRHHHEINQPHIDKEASNKWLMKGELFAETEGFLMAIQDQVIATNNYKKFIMKDGTLQTDRCRKCHIRSETIQHITSGCEQLANTDYLHRHNQVCNIIHQKLAPKYGLLNTFQPYYKYQPAPVLENDSIRLYYDRPIITDRMVTNNRPDIVVYDKRAKTAMLVDVAIPNNNNVLNKFQEKKSKYTDLAIEIKQMWHLDKIDIVPVIVSSTGLIPKTLHDSLKKLELHKNTYIEMQKL

SEQ ID NO: 31358 - protein, 1136 aa, Cryptolaemus montrouzieri
MPTTTRAGLPRKRMKWTPEMNTFIMRSYYKITNLESEMTAYRYALHLAFIEKYPELQHISEQRISDQRRTIVKNRLLSSETLQSLREEVIMELRSENDTHNGIPAGVNESVTDNIEATETNINMERPLEPNQQNEYTYLARSELNRAITEFSGSNPTKRPKLPKLKTNKNTNIILASVNSMFEEYTDQNTLEKIHTLIYCGAVAVLRLHKQQISTTLIQAEPKSVRKPPWQKRLEKDIDNIRAEIGRLTEFLRNRKPSRRLKSHIRKIYRKIGTNTKHPDHKQHIDVYMDTLKQKLQAKAKRLSRYVKCTERKHQNQRFLQNAANFHKGNNKTATNNNREVPDTQCLTDYWSSIWSNPKEHNRDAEWITNERERLDIRHMDFDGMTEEEITTVIGATNNWKATGIDNIHNYWYKKFDKLHGALAKQLTYVLQHPKKTPTFLTQGLTYMLPKSDRTQDPSQYRPITCLPTLYKILTSCISNRIYQHLDDNNILAEEQKGCRKKHHGCKEQLIIDSVIMKQAHVGHRNVHSAFLDYLKAFDSTAHSWLVEVLQIYKIHPALVEFLKTTMTHWRTSLQVNMNNKSIKTDEIPIRRGIFQGDSLSPLWFCLAMNPLSSMLNRTGYGFRIKAERNYHTISHLLYMDDIKLYASNKKQLDDLLKTVSEFSADVHMKFGIEKCKTLNIQRGKVIDGETQLPNGDIIQCMRDGETYKYLGCQQARLLDQKQSKEKIRSEYSQRLKSVLKSMLNSGNLVKAINTYTIPVLLYSFGIIRWTKTELDDIQRQTRTMLTKYNNHHPKSSVIRTTLKRKEGGRGLIDVVNLHTEQIRNLREFFSAKALTSDLHRVVSLADKGYTPLNLATRDDLLNLPFLSDTEKQEQWSRKELHGRHHHEINQPHIDKEASNKWLMKGELFAETEGFLMAIQDQVIATNNYKKFIMKDRTSQTDRCRKCHIRSETIQHITSGCEQLANTDYLHRHNQVCNIIHQKLAHKYGLLNTFQPYYKYQPAPVLENDSIRLYYDRPIITDRMVTNNRPDIVVYDKRAKTAMLVDVAIPNNNNVLNKFQEKKSKYTDLAIEIKQMWHLEKIDIVPVIVSSTGLIPKTLHDSLKKLELHKNTYIEMQKAVILNTCRIVRKFMSSIL

SEQ ID NO: 31359 - protein, 1159 aa, Cryptolaemus montrouzieri
MMYNLWNKPVNRHCTTITSCRVQDLGRGSCSESESQSPSVSDGSSVISSRDTATQNRVGNNINTSQPTLDVSTAAQAIMPTTTRAGLPRKRMKWTPEMNTFIMRSYYKITNLESEMTAYRYALHLAFIEKYPELQHISEQRISDQRRKIVKNRLLSSETLQSIREEVIMELRSENDTHNGIPAGSELNREFSGSNPTKRPKLPKLKTNKNTNIILASVNSVFEEYTDQNTLEKIHTLIYCGAVAVLRLHKQQISTTLIQAEPKSVRKPPWQKRLEKDIDNIRAEIGRLTEFLRNRKPSRRLKSHIRKIYRKIGTNTKHPDHKQHIDVYMDTLKQKLQAKAKRLSRYVKCTERKHQNQRFLQNAANFHKGNNETATNNNREVPDAQCLTDYWSSIWSNPKEHNRDAEWITNERERLDIRHMDFDGITEEEITTVIGATNNWKATGIDNIHNYWYKKFDKLHGALAKQLTYVLQHPKKTPTFLTQGLTYMLPKSDRTQDPSQYRPITCLPTLYKILTSCISNRIYQHLDDNNILAEEQKGCRKKHHGCKEQLIIDSVIMKRAHVGHRNVHSAFLDYLKAFDSTAHSWLVEVLQIYKIHPALVEFLKTTMTHWRTSLQVNMNNKSIKTDEIPIRRGIFQGDSLSPLWFCLAMNPLSSMLNRTGYGFRIKAEMNYHTISHLLYMDDIKLYASNKKQLDDLLKTVSEFSADVHMKFGIEKCKTLNIQRGKVIDRETQLPNGDIIQCMRDGETYKYLGYQQARLLDEKQSKEKIRSEYSQRLKSVLKSMLNSGNLVKAINTYAIPVLLYSFGIIRWTKTELDDIQRQTRTMLTKYNNHHPKSSVIRTTLKRKEGGRGLIDVVNLHTEQIKNLREFISAKALTSDLHRVVSLADKGYTPLNLATRDDLLNLPILSDTEKQEQWSRKELHGRHHHEIKQPHIDKEASNKWLMKGELFAETEGFLMAIQDQLIATNNYKKFIMKDGTLQTDRCRKCHIRSETIQHITSGCEQLANTDYLHRHNQVCNIIHQKLAHKYGLLNTFQPYYKYQPAPVLENDSIRLYCDRPIITDRMVTNNRPDIVVYDKRAKTAMLVDVAIPNNNNVLNKFQEKKSKYTDLAIEIKQMWHLEKIDIVPVIVSSTGLIPKTLHDSLKKLELHKNTYVEMQKL

SEQ ID NO: 31360 - protein, 945 aa, Cryptolaemus montrouzieri
MYLARSELNSAITEFSGSNPTKRPKLPKLKTNKNTNIILASVNSVFEEYTDQNTLEKIHTLIYCGAVAVLRLHKQQISTTLIQAEPKSVRKPPWQKRLERDIDNIRAEIGRLTEFLRNRKPSRRLKSHIRKIYRKIGTNTKHPDHKQHIDVYMDTVKQKLQAKAKRLSRYVKCTERKHQNQKFLQNAANFHKGNNKTATNNNREVPDAQCLTDYWSSLWSNPKEHNRDAEWITNEKERLDIRHMDFDGITEEEITTVVRATNNWKATGIDNIHNYWYKKFDKLHGALATQLTYVLQHPKKTPTFLTQGLTYMLPKSDRTQDPSQYRQITCLPTLYKILTSCISNRIYQHLDDNSILAEEQKGCRKKHHGCKEQLIIDSVIMKQAHVGHRNVRSAFLDYLKAFDSTAHSWLVEVLQIYKIHPSLVEFLKTTMTHWRTSLQVNMNNKSIKTDEIPIRRGIFQGDSLSPLWFCLAMNPLSSMLNRTGYGFRIKAERNYHTISHLLYMDDIKLYASNKKQLDDLLKTVSEFSADVHMEFGIEKRKTLNIQRGKVIDGDTQLPTGDIIQCMRDGETYKYLGYQQARLLDQKQSKEKIRSEYSQRLKSLLKSMLNSGNLVKAINTYAIPVLLYSFGIIRWTKTELDDIRRQTRTMLTKYNNHHPKSSVIRTTLKRKEGGRGLIDVVNLHTEQIKNLREFFSEKALTSDLHRAVSLADKGYTPLNLATRDDLLNLPFLSDTEKQEQWSRKELHGRHHHEINQPHIDKEASNKWLMKGELFAETEGFLMAIQDQVIATNNYKKFIMKDGTLQTDRCRKCHIRSETIQHITSGCEQLANIDYLHRHNQVCNIIHQKLAHKYGLLNTFQPYYKYQPAPVLENDSIRLYYDRPIITDRMVTNNRPDIVVYEKRAKTAMLVNVAIPNNNNVLNKFQEKSPNTQTWLLRSSRCGTSRK

SEQ ID NO: 31361 - protein, 1238 aa, Adalia bipunctata
MVFWSTGLAHPRYPSYLAVGIKCTSNGMYNLRSKRVNRHCTTRTSCRVQDLGRGSCSKNESQSPSDNDGSSVIPSRATATPHQEETAIHSPQPTLDASTATQVTMPATTRAGLPRKRMKWTQEMNSFIMRSYYKITHLESNMTAYRYGLHQEFIERYPELHHISEQRISDQRRTIVKNNLLSTDTLRSIRDEVLMELRNDTGANIETHPEQNQNEIQNMESNDNGEVPSDSNGSGEYAHSARSLLNMAMVEFQGANPTKRPKLPKLKTNKSTNIILASVNAAFDDHLEDFNSLEGIHTLVYCGAVATLRLHKQQVHTPEFHTRERTIKKPPWQIRLEKDIDKIRTEIGRLTEFLRNESPSRRLKSFVRKILKKIGNTMNKSESQHHIIIYVDTLKQKLQAKAKRLSRYVKCTQRKQHNQLFHNNEANFFKHITKSSNKVTRAMPEAQSLKNYWASLWSMPKEHNENADWIRREKNRTNIPQMNFEEISVDEVVTALKEASNWKAPGADNIHNFWYKKFGHLHEAIARQFTHILQHPQEAPTFLTEGVTYMLPKSDRTQDPSQYRPITCLPTLYKILTSCLSNRIYQHLDQNNIMAEEQKGCRRKHQGCKEQLIIDSVIMKQAHEKGRNLHSAFLDYQKAFDSTAHSWLIEVLHIYGINPVLVEFLRTTMSQWRTSIQVTMNNKTIKLEEISIRRGIFQGDSLSPLWFCLAMNPLSSMLRGTKCGFKIKTAREEHTISHLLYMDDIKLYAANKKQLDELLKTVSSFLSDVRMEFGIEKCRTLNIHRGKVVDGESQLPNGDILQAMRDGETYKYLGYQQARCLEQKQSKAKIREEYTGRLRTVMKSLLNSGNLIKAINSYAIPVLVYSFGVIKWTKTDLEDIQRQTRTMLTKQRGHHPRSSVLRTTLPRKEGGRGLADIVNLHTRQIKNLRKFFFEKANNSNLHRVVTLVDKKFTPLTLATADELLDLPSLSETDKLEQWSRKELHGRHHHELNQPHIDKTSSNKWLSKGELFPETEGFMMAIQDQVISTNNYKKYIMKDRTLPTDMCRKCHQKSETIQHVTSGCEQLANTDYLHRHNQVCNIIHQKLALKFGLLNSYKPYYKYQPLPVLENDSFRLYYDRPIITDRTVTNNRPDIVVYDKRVRKAILVDVAVPNNNNMLNKYQEKICKYTDLAFEIKEMWHLEKVDIVPVIISSTGLIPKSLHNSLNKLELNVNSYIEMQKAVILNTCRIVRKFLSSVS

SEQ ID NO: 31362 - protein, 1238 aa, Adalia bipunctata
MVFWSTGLAHPRYPSYLAIGIKCTSNGMYNLRSKRVNRHCTTRTSCRVQDLGRGSCSKNESQSPSDNDGSSVIPSRATATPHQEETAIHSPQPTLDASTATQVTMPATTRAGLPRKRMKWTQEMNSFIMRSYYKITHLESNMTAYRYGLHQEFIERYPELHHISEQRISDQRRTIVKNNLLSTDTLRSIRDEVLMELRNDTGANIETHPEQNQNEIQNMESNDNGEVPSDSNGSGEYAHSARSLLNMAMVEFQGANPTKRPKLPKLKTNKSTNIILASVNAAFDDHLEDFNSLEGIHTLVYCGAVATLRLHKQQVHTPEFHTRERTIKKPPWQIRLEKDIDKIRTEIGRLTEFLRNESPSRRLKSFVRKILKKIGNTMNKSESQHHIIIYVDTLKQKLQAKAKRLSRYVKCTQRKQHNQLFHNNEANFFKHITKSSNTVTRAMPEAQSLKNYWASLWSMPKEHNENADWIRREKNRTNIPQMNFEEISVDEVVTALKKASNWKAPGVDNIHNFWYKKFGHLHEAIARQFTHILQHPQEAPTFLTEGVTYMLPKSDRTQDPSQYRPITCLPTLYKILTSCLSNRIYQHLDQNNIMAEEQKGCRRKHQGCKEQLIIDSVIMKQAHEKGRNLHSAFLDYQKAFDSTAHSWLIEVLHIYGINPVLVEFLRTTMSQWRTSIQVTMNNKTIKLEEIPIRRGIFQGDSLSPLWFCLAMNPLSSMLRGTKCGFKIKTAREEHTISHLLYMDDIKLYAANKKQLDELLKTVSSFSSDVRMEFGIEKCRTLNIHRGKVVDGESQLPNGDILQAIRNGETYKYLGYQQARCLEQKQSKAKIREEYTGRLRTVMKSLLNSGNLIKAINSYAIPVLVYSFGVIKWTKIDLEDIQRQTRTMLTKQRGHHPRSSVLRTTLPRKEGGRGLADIVNLHTRQIKNLRKFFFEKANNYNLHRVVTLVDKKFTPSTLATADELLDLPSLSETDKLEQLSRKELHGRHHHELNQPHIDKTSSNKWLSKGELFPETEGFMMAIQDQVISTNNYKKYIMKDRTLPTDMCRKCHQKSETIQHVTSGCEQLANTDYLHRHNQVCNIIHQKLALKFGLLNSYKPYYKYQPLPVLENDSFRLYYDRPIITDRTVTNNRPDIVVYDKRVRRAILVDVAVPNNNNMLNKYQEKICKYTDLAFEIKEMWHLEKVDIVPVIISSTGLIPKSLHNSLNKIELNVNSYIEMQKAVILNTCRIVRKFLSSVS

SEQ ID NO: 31363 - protein, 861 aa, Adalia bipunctata
MNKSESQHHIIIYVDTLKQKLQAKAKRLSRYVKCTQRKQHNQLFHNNEANFFKHITKSSNKVTRAMPEAQSLKNYWASLWSMPKEHNENADWIRREKNRTNIPQMNFEEISVDEVVTALKEASNWKAPGVDNIHNFWYKKFGHLHEAIARQFTHILQHPQEAPTFLTEGVTYMLPKSDRTQDPSQYRPITCLPTLYKILTSCLSNRIYQHLDQNNIMAEEQKGCRRKHQGCKEQLIIDSVIMKQAHEKGRNLHSAFLDYQKAFDSTAHSWLIEVLHIYGINPVLVEFLRTTMSQWRTSIQVTMNNKTIKLEEIPIRRGIFQGDSLSPLWFCLAMNPLSSMLHGTKCGFKIKTAREEHTISHLLYMDDIKLYAANKKQLDELLKTVSSFSSDVRMEFGIEKCRTLNIHRGKVVDGESQLPNGDILQAMRDVETYKYLGYQQARCLEQKQSKAKIREEHTGRLRTVMKSLLNSGNLIKAINSYAIPVLVYSFGVIKWTKTDLEDIQRQTRTMLTKQRGHHPRSSVLRTTLPRKEGGRGLADIVNLHTRQIKNLREFFFEKANNSNLHRVVTLVDKKFTPLTLATADELLDLPSLSESDKLEQWSRKELHGRHHHELNQPHIDKTSSNKWLSKGELFPETEGFMMAIQDQVISTNNYKKYIMKDRTLPTDMCRKCHQKSETIQHVTSGCEQLANTDYLHRHNQVCNIIHQKLALKFGLLNSYKPYYKYQPLPVLENDSFRLYYDRPIITDRTVTNNRPDIVVYDKRVRKAILVDVAVPNNNNMLNKYQEKICKYTDLAFEIKEMWHLEKVDIVPVIISSTGLIPKSLHNSLNKLELNVNSYIEMQKAVILNTCRIVRKFLSSVS

SEQ ID NO: 31364 - protein, 1238 aa, Adalia bipunctata
MVFWSTGLAHPRYPSYLAVGIKCTSNGMYNLRSKRVNRHCTTRTSCRVQDLGRGSCSKNESQSPSDNDGSSVIPSRATATPHQEETAIHSPQPTLDASTATQVTMPATTRAGLPRKRMKWTQEMNSFIMRSYYKITHLESNMTAYRYGLHQEFIERYPELHHISEQRISDQRRTIVKNNLLSTDTLRSIRDEVLMELRNDTGANIETHPEQNQNEIQNMESNDNGEVPSDSNGSGEYAHSARSLLNMAMVEFQGANPTKRPKLPKLKTNKSTDIILASVNAAFDDHLEDFNSLEGIHTLVYCGAVATLRLHKQQVHTPEFHTRERTIKKPPWQIRLEKDIDKIRTVIGRLTEFLRNESPSRRLKSFVRKILKKIGNTMNKSESQHHIIIYVDTLKQKLQAKAKRLSRYLKCTQRKQHNQLFHNNEANFYKHITKSSNKVTRALPEAQSLKNYWASLWSMPKEPNENADWIRREKNRTNIPQMNFEEISVDEVVTALKEASNWKAPGVDNIHNFWYKKFSHLHEAIARQFTHILQHPQEAPTFLTEGVTYMLPKNDRTEDPSQYRPITCLPTLYKILTSCLSNRIYQHLDENNIMAEEQKGCRRKHQGCKEQLIIDSVIMKQAHEKGRNLHSAFLDYQKAFDSTAHSWLIEVLHIYGINPILVEFLRTTMSQWRTSIQVTMNNKTIKLEEIPIRRGIFQGDSLSPLWFCLAMNPLSSMLQGTKCGFKIKAARTEHTISHLLYMDDIKLYAANKKQLDELLKTVSSFSNDVRMEFGIEKCRTLNIHRGKVVDGESQLPNGDILQAMRDGETYKYLGYQQARCFEQKQSKAKIREEYTGRLRTVMKSLLQSGNLIKAINSYAIPVLVYSFGVIKWTKTDLEDIQRQTRTMLTKQRGHHPRSSVLRTTLPRKEGGRGLADVVNLHTRQIKNLREFFFEKANNSNLHKVVTLVDKKFTPLTLATADEFLDLPSLSETDKIEQWSRKELHGRHHHELNQPHIDKTSSNKWLSKGELFPETEGFMMAIQDQVISTNNYKKYIMKDRTVPTDMCRKCHQKSETIQHITSGCEQLANTDYLHRHNQVCNIIHQKLALKFGLLNSYKPYYKYQPLPVLENDSFRLYYDRPIITDRTVTNNRPDIVVYDKRVRKAILVDVAVPNNNNMLNKYQEKMCKYTDLAFEIKEMWHLEKVDIVPVIISSTGLIPKSLHNSLNKLELNVNSYIEMQKAVILNTCRIVRKFLSSVS

SEQ ID NO: 31365 - protein, 1211 aa, Adalia bipunctata
MYNLRSKRVNRHCTTRTSCRVQDLGRGSCSKNESQSPSDNDGSSVIPSRATATPHQEETAIHSPQPTLDASTATQVTMPATTRAGLPRKRMKWTQEMNSFIMRSYYKITHLESNMTAYRYGLHQEFIERYPELHHISEQRISDQRRTIVKNNLLSTDTLRSIRDEVLMELRNDTGANIETHPEQNQNEIQNMESNDNGEVPSDSNGSGEYAHSARSLLNMAMVEFQGANPTKRPKLPKLKTNKSTNIILASVNAAFDDHLEDFNSLEGIHTLVYCGAVATLRLHKQQVHTPEFHTRERTIKKPPWQIRLEKDIDKIRTEIGRLTEFLRNESPSRRLKSFVRKILKKIGNTMNKSESQHHIIIYVDTLKQKLQAKAKRLSRYVKCTQRKQHNQLFHNNEANFFKHITKSSNKVTRAMPEAQSLKNYWASLWSMPKEHNENADWIRREKNRTNIPQMNFEEISVDEVVTALKEASNWKAPGVDNIHNFWYKKFGHLHEAIARQFTHILQHPQEAPTFLTEGVTYMLPKSDRTQDPSQYRPITCLPTLYKILTSCLSNRIYQHLDQNNIMAEEQKGCRRKHQGCKEQLIIDSVIMKQAHEKGRNLHSAFLDYQKAFDSTAHSWLIEVLHIYGINPVLVEFLRTTMSQWRTSIQVTMNNKTIKLEEIPIRRGIFQGDSLSPLWFCLAMNPLSSMLRGTKCGFKIKTAREEHTISHLLYMDDIKLYAANKKQLDELLKTVSSFSSDVRMEFGIEKCRTLNIHRGKVVDGESQLPNGDILQAMRDGETYKYLGYQQARCLEQKQSKAKIREEYTGRLRTVMKSLLNSGNLIKAINSYAIPVLVYSFGVIKWTKTDLEDIQRQTRTMLTKQRGHHPRSSVLRTTLPRKEGGRGLADIVNLHTRQIKNLRKFFFEKANNSNLHRVVTLVDRKFTPLTLATADELLDLPSLSETDKLEQWSRKELHGRHHHELNQPHIDKTSSNKWLSKGELFPETEGFMMAIQDQVISTNNYKKYIMKDRTLPTDMCRKCHQKSETIQHVTSGCEQLANTDYLHRHNQVCNIIHQKLALKFGLLNSYKPYYKYQPLPVLENDSFRLYYDRPIITDRTVTNNRPDIVVYDKRVRKAILVDVAVPNNNNMLNKYQEKICKYTDLAFEIKEMWHLEKVDIVPVIISSTGLIPKSLHNSLNKLELNVNSYIEMQKAVILNTCRIVRKFLSSVS

SEQ ID NO: 31366 - protein, 1264 aa, Adalia bipunctata
MYICCIFFVYIIIIIIIIIINPQGLRMVFWSTGLAHPRYPSYLAVGIKCTSNGMYNLRSKRVNRHCTTRTSCRVQDLGRGSCSKNESQSPSDNDGSSVIPSRATATPHQEETAIHSPQPTLDASTATQVTMPATTRAGHPRKRMKWTQEMNSFIMRSYYKITHLESNMTAYRYGLHQEFIERYPELHHISEQRISDQRRTIVKNNLLPTDTLRSIRDEVLMELRNDTGANIETHPEQNQNEIQNMETNDNGEVPSDSNGSGEYAHSARSLLNMAMVEFQGANPTKRPKLPKLKTNKSTNIILASVNAAFDDHLEDFNSLEGIHTLVYCGAVATLRLHKQQVHTPEFHTRERTIKKPPWQIRLEKDIDKIRTEIGRLTEFLRNESPSRRLKSFVRKILKKIGNTMNKSESQHHIIIYVDTLKQKLQAKAKRLSRYVKCTQRKQHNQLFHNSEANFFKHITKSSNKVTRAMPEAQSLKNYWASLWSMPKEHNENADWIRREKNRTNIPQMNFEEISVDEVVTALKEASNWKAPGVDNIHNFWYKKFGHLHEAIARQFTHILQHPQEAPTFLTEGVTYMLPKSDRTQDPSQYRPITCLPTLYKILTSCLSNRIYQHLDQNNIMAEEQKGCRRKHQGCKEQLIIDSVIMKQAHEKGRNLHSAFLDYQKAFDSTAHSWLIEVLHIYGINPVLVEFLRTTMSQWRTSIQVTMNNKTIKLEEIPIRRGIFQGDSLSPLWFCLAMNPLSSMLRGTKCGFKIKTAREEHTISHLLYMDDIKLYAANKKQLDELLKTVSSFSSDVRMEFGIEKCRTLNIHRGKVVDGESQLPNGDILQAMRDGETYKYLGYQQARCLEQKQSKAKIREEYTGRLRTVMKSLLNSGNLIKAINSYAIPVLVYSFGVIKWTKTDLEDIQRQTRTMLTKQRGHHPRSSVLRTTLPRKEGGRGLADIVNLHTRQIKNLRKFFFEKANNSNLHRVVTLVDKKFTPLTLATADELLDLPSLSETDKLEQWSRKELHGRHHHELNQPHIDKTSSNKWLSKGELFPETEGFMMAIQDQVISTNNYKKYIMKDRTLPTDMCRKCHQKSETIQHVTSGCEQLANTDYLHRHNQVCNIIHQKLALKFGLLNSYKPYYKYQPLPVLENDSFRLYYDRPIITDRTVTNNRPDIVVYDKRVRKAILVDVAVPNNNNMLNKYQEKICKYTDLAFEIKEMWHLEKVDIVPVIISSTGLIPKSLHNSLNKLELNVNSYIEMQKAVILNTCRIVRKFLSSVS

SEQ ID NO: 31367 - protein, 1238 aa, Adalia bipunctata
MVFWSTGLAHPRYPSYLAVGIKCTSNGMYNLRSKRVNRHCTTRTSCRVQDLGRGSCSKNESQSPSDNDGSSVIPSRATATPHQEETAIHSPQPTLDASTATQVTMPATTRAGLPRKRMKWTQEMNSFIMRSYYKITHLESNMTAYRYGLHQEFIERYPELHHISEQRISDQRRTIVKNNLLSTDTLRSIRDEVLMELRNDTGANIETHPEQNQNEIQNMESNDNGEVPSGSNGSGEYAHSARSLLSMAMVEFQGANPTKRPKLPKLKTNKSTNIILASVNAAFDDHLEDFNSLEGLHTLVYCGAVATLRLHKQQVHTPEFHTRERTIKKPPWQIRLEKDIDKIRTEIGRLTEFLRNESPSRRLKSFVRKILKKIGNTMNKSESQHHIIIYVDTLKQKLQAKAKRLSRYVKCTQRKQHNQLFHNNEANFFKHITKSSNKVTRAMPEAQSLKNYWASLWSMPKEHNENADWIRREKNRTNIPQMNFEEISVDEVVTALKEASNWKAPGVDNIHNFWYKKFGHLHEAIAKQFTHILQHPQEAPTFLTEGVTYMLPKSDRTQDPSQYRPITCLPTLYKILTSCLSNRMYQHLDQNNIMAEEQKGCRRKHQGCKEQLIIDSVIMKQAHEKGRNLHSAFLDYQKAFDSTAHSWLIEVLHIYGINPVLVEFLRTTMSQWRTSIQVTMNNKTIKLEEIPIRRGIFQGDSLSPLWFCLAMNPLSSMLRGTKCGFKIKTAREEHTISHLLYMDDIKLYAANKKQLDELLKTVSSFSSDVRMEFGIEKCRTLNIHRGKVVDGESQLPNGDILQAMRDGETYKYLGYQQARCLEQKQSKAKIREEYTGRLRTVMKSLLNSGNLIKAINSYAIPVLVYSFGVIKWTKTDLEDIQRQTRTMLTKQRGHHPRSSVLRTTLPRKEGGRGLADIVNLHTRQIKNLREFFFEKANNSNLHRVVTLVDEKFTPLTLATADELLDLPSLSETDKLEQWSRKELHGRHHHELNQPHIDKTSSNKWLSKGELFPETEGFMMAIQDQVISTNNYKKYIMKDRILPTDMCRKCHQKSETIQHVTSGCEQLANTDYLHRHNQVCNIIHQKLALKFGLLNSYKPYYKYQPLPVLKNDSFRLYYDRPIITDRTVTNNRPDIVVYDKRVRKAILVDVAVPNNNNMLNKYQEKICKYTDLAFEIKEMWHLEKVDIVPVIISSTGLIPKSLHNSLNKLELNVNSYIEMQKAVILNTCRIVRKFLSSVS

SEQ ID NO: 31368 - protein, 990 aa, Adalia bipunctata
MVEFQGANPTKRPKLPKLKTNKSTNIILASVNAAFDDHLEDFNSLEGIHTLVYCGAVATLRLHKQQVHTPEFHTRERTIKKPPWQIRLEKDIDKIRTEIGRLTEFLRNESPSRRLKSFVRKILKKIGNTMNKSESQHHIIIYVDTLKQKLQAKAKRLSRYVKCTQRKQHNQLFHNNEANFFKHITKSSNKVTRAMPEAQSLKNYWASLWSMPKEHNENADWIRREKNRTNIPQMNFEEISVDEVVTALKEASNWKAPGVDNIHNFWYKKFGHLHEAIARQFTHILQHPQEAPTFLTEGVTYMLPKSDRTQDPSQYRPITCLPTLYKILTSCLSNRIYQHLDQNNIMAEEQKGCRRKHQGCKEQLIIDSVIMKQAHEKGRNLHSAFLDYQKAFDSTAHSWLIEVLHIYGINPVLVEFLRTTMSQWRTSIQVTMNNKTIKLEEIPIRRGIFQGDSLSPLWFCLAMNPLSSMLHGTKCGFKIKTAREEHTISHLLYMDDIKLYAANKKQLDELLKTVSSFSSDVRMEFGIEKCRTLNIHRGKVVDGESQLPNGDILQAMRDGETYKYLGYQQARCLEQKQSKAKIREEYTGRLRTVMKSLLNSGNLIKAINSYAIPVLVYSFGVIKWTKTDLEDIQRQTRTMLTKQRGHHPRSSVLRTTLPRKEGGRGLADIVNLHTRQIKNLREFFFEKANNSNLHRVVTLVDKKFTPLTLATADELLDLPSLSETDKLEQWSRKELHGRHHHELNQPHIDKTSSNKWLSKGELFPETEGFMMAIQDQVISTNNYKKYIMKDRTLPTDMCRKCHQKSETIQHVTSGCEQLANTDYLHRHNQVCNIIHQKLALKFGLLNSYKPYYKYQPLPVLENDSFRLYYDRPIITDRTVTNNRPDIVVYDKRVRKAILVDVAVPNNNNMLNKYQEKICKYTDLAFEIKEMWHLEKVDIVPVIISSTGLIPKSLHNSLNKLELNVNSYIEMQKAVILNTCRIVRKFLSSVS

SEQ ID NO: 31369 - protein, 1238 aa, Adalia bipunctata
MVFWSTGLAHPRYPSYLAVGIKCTSNGMYNLRSKRVNRHCTTRTSCRVQDLGRGSCSKNESQSPSDNDGSSVIPSRATATPHQEETAIHSPQPTLDASTATQVTMPATTRAGLPRKRMKWTQEMNSFIMRSYYKITHLESNMTAYRYGLHQEFIERYPELHHISEQRISDQRRTIVKNNLLSTDTLRSIRDEVLMELRNDTGANIETHPEQNQNEIQNMESNDNGEVPSDSNGSGEYAHSARSLLNMAMVEFQGANPTKRPKLPKLKTNKSTNIILASVNAAFDDHLEDFNSLEGIHTLVYCGAVATLRLHKQQVHTPEFHTRERTIKKPPWQIRLEKDIDKIRTEIGRLTEFLRNESPSRRLKSFVRKILKKIGNTMNKSESQHHIIIYVDTLKQKLQAKAKRLSRYVKCTQRKQHNQLFHNNEANFFKHITKSSNKVTRAMPEAQSLKNYWASLWSMPKEHNENADWIRREKNRTNIPQMNFEEISVDEVVTALKEASNWKAPGVDNIHNFWYKKFGHLHEAIARQFTHILQHPQEAPTFLTEGVTYMLPKSDRTQDPSQYRPITCLPTLYKILTSCLSNRIYQHLDQNNIMAEEQKGCRRKHQGCKEQLIIDSVIMKQAHEKGRNLHSAFLDYQKAFDSTAHSWLIEVLHIYGINPVLVEFLRTTMSQWRTSIQVTMNNKTIKLEEIPIRRGIFQGDSLSPLWFCLAMNPLSSMLRGTKCGFKIKTAREEHTISHLLYMDDIKLYAANKKQLDELLKTVSSFSSDVRMEFGIEKCRTLNINRGKVVDGESQLPNGDILQAMRDGETYKYLGYQQARCLEQKQSKAKIREEYTGRLRTVMKSLLNSGNLIKAINSYAIPVLVYSFGVIKWTKTDLEDIQRQTRTMLTKQRGHHPRSSVLRTTLPRKEGGRGLADIVNLHTRQIKNLRKFFFEKANNSNLHRVVTLVDKKFTPLTLATADELLDLPSLSETDKLEQWSRKELHGRHHHELNQPHIDKTSSNKWLSKGELFPETEGFMMAIQDQVISTNNYKKYIMKDRTLPTDMCRKCHQKSETIQHVTSGCEQLANTDYLHRHNQVCNIIHQKLALKFGLLNSYKPYYKYQPLPVLENDSFRLYYDRPIITDRTVTNNRPDIVVYDKRVRKAILVDVAVPNNNNMLNKYQEKICKYTDLAFEIKEMWHLEKVDIVPVIISSTGLIPKSLHNSLNKIELNVNSYIEMQKAVILNTCRIVRKFLSSVS

SEQ ID NO: 31370 - protein, 1238 aa, Adalia bipunctata
MVFWTTGLAHPRYPSYLAVGIKCTSNGMYNLRSKRVNRHCTTRTSCRVQDLGRGSCSKNESQSPSDNDGSSVIPSRATATPHQEETAIHSPQPTLDASTATQVTMPATTRAGLPRKRMKWTQEMNSFIMRSYYKITHLESNMTAYRYGLHQEFIERYPELHHISEQRISDQRRTIVKNNLLSTDTLRSIRDEVLMELRNDTGANIETHPEQNQNETQNMESNDNGEVPSGSNGSGEYAHSARSLLSMAMVEFQGANPTKRPKLPKLKTNKSTNIIMASVNAAFDDHLEDFNSLEGLHTLVYCGAVATLRLHKQQVHTPEFHTRERTIKKPPWQIRLEKDIDKIRTEIGRLTEFLRNESPSRRLKSFVRKILKKIGNTMNKSESQHHIIIYVDTLKQKLQAKAKRLSRYVKCTQRKQHNQLFHNNEANFFKHITKSSNKVTRAMPEAQSLKNYWASLWSMPKEHNENADWIRREKNRTNIPQMNFEEISVDEVVTALKEASNWKAPGVDNIHNFWYKKFGHLHEAIAKQFTHILQHPQEAPTFLTEGVTYMLSKSDRTQDPSQYRPITCLPTLYKILTSCLSNRMYQHLDQNNIMAEEQKGCRRKHQGCKEQLIIDSVIMKQAHEKGRNLHSAFLDYQKAFDSTAHSWLIEVLHIYGINPVLVEFLRTTMSQWRTSIQVTMNNKTIKLEEIPIRRGIFQGDSLSPLWFCLAMNPLSSMLRGTKCGFKIKTAREEHTISHLLYMDDIKLYAANKKQLDELLKTVSSFSSDVRMEFGIEKCRTLNIHRGKVVDGESQLPNGDILQAMRDGETYKYLGYQQARCLEQKQSKAKIREEYTGRLRTVMKSLLNSGNLIKAINSYAIPVLVYSFGVIKWTKTDLEDIQRQTRTMLTKQRGHHPRSSVLRTTLPRKEGGRGLADIVNLHTRQIKNLREFFFEKANNSNLHRVVTLVDKKFTPLTLATADELLDLPSLSETDKLEQWSRRELHGRHHHELNQPHIDKTSSNKWLSKGELFPETEGFMMAIQDQVISTNNYKKYIMKDRTLPTDMCRKCHQKSETIQHVTSGCEQLANTDYLHRHNQVCNIIHQKLALKFGLLNSYKPYYKYQPLPVLENDSFRLYYDRPIITDRTVTNNRPDIVVYDKRVRKAILVDVAVPNNNNMLNKYQEKICKYTDLAFEIKEMWHLEKVDIVPVIISSTGLIPKSLHNSLNKLELNVNSYIEMQKAVILNTCRIVRKFLSSVS

SEQ ID NO: 31371 - protein, 1238 aa, Adalia bipunctata
MVFWSTGLAHPRYPSYLAVGIKCTSNGMYNLRSKRVNRHCTTRTSCRVQDLGRGSCSKNESQSPSDNDGSSVIPSRATATPHQEETAIHSPQPTLDASTATQVTMPATTRAGLPRKRMKWTQEMNSFIMRSYYKITHLESNMTAYRYGLHQEFIERYPELHHISEQRISDQRRTIVKNNLLSTDTLRIIRDEVLMELRNDTGANIETHPEQNQNEIQNMESNDNGEVPSDSNGSGEYAHSARSLLNMAMVEFQGANPTKRPKLPKLKTNKSTNIILASVNAAFDDHLEDFNSLEGIHTLVYCGAVATLRLHKQQVHTPEFHTRERTIKKPPWQIRLEKDIDKIRTEIGRLTEFLRNESPSRRLKSFVRKILKKIGNTMNKSESQHHIIIYVDTLKQKLQAKAKRLSRYVKCTQRKQHNQLFHNNEANFFKHITKSSNKVTRAMPEAQSLKNYWASLWSMPKEHNENADWIRREKNRTNIPQMNFEEISVDEVVTALKEASNWKAPGVDNIHNFWYKKFGHLHEAIARQFTHILQHPQEAPTFLTEGVTYMLPKSDRTQDPSQYRPITCLPTLYKILTSCLSNRIYQHLDQNNIMAEEQKGCRRKHQGCKEQLIIDSVIMKQAHEKGRNLHSAFLDYQKAFDSTAHSWLIEVLHIYGINPVLVEFLRTTMSQWRTSIQVTMNNKTIKLEEIPIRRGIFQGDSLSPLWFCLAMNPLSSMLRGTKCGFKIKTAREEHTISHLLYMDDIKLYAANKKQLDELLKTVSSFSSDVRMEFGIEKCRTLNIHRGKVVDGESQLPNGDILQAMRDGETYKYLGYQQARCLEQKQSKAKIREEYNGRLRTVMKSLLNSGNLIKAINSYAIPVLVYSFGVIKWTKTDLEDIQRQTRTMLTKQRGHHPRSSVLRTTLPRKEGGRGLADIVNLHTRQIKNLRKFFFEKANNSNLHRVVTLVDKKFTPLTVATADELLDLPSLSETDKLEQWSRKELHGRHHHELNQPHIDKTSSNKWLSKGELFPETEGFMMAIQDQVISTNNYKKYIMKDRTLPTDMCRKCHQKSETIQHVTSGCEQLANTDYLHRHNQVCNIIHQKLALKFGLLNSYKPYYKYQPLPMLENDSFRLYYDRPIITDRTVTNNRPDIVVYDKRVRKAILVDVAVPNNNNMLNKYQEKICKYTDLAFEIKEMWHLEKVDIVPVIISSTGLIPKSLHNSLNKIELNVNSYIEMQKAVILNTCRIVRKFLSSVS

SEQ ID NO: 31372 - protein, 1251 aa, Adalia bipunctata
MNSRSHLQLIIIIMVFWSTGLAHPRYPSYLAVGIKCTSNGMYNLRSKRVNRHCTTRTSCRVQDLGRGSCSKNESQSPSDNDGSSVIPSRATATPHQEETAIHSPQPTLDASTATQVTMPATTRAGLPRKRMKWTQEMNSFIMRSYYKITHLESNMTAYRYGLHQEFIERYPELHHISEQRISDQRRTIVKNNLLSTDTLRSIRDEVLMELRNDTGANIETHPEQNQNEIQNMESNDNGEVPSDSNGSGEYAHSARSLLNMAMVEFQGANPTKRPKLPKLKTNKSTNIILASVNAAFDDHLEDFNSLEGIHTLVYCGAVATLRLHKQQVHTPEFHTRERTIKKPPWQIRLEKDIDKIRTEIGRLTEFLRNESPSRRLKSFVRKILKKIGNTMNKSESQHHIIIYVDTLKQKLQAKAKRLSRYVKCTQRKQHNQLFHNNEANFFKHITKSSNKVTRAMPEAQSLKNYWASLWSRPKEHNENADWIRREKNRTNIPQMNFEEISVDEVVTALKEASNWKAPGVDNIHNFWYKKFGHLHEAIARQFTHILQHPQEAPTFLTEGVTYMLPKSDRTQDPSQYRPITCLPTLYKILTSCLSNRIYQHLDQNNIMAEEQKGCRRKHQGCKEQLIIDSVIMKQAHEKGRNLHSAFLDYQKAFDSTAHSWLIEVLHIYGINPVLVEFLRTTMSQWRTSIQVTMNNNTIKLEEIPIRRGIFQGDSLSPLWFCLAMNPLSSMLRGTKCGFKIKTAREEHTISHLLYMDDIKLYAANKKQLDELLKTVSSFSSDVRMEFGIEKCRTLNIHRGKVVDGESQLPNGDILQAMRDGETYKYLGYQQARCLEQKQSKAKIREEYTGRLRTVMKSLLNSGNLIKAINSYAIPVLVYSFGVIKWTKTDLEDIQRQTRTMLTKQRGHHPRSSVLRTTLPRKEGGRGLADIVNLHTRQIKNLRKFFFEKANNSNLHRVVTLVDKKFTPLTLATADELLDLPSLSETDKLEQWSRKELHGRHHHELNQPHIDKTSSNKWLSKGELFPETEGFMMAIQDQVISTNNYKKYIMKDRTLPTDMCRKCHQKSETIQHVTSGCEQLANTDYLHRHNQVCNIIHQKLALKFGLLNSYKPYYKYQPLPVLENDSFRLYYDRPIITDRTVTNNRPDIVVYDKRVRKAILVDVAVPNNNNMLNKYQEKICKYTDLAFEIREMWHLEKVDIVPVIISSTGLIPKSLHNSLNKLELNVNSYIEMQKAVILNTCRIVRKFLSSVS

SEQ ID NO: 31373 - protein, 1121 aa, Adalia bipunctata
MKWTQEMNSFIMRSYYKITHLESNMTAYRYGLHQEFIERYPELHHISEQRISDQRRTIVKNNLLSTDTLRSIRDEVLMELRNDTGANIETHPEQNQNETQNMESNDNGEVPSGSNGSGEYAHSARSLLSMAMVEFQGANPTKRPKLPKLKTNKSTNIILASVNAAFDDHLEDFNSLEGLHTLVYCGAVATLRLHKQQVHTPEFHTRERTIKKPPWQIRLEKDIDKIRTEIGRLTEFLRNESPSRRLKSFVRKILKKIGNTMNKSESQHHIIIYVDTLKQKLQAKAKRLSRYVKCTQRKQHNQLFHNNEANFFKHITKSSNKVTRAMPEAQSLKNYWASLWSMPKEHNENADWIRREKNRTNIPQMNFEEISVDEVVTALKEASNWKAPGVDNIHNFWYKKFGHLHEAIAKQFTHILQHPQEAPTFLTEGVTYMLSKSDRTQDPSQYRPITCLPTLYKILTSCLSNRMYQHLDQNNIMAEEQKGCRRKHQGCKEQLIIDSVIMKQAHEKGRNLHSAFLDYQKAFDSTAHSWLIEVLHIYGINPVLVEFLRTTMSQWRTSIQVTMNNKTIKLEEIPIRRGIFQGDSLSPLWFCLAMNPLSSMLRGTKCGFKIKTAREEHTISHLLYMDDIKLYAANKKQLDELLKTVSSFSSDVRMEFGIEKCRTLNIHRGKVVDGESQLPNGDILQAMRDGETYKYLGYQQARCLEQKQSKAKIREEYTGRLRTVMKSLLNSGNLIKAINSYAIPVLVYSFGVIKWTKTDLEDIQRQTRTMLTKQRGHHPRSSVLRTTLPRKEGGRGLADIVNLHTRQIKNLREFFFEKANNSNLHRVVTLVDKKFTPLTLATADELLDLPSLSETDKLEQWSRRELHGRHHHELNQPHIDKTSSNKWLSKGELFPETEGFMMAIQDQVISTNNYKKYIMKDRTLPTDMCRKCHQKSETIQHVTSGCEQLANTDYLHRHNQVCNIIHQKLALKFGLLNSYKPYYKYQPLPVLENDSFRLYYDRPIITDRTVTNNRPDIVVYDKRVRKAILVDVAVPNNNNMLNKYQEKICKYTDLAFEIKEMWHLEKVDIVPVIISSTGLIPKSLHNSLNKLELNVNSYIEMQKAVILNTCRIVRKFLSSVS

SEQ ID NO: 31374 - protein, 1263 aa, Adalia bipunctata
MQEKRSTELIVIIIIIIIIFPQGLRMVFWSTGLAHPRYPSYLAVGIKCTSNGMYNLRSKRVNRHCTTRTSCRVQDLGRGSCSKNESQSPSDNDGSSVIPSRATATPHQEETAIHSPQPTLDASTATQVTMPATTRAGLPRKRMKWTQEMNSFIMRSYYKITHLESNMTAYRYGLHQEFIERYPELHHISEQRISDQRRTIVKNNLLSTDTLRSIRDEVLMELRNDTGANIETHPEQNQNEIQNMESNDNGEVPSDSNGSGEYAHSARSLLNMAMVEFQGANPTKRPKLPKLKTNKSTNIILASVNAAFDDHLEDFNSLEGIHTLVYCGAVATLRLHKQQVHTPEFHTRERTIKKPPWQIRLEKDIDKIRTEIGRLTEFLRNESPSRRLKSFVRKILKKIGNTMNKSESQHHIIIYVDTLKQKLQAKAKRLSRYVKCTQQKQHNQLFHNNEANFFKHITKSSNKVTRAMPEAQSLKNYWASLWPMPKEHNENADWIRREKNRTNIPQMNFEEISVDEVVTALKEASNWKAPGVDNIHNFWYKKFGHLHEAIARQFTHILQHPQEAPTFLTEGVTYMLPKSDRTQDPSQYRPITCLPTLYKILTSCLSNRIYQHLDQNNIMAEEQKGCRRKHQGCKEQLIIDSVIMKQAHEKGRNLHSAFLDYQKAFDSTAHSWLIEVLHIYGINPVLVEFLRTTMSQWRTSIQVTMNNKTIKLEEIPIRRGIFQGDSLSPLWFCLAMNPLSSMLRGTKCGFKIKTAREEHTISHLLYMDDIKLYAANKKQLDELLKTVSSFSSDVRMEFGIEKCRTLNIHRGKVVDGESQLPNGDILQAMRDGETYKYLGYQQARCLEQKQSKAKIREEYTGRLRTVMKSLLNSGNLIKAINSYAIPVLVYSFGVIKWTKTDLEDIQRQTRTMLTKQRGHHPRSSVLRTTLPRKEGGRGLADIVNLHTRQIKTLRKFFFEKANNSNLHRVVTLVDKRFTPLTLATADELLDLPSLSETDKLEQWSRKELHGRHHHELNQPHIDKTSSNKWLSKGELFPETEGFMMAIQDQVISTNNYKKYIMKDRTLPTDMCRKCQQKSETIQHVTSGCEQLANTDYLHRHNQVCNIIHQKLALKFGLLNSYKPYYKYQPLPVLENDSFRLYYDRPTITDRTVTNNRPDIVVYDKRVRKAILVDVAVPNNNNMLNKYQEKICKYTDLAFEIKEMWHLEKVDIVPVIISSTGLIPKSLHNSLNKLELNVNSYIEMQKAVILNTCRIVRKFLSSVS

SEQ ID NO: 31375 - protein, 1164 aa, Adalia bipunctata
MFFHWFIEVIPARAETGRPMMKNNNNNNNNNIATTRAGLPRKRMKWTQEMNSFIMRSYYKITHLESNMTAYRYGLHQEFIERYPELHHISEQRISDQRRTIVKNNLLSTDTLRSIRDEVLMELRNDTGANIETHPEQNQNEIQNMESNDNGEVPSDSNGSGEYAHSARSLLNMAMVEFQGANPTKRPKLPKLKTNKSTNIILASVNAAFDDHLEDFNSLEGIHTLVYCGAVATLRLHKQQVHTPEFHTRERTIKKPPWQIRLEKDIDKIRTEIGRLTEFLRNESPSRRLKSFVRKILKKIGNTMNKSESQHHIIIYVDTLKQKLQAKAKRLSRYVKCTQRKQHNQLFHNNEANFFKHITKSSNKVTRAMPEAQSLKNYWASLWSMPKEHNENADWIRREKNRTNIPQMNFEEISVDEVVTALKEASNWKAPGVDNIHNFWYKKFGHLHEAIARQFTHILQHPQEAPTFLTEGVTYMLPKSDRTQDPSQYRPITCLPTLYKILTSCLSNRIYQHLDQNNIMAEEQKGCRRKHQGCKEQLIIDSVIMKQAHEKGRNLHSAFLDYQKAFDSTAHSWLIEVLHIYGINPVLVEFLRTTMSQWRTSIQVTMNNKTIKLEEIPIRRGIFQGDSLSPLWFCLAMNPLSSMLRGTKCGFKIKTAREEHTISHLLYMDDIKLYAANKKQLDELLKTVSSFSSDVRMEFGIEKCRTLNIHRGKVVDGESQLPNGDILQAMRDGETYKYLGYQQARCLEQKQSKAKIREEYTGRLRTVMKSLLNSGNLIKAINSYAIPVLVYSFGVIKWTKTDLEDIQRQTRTMLTKQRGHHPRSSVLRTTLPRKEGGRGLADIVNLHTRQIKNLRKFFFEKANNSNLHRVVTLVDKKFTPLTLATADELLDLPSLSETDKLEQWSRKELHGRHHHELNQPHIDKTSSNKWLSKGELFPETEGFMMAIQDQVISTNNYKKYIMKDRTLPTDMCRKCHQKSETIQHVTSGCEQLANTDYLHRHNQVCNIIHQKLALKFGLLNSYKPYYKYQPLPVLENDSFRLYYDRPIITDRTVTNNRPDIVVYDKRVRKAILVDVAVPNNNNMLNKYQEKICKYTDLAFEIKEMWHLEKVDIVPVIISSTGLIPKSLHNSLNKLELNVNSYIEMQKAVILNTCRIVRKFLSSVS

SEQ ID NO: 31376 - protein, 955 aa, Adalia bipunctata
MKGAKIVSRTRAPLSLAGALAVATLRLHKQQVHTPEFHTRERTIKKPPWQIRLEKDIDKIRTEIGRLTEFLRNESPSRRLKSFVRKILKKIGNTMNKSESQHHIIIYVDTLKQKLQAKAKRLSRYVKCTQRKQHNQLFHNNEANFFKHITKSSNKVTRAMPEAQSLKNYWASLWSMPKEHNENADWIRREKNRTNIPQMNFEEISVDEVVTALKEASNWKAPGVDNIHNFWYKKFGHLHEAIARQFTHILQHPQEAPTFLTEGVTYMLPKSDRTQDPSQYRPITCLPTLYKILTSCLSNRIYQHLDQNNIMAEEQKGCRRKHQGCKEQLIIDSVIMKQAHEKGRNLHSAFLDYQKAFDSTAHSWLIEVLHIYGINPVLVEFLRTTMSQWRTSIQVTMNNKTIKLEEIPIRRGIFQGDSLSPLWFCLAMNPLSSMLHGTKCGFKIKTAREEHTISHLLYMDDIKLYAANKKQLDELLKTVSSFSNDVRMEFGIEKCRTLNIHRGKVVDGESQLPNGDILQAMRDGETYKYLGYQQARCLEQKQSKAKIREEYTGRLRTVMKSLLNSGNLIKAINSYAIPVLVYSFGVIKWTKTDLEDIQRQTRTMLTKQRGHHPRSSVLRTTLPRKEGGRGLADIVNLHTRQIKNLREFFFEKANNSNLHRVVTLVDKKFTPLTLATADELLDLPSLSETDKLEQWSRKELHGRHHHELNQPHIDKTSSNKWLSKGELFPETEGFMMAIQDQVISTNNYKKYIMKNRTLPTDMCRKCHQKSETIQHVTSGCEQLANTDYLHRHNQVCNIIHQKLALKFGLLNSYKPYYKYQPLPVLENDSFRLYYDRPIITDRTVTNNRPDIVVYDKRVRKAILVDVAVPNNNNMLNKYQEKICKYTDLAFEIKEMWHLEKVDIVPVIISSTGLIPKSLHNSLNKLELNVNSYIEMQKAVILNTCRIVRKFLSSVS

SEQ ID NO: 31377 - protein, 1238 aa, Adalia bipunctata
MVFWSTGLAHPRYPSYLAVGIKCTSNGMYNLRSRRVNRHCTTRTSCRVQDLGRGSCSKNESQSPSDNDGSSVIPSRATATPHQEETAIHSPQPTLDASTATQVTMPATTRAGLPRKRMKWTQEMNSFIMRSYYKITHLESNMTAYRYGLHQEFIERYPELHHISEQRISDQRRTIVKNNLLSTDTLRSIRDEVLMELRNDTGANIETHPEQNQNEIQNMESNDNGEVPSDSNGSGEYAHSARSLLNMAMVEFQGANPTKRPKLPKLKTNKSTNIILASVNAAFDDHLEDFNSLEGIHTLVYCGAVATLRLHKQQVHTPEFHTRERTIKKPPWQIRLEKDIDKIRTEIGRLTEFLRNESPSRRLKSFVRKILKKIGNTMNKSESQHHIIIYVDTLKQKLQAKAKRLSRYVKCTQRKQHNQLFHNNEANFFKHITKSSNKVTRAMPEAQSLKNYWASLWSMPKEHNENADWIRREKNRTNIPQMNFEEISVDEVVTALKEASNWKAPGVDNIHNFWYKKFGHLHEAIARQFTHILQHSQEAPTFLTEGVTYMLPKSDRTQDPSQYRPITCLPTLYKILTSCLSNRIYQHLDQNNIMAEEQKGCRRKHQGCKEQLIIDSVIMKQAHEKGRNLHSAFLDYQKAFDSTAHSWLIEVLHIYGINPVLVEFLRTTMSQWRTSIQVTMNNKTIKLEEIPIRRGIFQGDSLSPLWFCLAMNPLSSMLRGTKCGFKIKTAREEHTISHLLYMDDIKLYAANKKQLDELLKTVSSFSSDVRMEFGIEKCRTLNIHRGKVVDGESQLPNGDILQAMRDGETYKYLGYQQARCLEQKQSKAKIREEYTGRLRTVMKSLLNSGNLIKAINSYAIPVLVYSFGVIKWTKTDLEDIQRQTRTMLTKQRGHHPRSSVLRTTLPRKEGGRGLADIVNLHTRQIKNLRKFFFEKANNSNLHRVVTLVDKKFTPLTLATADELLDLPSLSETDKLEQWSRKELHGRHQHELNQPHIDKTSSNKWLSKGELFPETEGFMMAIQDQVISTNNYKKYIMKDRTLPTDMCRKCHQKSETIQHVTSGCEQLANTDYLHRHNQVCNIIHQKLALKFGLLNSYKPYYKYQPLPVLENDSFRLYYDRPIITDRTVTNNRPDIVVYDKRVRKAILVDVAVPNNNNMLNKYQEKICKYTDLAFEIKEMWHLEKVDIVPVIISSTGLIPKSLHNSLNKLELNVNSYIEMQKAVILNTCRIVRKFLSSVS

SEQ ID NO: 31378 - protein, 861 aa, Adalia bipunctata
MNKSESQHHIIIYVDTLKQKLQAKAKRLSRYLKCTQRKQQNQLFHNNEANFYKHITKSSNKVTRALPEAQSLKNYWASLWSMPKEHNENADWIRREKNRTNIPQMNFEEISVDEVVTALKEASNWKAPGVDNIHNFWYKKFSHLHGAIARQFTHILQHPQEAPTFLTEGVTYMLPKNDRTEDPSQYRPITCLPTLYKILTSCLSNRIYQHLDENNIMAEEQKGCRRKHQGCKEQLVIDSVIMKQAHEKGRNLHSAFLDYQKAFDSTAHSWLIEVLHIYGINPLLVEFLRTTMSQWRTSIQVTMNNKTIKLEEIPIRRGIFQGDSLSPLWFCLAMNPLSSMLQGTKCGFKIKAARTEHTISHLLYMDDIKLYAANKKQLDELLKTVSSFSNDVRMEFCIEKCRTLNIHRGKVVDGESQLPNGDILQAMRDGETYKYLGYQQARCLEQKQSKAKIREEYTGRLRTVMKSLLQSGNLIKAINSYAIPVLVYSFGVIKWTKTDLEDIQRQTRTMLTKQRGHHPRSSVLRTTLPRKEGGRGLADIVNLHTRQIKNLREFFFEKANNSNLHRVVTLVDKKFTPLTLATADEFLDLPSLSEADKIEQWSRKELHGRHHHELNQPHIDKTSSNKWLSKGELFPETEGFMMAIQDQVISTNNYKKYIMKDRTVPTDMCRKCHQKSETIQHITSGCEQLANTDYLHRHNQVCNIIHQKLALKFGLLNSYKPYYKYQPLPVLENDSFRLYYDRPIITDRTVTNNRPDIVVYDKRVRKAILVDVAVPNNNNMLNKYQEKMCKYTDLAFEIKEMWHLEKVDIVPVIISSTGLVPKSLHNSLNRLELNVNSYIEMQKAVILNTCRIVRKFLSSVS

SEQ ID NO: 31379 - protein, 1238 aa, Adalia bipunctata
MVFWSTGLAHPRYPSYLAVGIKCNSNGMYNLRSKRVNRHCTTRTSCRVQDLGRGSCSKNESQSPSDNDGSSVIPSRATATPHQEETAIHSPQPTLDASTATQVTMPATTRAGLPRKRMKWTQEMNSFIMRSYYKITHLESNMTAYRYGLHQEFIERYPELHHISEQRISDQRRTIVKNNLLSTDTLRSIRDEVLMELRNDTGANIETHPEQNQNEIQNMESNDNGEVPSDSNGSGEYAHSARSLLNMAMVEFQGANPTKRPKLPKLKTNKSTNIILASVNAAFDDHLEDFNSLEGIHTLVYCGAVATLRLHKQQVHTPEFHTRERTIKKPPWQIRLEKDIDKIRTEIGRLTEFLRNESPSRRLKSFVRKILKKIGNTMNKSEIQHHIIIYVDTLKQKLQAKAKRLSRYVKCTQRKQHNQLFHNNEANFFKHITKSSNKVTRAMPEAQSLKNYWASLWSMPKEHNENADWIRREKNRTNIPQMNFEEISVDEVVTALKEASNWKAPGVDNIHNFWYKKFCHLHEAIARQFTHILQHPQEAPTFLTEGVTYMLPKSDRTQDPSQYRPITCLPTLYKILTSCLSNRIYQHLDQNNIMAEEQKGCRRKHQGCKEQLIIDSVIMKQAHEKGRNLHSAFLDYQKAFDSTAHSWLIEVLHIYGINPVLVEFLRTTMSQWRTSIQVTMNNKTIKLEEIPIRRGIFQGDSLSPLWFCLAMNPLSSMLRGTKCGFKIKTAREEHTISHLLYMDDIKLYAANKKQLDELLKTVSSFSSDVRMEFGIEKCRTLNIHRGKVVDGESQLPNGDILQAMRDGETYKYLGYQQARCLEQKQSKAKIREEYTGRLRTVMKSLLNSGNLIKAINSYAIPVLVYSFGVIKWTKTDLEDIQRQTRTMLTKQRGHHPRSSVLRTTLPRKEGGRGLADIVNLHTRQIKNLRKFFFEKANNSNLHRVVTLVDKKFTPLTLATADELLDLPSLSETDKLEQWSRKELHGRHHHELNQPHIDKTSSNKWLSKGELFPETEGFMMAIQDQVISTNNYKKYIMKDRTLPTDMCRKCHQKSETIQHVTSGCEQLANTDYLHRHNQVCNIIHQKLALKFGLLNSYKPYYKYQPLPVLENDSFRLYYDRPIITDRTVTNNRPDIVVYDKRVRKAILVDVAVPNNNNMLNKYQEKICKYTDLAFEIKEMWHLEKVDIVPVIISSTGLIPKSLHNSLNKIELNVNSYIEMQKAVILNTCRIVRKFLSSVS

SEQ ID NO: 31380 - protein, 1238 aa, Adalia bipunctata
MVFWSTGLAHPRYPSYLAVGIKCTSNGMYNLRSKRVNRHCTTRTSCRVQDLGRGSCSKNESQSPSDNDGSSVIPSRATATPHQEETAIHIPQPTLDASTATQVTMPATTRAGLPRKRMKWTQEMNSFIMRSYYKITHLESNMTAYRYGLHQEFIERYPELHHISEQRISDQRRTIVKNNLLSTDTLRSIRDEVLMELRNDTGANIETHPEQNQNEIQNMESNDNGEVPSDSNGSGEYAHSARSLLNMAMVEFQGANPTKRPKLPKLKTNKSTNIILASVNAAFDDHLEDFNSLEGIHTLVYCGAVATLRLHKQQVHTPEFHTREKTIKKPPWQIRLEKDIDKIRTEIGRLTEFLRNESPSRRLKSFVRKTLKKIGNTMNKSESQHHLIIYVDTLKQKLQAKAKRLSRYVKCTQRKQHNQLFHNNEANFFKHITKSSNKVTRAMPEAQSLKNYWASLWSMPKEHNENADWIRREKNRTNIPQMNFEEISVDEVVTALKEASNWKAPGVDNIHNFWYKKFGHLHEAIARQFTHILQHPQEAPTFLTEGVTYMLPKSDRTQDPSQYRPITCLPTLYKILTSCLSNRIYQHLDQNNIMAEEQKGCRRKHQGCKEQLIIDSVIMKQAHEKGRNLHSAFLDYQKAFDSTAHSWLIEVLHIYGINPVLVEFLRTTMSQWRTSIQVTMNNKTIKLEEIPIRRGIFQGDSLSPLWFCLAMNPLSSMLHGTKCGFKIKTAREEHTISHLLYMDDIKLYAANKKQLDELLKTVSSFSSDVRMEFGIEKCRTLNIHRGKVVDGESQLPNGDILQAMRDGETYKYLGYQQARCLEQKQSKAKIREEYTGRLRTVMKSLLNSGNLIKAINSYAIPVLVYSFGVIKWTKTDLEDIQRQTRTMLTKQRGHHPRSSVLRTTLPRKEGGRGLADIVNLHTRQIKNLREFFFEKANNSNLHRVVTLVDKKFTPLTLATADELLDLPSLSETDKLEQWSRKELHGRHHHELNQPHIDKTASNKWLSKGELFPETEGFMMAIQDQVISTNNYKKYIMKDRTLPTDMCRKCHQKSETIQHVTSGCEQLANTDYLHRHNQVCNIIHQKLALKFGLLNSYKPYYKYQPLPVLENDSFRLYYDRPIITDRTVTNNRPDIVVYDKRVRKAILVDVAVPNNNNMLNKYQEKICKYTDLAFEIKEMWHLEKVDIVPVIISSTGLIPKSLHNSLNKLELNVNSYIEMQKAVILNTCRIVRKFLSSVS

SEQ ID NO: 31381 - protein, 1238 aa, Adalia bipunctata
MVFWSTGLAHPRYPSYLAVGIKCTSNGMYNLRSKRVNRHCTTRTSCRVQDLGRGSCSKNESQSPSDNDGSSVIPSRATATPHQEETAIHSPQPTLDASTATQVTMPATTRAGLPRKRMKWTQEMNSFIMRSYYKITHLESNMTAYRYGLHQEFIERYPELHHISEQRISDQRRTIVKNNLLSTDTLRSIRDEVLMELRNDTGANIETHPEQNQNEIQNMESNDNGEVPSDSNGSGEYAHSARSLLNMAMVEFQGANPTKRPKLPKLKTNKSTNIILASVNAAFDGHLEDFNSLEGIHTLVYCGAVATLRLHKQQVHTPEFHTRERTIKKPPWQIRLEKDIDKIRTEIGRLTEFLRNESPSRRLKSFVRKILKKIGNTMNKSESQHHIIIYVDTLKQKLQAKAKRLSRYVKCTQRKQHNQLFHNNEANFFKHITKSSNKVTRAMPEAQSLKNYWASLWSMPKEHNENADWIRREKNRTNIPQMNFEEISVDEVVTALKEASNWKAPGVDNIHNFWYKKFGHLHEAIARQFTHILQHPQEAPTFLTEGVTYMLPKSDRTQDPSQYRPITCLPTLYKILTSCLSNRIYQHLDQNNIMAEEQKGCRRKHQGCKEQLIIDSVIMKQAHEKGRNLHSAFLDYQKAFDSTAHSWLIEVLHIYGINPVLVEFLRTTMSQWRTSIQVTMNNKTIKLEEIPIRRGIFQGDSLSPLWFCLAMNPLSSMLRGTKCGFKIKTAREEHTISHLLYMDDIKLYAANKKQLDELLKTVSSFSSDVRMEFGIEKCRTLNIHRGKVVDGESQLPNGDILQAMRDGETYKYLGYQQARCLEQKQSKAKIREEYTGRLRTVMKSLLNSGNLIKAINSYAIPVLVYSFGVIKWTKTDLEDIQRQTRTMLTKQRGHHPRSSVLRTTLPRKEGGRGLADIVNLHTRQIKNLRKFFFEKANNSNLHRVVTLVDKKFTPLTLATADELLDLLSLSETDKLEQWSRKELHGRHHHELNQPHIDKTSSNKWLSKGELFPETEGFMMAIQDQVISTNNYKKYIMKDRTLPTDMCRKCHQKSETIQHVTSGCEQLANTDYLHRHNQVCNIIHQKLALKFGLLNSYKPYYKYQPLPVLENDSFRLYYDRPIITDRTVTNNRPDIVVYDKRVRKAILVDVAVPNNNNMLNKYQEKICKYTDLAFEIKEMWHLEKVDIVPVIISSTGLIPKSLHNSLNKIELNVNSYIEMQKAVILNTCRIVRKFLSSVS

SEQ ID NO: 31382 - protein, 1231 aa, Adalia bipunctata
MNNNNNNNNNSIGIKCTSNGMYNLRSKRVNRHCTTRTSCRVQDLGRGSCSKNESQSPSDNDGSSVIPSRATATPHQEETAIHSPQPTLDASTATQVTMPATTRAGLPRKRMKWTQEMNSFIMRSYYKITHLESNMTAYRYGLHQEFIERYPELHHISEQRISDQRRTIVKNNLLSTDTLRSIRDEVLMELRNDTGANIETHPEQNQNEIQNMESNDNGEVPSDSNGSGEYAHSARSLLSMAMVEFQGANPTKRPKLPKLKTNKSTNIILASVNAAFDDHLEDFNSLEGIHTLVYCGAVATLRLHKQQVHTPEFHTRERTIKKPPWQIRLEKDIDKIRTEIGRLTEFLRNESPSRRLKSFVRKILKKIGNTMNKSESQHHIIIYVDTLKQKLQAKAKRLSRYVKCTQRKQHNQLFHNNEANFFKHITKSSNKVTRAMPEAQSLKNYWASLWSVPKEHNENADWIRREKNRTNIPQMNFEEISVDEVVTALKEASNWKAPGVDNIHNFWYKKFGHLHEAIARQFTHILQHPQEAPTFLTEGVTYMLPKSDRTQDPSQYRPITCLPTLYKILTSCLSNRIHQHLDQNNIMAEEQKGCRRKHQGCKEQLIIDSVIMKQAHEKGRNLHSAFLDYQKAFDSTAHSWLIEVLHIYGINPVLVEFLRTTMSQWRTSIQVTMNNKTIKLEEIPIRRGIFQGDSLSPLWFCLAMNPLSSMLHGTKCGFKIKTAREEHTISHLLYMDDIKLYAANKKQLDELLKTVSSFSSDVRMEFGIEKCRTLNIHRGKVVDGETQLPNGDILQAMRDGETYKYLGYQQARCLEQKQSKAKIREEYTGRLRTVMKSLLNSGNLIKAINSYAIPVLVYSFGVIKWTKTDLEDIQRQTRTMLTKQRGHHPRSSVLRTTLPRKEGGRGLADIVNLHTRQIKNLREFFFEKANNSNLHRVVTLVDKKFTPLTLATADELLDLPSLSETDKLEQWSRKELHGRHHHELNQPHIDKTSSNKWLAKGELFPETEGFMMAIQDQVISTNNYKKYIMKDRTLPTDMCRKCHQKSETIQHVTSGCEQLANTDYLHRHNQVCNIIHQKLALKFGLLNSYKPYYKYQPLPVLENDSFRLYYDRPIITDRTVTNNRPDIVVYDKRVRKAILVDVAVPNNNNMLNKYQEKICKYTDLAFEIKEMWHLEKVDIVPVIISSTGLIPKSLHNSLNKLELNVNTYIEMQKAVILNTCRIVRKFLSSVS

SEQ ID NO: 31383 - protein, 1110 aa, Adalia bipunctata
MRSYYKITHLESNMTAYRYGLHQEFIERYPELHHISEQRISDQRRTIVKNNLLPTDTLRSIRDEVLMELRNDTGANIETHPERNQNEIQNMESNDNGEVPSDSNGSGEYAHSARSLLNMAMVEFQGANPTKRPKLPKLKTNKSTNIILASVNAAFDDHLEDFNSLEGIHTLVYCGAVATLRLHKQQVHTPEFHTRERTIKKPPWQIRLEKDIDKIRTEIGRLTEFLRNESPSRRLKSFVRKILKKIGNTMNKSESQHHIIIYVDTLKQKLQAKAKRLSRYVKCTQRKQHNQLFHNSEANFFKHITKSSNKVTRAMPEAQSLKNYWASLWSMPKEHNENADWIRREKNRTNIPQMNFEEISVDEVVTALKEASNWKAPGVDNIHNFWYKKFGHLHEAIARQFTHILQHPQEAPTFLTEGVTYMLPKSDRTQDPSQYRPITCLPTLYKILTSCLSNRIYQHLDQNNIMAEEQKGCRRKHQGCKEQLIIDSVIMKQAHEKGRNLHSAFLDYQKAFDSTAHSWLIEVLHIYGINPVLVEFLRTTMSQWRTSIQVTMNNKTIKLEEIPIRRGIFQGDSLSPLWFCLAMNPLSSMLRGTKCGFKIKTAREEHTISHLLYMDDIKLYAANKKQLDELLKTVSSFSSDVRMEFGIEKCRTLNIHRGKVVDGESQLPNGDILQAMKDGETYKYLGYQQARCLEQKQSKAKIREEYTGRLRTVMKSLLNSGNLIKAINSYAIPVLVYSFGVIKWTKTDLEDIQRQTRTMLTKQRGHHPRSSVLRTTLPRKEGGRGLADIVNLHTRQIKNLRKFFFEKANNSNLHRVVTLVDKKFTPLTLATADELLDLPSLSETDKLEQWSRKELHGRHHHELNQPHIDKTSSNKWLSKGELFPETEGFMMAIQDQVISTNNYKKYIMKDRTLPTDMCRKCHQKSETIQHVTSGCEQLANTDYLHRHNQVCNIIHQKLALKFGLLNSYKPYYKYQPLPVLENDSFRLYYDRPIITDRTVTNNRPDIVVYDKRVRKAILVDVAVPNNNNMLNKYQEKICKYTDLAFEIKEMWHLEKVDIVPVIISSTGLIPKSLHNSLNKLELNVNSYIEMQKAVILNTCRIVRKFLSSVS

SEQ ID NO: 31384 - protein, 1238 aa, Adalia bipunctata
MVFWSTGLAHPRYPSYLAVGIKCTSNGMYNLRSKRVNRHCTTRTSCRVQDLGRGSCSKNESQSPSDNDGSSVIPSRATATPHQEETAIHSPQPTLDASTATQVTMPATTRAGLPRKRMKWTQEMNSFIMRSYYKITHLESNMTAYRYGLHQEFIERYPELHHISEQRISDQRRTIVKNNLLPTDTLRSIRDEVLMELRNDTGANIETHPEQNQNEIQNMESNDNGEVPSDSNGSGEYAHSARSLLNMAMVEFQGANPTKRPKLPKLKTNKSTNIILASVNAAFDDHLEDFNSLEGIHTLVYCGAVATLRLHKQQVHTPEFHTRERTIKKPPWQIRLEKDIDKIRTEIGRLTEFLRNESPSRRLKSFVRKLLKKIGNTMNKSESQHHIIIYVDTLKQKLQAKAKRLSRYVKCTQRKQHNQLFHNSEANFFKHITKSSNKVTRAMPEAQSLKNYWASLWSMPKEHNENADWIRREKNRTNIPQMNFEEISVDEVVTALKEASNWKAPGVDNIHNFWYKKFGHLHEAIARQFTHILQHPQEAPTFLTEGVTYMLPKSDRTQDPSQYRPITCLPTLYKILTSCLSNRIYQHLDQNNIMAEEQKGCRRKHQGCKEQLIIDSVIMKQAHEKGRNLHSAFLDYQKAFDSTAHSWLIEVLHIYGINPVLVEFLRTTMSQWRTSIQVTMNNKTIKLEEIPIRRGIFQGDSLSPLWFCLAMNPLSSMLRGTKCGFKIKTAREEHTISHLLYMDDIKLYAANKKQLDELLKTVSSFSSDVRMEFGIEKCRTLNIHRGKVVDGESQLPNGDILQAMRDGETYKYLGYQQARCLEQKQSKAKIREEYTGRLRTVMKSLLNSGNLIKAINSYAIPVLVYSFGVIKWTKTDLEDIQRQTRTMLTKQRGHHPRSSVLRTTLPRKEGGRGLADIVNLHTRQIKNLRKFFFEKANNSNLHRVVTLVDKKFTPLTLATADELLDLPSLSETDKLEQWSRKELHGRHHHELNQPHIDKTSSNKWLSKGELFPETEGFMMAIQDQVISTNNYKKYIMKDRTLPTDMCRKCHQKSETIQHVTSGCEQLANTDYLHRHNQVCNIIHQKLALKFGLLNSYKPYYKYQPLPVLENDSFRLYYDRPIITDRTVTNNRPDIVVYDKRVRKAILVDVAVPNNNNMLNKYQEKICKYTDLAFEIKEMWHLEKVDIVPVIISSTGLIPKSLHNSLNKLELNVNSYIEMQKAVILNTCRIVRKFLSSVS

SEQ ID NO: 31385 - protein, 931 aa, Cryptolaemus montrouzieri
MELRSEDDTHNGIPIVNESNTNNIEAMETNIKIERPPETNQQNEFMNLARSELNRAIIEFSGSDPTKRPKLPKLKTNKNTNIILASINSVFEEYTDHITLERIHTLIYCGAVAVLRLHKQQVSTTLIRSEPKSVRKPPWQKRLEKDIDNIRAQIGRLTEFLRNKKPSRRLKSYIRKIHRKIGTNTKHPDRQQHIDMYMDTLKQKLQAKAKRLSRYVKCTERKHQKKRFLQNVANFHKGNNKTATNNNREVPDAQCLTDYRSSLWSNPKEHNNDAKWITHEKQRLDIKHMDFEGITEEEVTTVVRATNNWKATGIDNIHNYWYKKFDKLHGALAKQLTYVLQHPKKTPTFLTQGLTYMLPKSDKTQDPSQYRPITCLPTLYKILTSCISNRIYQHLDDNILAEEQRRCRKKHHGCKEQLIIDSVIMKQAHVGHRNVHSAFLDYLKAFDSTVHSWLVEVLQIYKIQPALVEFLKTTMTHWRTSLQVNMNNTSIKTDEIPIRRGIFQGDSLSPLWFCLAMNPLSPMLNRTGYGFRIKAERNYHTISHLLYMDDIKLYASNKKQLDDLLKTVSEFSADVYMKFGIEKCKTLNIQRGKVIDGETQLPNGDIIQCMRDGETYKYLGCQQARLLDQKQSKEKIRSEYSQRLKSVLKSMLNSGNLVKAINTYAIPVLLYSFGIIRWTKTELDDIQRQTRTMLTKYNNHHPKSSVIRTTLKRKVGGRGLIDVVNLHTEQIKNLREFFSAKAFTSDLHRMVSLADKGYTPLNLATRDDLLNLPFLSDTEKQEQWSRKELHGRHHHEINQPHIDKEASNKWLMKGELFAETEGFLMAIQDQVIATNYKKFIMKDGTLQTDKCRKCHIRSETIQHITSGCEQLANTDYLHRHNQVCNIIHQKLAHKYGLLNTFQPYYKINRRPYWKMTLSDYTTIGLLSLTEW

SEQ ID NO: 31386 - protein, 1011 aa, Cryptolaemus montrouzieri
MERPPEQNQQDEYMYLARSELNRAITEFSGSNPTKRPKLPKLKTNKNTNIILASVNSVFEEYTDQNTLEKIHTLIYCGAVAVLRLHKQQISTTLIQAEPKSVRKPPWQKRLEKDIDNIRAEIGRLTEFLRNRKPSRRLKSHIRKIYRKIGTNTKHPDHKQHIDVYMDTLKQKLQAKAKRLSRYVKCTERKHQNQRFLQNTANFHKGNNKTATNNNREVPDAQCLTGYWSSLWSNPKEHNRDAEWITNEKERLDIRHMDFDGITEEEITTVVRATNNWKATGIDNIHNYWYKKFDKLHGALAKQLTYVLQHPKKIPTFLTQGLTYMLPKGDKRQDSSQYRPITCLPTLYKILTSCISNRIYQHLDDNNILAEEQKGCRKKHHGCKKQLIIDSVIMKQAHVGHRNVHSAFLDYLKAFDSTAHSWLVEILQIYKIHPSLVEFLKTTMTHWRTSLQVNMNKKSIKTDEIPIRRGIFQGDSLSPLWFCLAMNPLSSMLNRTGYGFRIKAERNYHTISHLLYMDDIKLYASNKKQLDDLLKTVSEFSANVKFGIEKCKTLNIQRGKVIDGETQLPNGDIIQCMRDGETYKYLGYQQARLLDQKQSKEKIRSEYSQRLKSVLKSMLNSGNLVKAINTYAIPVLLYSFGIIRWTKTELDDIQRQTRTMLTNYNNHHPKSSVIRTTLKRKEGGRGLIHVVNLHTEQIKNLREFFSEKALTSDLHRAVSLADKGYTPLNLATRDDLLNLRFLSDTEKQEQWSRKELHGRHHHEINQPHIDKEASNEWLMKGELFAETEGFLMAIQDQVIATNNYKKFIMMDGTLQTDRCRKCHIRSETIQHITSGCEQLANTDYLHRHNQVCNIIHQKLAHKYGLLNTFQPYYMYRPAPVLENDSIRLYYDRPIITDRMVTNNRPDIVVYDKRAKTAMLVDVAIPNNNNVLNKFQEKKSKYTDLAIEIKQMWHLEKIDIVPVIVSSTGLIPKTLHDSLKKLELHKNTYVEMQKAVILNTCRIVRKFMSSIL

SEQ ID NO: 31387 - protein, 942 aa, Cryptolaemus montrouzieri
MERPPEPNQQNEYMYLARTELNRAITEFSGSNRTKRPKLLKLKTNKNTNIILASVNSVFEEHTDQNTLEKIHTLIYCGAVAVLRLHKQQISTTLIQAEPKNARKPPWQKRLEKDIDNIRAEIGRLTEFLRNRKPSRRLKSHILKIYRKIGTNTKHPDHKQHIDVYMDTLKQKLQAKTKRLSRYVKCTESKHQNRRFLQNAANFHKGNNKTATNNNREVPNAQCLTDYWSSLWSNPKEHNRDAEWITNEKERLDIKHMNFEAITEEEITTVVRATNNWKVTRIDNTHKYWCKKFDKIHGALAKQLTYVLQHPKKTPTFLTQGLTYMLPKSDRTQDPSQYRPITCLPTLYKILTSCISNRIYPDDNNILAEEQKGCRKKHHGCKEQLIIDSVIMKQAHVRHRNVHSAFLDYLKAFDSTAHSWLVEVLQIYKIHPALVEFLKTTMTHWRTSLQVNMNNESIKTDEISIRRGIFQGDSLSPLWFCSTMNPLSSMLNRTGYGFRIKAERNYHTISHLLYMDDIKLYASNKKQLDDLLKTVSEFSADVHMKFGIEKCKTLNNQRGKVIDDETQLPNGDIIQCMRDGETYKYLGYQQARLLDQKQSKEKRLKSVLKSMLNSGNLVKAINTYAIPVLLYSFGIIRWTKTELDDIQRQTRTLLTKYNNHHPKSSVIRTTLKRKEGGRGLIDVVNLHTEQIRNLREFFSAKALTSDLHRVVSLADKGYTPLNLATRDDLLNLPFLSDTEKQEQWSRKELHGRHHHEINQPHIDKEASNKWLMKGELFAETEGFLMAIQDQVIATNNYKKFIMKDGTLQTDKCRKCHIRSETIQHISSGCEQLANTEYLHRHNQVCNIIHQKLAHKYGLLNTFQPYYKYQPAPVLENDSIRLYYDRPVITDRMVTNNRPDIVLYDKRARTAMLVDVAVPNNNNVLNKFQEKKSKYTDLAIEIK

SEQ ID NO: 31388 - protein, 1739 aa, Ixodes persulcatus
MTNKRKITIRGSRVAVTPSSSRPGDGQSLRDGGSGDTSPTPNRPRCTCGREFDTLRGLRVHAFRMKHDLTTPPRSEIGGQSDESLECPVVSPLGLGRGATTHVPEAALGAGASAAVIEGAELPVCVGLPLGTQVRSPSMPSRSMTTASAEQHDGGSGDTIPVPDRPKCICGREFGTLRGLRMHAARMKHDLTTPPGGRIGGQSEEALECPLVGPLGLGRGTTTRVPEEAPRPGTSAAVLEYREMTEGFGSPSRTSFEMVSVLSGSRMTAIVDQGSELGSARVEAVTQPGKKNQGRKVTFDISPSVAVIERRAHRRVLRPKSGKIECAAVEQATRPVCPQGSRRREGRPPSADSTTQGPLRRAAEAEARFPTRVFRAKRGAATPVVAFMGATTPSCEGVALADDVDPRRKELRDVMPRREDSGAHLKRSKVLAESAGAAGVGRPTNSSGPEVELLTHLSRREGVLAGETGTPECNPFEPYGSPGLRTESSGILRSGTNDSVGGRGALDDDLIQSERCEELAEVAAGSSNFFSPPPEEKVGDVDAGEEGDVVPLRHEMMLSESTKDSSVRFGQPSLEMSPVGPVEAGRPTSTLLHRGSQSLHPLVGEGARSKRPVGPRVIRRERSGDGVSASSVATPSAEESAVGMDGGVSLVAAEGVDLVTQNHEYCSTEAVKGRDPAGFLCPECSRGFASKVGVSLHRRAKHFSEYNAEIDITRVKARWSREEQFLMAKKEAQLSHAGQLANMNQQLRESVAAGRTLEAIKSHRRREDYRKLVQEALTVETSKELAGASYSKDGGDYEVDVLCSTGGLLGDGSGRVAPAVVPRMGLRSRQLAGTGGGQNTMPPMSDSSSSTDFESDETDDGGSDEPPGRGSLRPLRQDTGARIIAEITSLVNRPPPQSHQAYMLWDVAKLACRGVEVGAALNNYIREVFCVNERPVRRPTRQVPSGRESRRKKKKREYAEMQQLFKKKRSECARKVLDGDQNTGVKDPVEFLENWKAVMAGEEPLPRVPGSLQSPSSKIDILYLITAQDIKNAFPPLNSAPGPDGFTSRNLRAVPMPVLRVLLNLLNLTRRVPVCLQGARTVFLPKKPQASAYSDFRPITMSSVLLRLYHKILAQRLMAAVEFDFRQRAFIPVDGCGENISILSAVLDEAKTRFRPLYLASVDLAKAFDRVSTEAILRGARLAGLSEGFLEYLEHLYRSSNTVLRFQNSELLVQPTAGVRQGDPLSPLLFNLVLNEWLQGLDENISFTSGGLRVSAMAFADDLLVMATTPQGLQERLDSLITFLVPRGLQINVTKSFTLALVPAKDRKVKVDTSKSFSVGGVALPTSDTASVWRYLGLQFSAMGRQAMPLERELAELLDRVSKAPLKPQQRLVLLRFYLIPRLLHRLVLGPWSQKLLLRLDKMVRAAMRRWLALPHDAPMAYFHAEVAEGGLGVPSLRTAIPGMQLRRLDKLAQSSHPACREALKTRLLKSLIQRAKTAAKYRGRELFTKKAVASFWAELLHHSVDGAALKHCKDAPYAQAWVRDGTRLVSGKQFINLVKLRINALPNLTRTKRGQGGAPTACRAGCLAPESLGHILQACHRTHTTRLQRHDGIVVYLADRLKEIGWDVEIEPRIVTDRGTVEPDLVLRREGQSVIVDAQVVGTRLPLQEAHRHKVAKYNFPDLLRQIQVAPSDPPVVTSATVSYRGVWALDSVSVLHDLGLGRHDIKLMTVRVLQGGVRCFRVHQRMTTVVSRAMYRR

SEQ ID NO: 31389 - protein, 1232 aa, Ixodes scapularis
MIWAKNRTGSPNAKGMRQKGCCQDILEVAAGSSVISIPPLEEGRGVEGVGVQGAEVPILQDTGVSEYAADITVDFMQPPMVVCPVGPVGIGRPTSPSGLLRSLPLHPMIGDGVRSRRLTGPRATDQGYGEEGTSSHTVGTPDNAASDVAEGVRLSPLRGAGADPLAQNLGVVSAKVVECSNPTGYFCPECSREFSTKIGVSLHRRAKHFSEYNVEIDVTRVKARWSKEEQFLMAKREAQLTQAGKLANMNQQLRDSVAAGRTLEAIKSHRRREDYRSLVREVIQADSGRGVASASPQNDRGDSDDDISSTGDPPGVEVERVPAVAAPRMELRSRARVVPSVGHTTTTHVAGGASTTQSDSDTTDDGGPDGPLEGGSARLLRPDTGARIITEINSLVNRPPPQSHQAYKLWDVAKLATKGVEVGAALNNYIREVFCVNERPARRPKRHVPAGRESRRKKKKREYAEMQQLFKKKRSECARKVLDGDQDTGVRDPVEFLERWRAVMAGEEPLPRVPGSFNPPSETIDILFLITAQDIKNAFPPLNSAPGPDGLTSRKLRAVPMPILRVLLNLLNLTRKVPVCLQGARTVFLPKKPQASAYSDFRPITMASVLLRLYHKILAHRLMESVDFDFRQRAFIPVDGCGENISILSAVLDEAKTRFRPLYLASVDLAKAFDRVSTEAILRGARLAGLSEGFLGYLEHLYRSSNTVLHFQNSEMLVQPTAGVRQGDPLSPLLFNLVLNEWLQGLDERITFVSGDLRVSAMAFADDLLIMATTPQGLQERLDSLMSFLVPRGLQINVTKSFTLALVPSKDKKVKVDTSKIFTVGGIALPTSDTATVWRYLGLQFLAMGRSAMPLERELAELLCKVSKAPLKPQQRLVILRFYLIPRLLHRLVLGPWSQKLLLRLDKMIRASMRRWLALPHDAPMAYFHADVSEGGLGVPSLRTAIPGMQIRRLEKLSQSSHPACRAALKTRLLKSLTQRAKAAARYRGKELFTKKAVSAFWTELLHHSVDGAALKNCRDAPYAQAWVRDGTRLLSGKQFIDLVKLRINAFPNLTRTKRGQGGASKSCRAGCLAPESLGHLLQACHRTHSTRLQRHDGLVAYLAKRLEELEWDVAVEPRIETNRGTVEPDLVLKREGQSVIVDAQVVGTRLPLHEAHRHKVAKYSFPDLWNQIRVGPSDTPVVTSATVSYRGVWAKDSVAALHDLGLGRYDVKLMTVRALQGGFGVSVFTKR

SEQ ID NO: 31390 - protein, 1000 aa, Ixodes scapularis
MAKREAQLTQAGKLANMNQQLRDSVAAGRTLEAIKSHRRREDYRSLVREVIQADSGRGVASASPQNDRGDSDDDISSTGDPPGVEVERVPAVAAPRMELRSRARVVPSVGHTTTTHVAGGASTTQSDSDTTDDGGPDGPLEGGSARLLRPDTGARIITEINSLVNRPPPQSHQAYKLWDVAKLATKGVEVGAALNNYIREVFCVNERPARRPKRHVPAGRESRRKKKKREYAEMQQLFKKKRSECARKVLDGDQDTGVRDPVEFLERWRAVMAGEEPLPRVPGSFNPPSETIDILFLITAQDIKNAFPPLNSAPGPDGFTSRKLRAVPMPILRVLLNLLNLTRKVPVCLQGARTVFLPKKPQASAYSDFRPITMASVLLRLYHKILAHRLMESVDFDFRQRAFIPVDGCGENISILSAVLDEAKTRFRPLYLASVDLAKAFDRVSTEAILRGARLAGLSEGFLGYLEHLYRSSNTVLHFQNSEMLVQPTAGVRQGDPLSPLLFNLVLNEWLQGLDERITFVSGDLRVSAMAFAHDLLIMATTPQGLQERLDSLMSFLVPRGLQINVTKSFTLALVPSKDKKVKVDTSKIFTVGGIALPTSDTATVWRYLGLQFSAMGRSAMPLERELAELLCKVSKAPLKPQQRLVILRFYLIPRLLHRLVLGPWSQKLLLRLDKMIRASMRRWLALPHDAPMAYFHADVSEGGLGVPSLRTAIPGMQIRRLEKLSQSSHPACRAALKTRLLKSLTQRAKAAARYRGKELFTKKAVSAFWTELLHHSVDGAALKNCRDAPYAQAWVRDGTRLLSGKQFIDLVKLRINAFPNLTRTKRGQGGASKSCRAGCLAPESLGHLLQACHRTHSTRLQRHDGLVAYLAKRLEELEWDVAVEPRIETNRGTVEPDLVLKREGQSVIVDAQVVGTRLPLHEAHRHKVAKYSFPDLWNQIRVGPSDTPVVTSATVSYRGVWAKDSVAALHDLGLGRYDVKLMTVRALQGGFGVSVFTKR

SEQ ID NO: 31391 - protein, 1748 aa, Ixodes scapularis
MTNKRKDTIRGSRVAVTPSSSRPGDGQSLRNGGSGDTGPNPSRPKCTCGREFGTLRGLRVHAFRMKHDLTTLLSSEGGGHSVKALECLVVGPLGLGRGATTHVPEVALGAEASAAVHECVVMPEGMGSPLGTSGRTESVPSGSVMTAKDEHESQRGSARVGAVALPGKKNPKRKVTFETSPSVAVTERRAHRMVLRPKRDGTVCVAAEQANRFVCLEESRRREGRPPSADSTTRGAVEKAAEAEIRFPTRIFRAKRGAAAPGDRIKGMATPYCGTDARKLSTADATGQMLKDVMPRTEDSSAQKKQPKVMAEPVGAAGVGRPTNSSGPDVELLTRLTNREGVMARETGTPGHGPMEWPGLPGVRTMIESPRILPTGTQDSMEVRGGPDGRGLMPKKRCEEFAEVAAGSSIFFIPPTGEDVGDEGAGRDGSGAQGKRPKVMAKLIRAAGLGRPTDSSGPDVKLSTRRTKRKGVMTRESGAPGHGPTDRPALPGVRIGIVSPGSPLTGIQDVVEERGGPDDKGRMPKKRCEEFAELAASSSIFFIPPTGEDAGDDGVGERGDVPLRYELMVNESTEDSSACVGQPYVEVSPVGPVGAGRPTSPPGLRRPLSLHPMVGEGARSKRPVGPRALQLNQNEDGTSSCLVAAPSIDDSATGVVEGRSLVVVDGVSPLAQNRESGSTEVVKGGDPAGFLCPECSRGFATKVGVSLHRRAKHFSEYNAEIDISRVKARWSKEEQFLMAKREAQLTQAGQSANMNQKLRDSVAAGRTLEAIKSHRRREDYRKLVREALRVGTEKELAGASPKKDDDFELDDFCSTGELSGDVSGRVASVDAPRMVLRGRTPAGTGDGHTAMPPMAGCSSTTDSDTDETDDEGELDGPSETGSLRLLRPDTGARIISEITSLVSRPPPQSHQAYKLWDAAKLACKGVEVGTALNNYIREVFCVNERPARRPRRQVPSGRESRRKKKKREYAEMQQLFKKKRSECARKVLDGHKDTGVRDPVEFLEKWKAVMAGEEPLPRVPGSLGAPSGKIDILFLITAQDIKNAFPPLNSAPGPDGFTSRNLRAVPMPILRVLLNLLNLTRRVPDCLQGARTVFLPKKPQASAYSDFRPITMSSVLLRLYHKILAQRLMAAVEFDFRQRAFIPVDGCGENISILSAALDEAKTRYRPLYLASVDLAKAFDRVSTEAILRGARLAGLSESFLGYLEHMYRTSNTVLCFENSELLVHPTAGIRQGDPLSPLLLNLVLNEWLQGLDESISFASGDLRVSAMAFADDLLVMATTPQGLQDRLESLMNFLIPRGLQINVTKSFTLALVPSKDRKVKVDTSKSFTVGGVALPTSDTASVWRYLGLQFTAMGRKAMPLEKELAELLGRVSKAPLKPQQRLVLLRFYLIPRLLHRLVLGPWSQKLLLRLDKMIRAAMRRWLALPHDAPMAYFLADVSDGGLVVPSLRTTIPGMQLRRMDKLSQSTHPTCREALKTRLLKSLVQRAKMAAKYRGRELFTKKAVSSLWAELLHHSVDGAALRNCKDAPYAQAWVRDGTRLVSGKQFINLVKLRVNALPNLTRTKRGQGGAPTGCRAGCLAPESLGHILQACHRTHSTRLQRHDGIVAYLASRLKEVGWEVAIEPRIETERGTVEPDLVLKREGQSVIVDAQVVGTRLPLREAHRHKVAKYNFPDLLRQIQVTPLDPPVVTSATVSYRGVWALESVSALHDLGLGRYDIKLMTVRVLQGGSVFPCSPENDHRGDTGDEP

SEQ ID NO: 31392 - protein, 994 aa, Lasioglossum lativentre
MMRHESEQFLCRMPDCNRVFPTLRGRGVHEQRAHKNWHDERQMEMLDSRKAPWSTEERALMARQEAKLTIEGVKFINQALVPVFPNRTLEAIKGQRKRADYKDKVLELIRELNDTDSADQLQQQLQDTPDDPRLTTNDMAAAIIEAHQGMPPIEGNDFHVDELGRIYDNIGTWPLERTFEELQLYLLKVFPIPPRKKNKSPREYTDQAVTKRKARRIEYARTQRAWKRHPCKCLRTIIKDKVSAHSPPKDVMLPFWNAVMTESDSQSPGIGNRSPVKAELWRPIVPGEIRQAFPELTTAPGPDGLKTRQFRAMPLGVIARIFNLFMLCGKMPKHLTASRTVLIPKKDNALDPGDFRPITVSSIIARTFHKILGKRIMCTIGLDPRQKAFLPVDGCNENIFDLDLVLRYHRQNFKPLYMASMDIAKAFDSVTHNTIRDTLMNVGLPDPMVQYIVGTYEQSTTRLMCGDWESDDIHPTCGVKQGDPLSPIIFNMVMDSLLKRIPPEVGVDIGGVHYNALLFADDMVFMASTPNGLQKSIDIAAEYLAQCGLNINASKSFTMSIKNVPHVKKSIVDAKMKFRCLGRTLPSMSREDEWKYLGVPFTPEGRQGVNEVARLKEALDKLTKAPLKPQQRMFALRVMVLPGLYHLLTLGHTTLSKLKRVDTTVRGTVRKWLNLPHDAPNAYFHANAKDGGLSIPSMRWLMPLRRKERLRAMVGDGVEPSSYLALEIQRATRRLSEGREEISSSQSLEQRWAKLLHSSSDGKALKDARKVPQQHSWVTDGSRFLSGRDYINIVKLRINALPTRSRTARGRRKEKICRAGCNETETLNHVLQRCHRTHGARIERHNAIAKYLQRALGNKFENVEEEPHFVTPEGLRKPDLIAVKGHEAVIIDVQIVSEQSDLGRAHQNKIDRYCQLKDSIISKYKVREVKFTSATLSCRGIWSQKSAEDLTTLHVIRKSELKILSTRALIGGLNAFWRFNKMTACRTQQRTGIG

SEQ ID NO: 31393 - protein, 993 aa, Lasioglossum morio
MMRQEPEQFPCRMPGCNRVFPKSRGRGVHEQRAHKSWHDERQVEQLDIRKAPWSAEERSLMARQEAKLTIDGVRFVNQELVTLFPHRTLEAIKGQRKRADYKEKVLDMIRELENTDSADQLQQQQEDMPDDLGPSTNELMEAIIQVHQGMTPLEGTDFHANELGRIYDYIGTWPLERTLEELQLYLLKVFPLPPRRKKRSREHSDQAATKRKARRIEYARTQRAWKRHPCKCLRTIIKDKVSAQLPPKDVMLPFWKAVMTESGSQSPGIGNRSPVKAELWRPITPGEIERSFPEMTTAPGPDGLTTRQFKAMPLEVIARIFNLFMLCGKMPKHLTASRTVLIPKKDNALEPGDYRPITVSSIIARTFHKVLGKRITGTIQLDPRQKAFVPVDGCNENIFDLDLVLRYHRQNFKPLYMASVDIAKAFDSVTHNSIRDTLVNAGLPDPMVRYILGTYEESTTKITCGDWESDDIHPTGGVKQGDPLSPIIFNMVIDSLLKKIPPEVGVDIDGVHYNALAFADDMVFMASTSNGLQMSIDIAAEYLAQCGLNINASKSFTVSIKNVPHVKKSIVDARMKFTCLGRTLPSISREDEWKYLGVPFIPEGRLGVNEVAQLKEALEKLTRAPLKPQQRMLALRVMVLPGLYHLLTLGYTTLSKLKKIDTAVRGAVRKWLNLPHDAPNAYFHASHKDGGLSIPSMRWLMPLRRKERLKAMVGDGEEPSSYLAVEIQRATRRLKEGHEEIVSSQSLEQRWAKLLHSSSDGKALKDARKVPQQHSWITDGSRFLSGRDYINIIKLRINALPTRLRTARGRRKERICRAGCNETETLNHVLQRCHRTHGARIERHNAIAKYLQRALGKKYENVEEEPHFMTPEGLRKPDLIAVKDHKAVTIDVQIVSEQSDLKKAHQNKIDRYCQLEDSIKSRYKVREVKFTSATLSCRGIWSQKSAEDMTTLGVIRKAELKILSTRALIGGLNAFWRFNKMTACRTLQRTGIG

SEQ ID NO: 31394 - protein, 904 aa, Conopomorpha cramerella
MLLLAPQQLLRRIFRTCLVDLSEHCQLLSGYRVVREFRWPVLCRLVSGRYWIRMTKTVGQIFFTFAYRVLHVSRDRSDGLSLTQKIKNNCSNVHVFRGEAVRRPVASDLSRRVEGKISDGDVGGAARLLFSTDTLAPSTEATLAALREQHPTSPPGDRLPLEPDTSFPTPQAAVEDTLKVISSFKNGSAAGLDGLSPQHLKDLVCNTSGDQGRSLLSNLTNIVNLMLSGGVCVEVLNTLYGANLLALKKKDGGIRPIAVGSTIRRIASKICCRQILPELTAMFQPLQLGFGSKGGCEAAVHAARTYLSHGAGEVFLKVDVRNAFNSVDRAAFLTRVRECVPQLYRYVWQCYSRPSNLVYGDEIINSASGVQQGDPLGPALFSLAIHPHIVNLKSKFNIWYLDDGSIAGEASTVLEDFRNLMASFESIGLSLNFAKCELFINPSLGQTERDAVLQDFCLVAPNIEIVDSSSIRLLGAPLCSESVPSFLEQQITKFKSTTKRLEQLHPHLAFTIMRYCLFVPQFTYALRCSSIWQHEALIENVDRLLRECLTNILNCSFTADSWTQACLPVRFGGLGIRNISGVALPAFLSSVHSIRDLCGSILRPSLGDVEIAGSSEAVNAWRLSAEATILPESKNAQKQWDTPICEGVSRNLLSRATDPAQRARLLSCLEAESGYWLRVVPSRTIGTLLDRSTFTLSIGLRLGVPVNEPHRCCCGVSVDKLGYHGLSCQRSAGRISRHAAINDILRRALVSVGVPSVLEPSGIVRSDGKRPDGMTLIPWSNGQPMVWDATCVDTVAPCHVMASARGAGSAATSAEMAKKRKYADLPSEYSFVPFAVETFGTWGHEARTLYKQLCTRLVDVSGDPRAGLYLGQRISIAIQRGNATSVLGTLPQDSGRDYLEIFNV

SEQ ID NO: 31395 - protein, 955 aa, Conopomorpha cramerella
MSNGDGEASLSSSQNLVRCPNCSQPRFFKGSRGLKIHCTRQHQAAPNSALVDVVVSTTTASTTDLSDLLSGLKRTLPIIKRVPRGARVSVAGALSACIRKVLDKNDKDSWTDFFTFAYRVLHVSRDRSDGLSLTQKIKNNCSNVHVFRGEAVRRPVASDLSRRVEGKISDGDVGGAARLLFSTDTLAPSTEATLAALREQHPTSPPGDRLPLEPDTSFPTPQAAVEDTLKVISSFKNGSAAGLDGLSPQHLKDLVCNTSGDQGRSLLSNLTNIVNLMLSGGVCVEVLNTLYGANLLALKKKDGGIRPIAVGSTIRRIASKICCRQILPELTAMFQPLQLGFGSKGGCEAAVHAARTYLSHGAGEVFLKVDVRNAFNSVDRAAFLTRVRECVPQLYRYVWQCYSRPSNLVYGDEIINSASGVQQGDPLGPALFSLAIHPHIVNLKSKFNIWYLDDGSIAGEASTVLEDFRNLMASFESIGLSLNFAKCELFINPSLGQTERDAVLQDFCLVAPNIEIVDSSSIRLLGAPLCSESVPSFLEQQITKFKSTTKRLEQLHPHLAFTIMRYCLFVPQFTYALRCSSIWQHEALIENVDRLLRECLTNILNCSFTADSWTQACLPVRFGGLGIRNISGVALPAFLSSVHSIRDLCGSILRPSLGDVEIAGSSEAVNAWRLSAEATILPESKNAQKQWDTPICEGVSRNLLSRATDPAQRARLLSCLEAESGYWLRVVPSRTIGTLLDRSTFTLSIGLRLGVPVNEPHRCCCGVSVDKLGYHGLSCQRSAGRISRHAAINDILRRALVSVGVPSVLEPSGIVRSDGKRPDGMTLIPWSNGQPMVWDATCVDTVAPCHVMASARGAGSAATSAEMAKKRKYADLPSEYSFVPFAVETFGTWGHEARTLYKQLCTRLVDVSGDPRAGLYLGQRISIAIQRGNATSVLGTLPQDSGRDYLEIFNV

SEQ ID NO: 31396 - protein, 1354 aa, Conopomorpha cramerella
METRAMRKRLGPLPEDRRGTPGADAGCHSMRTIGGEELSRRALVGVYPEDTTADINHLIHVPLSTSSNVDQSHSPSSSPISHIHTSPSSSIISTLPIDSPVNVGQMASADDFVPAAGAKRTRKRWTKEMNSFIWRTYLILTSLESDTTTTYLDPLHAEFTKQFPEMNASKQRIGDQRRAILKNKYLTDEEMFNIKHEAEKHISHNRTHNITLNVGNTQTRKRLRWTKEQNEAIMRIYYTVTDLEKNTTANRQLMHRMFIEQFPQLSHLSEQRISDQRRAIINNKYLTEDRLEQLKTETQNIINQTNIGNDTDSRRNSYREEQFQITNQQQNRTEPTTTINVQVPQTNQCTNKDVLSEADQNQIRGNFHNTLAKFLDSDPTHRPYIPKQKPTKHFTLIVHFINELLTEHLTPDLNFITTQTIIYCAAYTAVICNGCKIRTEPIRRACIRKPAWEFRILKRIDDLRKDIGRLTHYRQGNRSSKLNAQVQKITQSHQIHAQHESHNTNIDEFLDTLKQKLNVASSRLRRYKNCTLRKTQNNQFINNEKQFYRNLVNPNNNKSSPISNLPTPEGLHSFWSDIWSNPIDHNQHSEFLNNPPIITHNMAFEHVTIEIFIKVLKKSHNWKASGSDHIHNFWYKKFTSVHPLLFNHLNKFIKNPDTLPKYLTEGITYMLPKDDEYCNPAKYRPITCLQTFYKIITGCIKAIIDQHIEENNIILAEEQKGCRKGSQGCKEQLIIDSSVMKHAKRNKIDIYNMYVDYQKAFDSIPHSYLTHILNYYCIHPTIVHFLQHTMLNWETHLELSLQDTHITTPPIQIKRGIFQGDALSPLWFCLALNPLSVALNKNNNGFPLHINSDDANLTHLFYMDDIKLYSKTKSNLHQIADTVDRFSSDICMRFGLDKCKTYSSEHGNTVKYSYNLQTGQEIEPMDLAYKYLGFNQSDQIHHKQTKLDVTKKFRHRLNALLKSQLNSRNLVKAVNTFAIPTLTYSFGVISWTKTELKKLQTLINTSFTTHRKHHPKSAVQRLTLPREEGGRGLIDILNLHNTQINKLRQYFFHKSETSTIHHAITQIDIKHTPLNLSSKTTQNNEIIQDNAAKIQLWKEKSLHGRYYRDLNHNDVDKVASTLWLRQGTLFPETEAFMMAIQDQVIATRNYKKYIMKRLVSDTCRHCKSASETIQHITGACKSIVQTDYKHRHDQVAAIVHQNLAFKYNLIKEKVPYYKYIPGTVLEDENTKLYWDRTLLTDRTVHYNRPDVTLLDKTTQTLYLIDIAIPNTHNIHTTVTEKLTKYREIAIELQTQWKVKTTHILPIVTSTTGIIPTDLAVQLKVIGLNTNLIGLIQKAVILNTCRITRKFLSQE

SEQ ID NO: 31397 - protein, 1395 aa, Conopomorpha cramerella
MLTWGADSVHSKLTRPTRKWYLGRMQTRAMRKRLGPLPEDRRGTPGADAGCHSMRTIGGEELSRRALVGVYPEDTTADINHLIHVPLSTSSNVDQSHSPSSSPISHIHTSPSSSIISTLPIDSPVNVGQMASADDFVPAAGAKRTRKRWTKEMNSFIWRTYLILTSLESDTTTTYLDPLHTEFTKQFPEMNASKQRIGDQRRAILKNKYLTDEEMSNIKHEAEKHITHNRTHNIPLNIGNTQTRKRLRWTKEQNEAIMRIYYTVTDLEKNTTANRQLMHRMFIEQFPQLSHLSEQSISDQRRAIINNKYLTEDRLEQLKTETQNIINQTNIGNDTDSRRNSYREEQLQITNQQQNRTEPTTTINVQVPQTNQCTNKDVLSEADQNQIRGNFHNTLAKFLDSDPTHRPYIPKQKPTKHFILIVHFINELLTEHLTPDLNFITTQTIIYCAAYTAVICNGCKIRTEPIRKAYIRKPAWEFRILKRIDIGRLTHYRQGNRSRKLNAQVQKITQSHQIHAQHESHNTNIDEFLDTLKQKLNVASSRLRRYKNCTLRKTQNNQYINNEKQFYRNLVNPNNNKSSPIPNLPTPEGLHSFWSDIWSNPIDHNQHSEFLNNPPIITHNMAFEHVTIEIFIKVLKKSHNWKASGSDHIHNFWYKKFTSVHPLLFNHLNKFIKNPDTLPKYLTEGITYMLPKDDEYCNPAKYRPITCLQTFYKIITGCIKAIIDQHIEENNILAEEQKGCRKGSQGCKEQLIIDSSVMKHAKRNKLDIYNMYVDYQKAFDSVPHSYLTHILNYYCIHPTIVYFLQHTMLNWETHLELSLQDTHITTPPIQIKRGIFQGDALSPLWFCLALNPLSIALNKNNNGFPLHINSDDANLTHLFYMDDIKLYSKTKSNLHQIADTVDRFSSDICMRFGLDKCKTYSSEHGNTVKYSYNLQTGQEIEPVDLAYKYLGFNQSDQIHHKQTKLDITKKFRHRLNAVLKSQLNSRNIVKAVNTFAIPTLTYSFGVISWTKTELKKLQTLINTSFTTHRKHHPKSAVQRLTLPREEGGRGLIDILNLHNTQINKLRQYFFHKSETSTIHHAITQIDIKHTPLNLSSKPTQNNEITQDNAAKIQLWKEKSLHGRYYRDLNHNDIDKVASTLWLRQGTLFPETEAFMMAIQDQVIATRNYQKYIMKRLVSDTCRHCKSASETIQHITGACKSIVQTDYKHRHDQVAAIVHQNLALKYNLIKEKVPYYKYIPSTILEDEHYKLYWDRTLLTDRTVHYNRPDVTLLDKTTQTLYLIDIAIPNTHNIHTTVTEKLTKYREIAIELQTQWKVKTTHIVPIVTSTTGIIPTDLAVQLKVIGLNTNLIGLIQKAVILNTCRITRKFFKSRMIQYTWLRPVHWTNYPLKRRRKT

SEQ ID NO: 31398 - protein, 963 aa, Dendrolimus punctatus
MKPMPQTCSNAHNTSTLLSQCPHCPTPRFFKGSRGLNIHISKIHHQNTQTNCSACPSTLTDSAPNPQTSCTALWERLACLKNNTPLIRRIPRGARITVAENLTKILAKILAENCPTNWERYLFFSFRVFHSTGLDKNNSLTKTIKQNCCRPTIENLDTSHILGNKFSVNLSKKIENKVSEGDLKGAACLLFSNDSLAPDSADTLSALKDKHPIPTTSPTSPPVPPSSQTEFLQASTKDVYSAIMSFKTGSAAGIDGLSPQHLKDLISGCTGNIGQTLLKHITQIINLMLAGKVPDGIREVLYGANLIALKKKDGGIRPIAVGNSLRRIASKVCCRHISTKLKNKFQPLQLGFGSKGGCEAAVHSLRSFINNKCGEVILKVDVKNAFNSVDRSVMLHEVTSNIPEISNYLYESYSKPTNLMYKNNLILSSVGCQQGDPLGPAIFSLAIHPVIESLKSKFNVWYLDDGTLGGDAETVLQDLLILISKFNSIGLELNFSKCEIFLSDSLSKNESDNISNMFNVVAPGIKVLEKDSLRLLGAPILDEAIPNYLSEQSAAFDLSYSKLFDIHSQIAYHIVRHCLFVPKLTYVLRCAPLWKFSNLIKPLDNRIKDVLSKILNSEFSDNNWIQASLPIRYGGLGIRKISSVALPAFLSSAYSTGSLFKKIMQHWDNVNTSFLNEALNAWKMVCPSEDIPTIMNSQRCWDEPICRGLNTELLNSTNSTGRARILAVSRKESGFWLQAIPSPNIGTLMDNTSFSLAINLRLGSRICAPHTCVCGIEVIDPGYHGLSCRRSAGRWSRHAALNDVLRRALATANVPALLEPNGIARDDGRRPDGMTLIPWQRGKPLVWDATCVDTLAASHLPNTSRSAGSAAETAESLKRRKYAILSESYMFVPFAVETLGPWGPEAMSLYQNLSKRLIDSSGDQRAGAYLGQRISMAIQRGNVASLLGTLPLEDGDLGSVFYL

SEQ ID NO: 31399 - protein, 1104 aa, Limonius californicus
MPPLPLPDLHRCRCGKEYNTRKAFLQHQRLRCPLPPNLDNFTCATCQRSFNSFAGLRQHQRLAHPVDYNAEAEAEGRARKVNPWSQFDLLSMAQEEAKYEGRTIVQYLAQTFDRKVDAIKYQRRQPNYQNLLARVRSDYEEAPSDPDSDEDGDDSLSVSGSSSVGSHMSNSVALSPVMDPVQGTEVDGEGPLSDSALSSDPVPVPDPPDATPDPPEIPELVNLPESNDPDLPDADNLFFQFFTNLRAHEALTADDRELVRLLAQSHPSARHGLDALARELIPTRRDTRQGANSAAPRDKHPKKFRGGAAKRAFQFKLNQELYHKNRAQLAANILDDIQPSENTNSPDTESIYNTYLNIFGNDAFIDDESVSVKPNTRRSGHACFRPIDDTDLIKAIGSSKSSAAGPDGCRIADVKRMPLQRVSLLLNGCLFSGYTPPDLKRCRTTLIPKKGDLAMVGNWRPITVASIFVRLLHKILAERLASLPLCPLQTGFQKLDACMHNSVIIQSIIKRYRKRTCPFNILTLDISKAFDTVSHSSIGRMCSRFQIHPSLTRYILDSYRGSTTTVSCLNKVTSSIPLNRGVKQGDPLSPVLFNMILDELLDHLYHSSAGLSVGDQATKIPAIAYADDIILLGATTSETQRLLKICSQFLEKRGLALSAGKCSALSFGLIPKKKKLFVHTSARFYLNGALLKQLGVSDFFSYLGLRYGSMGVSTADYATAKSYLYRVERAALKPQQKLTIVKFYLIPRLLHALQAPSIFQHTLNNFDKIIRACIKKCLHLPLTIPSSYIYGHTRDGGIGVPCLRDSIPAIMLRRVNKLAAGDHPVFNLALQSDWGAKLLDNLEHNMTAHGRSREGIRSWWRDSLQASTSGNGTDQGAASSSSSAWLGNPPPFWTASDFVKAVALRGNVLPTVGTPYNRGEAARCRAGCRRSETLCHVLQACPVTHWSRIRRHNFVAVELAKKIRKLGWAVEEEPNIWGEDGIRKKPDLIIHRGGCLIIIDVGISWEGPRRLEEAFWGKQATYNSAPFIEAVKKRYNPADIYCLPVIIGARGTWCQLNNALWEHLLLSEADARCLVHSVIKGSVLIHSEFSRVVWRRSHPEPANR

SEQ ID NO: 31400 - protein, 1140 aa, Bradysia coprophila
MGNTSGGPTNDDDRFCICMNDKDNNNDSKNAKWIFCHGCKNWYHSICALISDEEYEGIMNDNVDWHCDFYQCQDKVAEIATNNALSSQAQTQCTICGFNAKNNRGLKVHQRIHERPVSGHTQAINLSFDCKKCKKSFKNQNEIDHHQGCHSKISQKIAQRVNNRTGNIKRKGVEILTEPMKTTDCQDTQSDSLCCNSSSGNLPSQNVNEFIFHCEHCPANEPRSFKSVKGLHVHIAKSHPILKEANPDNDIERILENLSTLKSRVRLLKRIPKSARPMAAKKFNELARNCISKNDLKSWEDLLTFPYKCFRVPIKCNKKKQRSLASIVKENINQFELTDIHTENLVTASLKKRVEAKIADFDVKGAIRLLCSQDSFAPMNQETVDILNSKHPAPSRCLDFPSPPNDEIAFQCEEDNVKLSIMSFGSGSAAGMDGFYPQYFKDLISTSAFVAGNECLSVITELCNFMLRGKLNDRICKYVYGASLCALTKKYGGIRPIAVGLSIRRLASKVACSDVIEEVGKYLFPSQLGVGIKQGCEAAVHATRSYLSINIGKTKILLKIDFRNAFNSIERDVMLNEVKQIIPSLYPYLWQCYRYSSLLFFGENQILSQIGAQQGDPLGPLIFSLTIHKLIQNLKSELNVWYLDDGTVCDDPDIVLNDFKTIINESEKLGLHINPSKCELFFLSEKIDEEIVSKFNTICPEICVTTKEDLNLLGAPLFEEGFIKFSEKVLSKLKVMFERLKLLNSHTALFLLKNCFAVPKLTYLLRTSPAWKFEDFISSFDDEIKDLLETILNIDMNDQQWTQATLPINFGGLGIRKLQDISLPAFLSSSFGVKSHVSHILNFQDTTFIVHLDEALEKWKSLNDLQAPSIKHLQKNWDLINVQRIMNENFKFTLKTDIARFKALQCKESNAWLHSIPSSNIGTVMDNNTIRICIGLRLGCNICSTHTCICGSLVLPNGLHGLSCSKCIAKYERHIIINDIIHRSLSSLHIPANLEPRGLSRNDGKRPDGVTLTPWLKGKPLVWDATCVDTFADSYLSKTSTKARQLADYAASQKHKHYSELLSSNNYILLAFAVETMGPWSEEALNFVDKIGHKLQELTGDKRSKFFLIQRMSMEIQRHNAACIMGTISPNKPLEEVFYL

SEQ ID NO: 31401 - protein, 1140 aa, Bradysia coprophila
MGNTSGGPTNDDDRFCICMNDKDNNNDSKNAKWIFCHGCKNWYHSICALISDEEYEGIMNDNVDWHCDFYQCQDKVAEIATNNALSSQAQTQCTICGFNAKNNRGLKVHQRIHERPVSGHTQAINLSFDCKKCKKSFKNQNEIDHHQGCHSKISQKIAQRVNNRTGNIKRKGVEILTEPMKTTDCQDTQSDSLCCNSSSGNLPSQNVNEFIFHCEHCPANEPRSFKSVKGLHVHIAKSHPILKEANPDNDIERILENLSTLKSRVRLLKRIPKSARPMAAKKFNELARNCISKNDLKSWEDLLTFPYKCFRVPIKCNKKKQRSLASIVKENIIQFELTDIHTENLVTASLKKRVEAKIADFDVKGAIRLLCSQDSFAPMNQETVDILNSKHPAPSRCLDFPSPPNDEIAFQCEEDNVKLSIMSFGSGSAAGMDGFYPQYFKDLISTSAFVAGNECLSVITELCNFMLRGKLNDRICKYVYGASLCALTKKYGGIRPIAVGLSIRRLASKVACSDVIEEVGKYLFPSQLGVGIKQGCEAAVHATRSYLSINIGKTKILLKIDFRNAFNSIERDVMLNEVKQIIPSLYPYLWQCYRYSSLLFFGENQILSQIGAQQGDPLGPLIFSLSIHKLIQNLKSELNVWYLDDGTVCDDPDIVLNDFKTIINESEKLGLHINPSKCELFFLSEKIDEEIVSKFNTICPEICVTTKEDLNLLGAPLFEEGFIKFSEKVLSKLKVMFERLKLLNSHTALFLLKNCFAVPKLTYLLRTSPAWKFEDFISSFDDEIKDLLETILNIDMNDQQWTQATLPINFGGLGIRKLQDISLPAFLSSSFGVKSHVSHILNFQDTTFIVHLDEALEKWKSLNDLQAPSIKHLQKNWDLINVQRIMNENFKFTLKTDIARFKALQCKESNAWLHSIPSSNIGTVMDNNTIRICIGLRLGCNICSTHTCICGSMVLPNGLHGLSCSKCIAKYERHIIMNDIIHRSLSSLHIPANLEPRGLSRNDGKRPDGVTLTPWLKGKPLVWDATCVDTFADSYLSKTSTKARQLADYAASQKHKHYSELLSSNNYILLAFAVETMGPWSEEALNFVDKIGHKLQELTGDKRSKFFLIQRMSMEIQRHNAACIMGTISPNKPLEEVFYL

SEQ ID NO: 31402 - protein, 1217 aa, Acropora yongei
MNCETNMASNGTRERLLRINGRIKWNEAANSDILECKRQAQLLENSENPPCFDNGRRKGYMRIMKGLWEQKGYGYLNLSEQNLRDQAAKLEKTLGNAGQKISESVGTRVRGKNEEAVECFQYANAGEQDLHMEESIPVPDEQPNTLSSEARELLETSSHMYTQISPCEGDFRNRTIDTRTKGKPINGYLENINNVLMELMKQCRVSPTDNPFSYLWIANCVLYSVVTAFLLHKGWKKQGSNNSSVHKRKISKWQIVYEGNAGSIRKRISIAKAETDRLKENRKKTKRGRRNREILKKKCKVLSIASLVNYMERQKCELRKLKKAFGRKKKNEEARVINKNFKDDAGRVYANMREMLAKNKDCDRPKYEGVSGNTCEEERERFGSIEEASSFWKELWEGEGSGNSQAVWLDEVRHAIFTKVPPPTDEDWTLETAEAVGVLKRKKNWSAPGPDRLANFWWKRAHALHEGVTRSFEAISRIDDEYPSWFAEGKTSLIPKPGEFTSDNQRLITCLNTSYKWFTSCLLGPTDQHLEKHGLVEGSQRGAKKGCSGTVDNLLIDRVVTLDCQRRRRNLSMAWVDVKKAYDSVDHGWLGEMMVLHRFPKWLCEVICKLCKSWNTKIVANTLHGQEVSEPIVFKKGLPQGDALCPRLFTICLNPVAWKISASEGYKLSKPISTRVTDLLYIDDLKVFAASESKLNRVLELTQAAMEDIGLQWHPRKCAVVHIKRGVHSQRNFGRDIAGDRVPTLEEGRQYKFLGVLETLVQEEKMALELAAKEYLRRSSVIWSSPLSDYNRVVASNQFALPVLGYLMWTQHWPVSDLKIVDREARKIIVENAGKHPGGSTALLYLPRKKGGRGLRAVETEYKVTKVKAALGLYENKDQVMKRVREFEERAESLGHRSLVKDAVKFAEDLGVNLHLKHPDPVCAMNSGEIIPSHRVKEVLKECVEEKLEREVRGLEWQGKLLTERKSDSQLCKNGCFSWLWKWKSCPSYTIAGAFEIYEQLLPTKLYFSKKTHTSCNGDLKCRLCGHAQESVPHILAGCTALAQNKYLFRHYMALKVQFYEILRDQNLLEEVPPWYSPVMPRPVDKSEQVEAWWDVPVYADHQEVRANRVDARVVNHVGKKVMTIEMSCPWISNREKKSEEKTMKYGPLMWELKEKYKGYEVHQYNIIMDVLGGWSEETEISVQSLVGRKTTHVLERMQKAVLSATLNIARTFKVVT

SEQ ID NO: 31403 - protein, 1086 aa, Acropora yongei
MEESIPVPDEQPNTLSSEARELLETSSHMYSQISPCEGDFRNRTIDTRTKGKPINGDLENINNVIMELMKQCRVSPTDNPFSYLWIANCVLYSVVTAFLLHKGWKKQGSNNSSVHKRKISKWQIVYEGKAGSIRKRISIAKAETDRLKENRKVTKKGKRNREILQKECKVLSIASLVNYMERQKCELRKLKKAFGRKKKNEEARVINKHFKDDAGRVYANMREMLAKNEDCDRPKYEEVSGNTCEEERERFGSIEEASSFWKELWEGEGSGNSQAVWLDEVRHAIFTKVPPPTDEDWTLETAEAVGVLKRKKNWSAPGPDRLANFWWKRAHALHEGVARSFEAISRIDDEYPSWFAEGKTSLIPKPGEFTSDNQRPITCLNTSYKWFTSCLLGPTDQHLEKHGLMEGSQRGAKKGCSGTVDNLLIDRVVTLDCQRRRRNLSMAWVDVKKAYDSVDHGWLGEMMVLHRFPKWLCEVICKLCKSWNTKIVANTLHGQEVSEPIVFKKGLPQGDALCPRLFTICLNPVAWKISASEGYKLSKPISTRVTDLLYIDDLKVFAASESKLNRVLELTQAAMEDIGLQWNPRKCAVVHIKRGVHSQRNFGRDIAGDRVPTLEEGRQYKFLGVLETLVQEEKMVLELAAKEYLRRLSVIWSSPLSDYNRVVASNQFALPVLGYLMWTQHWPVTDLKIVDREARKIIVENGGKHPGGSTALLYLPRKKGGRGLRAVETEYKVTKVKAALGLYENKDQVMEMVRVFEERAESLGHRSLVKDAVKFAEDLGVNLHLKHPDPVCAMNSGEIIPSHRVKEVLKECVEEKLEREVRGLEWQGKLLTERESDSQLCKNGCFSWLWKWKSCPSYTIAGAFEIYEQLLPTKLYFSKKTHTSCTGDVKCRLCGHAQESVPHILAGCTALAQNKYLFRHNMALKVLFYEILRDQNLLEEVPPWYSPVMPKPVYKSEQVEAWWDVPVYADHQEVRANRVDARVVNHVSKKVMTIEMSCPWISNREKKSEEKTMKYGPLRWELKEKYKGYEVHQYNIIMDVLGGWSEETEISVQSLVGRKTTHVLERMQKAVLSATLNIARTFKVVT

SEQ ID NO: 31404 - protein, 1006 aa, Astreopora myriophthalma
MHCCLGGWSTLKPIIIIIIIIIIIIKQGSGKSSNQKSKRSKCQKAYEEKAECLRKKISMAKSEIERLKENRKMTKRGKRNRAILQQECKELSIASLVSYMERQKCALRKLKRAFGRNKKNKEAKVLNQQFKEDAGRVYANMREMLAKCEDCDRPKYEGANGNTAAEEREKFGSIEEASSFWRELWEGEGTGNSQAEWLNEVRDAIFSKVPPPAEEAWTLETVEAVGILKRKKNWSAPGPDKLVNYWWKRAQVLHEGMARSFEAISRSDDDYPSWFAEGKTSLIPKPGEFTSDNQRPITCLNTAYKWFTSCVLGPMDQHLEEHGLMEGSQRGAKKRCSGTVDNLLIDRVVTLDCQRRRRNLSMAWVDVKKAYDSVDHGWLGEMMVLHRFPKWMCKVISKLCKSWKTRIIANTRHGWEVSDPIMFKKGLPQGDALCPRLFTICLNPVAWKISASEGYKLSKPISATVTDLLYIDDLKVFAANETKLNRVLESTQVAMEDIGLQWNPRKCAVVHIRRGIHSQENLGGDIAGGRLPSLEEGKQYKFLGVLESLVQEEKMVLECAAREYLRRLSIIWSSPLSDLNRVAASNQFALPVLGYLMWTQHWPITELKILDREVRKIIVENGGKHPGGSTALLYLPRGQGGRGLRAVEMEYKVTKVKAAIRMYENQDPAMRMVREFDERAESSGHKSIVKDAAKFAAELGVDLHLKHPEPVCVMTSGEAIPPQRVKGVLKECVEEKYERDVRGLEWQGKLLRERKDDEQLCTNGCFSWLRTWRSCPTYTIAGAFELYEQLLPTKLYTSKKTHTSCSGDVKCRICGHAQESVSHILSGCTALAQTKYLFRHNMALKVLFYEILHDQGLLEEVPPWYSPVMPKPEYRSEQVEAWWDVPVYADHQEVRANRVDARIVDHANKKVLTLEMSCPWISNREKKSEEKTMKYGPLRWELKQQYRGYEVIQHNIIMDVLGGWSRETETSIQSLVGRKANQVLEAMQKAVLSSSLNIARTFKVMI

SEQ ID NO: 31405 - protein, 948 aa, Pachyseris speciosa
MAKSEIERLKENRKMTKRGKRNRAILQQECKELSIASLVSYMERQKCALRKLKRAFGRNKKNKEAKVLNQQFKEDAGRVYANMREMLAKCEDCDRPKYEGANGNTAAEEREKFGSIEEASSFWRELWEGEGTGNSQAEWLNEVRDAFFSKVPPPTEEAWTLETAEAVGILKRKKNWSAPGPDKLVNYWWKRAQVLHEGMARSFEAISRSDDDYPSWFAEGKTSLIPKPGEFTSDNQRPITCLNTAYKWFTSCVLGPMDQHLEEHGLMEGSQRGAKKGCSGTVDNLLIDRVVTLDCQRRRRNLSMAWVDVKKAYDSVDHGWLGEMMVLHRFPKWMCKVISKLCKSWKTRIIANTPHGWEVSDPIMFKKGLPQGDALCPRLFTICLNPVAWKISAAEGYKLSKPISATVTDLLYIDDLKVFAANETKLNRVLESTQVAMEDIGLQWNPRKCAVVHIRRGIHSQENLGGDIAGGRLPSLEEGKQYKFLGVLESLVQEEKMVLECAAREYLRRLSIIWSSPLSDFNRVAASNQFALPVLGYLMWTQHWPITELKILDREVRKIIVESGGKHPGGSTALLYLPREQGGRGLRAVEMEYKLTKVKAAIRMYENQDPAMKMVREFDERAESSGHKSIVKDAAKFAAELGVDLHLKHPEPVCVMTSGEAIPPQRVKEVLKECVEEKYERDVRGLEWQGKLLRERKDDEQLCTNGCFSWLRTWRSCPTYTIAGAFELYEQLLPTKLYTSKKTHTSCSGDVKCRICGHAQESVSHILSGCTALAQTKYLFRHNMALKVLFYEILHDQGLLEEVPPWYSPVMPKPEYRSEQVEAWWDVPVYADHQEVRANRVDARIVDHANKKVLTLEMSCPWISNREKKSEEKTMKYGPLRWELKQQYRGYEVIQHNIIMDVLGGWSRETETSIQSLVGRKANQVLEAMQKAVLSSSLNIARTFKVMI

SEQ ID NO: 31406 - protein, 1195 aa, Acropora yongei
MTIMIIIIIIIIIIIIIIIIIINSENPPCFDNGRRKGYMRIMKGLWEQKGYGYLNLSEQNLRDQAAKLEKTLGNAGQKISESVGTRVRGQNEEAVECFQYANAGEQDLHMEESIPVPDEQPNTLSSEARELLETSSHMYTQISPCEGDFRNRTIDTRTKGKPINGDLENINNVIMELMKQCRVSPTDNPFSYLWIANCVLYSVVTAFLLHKGWKKQGSNNSSVHKRKISKWQINYEGKAGSIRKRISIAKAETDRLKENRKVTKRGKRNREILQKECKVLSIASLVNYMERQKCELRKLKKAFGRKRKNEEARVINKHFKDDAGRVYANMREMLAKNEDCDRPKYEGVSGNTCEEERERFGSIEEASSFWKELWEGEGSGNSQAVWLDEVRHAIFTKVPPPTDEDWTLETAEAVGVLKRKKNWSAPGPDRLANFWWKRAHALHEGVARSFEAISRIDDEYPSWFAEGKTSLIPKPGEFTSDNQRPITCLNTSYKWFTSCLLGPTDQHLEKHGLMEGSQRGAKKGCSGTVDNLLIDRVVTLDCQRRRRNLSMAWVDVKKAYDSVDHGWLGEMMVLHRFPKWLSEVICKLCKSWNTKIVANTLHGQEVSEPIVFKKGLPQGDALCPRLFTICLNPVAWKISASEGYKLSKPISTRVTDLLYIDDLKVFAASESKLNRVLEWTQAAMEDIGLQWNPRKCAVVHIKRGVHSQRNFGRDIAGDRVPTLEEGRQYKFLGVLETLVQEEKMVLELAAKEYLRRLSVIWSSPLSDYNRVVASNQFALPVLGYLMWTQHWPDTDLKIVDREARKIIVENGGKHPGGSTALLYLPRKKGGRGLRAVETEYKVTKVKAALGLYENKDQVMEMVREFEERAESLGHRSLVKDAVKFAEDLGVNLHLKHPDPVCAMNSGEIIPSHRVKEVLKECVEEKLEREVRGLEWQGKLLTERKSDSQLCKNGCFSWLWKWKSCPSYTIAGAFEIYEQLLPTKLYFSKKTHTSCTGDVKCRLCGHAQESVPHILAGCTALAQNKYLFRHNMALKVLFYEILRDQNLLEEVPPWYSPVMPKPVYKSEQVEAWWDVPVYADHQEVRANRVDARVVNHVSKKVMTIEMSCPWISNREKKSEEKTMKYGPLRWELKEKYKGYEVHQYNIIMDVLGGWSEETEISVQSLVGRKTTHVLERMQKAVLSATLNIARTFKVVT

SEQ ID NO: 31407 - protein, 1018 aa, Astreopora myriophthalma
MKQCRVSPMDNPFSYLWTANCVLYSVVTAFLLYKGWKKQGSGESSNQKSKRSKCQKAYEEKAECLRKKISMAKSEIERLKENRKMTKRGKRNRAILQQECKELSIASLVSYMERQKCALRKLKRAFGRNKKNKEAKVLNQQFKEDAGRVYANMREMLAKCEDCDRPKYEGANGNTAAEEREKFGSIEEASSFWRELWEGEGTGNSQAEWLNEVRDAIFSKVPPPAEEAWTLETVEAVGILKRKKNWSAPGPDKLVNYWWKRAQVLHEGMARSFEAISRSDDDYQSWFAEGKTSLIPKPGEFTSDNQRPITCLNTAYKWFTSCVLGPMDQHLEEHGLMEGSQRGAKKRCSGTVDNLLIDRVVTLDCQRRRRNLSMAWVDVKKAYDSVDHGWLGEMMVLHRFPKWMCKVISKLCKSWKTRIIANTRHGWEVSDPIMFKKGLPQGDALCPRLFTICLNPVAWKISASEGYKLSKPISATVTDLLYIDDLKVFAANETKLNRVLESTQVAMEDIGLQWNPRKCAVVHIRRGIHSQENLGGDIAGGRLPSLEEGKQYKFLGVLESLVQEEKMVLECAAREYLRRLSIIWSSPLSDLNRVAASNQFALPVLGYLMWTQHWPITELKILDREVRKIIVENGGKHPGGSTALLYLPRGQGGRGLRAVEMEYKVTKVKAAIRMYENQDPAMRMVREFDERAESSGHKSIVKDAAKFAAELGVDLHLKHPEPVCVMTSGEAIPPQRVKGVLKECVEEKYERDVRGLEWQGKLLRERKDDEQLCTNGCFSWLRTWRSCPTYTIPGAFELYEQLLPTKLYTSKKTHTSCSGDVKCRICGHAQESVSHILSGCTALAQTKYLFRHNMALKVLFYEILHDQGLLEEVPPWYSPVMPKPEYRSEQVEAWWDVPVYADHQEVRANRVDARIVDHANKKVLTLEMSCPWISNREKKSEEKTMKYGPLRWELKQQYRGYEVIQHNIIMDVLGGWSRETETSIQSLVGRKANQVLEAMQKAVLSSSLNIARTFKVMI

SEQ ID NO: 31408 - protein, 1018 aa, Pachyseris speciosa
MKQCRVSPTDNPFSYLWIANCVLYSVVMAFLLYKGWKKQGSGKSSNQKSKRSKCQKAYEEKAECLRKKISMAKSEIERLKENRKMTKRGKRNRAILQQECKELSIASLVSYMERQKCALRKLKRAFGRNKKNKEAKVLNQQFKEDAGRVYANMREMLAKCEDCDRPKYEGANGNTAAEEREKFGSIEEASSFWRELWEGEGTGNSQAEWLNEVRDAIFSKVPPPTEEAWTLETAEAVGILKRKKNWSAPGPDKLVNYWWKRAQVLHEGMARSFEAISRSDDDYPSWFAEGKTSLIPKPGEFTSDNQRPITCLNTAYKWFTSCVLGPMDQHLEEHGLMEGSQRGAKKGCSGTVDNLLIDRVVTLDCQRRRRNLSMAWVDVKKAYDSVDHGWLGEMMVLHRFPKWMCKVISKLCKSWKTRIIANTRHGWEVSDPIMFKKGLPQGDALCPRLFTICLNPVAWKISASEGYKLSKPISATVTDLLYIDDLKVFAANETKLNRVLESTQVAMEDIGLQWNPRKCAVVHIRRGIHSQENLGGDIAGGRLPSLEEGKQYKFLGVLESLVQEEKMVLECAAREYLRRLSIIWSSPLSNFNRVAASNQFALPVLGYLMWTQHWPITELKILDREVRKIIVENGGKHPGGSTALLYLPREQGGRGLRAVEMEYKVTKVKAAIRMYENQDPAMKMVREFDERAESPGHKSIVKDAAKFAAELGVDLHLKHPEPVCVMTSGEAIPPQRVKGVLKECVEEKYERDVRGLEWQGKLLRERKDDEQPCTNGCFSWLRTWRSCPTYTIAGAFELYEQLLPTKLYTSKKTHTSCSGDVKCRICGHAQESVSHILSGCTALAQTKYLFRHNMALKVLFYEILHDQGLLEEVPPWYSPVMPKPEYRSEQVEAWWDVPVYADHQEVRANRVDARIVDHANKKVLTLEMSCPWISNREKKSEEKTMKYGPLRWEFKQQYRGYEVIQHNIFMDVLGGWSRETETSIQSLVGRKANHVLEAMQKAVLSSSLNIARTFKVMI

SEQ ID NO: 31409 - protein, 906 aa, Acropora microphthalma
MERQKCELRKLKKAFGRKKKNEEARVINKQFKDDAGRVYANMREMLAKNEDCDRPKYEGVSGNTCEEERERFGSIEEASSFWKELWEGGSGNSQAVWLEEVRHAIFTRVPPPTDEDWTLETAEAVGVLKRKKNWSAPGPDRLVNFWWKRAHALHEGVARSFEAISRIDDEYPSWFAEGKTSLIPKPGEFTSDNQRPITCLNTSYKWFTSCLLGPTDQHLEEHGLMEGSQRGAKKGCSGTVDNLLIDRVVTLDCQRRRRNLSMAWVDVKKAYDSVDHGWLGEMMVLHRFPKWLCEVICKLCKSWNTRIVANTLHGQEVSEPIVFKKGLPQGDALCPRLFTICLNPVAWKISASEGYKLSKPISARVTDLLYIDDLKVFAASESKLNRVLESTQAAMEDIGLQWNPRKCAVVHIRRGVHFQQNFGRDTVGDRVPTLEEGRQYKFLGVLESLVQEEKMVLELAAKEYLRRLSVIWSSPLSDYNRVVASNQFALPVLGYLMWTQHWPVTDLKIVDREARKIIVENGGKHPGGSTALLYLPREKGGRGLRAVETEYKVTKVKAALRLYENKDQVMEMVREFEERAESLGHRSLVKDATKFAEDLGVNLHLKHPDPVCAENSGEIIPSHRVKEVLKECVEEKLEREVRGLEWQGKLLIERKSDSQLCKNGCFSWLSKWKSCPSYTIAGAFEIYEQLLPTKLYFSKKTHTSCSGDVKCRLCGHAQESVPHILAGCTALAQNKYLFRHNMALKVLFYEILRDQDLLEEVPPWYSPVMPKPVYKSEQVEAWWDVPVYADHQEVRANRVDARVVNHVSKKVMTIEMSCPWISNREKKSEEKTMKYGPLRWELKEKYKGYEVHQYNIIMDVLGGWSEETEISVQSLVGRKTTHVLERMQKAVLSATLNIARTFKVVT

SEQ ID NO: 31410 - protein, 1210 aa, Pachyseris speciosa
MASNGSQERLVRINGRIKWTEVGNHDILECKKQAQRLVNSENPPRFDNGRKKGYMGIMKQLWEEKGYGYLELTEQNLRDQAAKLEKTLGNVRQRISENIRTRECERNEEPVEGFQNANTGDQDLHMEESEAVPDERPSLSSEARELLKSATNVYIHIHPCEDDFSNRTIDTRTKGTPTKGDHENINKVITELMKQCRVSPTDNPFSYLWIANCVLYSVVTAFLLYKGWKKQGSGKSSNQKSKRSKCQKAYEEKAECLRKKISMAKSEIERLKENRKMTKRGKRNRAILQQECKELSIASLVSYMERQKCALRKLKRAFGRNKKNKEAKVLNQQFKEDAGRVYANMREMLAKCEDCDRPKYEGANGNTAAEEREKFGSIEEASSFWRELWEGEGTGNSQAEWLNEVRDAIFSKVPPPTEEAWTLETAEAVGILKRKKNWSAPGPDKLVNYWWKRAQVLHEGMARSFEAISRSDDDYPSWFAEGKTSLIPKPGEFTSDNQRPITCLNTAYKWFTSCVLGPMDQHLEEYRLMEGSQRGAKKGCSGTVDNLLIDRVVTLDCQRRRRNLSMAWVDVKKAYDSVDHGWLGEMMVLHRFPKWMCKVISKLCKSWKTRIIANTRHGWEVSDPIMFKKGLPQGDALCPRLFTICLNPVAWKISASEGYKLSKPISATVTDLLYIDDLKVFAANETKLNRVLESTQVAMEDIGLQWNPRKCAVVHIRRGIHSQENLGGDRAGGRLPSLEEGKQYKFLGVLESLVQEEKMVLECAAREYLRRLSIIWSSPLSDFNRVAASNQFALPVLGYLMWTQHWPITELKILDREVRKIIVENGGKHPGGSTALLYLPREQGGRGLRAVEMEYKVTKVKAAIRMYENQDPAMKMVREFDERAESSGHKSIVKDAAKFAAELGVDLHFKHPEPVCVMTSGEAIPPQRVKGVLKECVEEKYERDVRGLEWQGKLLRERKDDEQLCTNGCFSWLRTWRSCPTYTIADAFELYEQLLPTKLYTSKKTHTSCSGDVKCRICGHAQESVSHILSGCTALAQTKYLFRHNMALKVLFYEILHDQGLLEEVPPCYSPVMPKPEYRSEQVEAWWDVPVYADHQEVRANRVDARIVDHANKKVLTLEMSCPWIRNREKKSEEKTMKYGPLRWELKQQYRGYEVIQHNIIMDVLGGWSRETETSIQSLVGRKANQVLEAMQKAVLSSSLNIARTFKVMI

SEQ ID NO: 31411 - protein, 1183 aa, Acropora tenuis
MNCETDMASNGMRERLLRINGRIKWNEAANSDILECKRQAQLLVNSENPPCFDNGRRKGYMRIMKGLWEQKGYGYLNLSEQNLRDQAAKLEKTLGNAGQKISESVGTRVRGKNEEAVECFQYANIGEQDLHMEESIPVPDEQPNTLSSEARELLETSAHIYTQISPCEGDFRNRTIDTRTKGKPINGDLENINKVIMELMKQCRVSPTDNPFSYLWIANCVLYSVVTAFLLHKGWKKQGSNNSSVHKRKISKWQIVYEGKAGSIRKRISIAKAETDRLKENRKVTKRGKRNREILQKECKVLSIASLVNYMGRQKFELRKLKKEFDRKKKNEEAWVINKQFKDDAGGVYANMREMLAKNEDCDRPKYEGVSGNTCEEERERFASIEEASSFWKELWEGEGSGNSQAVWLDEVRHAIFTKVPPPADEDWTLETSEAVGVLKRKKNWSAPGPDRLVSFWWKRAHALHEGVARSFEAISRIDDEYPSWFAEGKTSLIPKMGEFTSDNQRPITCLNTSYKWFTSCLLGPTDQHLEEHGLMEGSQRGAKKGCSGTVDNLLIDRVVTLDCQRRRRNLSMAWVDVKKAYDSVDHGWLGEMMVLHRFPKWLCEVICKLCKSWNTRIVANTLHGQEVSEPIVFKKGLPQGDALCPRLFTICLNPVAWKISASEGYKLSKPISARVTDLLYIDDLKVFAASESKLNRVLELTQAAMEDIGLQWNPRKCAVVHIKRGVHSQRNFGRDIAGDRVPTLEEGRQYKFLSVLETLVQEEKMVLELAAKEYLRRLSVIWSSPLSDYNRVVASNQFALPVLGYLMWTQHWPVTDLKIVDREARKIIVENGGKHPGGSTALLYLPRKKGGRGLRAVETEYKVTKVKAALGLYENKDQVMEMVREFEERAESLGHRSLVKDAVKFAEDLGVNLHLKHPDPVCAMNSGEIIPSHRVKEVLKECVEEKLEREVRGLEWQGKLLTERKSDSQLCKNGCFSWLRKWKSCPSYTIAGAFEIYEQLLPTKLYFSKKTHTSCTGDVKCRLCGHAQESVPHILAGCTALAQNKYLFRHNMALKVLFYEILRDQDLLEEVPPWYSPVMPKPVYKSEQVEAWWDVPVYADHQEVRANRVDARVVNHVSKKVMTIEMSCPWISNREKKSEEKTMKYGPLRWELKEKYKGYEVHQYNIIMEVCNHWLGERLLTS

SEQ ID NO: 31412 - protein, 907 aa, Pachyseris speciosa
MERQKCALRKLKRAFGRNKKNKEAKVLNQQFKEDAGRVYANMREMLAKCEDCDRPKYEGANGNTAAEEREKFGSIEEASSFWRELWEGEGTGNSQAEWLNEVRDAIFSKVPPPTEEAWTLETAEAVGILKRKKNWSAPGPDKVVNYWWKRAQVLHEGMARSFEAISRSDDDYPSWFAEGKTSLIPKPGEFTSDNQRPITCLNTAYKWFTSCVLGPMDQHLEEHGLMEGSQRGAKKGCSGTVDNLLIDRVVTLDCQRRRRNLSMAWVDVKKAYDSVDHGWLGEMMVLHRFPKWMCKVISKLCKSWKTRIIANTRHGWEVSDPIMFKKGLPQGDALCPRLFTICLNPVAWKISASEGYKLSKPISATVTDLLYIDDLKVFAANETKLNRVLESTQVAMEDIGLQWNPRKCAVVHIRRGIHSQENLGGDIAGGRLPSLEEGKQYKFLGVLESLVQEEKMVLECAAREYLRRLSIIWSSPLSDFNRVAASNQFALPVLGYLMWTQHWPITELKILDREVRKIIVENGGKHPGGSTALLYLPREQGGRGLRAVEMEYKVTKVKAAIRMYENQDPAMKMVREFDERAESSSHKSIVKDAAKFAAELGVDLHFKHPEPVCVMTSGEAIPPQRVKGVLKECVEEKYERDVRGLEWQGKLLRERKDDEQLCTNGCFSWLRTWRSCPTYTIAGAFELYEQLLPTKLYTSKKTHTSCSGDVKCRICGHAQESVSHILSGCTALAQTKYLFRHNMALKVLFYEILHDQGLLEEVPPWYSPVMPKPEYRSEQVEAWWDVPVYADHQEVRANRVDARIVDHANKKVLTLEMSCPWISNREKKSEEKTMKYGPLRWELKQQYRGYEVIQHNIIMDVLGGWSRETETSIQSLVGHKASQVLEAMQKAVLSSSLNIARTFKVMI

SEQ ID NO: 31413 - protein, 1018 aa, Pachyseris speciosa
MKQCRVSPTDNPFSYLWIANCVLYSVVTAFLLYKGWKKQGSGKSSNQKSKRSKCQKAYEEKEECLRKKISIAKSEIERLKENRKMTKRGKRNRAILQQECKELSIASLVSYMERQKCVLRKLKRAFGRNKKNKEAKVLNQQFKEDAGRVYANMREMLAKCEDCDRPKYEGANGNTAAEEREKFGSIEEASSFWRELWEGEGTGNSQAEWLNEVRDAIFSKVPPPTEEAWTLETAEAVGILKRKKNWSAPGPDKLVNYWWKRAQVLHEGMARSFEAISRSDDDYPSWFAEGKTSLIPKPGEFTSDNQRPITCLNTAYKWFTSCVLGPMDQHLEEHRLMEGSQRGAKKGCSGTVDNLLIDRVVTLDCQRRRRNLSMAWVDVKKAYDSVDHGWLGEMMVLHRFPKWMCKVISKLCKSWKTRIIANTRHGWEVSDPIMFKKGLPQGDALCPRLFTICLNPVAWKISASEGYKLSKPIIATVTDLLYIDDLKVFAANETKLNRVLESTQVAMEDIGLQWNPRKCAVVHIRRGIHSQENLGGDIAGGRLPSLEEGKQYKFLGVLESLVQEEKMVLECAAREYLRRLSIIWSSPLSDFNRVAASNQFALPVLGYLMWTQHWPITELKILDREVRKIIVENGGKHPGGSTALLYLPREQGGRGLRAVEMEYKVTKVKAAIRMYENQDPAMKMVREFDERAESSGHKSIVKDAAKFAAELGVDLHFKHPEPVCVMTSGEAIPPQRVKGVLKECVEEKYERDVRGLEWQGKLLRERKDDEQLCTNGCFSWLRTWRSCPTYTIAGAFELYEQLLPTKLYTSKKTHTSCSGDVKCRICGHAQESVSHILSGCTALAQTKYLFRHNMALKVLFYEILHDQGLLEEVPPWYSPVMPKPEYRSEQVEAWWDVPVYADHQEVRANRVDARIVDHANKKVLTLEMSCPWISNREKKSEEKTMKYGPLRWELKQQYRGYEVIQHNIIMDVLGGWSRETETSIQSLVGRKANQVLEAMQKAVLSSSLNIARTFKVMI

SEQ ID NO: 31414 - protein, 1217 aa, Acropora tenuis
MNCETNMASNGTRERLLRINGRIKWNEAANSDILECKRQAQLLVNSENPPCFDNGRRKGYMRIMKGLWEQKGYGYLNLSEQNLRDQAAKLEKTLGNAGQKISESVGTRVRGKNEEAVECFQYANAGEQDLHMEESIPVPDEQPNTLSSEARELLETSSHMYTQISPCEGDFRNRTIDTRTKGKPINGDLENINNVIMELMKQCRVSPTDNPFCYLWIANCVLYSVVTAFLLHKGWKKQGSNNSSVHKRKISKWQIVYEGKAGSIRKRISIAKAETDRLKENRKVTKRGKRNREILQKECKVLSIASLVNYMERQKCELRKLKKAFGRKRKNEEARVINKHFKDDAGRVYANMREMLAKNEDCDRPKYEGVSGNTCEEERERFGSIEEASSFWKELWEGEGSGNSQAVWLDEVRHAIFTKVPPPTDEDWTLEIAEAVGVLKRKKNWSAPGPDRLANFWWKRAHALHEGVARSFEAISRIDDEYPSWFAEGKTSLIPKPGEFTSDNQRPITCLNTSYKWFTSCLLGPTDQHLEKHGLMEGSQRGAKKGCSGTVDNLLIDRVVTLDCQRRRRNLSMAWVDVKKAYDSVDHGWLGEMMVLHRFPKWLSEVICKLCKSWNTKIVANTLHGQEVSEPIVFKKGLPQGDALCPRLFTICLNPVAWKISASEGYKLSKPISTRVTDLLYIDDLKVFAASESKLNRVLEWTQAAMEDIGLQWNPRKCAVVHIKRGVHSQRNFGRDIAGDRVPTLEEGRQYKFLSVLETLVQEEKMVLELAAKEYLRRLSVIWSSPLSDYNRVVASNQFALPVLGYLMWTQHWPVTDLKIVDREARKIIVENGGKHPGGSTALLYLPRKKGGRGLRAVETEYKVTKVKAALGLYENKDQVMEMVREFEERAESLGHRSLVKDAVKFAEDLGVNLHLKHPDPVCAMNSGEIIPSHRVKEVLKECVEEKLEREVRGLEWQGKLLTERKSDSQLCKNGCFSWLWKWKSCPSYTIAGAFEIYEQLLPTKLYFSKKTHTSCTGDVKCRLCGHAQESVPHILAGCTALAQNKYLFRHNMALKVLFYEILRDQNLLEEVPPWYSPVMPKPVYKSEQVEAWWDVPVYADHQEVRANRVDARVVNHVSKKVMTIEMSCPWISNREKKSEEKTMKYGPQRWELKEIYKGYEVHQYNIIMDVLGGWSEETEISVQSLVGRKTTHVLERMQKAVLSATLNIARTFKVVT

SEQ ID NO: 31415 - protein, 863 aa, Pachyseris speciosa
MLAKCEDCDRPKYEGANGNTAAEEREKFGSIEEASSFWRELWEGEGTGNSQAEWLNEVRDAIFSKVPPPTEEAWTLETAEAVGILKRKKNWSAPGPDKLVNYWWKRAQVLHEGMARSFEAISRSDDDYPSWFAEGKTSLIPKPGEFTSDNQRPITCLNTAYKWFTSCVLGPMDQHLEEHGLMEGSQRGAKKGCSGTVDNLLIDRVVTLDCQRRRRNLSMAWVDVKKAYDSVDHGWLGEMMVLHRFPKWMCKVISKLCKSWKTRIIANTWHGWEMSDPIMFKKGLPQGDALCPRLFTICLNPVAWKISASEGYKLSKPISATVTDLLYIDDLKVFAANETKLNRVLESTQVAMEDIGLQWNPRKCAVVHIRRGIHSQENLGGDIAGGRLPSLEEGKQYKFLGVLESLVQEEKMVLECAAREYLRRLSIIWSSPLSDFNRVAASNQFALPVLGYLMWTQHWPITELKILDREVHKIIVENGGKHPGGSTALLYLPREQGGRGLRAVEMEYKVTKVKAAIRMYENQDPAMKMVREFDERAESSGHKSIVKDAAKFAVELGVDLHFKHPEPVCVMTSGEAIPPQRVKGVLKECVEEKYERDVRGLEWQGKLLRERKDDEQLCTNGCFSWLRTWRSCPTYTIAGAFELYEQLLPTKLYTSKKTHTSCSGDVKCRICGHTQESVSHILSGCTAFAQTKYLFRHNMALKVLFYEILHDQGLLEEVPPWYSPVMPKPEYRSEQVEAWWDVPVYADHQEVQANRVDARIVDHANKKVLTLEMSCPWISNREKKSEEKTMKYGPLRWELKQQYRGYEVIQHNIIMDVLGGWLRETETSIQSLVGRKANQVLEAMQKAVLSSSLNIARTFKVMI

SEQ ID NO: 31416 - protein, 1163 aa, Acropora nasuta
MNCETNMASNGTRERLLRINGRIKWNEAANSDILECKRQAQLLVNSENPPCFDNGRRKGYMRIMKGLWEQKGYGYLNLSEQNLRDQAAKLEKTLGNAGQKISESIGTRDRGKNEEAAECFQYANAGDQDLHMEESIPVPDEQPNTLSSEARELLETSAHIYTQISPCEGDFRNRTIDTRTKGKPINGDLENINKVIMELMKQCRVSPTDNPFSYLWIANCVLYSVVTAFLLHKGWKKQGSNNSSVHKRKRSKWQIVYEGKAGSIRKRISIAKAETDRLKENRKVTKRGKRNREILQKECKVLSIASLVNYMERQKCELRKLKKAFGRKKKNEEARVINKQFKDDAGRVYANMREMLAKNEDCDRPKYEGVSGNTCEEERERFGSIEEASSFWKELWEGEGSGNSQAVWLEEVRHAIFTKVPPPTDEDWTLETAEAVGVLKRKKNWSAPGPDRLVNFWWKRAHALHEGVARSFEAISRIDDEYPSWFAEGKTSLIPKPGEFTSDNQRPITCLNTSYKWFTSCLLGPTDQHLEKHGLMEGSQRGAKKGCSGTVDNLLIDRVVTLDCQRRRRNLSMAWVDVKKAYDSVDHGWLGEMMVLHRFPKWLCEVICKLCKSWNTRIVANTLHGQEVSEPIVFKKGLPQGDALCPRLFTICLNPVAWKISASEGYKLSKPISARVTDLLYIDDLKVFAASESKLNRVLESTQAAMEDIGLQWNPRKCAVVHIRRGVHFQQNFGRDTVGDRVPTLEEGRQYKFLGVLESLVQEEKMVLELAAKEYLRRLSVIWSSPLSDYNRVVASNQFALPVLGYLMWTQHWPVTDLKIVDREARKIIVENGGKHPGGSTALLYLPREKGGRGLRAVETEYKVTKVKAALRLYENKDQVMEMVREFEERAESLGHRSLVKDAAKFAEDMGLNLHLKHPDPVCAVNSGEIIPSHRVKEVLKECVEKKLEREVRGLEWQGKLLIERKSDSQLCKNGCFSWLSKWKSCPSYTIAGAFEIYEQLLPTKLYFSKKTHTSCSGDVKCRLCGHAQESVPHILAGCTALAQNKYLFRHNMALKVLFYEILRDQDLLEEVPPWYSPVMPKPVYKSEQVEAWWDVPVYADHQEVRANRVDARVVNHVSKKVMTIEMSCPWISNREKKSEEKTMKYGPLRWELKEKYKGYEVH

SEQ ID NO: 31417 - protein, 1021 aa, Acropora microphthalma
MELMKQYRVSPTDNPFSYLWIANCVLYSVVTAFLLHKGWKKQGSNNSSVHKRKRSKWQIVYEGKAGSIRKRISIAKVETDRLKENKKVTKRGKRNREILQKECKVLSIASLVNYMERQKCELRKLKKAFGRKKKNEEARVINKQFKDDAGRVYANMREMLAKNEDCDRPKYEGVSGNTCEEERERFGSIEEASSFWKELWEGEGSGNSQAVWLEEVRHAIFTKVPPPTDEDWTLETAEAVGVLKRKKNWSAPGPDRLVNFWWKRAHALHEGVARSFEAISRIDDEYPSWFAEGKTSLIPKPGEFTSDNQRPITCLNTSYEWFTSCLLGPTDQHLEKHGLMEGSQRGAKKGCSGTVDNLLIDRVVTLDCQRRRRNLSMAWVDVKKAYDSVDHGWLGEMMVLHRFPKWLCEVICKLCKSWNTRIVANTLHGQEVSEPIVFKKGLPQGDALCPRLFTICLNPVAWKISASEGYKLSKPISARVTDLLYIDDLKVFAASESKLNRVLESTQAAMEDIGLQWNPRKCAVVHIRRGVHFQQNFGRDTVGDRVPTLEEGRQYKFLGVLESLVQEEKMVLELAAKEYLRRLSVIWSSPLSDYNRVVASNQFALPVLGYLMWTQHWPVTDLKIVDREARKIIVENGGKHPGGSTALLYLPREKGGRGLRAVETEYKVTKVKAALRLYENKDQVMEMVREFEERAESLGHRSLVKDAAKFAEDMGLNLHLKHPDPVCAVNSGEIIPSHRVKEVLKECVEEKLEREVRGLEWQGKLLIERKSDSQLCKNGCFSWLSKWKSCPSYTIAGAFEIYEQLLPTKLYFSKKTHTSCSGDVKCRLCGHAQESVPHILAGCTALAQNKYLFRHNMALKVLFYEILRDQDLLEEVPPWHSPVMPKPVYKSEQVEAWWDVPVYADHQEVRANRVDARVVNHVSKKVMTIEMSCPWISNREKKSEEKTMKYGPLRWELKEKYKGYEVHQYNIIMDVLGGWSEETEISAQSLVGRKTTHVLERMQKAVLSVTLNIARTFKVLT

SEQ ID NO: 31418 - protein, 1156 aa, Pachyseris speciosa
MGIMKQLWEEKGYGYLELTEQNLRDQAAKLEKTLGNVRQRISENIRTRECERNEEPVEGFQNANTGDQDLHMEESEAVPDERPSLSSEARELLKSATNVYIHIHPCEGDFSNRTIDTRTKGTPTKGDHENINKVITELMKQCRVSPTDNPFSYLWIANCVLYSVVTAFLLYKGWKKQRSGKSSNQKSKRSKCQKAYEEKAECLRKKISMAKSEIERLKENRKMTKRGKRNRAILQQECKELSIASLVSYMERQKCALRKLKRAFGRNKKNKEAKVLNQQFKEDAGRVYANMREMLAKCEDCDRPKYEGANGNTAAEEREKFGSIEEASSFWRELWEGEGTGNSQAEWLNEVRDAIFSKVPQPTEEAWTLETAEAVGILKRKKNWSALGPDKLVNYWWKCAQVLHEGMARSFEAISRSDDDYPSWFAEGKTSLIPKPGEFTSDNQRPITCLNTAYKWFTSCVLGPMDQHLEEHGLMEGSQRGAKKGCSGTVDNLLIDRVVTLDCQRRRRNLSMAWVDVKKAYDSVDHGWLGEMMVLHRFPKWMCKVISKLCKSWKTRIIANTRHGWEVSDPIMFKKGLPQGDALCPRLFTICLNPVAWKISASEGYKLSKPISPTVTDLLYIDNLKVFAANETKLNRVLESTQVAMEDIGLQWNPRKCAVVHIRRGIHSQENLGGEIAGGRLPSLEEGKQYKFLGVLESLVQEEKMVLECAAREYLRRLSIIWSSPLSDFNRVAASNQFALPVLGYLMWTQHWPITELKILDREVRKIIVENGGKHPGGSTALLYLPREQGGRGLRAVEMEYKVTKVKAAIRMYENQDPAMKMVREFDERAESSGHKSIVKDAAKFAAELGVDLHLKHPEPVRVMTSGEAIPPQRVKGVLKECVEEKYERDVRGLEWQGKLLRERKDDEQLCTNGCFSWLRTWRSCPTYTIAGAFELYEQLLPTKLYTSKKTHTSCSGDVKCRICGHAQESVSHILSGCTALAQTKYLFRHKMALKVLFYEILHDQGLLEEVPPWYSPVMPKPEYRSEQVEAWWDVAVYADHQEVRANRVDARIVDHANKKVLTLEMSCPWISNREKKSEEKTMKYGPLRWELKQQYRGYEVIQHNIIMDVLGGWSRETETSIQSLVGRKANQVLEAMQKAVLSSSLNIARTFKVMI

SEQ ID NO: 31419 - protein, 948 aa, Pachyseris speciosa
MAKSEIERLKENRKMTKRGKRNRAILQQECKELSIASLVSYMERQKCALRKLKRAFGRNKKNKEAKVLNQQFKEDAGRVYANMREMLAKCEDCDRPKYEGANGNTTAEERKKFGSIEEASSFWRELWEGEGTGNSQAEWLNEVRDAIFSKVPSPTEEAWTLETAEAVGILKRKKNWSAPGPDKLVNYWWKRAQVLHEGMARSFEAISRSDDDYPSWFAEGKTSLISKPGEFTSDNQRPITCLNTAYKWFTSCVLGPMDQHLEEHGLMEGSQRGAKKGCSGTVDNLLIDRVVTLDCQRRRRNLSMAWVDVKKAYDSVDHGWLGEMMVLHRFPKWMCKVISKLCKSWKTRIIANTRHGWEVSDPIMFKKGLPQGDALCPRLFTICLNPVAWKISASEGYTLSKPISATVTDLLYIDDLKVFAANETKLNRVLESTQVAMEDIGLQWNPRKCAVVHIRRGIHSQENLGGDIAGGRLPSLEEGKQYKFLGVLESLVQEEKMVLECAAREYLRRLSINWSSPLSDFNRVAASNQFALPVLGYLMWTQHWPITELKILDREVRKIIVENGGKHPGGSTALLYLPREQGGRGLRAVEMEYKVTKVKAAIRMYENQDPAMKMVREFDERAESSGHKSIVKDAAKFAAELGVDLHLKHPEPVCVMTSGEAIPPQRVKGVLKECVEEKYERDVRGLEWQGKLLRERKDDEQLCTNGCFSWLRTWRSCPTYTIAGAFELYEQLLPTKLYTSKKTHTSCSGDVKCRICGHAQESVSHILSGCTALAQTKYLFRHNMALKVLFYEILHDQGLLEEVPPWYSPVMPKPEYRSEQVEAWWDVPVYADHQEVRANRVDARIVDHANKKVLTLEMSCPWISNREKKSEEKTMKYGPLRWELKQQYRGYEVIQHNIIMDVLGGWSRETETSIQSLVGRKANQVLEAMQKAVLSSSLNIARTFKVMI

SEQ ID NO: 31420 - protein, 1210 aa, Pachyseris speciosa
MASNGSQERLVRINGRIKWTEVGNHDILECKKQAQRLVNSENPPRFDNGRKKGYMGIMKQLWEEKGYGYLELTEQNLRDQAAKLEKTLGNVRQRISENIRTRECERNEEPVEGFQNANTGDQDLHMEESEAVPDERPSLSSEARELLKSVTNVYIHIHPCEGDFSNRTIDTRTKGTPTKGDHENINKVITELMKQCRVSPTDNPFSYLWIANCVLYSVVTAFLLYRGWKKQGSGKSSNQKSKRSKCQKAYKEKAECLRKKISMAKSEIERLKENRKMTKRGKRNRAILQQECKELSIASLVSYMERQKCALRKLKRAFGRNKKNKEAKVLNQQFKEDAGRMYANMREMLAKCEDCDRPKYEGANGNTAAEEREKFGSIEEASSFWRELWEGEGTGNSQAEWLNEVRDAIFSKVPPPTEEAWTLETAETVGILKRKKNWSAPGPDKLVNYWWKRAQVLHEGMARSFEAISRSDDDYPSWFAEGKTSLIPKPGEFTSDNQRPITCLNTAYKWFTSCVLGPMDQHLEEHGLMEGSQRGAKKGCSGTVDNLLIDRVVTLDCQRRRRNLSMAWVDVKKAYDSVDHGWLGEMMVLHRFPKWMCKVISKLCKSWKTRIIANTRHGWEVSDPIMFKKGLPQGDALCPRLFTICLNPVAWKISASKGYKLSKPISATVTDLLYIDDLKVFAANETKLNRVLESTQVAMEDIGLQWNPRKCAVVHIRRGIHSQENLGGDIAGGRLPSLEEGKQYKFLDVLESLVQEEKMVLECAAREYLRRLSIIWSSPLSDFNRVTASNQFALPVLGYLMWTQHWPITELKILDREVRKIIVENGGKHPGGSTALLYLPREQGGRGLRAVEMEYKVTKVKAAIRMYENQDPAMKMVREFDERAESSGHKSIVKDAAKFAAELGVDLHLKHPEPVCVMTSGEAIPLQRVKGVLKECVEEKYERDVRGLEWQGKLLRERKDDEQLCTNGCFSWLRTWRSCPTYTIAGAFELYEQLLPTKLYTSKKTHTSCSGDVKCRICGHAQESVSHILSGCTALAQTKYLFRHNMALKVLFYEILHDQGLLEEVPPWYSPVMPKPEYRSEQVEAWWDVPVYADHQEVRANRVDARIVDHANKKVLTLEMSCPWISNREKKREEKTMKYGPLRWELKQQYRGYEVIQHNIIMDVLGGWSRETETSIQSLVGRKANHVLEAMQKAVLSSSLNIARTFKVMI

SEQ ID NO: 31421 - protein, 1217 aa, Acropora awi
MNCETNMASNGTRERLLRINGRIKWNEAANSDILECKRQAQLLVNSENPPCFDNGRRKGYMRIMKGLWEQKGYGYLNLSEQNLRDQAAKLEKTLGNAGQKISESIGTRDRGKNEEAAECFQYANAGDQDLHMEESIPVPDEQPNTLKSEARELLETSAHIYTQISPCEGDFRNRTIDTRTKGKPINGDLENINKVIMELMKQCRVSPTDNPFSYLWIANCVLYSVVTAFLLHKGWKKQGSNNSSVHKRKRSKWQIVYEGKAGSIRKRISIAKAETDRLKENRKVTKRGKRNREILQKECKVLSIASLVNYMERQKCELRKLKKAFGRKKKNEEARVINKQFKDDAGRVYANMREMLAKNEDCDRPKYEGVSGNTCEEERERFGSIEEASSFWKELWEGEGSGNSQAVWLEEVRHAIFTKVPPPTDEDWTLETAEAVGVLKRKKNWSAPGPDRLVNFWWKRAHALHEGVARSFEAISRIDDEYPSWFAEGKTSLIPKPGEFTSDNQRPITCLNTSYKWFTSCLLGPTDQHLEKHGLMEGSQRGAKKGCSGTVDNLLIDRVVTLDCQRRRRNLSMAWVDVKKAYDSVDHGWLGEMMVLHRFPKWLCEVICKLCKSWNTRIVANTLHGQEVSEPIVFKKGLPQGDALCPRLFTICLNPVAWKISASEGYKLSKPISARVTDLLYIDDLKVFAASESKLNRVLESTQAAMEDIGLQWNPRKCAVVHIRRGVHFQQNFGRDTVGDRVPTLEEGRQYKFLGVLESLVQEEKMVLELAAKEYLRRLSVIWSSPLSDYNRVVASNQFALPVLGYLMWTQHWPVTDLKIVDREARKIIVENGGKHPGGSTALLYLPREKGGRGLRAVETEYKVTKVKAALRLYENKDQVMEMVREFEERAESLGHRSLVKDAAKFAEDLGVNLHLKHPDPVCAVNSGEIIPSHRVKEVLKECVEEKLEREVRGLEWQGKLLIERKSDSQLCKNGCFSWLSKWKSCPSYTIAGAFEIYEQLLPTKLYFSKKTHTSCSGDVKCRLCGHAQESVPHILAGCTALAQNKYLFRHNMALKVLFYEILRDQDLLEEVPPWHSPVMPKPVYKSEQVEAWWDVPVYADHQEVRANRVDARVVNHVSKKVMTIEMSCPWISNREKKSEEKTMKYGPLRWELKEKYKGYEVHQYNIIMDVLGGWSEETEISVQSLVGRKTTHVLERMQKAVLSATLNIARTFKVVT

SEQ ID NO: 31422 - protein, 1103 aa, Acropora acuminata
MCTTAIIIIIIIIIIIIIIISIPFPDEQPNALSSEARELLETSAHIYTQISPCEGDFRNRTIDTRTKGKPINGDLENINKVIMELMKQCRVSPTDNPFSYLWTANCVLYSVATAFLLHKGWKKQGSNNSSVHERKRSKWQIVYEGKAGSIRKRISIAKAETDRLKENRKVTKKGKRNREILQKECKVLSIASLVNYMERQKCELRKLKKAFGRKKKNEEARVINKQFKDDAGRVYANMREMLAKNEDCDRPKYEGVSGNTCEEERERFGSIEEASSFWKELWEGEGSGNSQAVWLEEVRHAIFTKVPPPTDEDWTLETAEAVGVLKRKKNWSAPGPDRLVNFWWKRAHALHEGVARSFEAISRIDDEYPSWFAEGKTSLIPKPGEFTSDNQRPITCLNTSYKWFTSCLLGPTDQHLEKHGLMEGSQRGAKKGCSGTVDNLLIDRVVTLDCQRRRRNLSMAWVDVKKAYDSVDHGWLGEMMVLHRFPKWLCEVICKLCKSWNTRIVANTLHGQEVSEPIVFKKGLPQGDALCPRLFTICLNPVAWKISASEGYKLSKPISARVTDLLYIDDLKVFAASESKLNRVLESTQAAMEDIGLQWNPRKCAVVHIRRGVHFRQNFGRDTVGDRVPTLEEGRQYKFLGVLESLVQEEKMVLELAAKEYLRRLSVIWSSPLSDYNRVVASNQFALPVLGYLMWTQHWPVTDLKIVDREARKIIVENGGKHPGGSTALLYLPREKGGRGLRAVETEYKVTKVKAALRLYENKDQVMEMVREFEERAESLGHRSLVKDAAKFAEDMGLNLHLKHPDPVCAVNSGEIIPSHRVKEVLKECVEEKLEREVRGLEWQGKLLIERKSDSQLCKNGCFSWLSKWKSCPSYTIAGAFEIYEQLLPTKLYFSKKTHTSCSGDVKCRLCGHAQESVPHILAGCTALAQNKYLFRHNMALKVLFYEILRDQDLLEEVPPWHSPVMPKPVYKSEQVEAWWDVPVYADHQEVRANRVDARVVNHVSKKVMTIEMSCPWISNREKKSEEKTMKYGPLRWELKEKYKGYEVHQYNIIMDVLGGWSEETEISVQSLVGRKTTNVLERMQKAVLSVTLNIARTFKVLT

SEQ ID NO: 31423 - protein, 1217 aa, Acropora acuminata
MNCETNMASNGTRERLLRINGRIKWNEAANSDILECKRQAQLLVNSENPPCFDNGRRKGYMRIMKGLWEQKGYGYLNLSEQNLRDQAAKLEKTLGNAGQKISESIGTRDRGKNEEAAECFQYANAGDQDLHMEESIPVPDEQPNTLSSEARELLETSAHIYTQISPCEGDFRNRTIDTRTKGKPINGDLENINKVIMELMKQCRVSPTDNPFSYLWIANCVLYSVVTAFLLHKGWKKQGSNNSSVHKRKRSKWQIVYEGKAGSIRKRISIAKAETDRLKENRKVTKRGKRNREILQKECKVLSIASLVNYMERQKCELRKLKKAFGRKKKNEEARVINKQFKDDAGRVYANMREMLAKNEDCDRPKYEGVSGNTCEEERERFGSIEEASSFWKELWEGEGSGNSQAVWLEEVRHAIFTKVPPPTDEDWTLETAEAVGVLKRKKNWSAPGPDRLVNFWWKRAHALHEGVARSFEAISRIDDEYPSWFAEGKTSLIPKPGEFTSDNQRPITCLNTSYKWFTSCLLGPTDQHLEKHGLMEGSQRGAKKGCSGTVDNLLIDRVVTLDCQRRRRNLSMAWVDVKKAYDSVDHGWLGEMMVLHRFPKWLCEVICKLCKSWNTRIVANTLHGQEVSEPIVFKKGLPQGDALCPRLFTICLNPVAWKISASEGYKLSKPISARVTDLLYIDDLKVFAASESKLNRVLESTQAAMEDIGLQWNPRKCAVVHIRRGVHFRQNFGRDTVGDRVPTLEEGRQYKFLGVLESLVQEEKMVLELAAKEYLRRLSVIWSSPLSDYNRVVASNQFALPVLGYLMWTQHWPVTDLKIVDREARKIIVENGGKHPGGSTALLYLPREKGGRGLRAVETEYKVTKVKAALRLYENKDQVMEMVREFEERAESLGHRSLVKDAAKFAEDMGLNLHLKHPDPVCAVNSGEIIPSHRVKEVLKECVEEKLEREVRGLEWQGKLLIERKSDSQLCKNGCFSWLSKWKSCPSYTIAGAFEIYEQLLPTKLYFSKKTHTSCSGDVKCRLCGHAQESVPHILAGCTALAQNKYLFRHNMALKVLFYEILRDQDLLEEVPPWHSPVMPKPVYKSEQVEAWWDVPVYADHQEVRANRVDARVVNHVSKKVMTIEMSCPWISNREKKSEEKTMKYGPLRWELKEKYKGYEVHQYNIIMDVLGGWSEETEISVQSLVGRKTTHVLERMQKAVLSVTLNIARTFKVLT

SEQ ID NO: 31424 - protein, 1210 aa, Pachyseris speciosa
MASNGSQERLVRINGRIKWTEVGNHDILECKKQAQRLVNSENPPRFDNGRKKGYMGIMKQLWEEKGYGYLELTEQNLRDQAAKLEKTLGNVRQRISENIRTRECERNEEPVEGFQNANTGDQDLHMEESEAVPDERPSLSSEARELLKSATNVYIHIHPCEGDFSNRTIDTRTKGTPTKGDHENINKVITELMKQCRVSPTDNPFSYLWIANCVLYSVVTAFLLYKGWKKQGSGKSSNQKSKRSKCQKAYEEKAECLRKKISMAKSEIERLKENRKMTKRGKRNRAMLQQECKELSIASLVSYMERQKCALRKLKRAFGRNKKNKEAKVLNQQFKEDAGRVYANMREMLAKCEDCDRPKYEGANGNTAAEEREKFGSIEEASSFWRELWEGEGTGNSQAEWLNEVRDAIFSKVLPPTEEAWTLETAEAVGILKRKKNWSAPGPDKLVNYWWKRAQVLHEGMARSFEAISRSDDDYPSWFAEGKTSLIPKPGEFTSDNQRPITCLNTAYKWFTSCVLGPMDQHLEEHGLMEGSQRGAKKGCSGTVDNLLIDRVVTLDCQRRRRNLSMAWVDVKKAYDSVDHGWLGEMMVLHRFPKWMCKVISKLCKSWKTRIIANTRHGWEVSDPIMFKKGLPQGDALCPRLFTICLNPVAWKISASEGYKLSKPISATVTDLLYIDDLKVFAANETKLNRVLESTQVAMEDIGLQWNPRKCAVVHIRRGIHSQENLGGDIAGGRLPSLEEGKQYKFLGVLESLVQEEKMVLECAAREYLRRLSIIWSSPLSDFNRVAASNQFALPVLGYLMWTQHWPITELKILDREVRKIIVENGGKHPGGSTALLYLPREQGGRGLRAVEMEYKVTKVKAAIRMYENQDPAMKMVREFDERAESSGHKSIVKDAAKFAEELGVDLHFKHPEPVCVMTSGEAIPPQRVKGVLKECVEEKYERDVRGLEWQGKLLRERKDDEHLCTKGCFSWLRTWRSCPTYTIAGAFELYEQLLPTKLYTSKKTHTSCSGDVKCRICGHAQESVSHILSGSTALAQTKYLFRHNMALKVLFYEILHNQGLLEEVPPWYSPVMPKPEYRSEQVEAWWDVPVYADHQEVRANRVDARIVDHANKKVLTLEMSCPWISNREKKSEEKTMKYGPLRWELKQQYRGYEVIQHNIIMDVLGGWSRETETSIQSLVGRKANQVLEAMQKAVLSSSLNIARTFKVMI

SEQ ID NO: 31425 - protein, 1150 aa, Acropora yongei
MRIMKGLWEQKGNGYLNLSEQNLRDQAAKLEKTLGNAGQKISESVGTRVRGKNEEAFESFQYANAGEQDLHMEESIPVPDEQPNTLSSEARELLETSSHMYTQISPCEGDFRNRTIDTRTKGKPINGDLENMNNVIMELMKQCRVSPTDNPFSYLWIANCVLYSVVTAFLLHKGWKKQGSNNSSVHKRKISKWQIVYEGKAGSIRKRISIAKAETDRLKENRKVTKRGKRNREILQKECKVLSIASLVNYMERQKCELRKLKKAFGRKKKNEEVRVINKHFKDDAGRVYANMREMLAKNEDCDRPKYEGVSGNTCEEERERFGSIEEASSFWKELWEGEGSGNSQAVWLDEVRHAIFTKVPPPTDEDWTLETAEAVGVLKRKKNWSAPGPDRLTNFWWKRAHALHKGVARSFEAISRIDDEYPSWFAEGKTSLIPKPGEFTSDNQRPITCLNSSYKWFTDQHLEKHGLMEGSQRGAKRGCSGTVDNVLIDRVVTLDCQRRRRNLSMAWVDVKKAYDSVDHGWLGEMMVLHRFPKWLCEVICKLCKSWNTKIVANTLHGQEVSEPIVFKKGLPQGDALCPRLFTICLNPVAWKISASEGYKLSKPISTRVTDLLYIDDLKVFAASESKLNRVLELTQAAMEDIGLQWNPSKCAVVHIKRGVHSQRNFGRDIAGDRVPTLEEGRQYKFQGVLETLVQEEKMALELPAKEYLRRLSVIWSSPLSDYNRVVASNQFALPVLGYLMWTQHWPVTDLKIVDREARKIIEENGGKHPGGSTALLYLPRKKGGRGLRAVETEYKVTKVKAALGLYENKDQVMEMVREFEERAESLGHRSLVKDAVKFAEDLGVNLHLKHPDPVCAMNSGEIIPSHRVKEVLKECVEEKLEREVRGLEWQGKLLTERKSDSQLCKNGCFSWLWKWKSCPSYTIAGAFEIYHQLLPTKLYFSKKTHTSCTGDVKCRLCGHAQESVPHILAGCTALAQNKYLFGHNMALKVLFYEILRDQNLLEEVPPWYSPVMPRPVYKSEQVEAWWDVPVYADHQKVRANRVDARVVNHVSKKVMTIEMSCPWISNREKKSEEKTMKYGPLRWELKEKYKGYEVHQYNIIMDVLGGWSEETEISVQSLVGRKTTHVLERMQKAVLSATLNIARTFKVVT

SEQ ID NO: 31426 - protein, 1210 aa, Pachyseris speciosa
MASNGSQERLVRINGRIKWTEVGNHDILECKKQAQRLVNSENPPRFDNGRKKGYMGIMKQLWEEKGYGYLELTEQNLRDQAAKLEKTLGNVRQRISENIRTRECERNEEPVEGFQNANTGDQDLHMEESEAVLDERPSLSSEARELLKSATNVYIHIHPCEGDFSNRTTDTRTKGTPTKGDHENINKVITELMKQCRVSPTDNPFSYLWIANCVLYSVVTAFLLYKGWKKQGSGKSSNQKSKRSKCQKAYEEKAECLRKKISMAKSEIERLKENRKMTKRGKRNRAILQQECKELSIASLVSYMERQKCALRKLKRAFGRNKKNKEAKVLNQQFKEDAGRVYANMREMLAKCEDCDRPKYEGANGNTAAEEREKFGSIEEASSFWRELWEGEGTGNSQAEWLNEVRDAIFSKVPPPTEEAWTLETAEAVGILKRKKNWSAPGPDKLVNYWWKRAQVLHEGMARSFEAISRSDDDYPSWFAEGKTSLIPKPGVFTSDNQRPITCLNTAYKWFTSCVLGPMDQHLEEHELMEGSQRGAKKGCSRTVDNLLIDRVVTLDCQRRRRNLSMAWVDVKKAYDSVDHGWLGEMMVLHRFPKWMCKVISKLCKSWKTRIIANTRHGWEVSDPIMFKKGLPQGDALCPRLFTICLNPVAWKISASEGYKLSKPISATVTDLLYIDDLKVFAANETKLNRVLESTQVAMEDIGLQWNPRKCAVVHIRRGIHSQENLGGDIAGGRLPSLEEGKQYKFLGVLESLVQEEKMVLECAAREYLRRLSIIWSSPLSDFNRVAASNQFALPVLGYLMWTQHWPITELKILDREVRKIIVENGGKHPGGSTALLYLPREQGGRGLRAVEMEYKVTKVKAAIRMHENQDPAMKMVREFDERAESSGHKSIVKDAAKFAAELGVDLHFKHPEPVCVMTSGEAIPPQRVKGVLKECVEEKYERDVRGLEWQGKLLRERKDDEQLCTNGCFSWLRTWRSCPTYTIAGAFELYEQLLPTKLYTSKKTHTSCSGDVKCRICGHAQESVSHILSGCTALAQTKYLFRHNMALKVLFYEILHDQGLLEEVPPWYSPVMPKPEYRSKQVEAWWDVPVYADHQEVRANRVDARIVDHANKKVLTLEMSCPWISNREKKSEEKTMKYGPLRWELKQQYRGYEVIQHNIIMDVLGGWSRETETSIQSLVGRKANQVLEAMQKAVLSSSLNIARTFKVMI

SEQ ID NO: 31427 - protein, 1210 aa, Pachyseris speciosa
MASNGSQERLVRINGRIKWTEVGNHDILECKKQAQRLVNSENPPRFDNGRKKGYMGIMKQLWEEKGYGYLELTEQNLRDQAAKLEKTLGNVRQRISENIRTRECERNEEPVEGFQNANTGDQDLHMEESEAVPDERPSLSSEARELLKSATNVYIHIHPCEGDLSNRTIDTRTKGTPTKGDHENINKVITELMKQCRVSPTDNPFSYLWIANCVLYSVVTAFLLYKGWKKQGSGKSSNQKSKRSKCQKAYEEKAECLRKKISMAKSEIERLKENRKMTKRGKRNRAILQQECKELSIASLVSYMERQKCALRKLKRAFGRNKKNKEAKVLNQQFKEDAGRVYANMREMLAKCEDCDRPKYEGANGNIAAEEREKFGSIEEASSFWRELWEGEGTGNSQAEWLNEVRDAIFSKVPPPTEEAWTLETAEAVGILKRKKNWSAPGPDKLVNYWWKRAQVLHEGMARSFEAISRSDDDYPSWFAEGKTSLIPKPGEFTSDNQRPITCLNTAYKWFTSCVLGPMDQHLEEHGLMEGSQRGAKKGCSGTVDNLFIDRVVTLDCQRRRRNLSMAWVDVKKAYDSVDHGWLGEMMVLHRFAKWMCKVINKLCKSWKTRIIANTRHGWEVSDPIMFKKGLPQGDALCPRLFTICLNPVAWKISASEGYKLSKPISATVTDLLYIDDLKVFAANETKLNRVLESTQVAMEDIGLQWNPRKCAVVHISRGIHSQENLGGDIAGGRLPSLEEGKQYKFLGVLESLVQEEKMVLECAAREYLRRLSIIWSSPLSDFNRVAASNQFALPVLGYLMWTQHWPITELKILDREVRKIIVENGGKHPGGSTALLYLPREQGGRGLRAVEMEYKVTKVKAAIRMYENQDPAMKMVREFDERAESSGHKSIVKDAAKFAAELGVELHLKHPEPVCVMTSGEAIPPQRVKGVLKECVEEKYERDVRGLEWQGKLLRERKDDEQLCTNGCFSWLRTWRSCPTYTIAGAFELYEQLLPTKLYTSKKTHTSCSGDVKCRICGHAQESVSHILSGCTALAQTKYLFRHNMALKVLFYEILHDQGLLEEVPPWYSPVMPKPEYRSEQVEAWWDVPVYADHQEVRANRVDARIVDHANKKVLTLEMSCPWISNREKKSEEKTMKYGPLRWELKQQYRGYEVIQHNIIMDVLGGWSRETETSIQSLVGRKANQVLEAMQKAVLSSSLNIARTFKVMI

SEQ ID NO: 31428 - protein, 1209 aa, Pachyseris speciosa
MASNGSQERLVRINGRIKWTEVGNHDILECKKQAQRLVNSENPPRFDNGRKKGYMGIMKQLWEEKGYGYLELTEQNLRDQAAKLEKTLGNVRQRISENIRTRECERNEEPVEGFQNANTGDQDLHMEESEAVPDERPSLSSEARELLKSATNVYIHIHPCEGDFSNRTIDTRTKGTPTKGDHENINKVITELMKQCRVSPTDNPFSYLWIANCVLYSVVTAFLLYKGWKKQGSGKSSNQKSKRSKCQKAYEEKAECLRKKISMAKSEIERLKENRKMTKRGKRNRAILQQECKELSIASLVSYMERQKCALRKLKRAFGRNKKNKEAKVLNQQFKEDTGRVYANMREMLAKCEDCDRPKYEGANGNTAAEEREKFGSIEEASSFWRELWEGEGTGNSQAEWLNEVRDAIFSKVPPPTEETWTLETAEAVGILKRKKNWSAPGPDKLVNYWWKRAQVLHEGMARSFEAISRSDDDYPSWFAEGKTSLIPKPGEFTSDNQRPITCLNTAYKWFTSCVLGPMDQHLEEHGLMEGSQRGAKKGCSGTVDNLLIDRVVTLDCQRRRRNLSMAWVDVKKAYDSVDHGWLGEMMVLHRFPKWMCKVISKLCKSWKTRIIANTRHGWEVSDPIMFKKGLPQGDALCPRLFTICLNPVAWKISASEGYKLSKPISATVTDLLYIDDLKVFAANETKLNRVLESTQVAMEDIGLQWNPRKCAVVHIRRGIHSQENLGGDIAGGRLPSLEEGKQYKFLGVLESLVQEEKMVLECAAREYLRRLSIIWSSPLSDFNRVAASNQFALPVLGYLMWTQHWPITELKILDREVRKIIVENGGKHPGGSTALLYLPREQGGRGLRAVEMEYKVTKVKAAIRMYENQDPAMKMVREFDERAESSGHKSIVKDAAKFAAELGVDLHLKHPEPVCVMTSGEAIPPQRVKGVLKECVEKYERDVRGLEWQGKLLRERKDDEQLCTNGCFSWLRTWRSCPTYTIAGAFELYEQLLPTKLYTSKKTHTSCSGDVKCRICGHAQESVSHILSGCTALAQTKYLFRHNMALKVLFYEILHDQGLLEEVPPWYSPVMPKPEYRSEQVEAWWDVPVYADHQEVRANRVDARIVDHANKKVLTLEMSCPWISNREKKSEEKTMKYGPLRWELKQQYRGYEMIQHNIIMDVLGGWSRETETSIQSLVGRKANQVLEAMQKAVLSSSLNIARTFKVMI

SEQ ID NO: 31429 - protein, 1211 aa, Acropora selago
MASNGTRERLLRINGRIKWNEAANSDILECKRQAQLLVNSENPPCFDNGRRKGYMRIMKGLWEQKGYGYLNLSEQNLRDQAAKLEKTLGNAGQKISESIRTRDRGKNEEAAECFQYANAGDQDLHMEESIPVPDEQPNTLSSEARELLETSAHIYTQISPCEGDFRNRTIDTRTKGKPINGDLENINKVIMELMKQCRVSPTDNPFSYLWIANCVLYSVVTAFLLHKGWKKQGSNNSSVHKRKRSKWQIVYEGKAGSIRKRISIAKAETDRLKENRKVTKRGKRNREILQKERKVLSIALLVNYIERQKCELRKLKKAFGRKKKNEEARVINKQFKDDAGRVYANMREMLAKNEDCDRPKYEGVSGNTCEEERERFGSIEEASSFWKELWEGEGSGNSQAVWLEEVRHAIFTKVPPPTDEDWTLETAEAVGVLKRKKNWSAPGPDRLVNFWWKRAHALHEGVARAFEAISRIDDEYPSWFAEGKTSPIPKPGEFTSDNQRPITCLNTSYKWFTSCLLGPTDQHLEKHGLMEGSQRGAKKGCSGTVDNLLIDRVVTLDCQRRRRNLSMAWVDVKKAYDSVDHGWLGEMMVLHRFPKWLCEVICKLCKSWNTRIVANTLHGQEVSEPIVFKKGLPQGDALCPRLFTICLNPVAWKISASEGYKLSKPISARVTDLLYIDDLKVFAASESKLNRVLESTQAAMEDIGLQWNPRKCAVVHIRRGVHFQQNFGRDTVGDRVPTLEEGRQYKFLGVLESLVQEEKMVLELAAKEYLRRLSVIWSSPLSDYNRVVASNQFALPVLGHLMWTQHWPVTDLKIVDREARKIIVENGGKHPGGSTALLYLPREKGGRGLRAVETEYKVTKVKAALRLYENKDQVMEMVREFEERAESLGHRSLVKDAAKFAEDMGLNLHLKHPDPVCAVKSGEIIPSYRVKEVLKECVEEKLEREVRGLEWQGKLLIERKSDSQLCKNGCFSWLSKWKSCPSYTIAGAFEIYEQLLPTKLYFSKKTHTSCYGDVKCRLCGHAQESVPHILAGCTALAQNKYLFRHNMALKVLFYEILRDQDLLEEVPPWHSPVMPKPVYKSEQVEAWWDVPVYADHQEVRANRVDARVVNHVSKKVMTIEMSCPWISNREKKSEDKTMKYGPLRWELKEKYKGYEVHQYNIIMDVLGGWSEETEISVQSLVGRKTTHVLERMQKAVLSVTLNIARTFKVLT

SEQ ID NO: 31430 - protein, 1217 aa, Acropora acuminata
MNCETNMASNGMRERLLRINGRIKWNEAANSDILECKRQAQLLVNSENPPCFDNGRRKGYMRIMKGLWEQKGYGYLNLSEQNLRDQAAKLEKTLGNAGQKISESIGTRDRGKNEEAAECFQYANAGDQDLHMEESIPVPDEQPNTLSSEARELLETSAHIYTQISPCEGDFRNRTIDTRTKGKPINGDLENINKVIMELMKQCRVSPTDNPFSYLWIANCVLYSVVTAFLLHKGWKKQGSNNSSVHKRKRSKWQIVYEGKAGPIRKRISIAKAETDRLKENRKVTKRGKRNREILQKECKVLSIASLVNYMERQKCELRKLKKAFGRKKKNEEARVINKQFKDDAGRVYANMREMLAMNEDCDRPKYEGVSGNTCEEERERFGSIEEASSFWKELWEGEGSGNSQAVWLEEVRHAIFTKVPPPTDEDWTLETAEAVGVLKRKKNWSAPGPDRLVNFWWKRAHALHEGVARSFEAISRIDDEYPSWFAEGKTSLIPKPGEFTSDNQRPITCLNTSYKWFTSCLLGPTDQHLEKHGLMEGSQRGAKKGCSGTVDNLLIDRVVTLDCQRRRRNLSMAWVDVKKAYDSVDHGWLGEMMVLHRFPKWLCEVICKLCKSWNTRIVANTLHGQEVSEPIVFKKGLPQGDALCPRLFTICLNPVAWKISASEGYKLSKPISARVTDLLYIDDLKVFAASESKLNRVLESTQAAMEDIGLQWNPRKCAVVHIRRGVHFQQNFGRDTVGDRVPTLEEGRQYKFLGVLESLVQEEKMVLELAAKEYLRRLSVIWSSPLSDYNRVVASNQFALPVLGYLMWTQHWPVTDLKIVDREARKIIVENGGKHPGGSTALLYLPREKGGRGLRAVETEYKVTKVKAALRLYENKDQVMEMVREFEERAESLGHRSLVKDATKFAEDMGLNLHLKHPDPVCAVNSGEIIPSHRVKEVLKECVEEKLEREVRGLEWQGKLLIERNSDSQLCKNGCFSWLSKWKSCPSYTIAGAFEIYEQLLPTKLYFSKKAHTSCSGDVKCRLCGHAQESVPHILAGCTALAQNKYLFRHNMALKALFYEILRDQDLLEEVPPWHSPVMPKPVYKSEQVEAWWDVPVYADHQEVRANRVDARVVNHVSKKVMTIEMSCPWISNREKKSEEKTMKYGPLRWELKEKYKGYEVHQYNIIMDVLGGWSEETEISVQSLVGRKTTHVLERMQKAVLSVTLNIARTFKVLT

SEQ ID NO: 31431 - protein, 986 aa, Tenebrio molitor
MSVSSCENFSPVKKTYIGSSRLRSGTSDALRNFKVSTQDIIEAGPSSSFDLQQSSQSSWIFDKSFNKSEKICLKCDICHKEFLSKRGLNIHLGKSHSNSSIVTTTCSSYNKCEICPNSRTFVNAHGLKIHNSRCHKESFVNISPVEECKSFQERIANFKSNVPVLKRIPQGARISVANKLSSVINACVNLNTMNAWEELFLFSYRILNISTKNLKDKSLTSKVKENISHYEVPNTFIKKKNSKFSVYKTAENKISDGDIRGAIRLLSSSDVFAANNSDTFAQLEEKHPPPSRPLNLPEAPNENVDYLSVSEDKVFKAIMSFPNGSSAGLDGIRPQHLKDLIGKSSCDAGQRLLSEITRLCNFMFSGKIISNFTPFIYGASLCALSKKDGGIRPIAIGSTFRRLASKLGCYYLSGEISNYLKPKQLGFGTRSGCEAAVHSVRSYLTNYSAEVFLKIDVKNAFNSVERDSLLLMVNNKIPLIYPYLWQCYSSPSYLIYNGNLIYSQVGCQQGDPLGPAIFSLSIHPTIERLSSHLNVWYLDDGALGGSAETVLKDLETIIVEFEKIGLSLNYSKCELFLSPDVSEERKIDILKKFESLSPDIRKTSAEDLSLLGSPLFEDAMPNFFSTILEKFDLLVKNIENIKPHMALFLLRHCLWIPKLNYFLRCCPFWKFKNYCKAFDEKIQSTLEKILNIKLSSNSWNQASLPLDFGGLGIRSVTDLSSVAFLASIHSSIALIGCILSPLNNTFEIKYLSEALDCWKLLCPGIEIPDSPNLQRLWDAPIINKKFNEILDSSDHCNKARLLAVSELESGAWLKALPSSNLGTLLDRQTLQIAVALRIGSEICHPHICICGSQVDKWGHHGLSCLKSAGRIPRHSALNDILKRTFSSVNIPCIIEPYGLLREDGKRPDGVTLIPWKRGRTLVWDVTCVDTLAATHLDGCSRKSGSAALSAEKLKHGKYCTIKENHNFVAFSLETFGPWSPDAKELF

SEQ ID NO: 31432 - protein, 849 aa, Tenebrio molitor
MNAWEELFLFSYRILNISTKNLKDKSLTSKVKENISHYEVPNTFIKKKNSKFSVYKTAENKISDGDIRGAIRLLSSSDVFAANNSDTFAQLEEKHPPPSRPLNLPEAPNENVDYLSVSEDKVFKAIMSFPNGSSAGLDGIRPQHLKDLIGKSSCDAGQRLLSEITRLCNFMFSGKIISNFTPFIYGASLCALSKKDGGIRPIAIGSTFRRLASKLGCYYLSGEISNYLKPKQLDFGTRSGCEAAVHSVRSYLTNYSAEVFLKIDVKNAFNSVERDSLLLMVNNKIPLIYPYLWQCYSSPSYLIYNGNLIYSQVGCQQGDPLGPAIFSLSIHPTIERLSSHLNVWYLDDGALGGSAETVLKDLETIIVEFEKIGLSLNYSKCELFLFPDVSEERKIDILKKFESLSPDIRKTSAEDLSLLGSPLFEDAMPNFFSTILEKFDLLVKNIENIKPHMALFLLRHCLWIPKLNYFLRCCPFWKFKNYCKAFDEKIQSTLEKILNIKLSSNSWNQASLPLDFGGLGFRSVTDLSSVAFLASIHSSIALIGCILSPLNNTFEIKYLSEALDCWKLLCPGIEIPDSPNLQRLWDAPIINKKFNEILDSSDHCNKARLLAVSELESGAWLKALPSSNLGTLLDRQTLQIAVALRIGSEICHPHICICGSQVDKWGHHGLSCLKSAGRIPRHSALNDILKRTFSSVNIPCIIEPYGLLREDGKRPDGVTLIPWKRGRTLVWDVTCVDTLAATHLDSCSRKSGSAALSAEKLKHGKYCTIKENHNFVAFSLETFGPWSPDAKELFKDISKLLLEKSGVSESPSYFQQRISIAIQRGNAASVLGTVAKTSGLEEVFYLFKI

SEQ ID NO: 31433 - protein, 1131 aa, Dermatophagoides pteronyssinus
MLTRSGINRRQNDPSLPMLEQLQTEENVTNELSRSNNQPVHVQSVIETTDNATTEMSTNDGTQPQSQTTTNMEKLIQILANIDKENQKDWIKELYENIKEQMSRIPKGGWEKIKDAFNQKFVQQKTIIDMRNLYNMAKNKDNLQSGQNNVPTTSNQLIEIKNVDLFTRTKTALKNNIKEVNEQNKMRTYKIYSREVKNEIMDYINIALQQEQLDESIISLQEYANIILACQITYQQMTTKTIKKSNWQQSMEETIKKLYDKVDTINEFCETGHATSAMKQICKNKHIHSTNRQKVERVKDELEERIKSYEKRLRIHENRKQFRKTNRLFELNAKRFYREINETTNSISNEIDKEATYEFWKKMWEQNEMETNREEIVNLHEPSQMNIDMCKEKICEITENVISNLPLWKATGTDYVFNFYIKKIHVLHTKLKELVYNAIQNPQSIDEQFYEGVTYLLPKRHNTKSPNDLRPITCLSNIYKLISKVATQLLTEFAEVNEIISNNQLGTKRRCQGAKLQALINKVINSSNDHKLCTSWIDIQKAYDSVPHSYILQCLEKIRAPDNIIKFVERMLINQKTTLIMNRDEVGRVQINKGLLQGDSLSPLLFVIAMEPLSRCLNKNCVKVRAGQTDLETNHLIFIDDIKLFANDKNTLKELCDRTKEVLEGIGFQTNEQKSANNIGDDTAFGNMIDENGYRYLGILEDENNLIKTENKVLLREKILSKVDALCKTKLNGKNLMMAINQYAISTMNYYIGLIDFKPNELKSMDDDIRRILKKYNIIRHSANNERLYMDRKELGRGLQKIEERAEAILFNFHSSLEQNNKAIIDNEIAKGTSLGTIKTFITNKYQIPDSTLNAMTIKEKQKADKLEKIREKRLHGKLFNHGEQPVNIEQSSLWLKKSNISPQEEGLLCKVQDRNLFFETRKCKHCSLTNVGVDHLATCCGRLLNSEYKYRHNDVVRSLHLMFCQRYGIERNKRLKNYRVENVIQNNRVKIKSDVPIITDTRIDNNKPDLLVHDLAAKKIWIVEVGITNKDRLKETETEKARKYDILAKELKSMYNATVFQVPIVMTWDGLTTKYHKKYMEILNVPKQIQAYVQYISIKRTAEIIFRDLTDICGGFDDVQLEKIINNENI

SEQ ID NO: 31434 - protein, 1760 aa, Dolomedes plantarius
MDPKSLNPTGSSENNSPPPSQRKSYADVASAVTPAPSALPLRKSPRKLTILSSSYSQNKHISASQPSTSRSKPVPTNRLPLVSPVAGRTRCATKKRNPIPASCPPGGASSTDAPGLPIDNVGPKWPPPPDTIPGPFSTLRCSPGSDSIPAAGSSPSCEGTDSPPPTTSLVNVSHQHRLPPAAPLPPRQLRKPISNAGTPTAESSWKRSPPSPTRDQGTQTDSSEDDTPPFQRDIGCMPLLSCRRGLTVELLFPRTSLFRCTEKGCQKVFHSTRWKNVKTSIRFHLERYHGLKSLDVVRWCLFCRQPVEGRLAHHPCLSGQRPYAIQQSELDAHAFECAACFQSFASDSDLNNHSLNKHGLPVLVPAPPPSQSIPTGISTPIPRSTSLGSPMSHDRDCPSPTSASSLAQISPVIVSPPAKTMTPPDSAAVDTPPRPDDSAHRTIDQSLSESESATRPSFSGLIDSQEMLLLERLSDPGLIPGDLGASPPSFPSTGNSLVSHSSEHAARSPTPTADDIPIGSPPPASSNTRLSGHSSPWSIIRDSLSSNSSSPGLSLHASPANSLSDSVPPRSPEITAHSSSEQRPATGRSSAPDLDGPGSGPSQDRTTTSINVPAHNSRVGEVIHLVFPIFEHFHCTETGCSMVFVNNDWTAARVSLIRHLESIHNLSGLTVCRWCSFCGGSLSQKISRHGCLRNIIRYDPARSHADLPYKCRHCSFACASGTGIKNHARVHTRAAAQRKLDEIAANRTIASQSSSTSQPTPGPSHVPDSPSLDGEINSPLSVSQPDIEFDEFQLLLSQPEDGEIAEMNSPEDPDAPSPSAGFIIRLRVLLALPEVDAAWPQFEALLEEYISFAQQHVRLPAPFAGPPPNRRTNPKDHKFIQQLYRRNRRNAVRKVLGQEGQRCSLPVNDVVDHFFPTCDSSPSPATFVHPAPATEPPQLCNFTSAEVWAKLSKCENSAPGPDRLTYQHWRSVDPDSTALALIFNLCLKAERIPDAWRTSRTILIPKCDDPAGPSDWRPIALGCTITKLFTGCLANRLSTWVEEYSLLSPNQKGFLRYDGAFENNFILEQRIQNARTRRRDICLASLDISNAFGSVPHNAIFFALENAGIGDTFLNIIRDLYSGTSTCILTGDELSEPFPVSCGVRQGCPLSGLLFNFAIDPVLRSIPNDDSSFQVLAFADDIMLISDSPDQLQMNICTVQETANQIGLSFNPSKCITLHLSPSPMGARPTVFRINDQPIPHLMDGEPARFLGKPFGFSIVPDSNRLSDFKATAESILTSSLAPWQRLDALKTFFLPSLSYAQRTAQFNKTNWKTVDKFMRPLIMDTLNLPNNASNSYIYGNTKDGLFGIGLCAADSDIALVDGAFKLLTSPDPRTKDLAWADLEKSVATRLRLPTCSSDLSSYLSGAYFSNTNPISNVWSRAREASERLGVSWSLHDDKSVSLILNDKPILDRRKIFRSLREAIKNKFSADLRRLRHQGKTFPAFSAAKASTHFHRSGAYCRFADWRFVHRARLGLVPLNAYKRNTSAPDKRCRKCGVHDETLPHVLNHCLSYMTLIRKRHNAVVERVKKAAEREWSILSENQPIAGLSLRPDLVITRGDSALILDIAIPFENGQSAFQEKRREKEEKYADLAATLKQRFKSVKVEAIIVGALGSWDPRNDRVLKNLCSKKYLTLMRKLCVSDVIRVSRDLYIEHLTGVRQATGSRYNTMPRNDISSLPRLSPVAINHYVEDEDIDPRDLDDDLGLDAEVQNDVDVVANR

SEQ ID NO: 31435 - protein, 887 aa, Brachyptera putata
MTPSQCIAVTSDRISVLEKSRNFQKEQEKAQKMRRRFVEKPSMQVIRDKPERVEPGLVDVENFYTQLYKAADGPERRPTPRFNEWLSRLQDHKASTNLTHTDPVNIRKLVNTALKSAASWKAPGEDSIPVGIYKLMPSARKYLCNYVSEVLTGKRVCVEKDVRGKVILLHKAGDQNDPSNYRPIALLNTDYKILTSVITTLIQEQLPEWAVPKEQLSREGVWGTVHGLLQDKAITRVARKNRSRNYSAWIDFTKAYDSISHWQLRRLIRVLPVNESVTNVLVNLTKKWSVRVSVGKECTRPIYVKRGVYQGDTMSPLLFVLITAFIIHEVKADKKVNAAAKGRQTVIAYMDDIKLHAPTKKGIEEATRCVKDCASEVGLAMNRRKCGVYCRDEPNDLDEEDDSAFLPQVRDGYKYLGIVQLELDTAINIESITNKTLEGVDEVLKSKITPVQKIQLINSTLVMAATYVLGNMFSAMKRSSVLKRCSEIDVEVRKLLVKHRLKTYTTSTASVHLDKNSGGLGLRSISDEVELQYVRKGVYLERHADLSETRSKYAMLERGGCKNPKTDCDAILKEYGVAKVVWSDEMSVSVYARGMVKKVREQQQQRWLGKWGEHMAYGRVLQHEKGNVSFPAYNSIYMEDWRISMLHAAAEDQVQGLGAIPTERRMCPKGCNKQLTAYHVAVSCPTPEYNTRHDSVVAKLLQAIVERTAPEDLKDKCQFTRATMVEDYCWSDRTVKIRAGVPIMANNLVKHNKPDILIILTNPDEVFVIEVAVSHLNNIRVQEKIKRTRYEVNSMADVNRENYERILRDTNIVSELRQIYRCPVELGVIVVGAFGEVLHTDELDKAAKMFQKLGVPPWRFKWLIDNACYSVAVWTAKILINRLATEH

SEQ ID NO: 31436 - protein, 898 aa, Idaea aversata
MTAFQFHHQTLVTIASLKHCIDRVVSSNCEQSWRDLFTFPYRILHVNKDEKVKMSLTQKIKNNCIQLPPSQDDPCSSSVCRHRPYNIFRKVESKVGEGDLRGAGQLLFSDDAVAPDSEETLQALRCKHPPLASTAQPCVDPDFDCVKPTISPDTVLSAIMSFKAGTSAGLDGLSPQHIKDLVCLSAGDIGRELLLSIVGLVDLMLSGRVIDSVLEVLYGANLCALKKKDGGIRPIAVGMTYRRLTSKIACGRVSSSLGAKFQPLQVGFGSRGGCEAAVHAARSFLEAGGSNILLKVDERNAFNSLDRGAMLREAKAHIPEIYPYLWQSYGQTSRLTYGKHALQSAVGCQQGDPLGPAIFSLGIHPFISALKSSFNLWYLDDGTLGGRPDVVLDDLKALMGSFSTVGLDLNFSKCELYIPSQFSDDDRRDVVSSFRDVAPDIQLVAEESLRLLGAPLLDGSVPNFVSEQIRKFRECSVRLREIGAHYALTIIRFCLFVPRFTYVLRCAHLWKFPGLLAEVDECIRDILSTVLNLPLRDKAWAQASLPVRLGGIGVRRVSSVALPAFLASAYGCLELFKQIVGPSLGLVEVARLLEARSEWDALCCTSPTCLSSQRSWDELLCERLQRELVDSCVNPSERARLLAVSQRESGLWLNAVPSPHTGTFLDDITLSLAIGLRVGVRTVQPHQCQCGRPVDELGHHGLSCQRSAGRIPRHAALNDVIRRALASANIPAILEPNGIVRSDGKRPDGLSLIPWRQGLSLVWDATCVDTLAPSHVPSTSGQAGAAAAQAECLKSRKYVDLEGSYMFVPVGVETLGAWGPSAHLFFRDLAGRLSVASGDRRAGGFFAQRVSLAIQRGNAASLLGTMPRGDALDGVFLFIIICNVCLSVFLFLIFICVI

SEQ ID NO: 31437 - protein, 972 aa, Idaea aversata
MSQPAQCSAPGGNDAGACSLGDSLICPHRCPHCPLPRCFKTLTGLKIHLAKVHNIKASPRGATAAVSQTQPLSSQLVDTDSLWVLLGGMRSEVPVVRRIPRGARASVAAALKHCIDRVKSSNCEQSWRDLFTFPYRILHVNKDEKVKMSLTQKIKNNCIQLPPSQDDPCSSSVCRHRPYNIFRKVESKVGEGDLRGAGQLLFSDDAVAPDSEETLQALRCKHPPLASTAQPCVDPDFDCVKPTISPDTVLSAIMSFKAGTSAGLDGISPQHIKDLVCLSAGDIGRELLLSIVGLVDLMLSGRVIDSVLEVLYGANLCALKKKDGGIRPIAVGMTYRRLTSKIACGRVSSSLGAKFQPLQVGFGSRGGCEAAVHAARSFLEAGGSNILLKVDVRNAFNSLDRGAMLREAKAHIPEIYPYLWQSYGQTSRLTYGKHALQSAVGCQQGDPLGPAIFSLGIHPFISALKSSFNLWYLDDGTLGGRPDVVLDDLKALMGSFSTVGLDLNFSKCELYIPSQFSDDDRRDVVSSFRDVAPDIQLVAEESLRLLGAPLLDGSVPNFVSEQIRKFRECSVRLREIGAHYALTIIRFCLFVPRFTYVLRCAHLWKFPGLLAEVDECIRDILSTVLNMPLRDKAWAQASLPVRLGGIGVRRVSSVALPAFLASAYGCLELFKQIVGPSLDLVEVARLLEARSEWDVLCCTSPTCLSSQRSWDELLCERLQRELVESCVNPSERARLLAVSQRESGLWLNAVPSPHTGTFLDDITLSLAIGLRVGVRTVQPHQCQCGRLVDELGHHGLSCQRSAGRIPRHAALNDVIRRALASANIPAILEPNGIVRSDGKRPDGLSLIPWRQGLSLVWDATCVDTLAPSHVPSTSGQAGAAAAQAECLKSRKYVDLEGSYMFVPVGVETLGAWGPSAHLFFRDLAGRLNVASGDRRAGGFFAQRVSLAIQRGNAASLLGTMPRGDALDGVFYL

SEQ ID NO: 31438 - protein, 972 aa, Idaea aversata
MSQPAQCSAPGGNDAGACSLGDSLICPHRCPHCPLPRCFKTLTGLKIHLAKVHNIKASPRGATAAVSQTQPLSSQPVDTDSLWVLLGGMRSEVPVVRRIPRGARASVAAALKHCIDRVVSSNCEQSWRDLFTFPYRILHVNKDEKVKMSLTQKIKNNCIQLPPSQDDPCSSSVCRHRPYNIFRKVESKVGEGDLRGAGQLLFSDDAVAPDSEETLQALRCKHPPLASTAQPCVDPDFDCVKPTISPDTVLSAIMSFKAGTSAGLDGISPQHIKDLVCLSAGDIGRELLLSIVGLVDLMLSGRVIDSVLEVLYGANLCALKKKDGGIRPIAVGMTYRRLTSKIACGRVSSSLGAKFQPLQVGFGSRGGCEAAVHAARSFLEAGGSNILLKVDVRNAFNSLDRGAMLREAKAHIPEIYPYLWQSYGQTSRLTYGKHALQSAVGCQQGDPLGPAIFSLGIHPFISALKSSFNLWYLDDGTLGGRPDVVLDDLKALMGSFSTVGLDLNFSKCELYIPSQFSDDDRRDVVSSFRDVAPDIQLVAEESLRLLGAPLLDGSVPNFVSEQIRKFRECSVRLREIGAHYALTIIRFCLFVPRFTYVLRCAHLWKFPGLLAEVDECIRDILSTVLNLPLRDKAWAQASLPVRLGGIGVRRVSSVALPAFLASAYGCLELFKQIVGPSLGLVEVARLLEARSEWDVLCCTSPTCLSSQRSWDELLCERLQRELVESCVNPSERARLLAVSQRESGLWLNAVPSPHTGTFLDDITLSLAIGLRVGVRTVQPHQCQCGRLVDELGHHGLSCQRGAGRIPRHAALNDVIRRALASANIPAILEPNGIVRSDGKRPDGLSLIPWRQGLSLVWDATCVDTLAPSHVPSTSGQAGAAAAQAECLKSRKYVDLEGSYMFVPVGVETLGAWGPSAHLFFRDLAGRLNVASGDRRAGGFFAQRVSLAIQRGNAASLLGTMPRGDALDGVFYL

SEQ ID NO: 31439 - protein, 969 aa, Idaea aversata
MSQPVQTSATAGDVPVPCSQGDSFKCPLCPLPRYFKTNTGLKIHLSKIHNVRSSPRRNIQPQAQVPPLAQPVEEPRDPLWVLLCTQKLGVPVVRRIPRGARASVASALKATIDRVVSLNCEQSWRDLFTFAYRVLHVNRDDRSKLSLTQKIKNNCRELSSSQNSCADPSSDRFKPFNVFKKVESKVSEGDVRGASQLLFSHDAMAPDDDSTLQALRDKHPPLSSTNHFPDAPSPGDVGPIITQDLVLSAIMSFKLGSSGGLDGLTPQHVRDLVCLSAGDVSRDLLLSLVALVDLMLSGKVFEGVLEVLYGANLCALKKKDGGIRPIAVGMTFRRLSSKVACRLVTPSLSARFQPLQVGFGSRSGCEAAVHAARTFLGVPGNKVLLKVDVRNAFNTLDRGAMLREVKEHIPLVFPYLWQCYGRASGLTYRRHALLSAVGCQQGDPLGPAIFSLGIHSAISALRSDFNLWYLDDGSIGGEPDIVLEDLKTLINSFSSLGLELNFSKCELYIHSSISELDSREIASRFTAVAPDIRLATDESLRLLGAPLLEGAIPNFMSEQIQNFRSCSERLQKIGAHYALTIVRFCLFVPRFTYVLRCTHLWKFRDLLREVDDCICGILSSVLNIPLKDGAWAQASLPVRFGGIGVRLVSSVALPAFLASAHGCADLFSRIVGPSLGSAEVACLSEAKCEWATVCPATPTVLSSQRLWDELLCEKLQRDLIDSSADFSERARLLASFQRESGLWLNAVPSPHIGTFMDDVSLSLAIGLRLGVVTVQPHVCHCGSPVDGLGHHGLSCRRSAGRIPRHAALNDVIRRALASANIPAVLEPNGIVRSDGKRPDGLTLIPWRQGMSLVWDATCVDTLAASHIPATSGRAGAAAANAESLKSRKYSELADRFMFVPIGVETLGSWGPEASVFFRDLGARLVEVSGDRRAGGFFAQRVSLAIQRGNVASLLGTMPRGDALEDVFYL

SEQ ID NO: 31440 - protein, 993 aa, Cherax destructor
MSQEVLGSQESPRQSQHLGTRPRGICQVCHRECALNPSTGNIRAHNGCLGSRRAPNGNSQQTLPADRADSYPDFTSTEDLKAAIKLTSTRTLTHIPKAARHQAASKFADLLKKVNDALANNGSWHNLLLFGNACLAVPPRRDKSLATSVIRAINAFPRDDNLVRLPSRTSNTRQANVNNRTPDASKIRAQISRKIEEGNTIGALRLITSEDTIAAKDIITAQALKDKHPPRAPTTNIGPLDIAAGAEHLTLRDADVYKAAMSFPQGSTGGFTGLRPQHLKQMLNPGLGEVSERLLSELTKFSNGCLAGSVPEAIRPLFFGASLCALRKKDGGIRPIAVGNTLRRLVAKAAVRMVSQDAASMLKPTQLGFGVQQGCEAAAHAARALIKLDFANAFNSVRRDAALQAVSRHFPSLYPFIESCYSVASKLLFGDHEIDSCEGVQQGDPLAPFLFCLVIKDVTKALSSELNIWFLDDGTLAGTTQSLLGDIRKIKDMGESLGLSLNPTKCEIVSTNPQMIQDIRAVLPGARAIDPANSTLLGAPLGPNAIDLVLEKKISDLRTMEGRMKDIDTHDAFYLLTRCLSIPKLTYFLRCSPAFSSPKLKEYDSLLKTMLESVLNLSLEDGQWLQASLPVRLGGLGVRKSSQIALPAFLSSSISSNELIKQILPDNLSDSAGIQDPCYTSAITEWETLAAPTPKPSAELAYKQSSWDGPIAEKILANMLRAVTSDRETARLLAVSAHHSGDFLQTVPISAMGTRLDPKTLRIAVALHLAAPIHTEYTCICSDAQADQYGLHGLNCSKTKGWHARHNEVNDIIKRTLATAGCPAERDPRSLAANNAHNPANRPDGITIYHWKNGKLLAWDYTCVSTLADTYIHHSVGRHGGAADHREEYKNGKYRDISQQYQFVPVGSETLGAWGKNATHFLKELGSRLIDTTRDPRAATFMFQRLSVAIQRGNACCILGSRPASEELEEIYNLLYIVPFYSCSCFPLMYSVC

SEQ ID NO: 31441 - protein, 724 aa, Cherax destructor
MSFLQGSAGGFTGLRPQHLKQMLNPGLGEVSERLLSELTKFSNGCLAGSVPQAIRPLFFGASLCALRKKDGGINPIAVGNTLRRLVAKAAVRRVSQDAASMLKPTQLGFGVQQGCEAAAHAARVYINNMSNEKALNKLDFANAFNSVRREAALQAVSRHFPSLYPFIESCYSVASKLLFGDHEIHSCEGVQQGDPLAPFLFCLAIKDVTEALSSELNIWFLDDGTLAGTTQSLLGDIRKIKDMVGSLSLSLNPTKCEIVSTNLQMIQDIRAVLPGARAIDAANSTLLGAPLGPNAIDLVLEKKISDLRTMEGRMKDIDTHDAFYLLTRCLSIPKLTYFLKCSPAFNSPKLEEYDSLIKTMLESVLNLSLEEGQWLQASLPVRFVGLGVRKSSQIALPAFLSSSIASNELIKQILPDNLSDSAGIQDPSYTSAITEWETLAAPTPKPSEELAYKQSSWDGPVAEKILANMLRAVTSDRETARLLAVSALHSGDFLQTVPISAMGTRLDPKTLRIAVALRLAAPIHTEYTCICSDAQADQYGLHGLNCSKTKGWHARHNEVNDIIKRTLATAGCPAEREPRSLAANNAHNPANRPDGITIYPWKNGKLLAWDYTCVSTLADTYIPHNVGRQGGAADHREEYKIGKYRDISQQYKFVPVGSETLGAWGKNATRFLKELGSRLIDTTRDPRAATSMFQRLSVAIQRGNACCILGLRPASEELEEIHNL

SEQ ID NO: 31442 - protein, 984 aa, Cherax destructor
MSQEVLGSQESPRQSQRLGTRPRGICQVCHRECALNPSTGNIRAHNGCLGSRRAPNGNSQQTLPADRADSHPDFTSKEDLKAAIKLTSTRTLTHIPKAARHQAASKFDDLLKKVNDAPANNGSWHNLLLFGNACLAVPPRRDKSLATSVIRAINAFPRDDNLVRLPSRASNTRQANVNNRTPDASKIRAQISRKIEEGNTIGALRLITSEDTIAPKDIITAQALKDKHPPRAPTTNIDPLDIGTGEEHLTLRDADVYKAAMSFPQGSAGGFTGLRPQHLKQMLNPGLGEVSERLLSELTKFSNGCLAGSVPEAIRPLFFGASLCALRKKDGGIRPIAVGNTLRRLVAKAAVRRGSQDAASMLKPTQLGFGVQQGCEAAAHPARAYINNMSNEKALIKLDFANAFNSVRRDAALQAVSRHFPSLYAFIESCYSVASKLLFGDNEIDSCEGVQQGDPLAPFLFCLVIKDVTEALSSELNIWFLDDGTLAGTTQSLLGDIRKIKDMVESLGLSLNPTKCEIVSTNPQMIQDIRAVLPGARAIDPANSTLLGAPLGPNAIDLVLEKKISDLRTVEGRMKNIDTHDAFYLLTRCLSIPKLTYFLRCSPAFSSPKLKEYDSLLKTILESVLNLSLEDGQWLQASLPVRLGGLGVRKSSQIALPAFLSSSIASNELIKQILPDNLSDSAGIQDPSYTSAITEWETLAAPTPKPSEELAYKQSSWDGPIAEKILANMLRAVTSDRETARLLAVSAHHSGDFLQTVPISAMGTRLDPKTLRIAVALRLAAPIHTEYTCICSDAQADQYGLHGLNCSKTKGWHARHNEVNDIIKRTLATAGCPAEREPRSLAANNAHNPANRPDGITIYPWKNGKLLAWDYTCVSTLADTYIHHSVGRQGGAADHREEYKIGKYRDISQQYQFVPVGSETLGAWGKNATRFLKELGSRLIDTTRDPRASAFMFQRLSVAIQRENACCILGSRPVSGELGEIHNL

SEQ ID NO: 31443 - protein, 724 aa, Cherax destructor
MSFPQGSAGGFTGLRPQHLKQMLNPGLGEVSERLLSELTKFSNVCLAGSVPQAIRPLFFGASLCALRKKDGGIRPIAVGNTLRRLVAKAAVRRVSQDAASMLKPTQLGFGVQQGCEAAAHAARVYINNMSNEKALIKLDFANAFNSVRRDAALQAVSRHFPSLYPFIESCYSVASKLLFGDHEIDSCEGVQQGDPLAPFLFCLAIKDVTEALSSELNIWFLDDGTLAGTAQSLLGDIRKIKDMVGSLGLSLNPTKCEIVSTNPHMIQDIRAVLPGARAIDPANSTLLGAPLGPNAIDLVLEKKISDLRTMEGRMKDIDTHDAFYLLTRCLSIPKLTYFLRCSPAFNSPKLEEYDSLLKTMLESVLNLSLDDGQWLQASLPVRLGGLGVRKSSQIALPAFLSSSIASNELIKQILPDNLSDSAGIQDPSYTIAITEWETLAAPTPKPSEELAYKQSSWDGPIAEKILANMLRAVTSDRETTRLLAVSAHHSGDFLQTVPISAMGTRLDPKTLRIAVALRLAAPIHTEYTCICSDAQADQYGLHGLNCSKTKGWHVRHKEVNDIIKRTLATAGCPAEREPRSLAANNAHNPANRPDGITIYPWKNGKLLAWDYTCVSTLADTYIHHSVGRQGGAADHREEYKIGKYRDISQQYKFVPVGSETLGAWGKNATRFLKELGSRLIDTTRDPRAATFMFQRLSVAIQRGNACCILGSRPASEELEEIHNL

SEQ ID NO: 31444 - protein, 724 aa, Cherax destructor
MSFPQGSAGGFTGLRPQHLKQMLNPGLGEVSERLLSELTKFSNGCLAGSVPQAIRPLFFGASLCALRKKDGGIRPIAVGNTLRRLVAKAAVRMVSQDAASMLKPTQLGFGVQQGCEAAAHATRVYINNMSNEKALIKLDFANAFNSVRRDAALQAVSRHFPSLYPFIESCYSVASKLLFGDHEIDSCEGVQQGDPLAPFLFCLAIKDATEALSSELNIWFLDDDTLAGTAQSLLGDIRKIKDMVGSLGLSLNPTKCEIVSTNPQMIQDIRAVLPGARDIDPANSTLLGSPLGPNAIDLVLEKKISDLRTMEGRMKDIDTHDAFYLLTRCLSIPKLTYFLRCSPAFNSPKLEEYDSLLKTMLESVLNLSLEDGQWLQASLPVRLGGLGARKSSQIALPAFLSSSIASNELIKQILPDNLSDSAGIQDPSYTSAITEWETLAAPTPKPSEELAYKQSSWDGPIVENILANMLRAVTSDRETARLLAVSAHHSGDFLQTVPISAMGTRLDPKTLRIAVALCLAAPIHTEYTCICSDAQADQYGLHGLNCSKTKGWHARHNEVNDIIKRTLATAGCPAEREPRSLAANNAHNPANRPDGITIYPWKNDKLLAWDYTCVSTLADTYIHHSVGRQGGAADHREEYKIGKYRDISQQYKFVPVGSETLGAWGKNATRFLKELGSRLIDTTRDPRATTFMFQRLSVAIQRENACCILGSRPASEELEEIHNL

SEQ ID NO: 31445 - protein, 996 aa, Cherax destructor
MHPCCPSPVTCYPLHEVLGSQESPRQSQRLGTRPRGICQVCHRECALNPSTGNIRAHNGCLGSRRAPNGNSQQALPADRADSHPDFTSTEDLKAAIKLTSTRTLTHIPKAARPQAASKFADLLKKVNDAPANNGSWHNLLLFGNACLAVPPRRDKSLATSVIRAINTFPRDDNLDRLPSRASNTRQANVNNRTPDASKIRAHISRKIEEGNTIGALRLITSEDTIAPKDIITAQALKDKHPPRAPSINIGPLDIPAGKEHLTLRDADVYKAAMSFPQGSAGGFTGLRPQHLKQMLNPGLGEVSERLLSELTKFSNGCLAGSVPQAIRPLFFGASLCALRKKDGGIRPIAVGNTLRRLVAKAAVRMVSQDAASMLKPTQLGYGVQQGCEAAAHAARVYINNMSNEKALIKLDFANAFNSVRRDAALQAVSRHFPSLYPFIESCYSVASKLLFRDHEIDSCEGVQQGNPLAPFLFCLAIKDVTEALSSELNIWFLDDGTLVGTAQSLLGDIRKIKDMVGSLGISLNPTKCEIVSTNPQMIQDIRAVLPGARAIDPANSTLLGAPLGPNAIDLVLEKKISDLRTMEGRMKDIDTHDAFYLLTRCLSIPKLTYFLRCSPAFNSPKLEEYDSLLKTMLESVLNLSIENGQWLQASLPVRLGGLGVRKSSQIALPAFLSSSIASNELIKQILPDNLSDSAGIQDPSYTSAITEWETLAAPTPKPSEELAYKQSSWDGLIAEKILANMLRAVTSDRETARLLAVSAHHSGDFLQTVPISAMGTRLDPKILRIAVALRLAAPIHTEYTCICSDAQADQYGLHGLNCSKTKGWHARHNEVNDIIKRTLATAGCPAEREPRSLAANNAHNPANRPDGITIYPWKNGKLLAWDYTCVSTLADTYIHHSVGRQGGAADHREEYKIGKYRDISQQYQFVPVGSETLGAWGKNATRFLKELGSRLIDTTRDPRAATFMFQRLSVAIQRGNACCILGSRPASGELEEIHNL

SEQ ID NO: 31446 - protein, 1093 aa, Cherax destructor
MSTPKYLNTFTSSILSPSNLISNLSSLNLFVILITLLFPIFTFNFLLLHTLPNSSTNLCNFSSESPKITVSSAKSNCDNSHFVFNSLSFNPTPLTTPSINILNNHGDITLLLGNSPFPPIYIYIYIYIYIYIYIYIYIYIYIYIYIYTGNIRAHNGCLGSRRAPNGNSQQTLPADRADSHPDFTSTEDLKAAIKLTSTRTLTHILKAARHQAASKFADLLKKVNDSPADNGSWHNLLLFGNACLAVPPRRDKSLTTSVIRAINAFPRDDNLVRIPSRASNTRQANVNNRTPDASKIRAHISRKIEGGITIGALRLITSDDTIAPKDIITAQALKDKHPPRAPSINIGPLDIPAGEEHLTLRDADVYKAAMSFPQGSAGGFTGLRPQHLKQMLNPGLGEVSERLLSELTKFSNGCLAGSVPQAIRPLFFGASLCALRKKDGGIRPIAVGNTLRRLVAKAAVRRVSQDAASMLKPTQLGFGVQQGCEAAAHAARVYINNMSNEKALIKLDFANAFNSVRREAALQAVSRHFPSLYPFIESCYSVASKLLFGDHEIDSCEGVQQGDPLAPFLFCLAIKDVTEALSSELNIWFLDDGTLAGTTQSLLGDIRKIKDMVGSLGLFLDPTKCEIISTNPQMIQDIRAVLPGARAIDPANSTLLGAPLGPNAIDLVLEKKISDLRTMEGRMKDIDTHDAFYLLTRCLSIPKLTYFLRCSPAFNSPKLEEYDSLLKTMLESVLNLSLEEGQWLQASLPVRHGRLGVRKSSQIALPAFLSSSIASNELIKQILPDNLSDSAGIQDPSYTSAITEWETLAVPTPKPSEELAYKQSSWDGPIAEKILANMLRAVKSERETARLLAVSSHHSGDFLQTVPISAMGTRLDPKTLRIAVALRLPALIHTEYTCICSDAQADQYGLHGLNCSKTKGWHARHTEVNDIIKITLATAGCPAEREPRSLAANNAHNPANRPDGITIYPWKNGKLLAWDYTCVSTLADTYIPHSVGRQGGAADHREEYKIGKYRDISQQYKFVPVGSETLGAWGKNATRFLKELGSRLIDTTRDPRAATFMFQRLSVAIQRGNACCILGSRPASEELEEIHNL

SEQ ID NO: 31447 - protein, 1102 aa, Cherax destructor
MDYAFQYIKDNAWIDTGDTPHMKLWMTNVGITHASLGENFRKDLILDEFLLIVQFYLIGTTKYIYIYIYIYIYIYIYIYIYIGKTGPTHTMSQEVLGSQESPRQSQRLGTRPRGICQVCHRECALNPSTGNIRAHNGCLGSRRAPNGNSQQTLPADRADSHPDFTSAEDLKAAIKLTSTRTLTHIPKAARHQAASKFADLLKKVNDAPANNGSWHNLLLFGNACLAVPPRRDKSLATSVIKAINAFPRDDNLVRIPSRASNTRQANVNNRTPDASKIRAHISRKIEEGNTIGALRLITSEDTIAPKDIITAQALKDKHPPRAPSINIGPLDIPAGEEHLTLRDADVYKAAMSFPQGSAGGFTGLRPQHLKQMLNPGLGEVSERLLSELTKFSNWCLAGSVPQAIRPLFFGASLCALRKKDGGIRPIAVGNTLRRLVAKAAVRRVSQDAASMLKPTQLGFGVQQGCEAAAHAARVYINNMSNEKALIKLDFANAFNSVRRDAALQAVSRHFPSLYPFIESCYSVASKLLFGDHEIDSCEGVQQGDPLAPFLFCLAIKDVTEALSSELNIWFLDDGTLAGTAQSLLGDIRKIKDMVGSQGLSLNPTKCEIVSTNPQMIQDIRAVLPGARASDPANSTLLGAPLGPNAIDLVLEKKISDLRTMEGRMKDIDTHDAFYLLTRCLSIPKLTYFLRCSPAFNSPKLEEYDSLLKTMLESVLNLSLDDGQWLQASLPVRLGGLGVRKSSQIALPAFLSSSIASNELIKQILPDNLSDSAGIQDPSYTIAITEWETLAAPTPKPSEELAYKQSSWDGPIAEKILQYAQGRNIRQGDCRLLAVSAHHSGDFLQTVPISAMGTRLDPKTLRIAVALRLAALFTRNIRVFAAMQADQYGLHGLNCSKTKGWHARHNEVNDIIKRTLATAGCPAEREPRSLAANNAHNPANRPDGITIYPWKNGKLLAWDYTCVSTLADTYIHHSVGRQGGAADHREEYKIGKYRDISQQYKFVPVGSETLGAWGKSATRFLKELGSRLIDTTRDPRAATFMFQRLSVAIQRETHAAYLAAVRLRRNWRRFIIFDILYHCIHVCVFYKCILSINKAFICMYVCI

SEQ ID NO: 31448 - protein, 723 aa, Cherax destructor
MSFPQGSAGGFTGLRPQHLKQMLNPGLGEVSERLLSELTKFSNGCLAGSVPQTIRPLFFGASLCALRKKDGGIRPIAVGNTLRRLVAKAAVRRVSQDAASMLKPTQLGFGVQQGCEAAAHAARVYINNMSNEKALIKLDFANAFNSVRRDAALQAVSRHFPSLYPFIESCYSVASKLLFGDHEIDSCEGVQQGDPLAPFLFCLAIKDVTEALSSELNIWFLDDGTLAGTTQSLLGDIRKIKDMVGSLGLSLNPTKCEIVSTNPQMIQDIRAVLPGARAIDPANSTLLGAPLGPMPSIWSWKKISDLRTMEGRMKDIDTHDAFYLLTRCLSIPKLTYFLRCSPAFNSPKLEEYDSLLKTMLESVLNLSLEDGQWLQASLPVRLGGLGVRKSSQIALPAFLSSSIASNELIKQILPYNLSDSAGIQDPSYTSAITEWETLAAPTPKPSEEQAYKQSSWDSPIVEKILANMLRAVTSDRETARLLAVSAPHSGDFLQTVPISAMGTRLDPKTLRIAVALRLAAPIHTEYTCICGDAQADQYGLHGLNCSKTKGWHARHNEVNDIIKRTLATAGCPAEREPRSLAANNAHNPANRPDGITIYPWKNGKLLAWDYTCVSTLADTYIHHSVGRQGGAADHREEYKIGKYRDISQQYKFVPVGSETLGAWGKNATRFLKELGSRLIDTTRDPRAATFMFQRLSVAIQRGNACCILGSRPASEELEEIHNL

SEQ ID NO: 31449 - protein, 723 aa, Cherax destructor
MSFPQGSAGGFTGLRPQHLKQMLNPGLGEVSERLLSELTKFSNGCLAGSVPQTIRPLFFGASLCALRKKDGGIRPIAVGNTLRRLVAKAAVRRVSQDAASMLKPTQLGFGVQQGCEAAAHAARVYINNMSNEKALIKLDFANAFNSVRRDAALQAVSRHFPSLYPFIESCYSVASKLLFGDHEIDSCEGVQQGDPLAPFLFCLAIKDVTEALSSELNIWFLDDGTLAGTTQSLLGDIRKIKDMVGSLGLSLNPTKCEIVSTNPQMIQDIRAVLPGARAIDPANSTLLGAPLGPMPSIWSWKKISDLRTMEGRMKDIDTHDAFYLLTRCLSIPKLTYFLRCSPAFNSPKLEEYDSLLKTMLESVLNLSLEDGQWLQASLPVRLGGLGVRKSSQIALPAFLSSSIASNELIKQILPYNLSDSAGIQDPSYTSAITEWETLAAPTPKPSEEQAYKQSSWDSPIVEKILANMLRAVTSDRETARILAVSAPHSGDFLQTVPISAMGTRLDPKTLRIAVALRLAAPIHTEYTCICGDAQADQYGLHGLNCSKTKGWHARHNEVNDIIKRTLATAGCPAEREPRSLAANNAHNPANRPDGITIYPWKNGKLLAWDYTCVSTLADTYIHHSVGRQGGAADHREEYKIGKYRDISQQYKFVPVGSETLGAWGKNATRFLKELGSRLIDTTRDPRAATFMFQRLSVAIQRGNACCILGSRPASEELEEIHNL

SEQ ID NO: 31450 - protein, 1043 aa, Hormaphis cornu
MKRNKKPRMDLDNGRPTGRAEPDTQPINPASTSGTNQENQYPCRENSCSRIFSTVIGRGVHERSAHPEFYDQLQLQQNPSRKDRWTEEEMHLMARKEALLTKEKVRFMNQELMKYLEHRSLEAIKGQRRKTAYKDLVKKYIKEGVSHESDKDSEDDEDDDRESGGETEIDDTRTNKNNSNDLRDFLLNSGKPSTNKYDAFWLHRICLMVRDATTERVTVELSAYLKKNFPAEKETMKVRKYANNKNANSRKNKKIMRREEYAKTQDLWRKDTGRCINRILDDAMENEGGLSRELMEPFWREVMEKESKGQPILPKRSVTHTHLWDPVLDEEIRRALPSANTAAGPDGVLPATLKKVPSEILSRILTIFMWCRALPYHLYSSRTVLIPKKRGAMSPSLFRPITISSVFVRLFHKVLANRMSIVKFDERQRAFRPSEGCAENIALLDMTLTKRRSKLQKLFLAVLDLAKAFDSVSLQALEATLKSKGIPDNMLGYIMNTYRNGSTRLQHNNWISDPIFPRRGVKQGDPLSPVFFNLILDGLLSSLPKELGVDIAGRKVSVLAFADDMVLVAATEKGLQVMLEHVTSFLDSCGLQLNVDKCQTIAWKSIPKQKKTVVDSTCRFKIKNRLIPACDRSSMWRYLGIQFSPDGTSKVDVLDQLTTHLIRITKAPLKPQQRLHALRTCIIPRVVYGMVFGKVKISLLKRLDIKIRSFVRKWVNLPKDCPNAYIHSSVADGGVGIQSLRWKIPLERLRCLQRLQKSAYMNDAAAQDYLLSEINQAKNKLKNNTNNVMATNTDLNAFWSQLLHAAIDGVGLRESSKTKGQHNWVRDPTRFLSGKDFVSSMKLRINALPTKSRTTRGRGEDRSCRAGCQVPETCNHILQVCHRTHGMRIKRHNMVAHYLKRNLIRNGYNVIEEPHFRTEDGLRKPDLVATLGSTSLIIDAQVLNDQLDLNAANKKKINYYATNQSLITAIKEEYDSKTVLTIAATLNWRGIWSGTSAAEMLSRGVVKKSDLKILSSRVLIGGVAAWNIFNKLTSTKKNRVGIG

SEQ ID NO: 31451 - protein, 1085 aa, Corapipo altera
MEKERSFSNVINVVCKVTIIAPLSPWCKGPKEMVTPGEWICEECERSFQSKIGLGQHKRLSHPEVRNQERIAATRPKVRTARESARKCWSKEEEELLESLLKRYEGERYINKLIAEHIPSKTMKQISDKRRYMIPVQKERKDQEAHVQVEKRKELVTSIETSTQDQLRAHYITKIEKGIGSRKIKNYPRAFQKIVEGTTDVHAIVNDTTKEWYGHLEARCRIDKTSNKNLRRGQNQDRQSKRKATKWMKKRAIKRGQYLRFQKLFYKDRGKLAQIILDNIESVKCEIPLPEVCSVFKSRWETTDGFKGLGKFRSEGTVDNNAFKAMITEKEIIKNINEINKKAAPGPDGITIKDLTKMDPNYSQTTEIFNLWLTSGKIPDMIRGCRTILLPKSTKPDRLNDINNWRPVTIGSVILRLFSRILTARLAKACPINPRQRGFIKSPGCSENLKLLQLLIKNAKRERKELGVVFVDIAKAFDTVSHEHILTGLKQKRVDAHIIDLIANMYENSYTQIGTKNEQSDPIQIKVGVKQGDPMSPLLFNLAMDPLLCELEQYGKGFHHRNNSITAMAFADDLVLLSGSWEGMKENIEILEAFCDLTGLKTQGEKCHGFFIKPTRDAYTINDCPPWTIGGTPLNMVCPGSSEKYLDLQIDPWIQIAKPDVTSRIESWLDRITQAALKTFQRVDILKTYAIPRVIYLADHAEIKAGFLEALDLKIRATVKKWLHLPANTCDAILYSGIKDGGLGITKLQALIPSVQARRLHRLAQCSDNTLRAVLQEDNITQTCEKLWTTAGGDKDKIPNIWTTKPMVEILTLGEEEASEWEVSTPRNIYPRPCNWKKKEFQKWTQLQSQGIGISNFEGDTISNSWIKNYKGIPHRKLLTALQLRANVYPTREYLARGQKEAYIRSCRHCQAGNESCAPIIGQCPVVKDARIKRHNYICGMLVKEAKKKDWVVYQEPNIRDRDGELFKPDLIFVKDKQALVVDVTVRYEADDTTLEKAEKEKIKKYQHLEKEVQNLTNTDKVTFMGFPLGTRGKWYTKNFDLLQTLELSASKRERTARALASRALLTSVDIMHMFASKSSHSSVS

SEQ ID NO: 31452 - protein, 1250 aa, Mionectes macconnelli
MGLLMRLMHVSTATQTEYYDWKPVANIVNETIVPVRLPSEVDIELQDLEFSNSNLLEEWGTITFIDQREKLASYPEVYESLSSDSVKDNNVILSDGVVDGDRDGEDSLLLATEFVVDPQIDSSPEETPLVRLPDKVPSCPCCEIKIMGIEKLVDHLLRSHGKRKIIFQCIGCGLQNENYRSIVCHYPRCKGGNTVASSGEFVCEECGRSFRSKKGLGQHKRHAHPEVRNQERIEAARPKVRPTRESSRKCWTKEEEDLLERLAKQYEGERYINKLIAEHIPTKTLKQISDKRRHMNPARKERINTEVCGMVQEEERKSQPPLNETSCPDHLKAYYMDVIGKGIKSRKINIYSRAFQKLVKGTMDCHTLVNNTTENWYGHLKARCQVEKPIKEKSGKGKTQDTRSKRKAAKWMKKRAIKKGMYLRTQKLFYKDRGKLARMILDEIESVKCGIPLPEIFSVFKSRWETTGKFKNLGNFLSKGMADNTAFKDMITEKEVEKNIRETNRNAAPGPDGITMKDLIKMDPKYSEITEIFNLWLTSGEVPDSMRGCRTILIPKSTKPDKLNNINNWRPITIGSVVLRLFSRILTARLAKACPINSRQRGFIKSPGCSENLKLLELIVKNAKKQHKELGVVFVDIAKAFDTVSHQHIIMGLKQKGVDVHIINLVANMYDNIYTEIGIGNVKSDPIQIKVGVKQGDPMSPFLFNLAMDPLLCNLEQYGKGYQYGTKSITAMAFADDLVLLSGSWDGMRENIAILEDFCNLTGLTTQGEKCHGFFIKPTRDSYTINDCPPWTVGDTALNMVYPGSSERYLGLQIDPWIQITKPDLMLKVDTWLDRIGGSYLKPLQKIDILKTYMIPRMIYLADHTDMKSGFLEALDLKLRARVKKWLHLPADTCDAILYSSTKDGGLGIIKLQALIPSVQARRLHRLAQCSDDTLREALQQENIMQIYEKLWVTAGGDKDRLPDIWAPKPPVQATFLGEEDTSEWEMTTPKNIYPRPCNWKKIEFQKWTKLQSQGFGIVNFEGDTISNNWIRNYRGIPHRKLLTALQLRANVYPTREYLARGKTDGRVRSCRHCKAENESSAHIIGQCPAVKDARIKHHNYICDMLIKEAKKKDWVIYQEPSIRDSDGELFKPDLIFVKEDRALVVDVTVRYESESNTLEKAAKEKVKKYQHLKKEIQDLTNTNKVTFMGFPLGARGKWYNKNFDLLQTLGLSTSRQGRVARAVSSRALFTSVDIIHIFVSKANCAAIRK

SEQ ID NO: 31453 - protein, 1245 aa, Corapipo altera
MGRPLKLLYVSTATQTDSKDWKPVETEINKTSTPIITSQEIDLQQLEFASSKEIENWQATQSLKQGDNLMTFPEPYESLTPDSVRGNEINATDNDNESNRGEDDSFILATESILDSQKDQTPEEIPLVKLPDKNPSCPCCKTKISGVQRLVEHLLRLHGKRKIIFQCNKCGLQSDNYRSTVCHYPLCKGPKEMVTPGEWICEECERSFQSKIGLGQHKRLSHPEVRNQERIAATRPKVRTARASARKCWSKEEEELLESLLKRYEGERYINKLIAEHIPSKTMKQISDKRRYMIPVQKERKDQEAHVQVERRKELVTSVETSTQDQLRAHYVTKIEKGIRSRKIKNYPRAFQKIVEGTTDVHAIINDITKEWYGHLEARCQMDKISNKKPRRGQNQDTQSKRKATKWMKKRAIKRGQYLRFQKLFYKDRGKLARIILDNIESVKCEIPLPEVYSVFKSRWESTGGFKGLGKFRSKGMADNSAFKAMITEKEIIKNINEINKKAAPGPDGITIKDLTKMDPNYSQTTEIFNLWLTSGKIPDMIRGCRTILLPKSTKPDRLKDINNWRPITIGSVILRLFSRILTARLAKACPINPRQRGFIKSPGCSENLKLLQLLIKNAKRERKELGVVFVDIAKAFDTVSHEHIITGLKQKGVDAHIIDLITNMYENSYTQIGTKNEQSDPIQIKVGVKQGDPMSPLLFNLAMDPLLCELEQYGKGFHHRDNSITAMAFADDLVLLSGSWEGMKENIKILETFCDLTGLKTQGEKCHGFFIKPTRDAYTINDCPPWTIGNTPLNMVCPGSSEKYLGLQIDPWIQIAKPDVTSRIESWLDRITQAPLKPFQRVDILKTYAIPRVIYLADHAEIKAGFLEALDLKIRATVKKWLHLPANTCDAILYSSIKDGGLGITKLQALIPSVQARRLHRLAQCSDNTLRTVLQEENITKTYEKLWITAGGDKDKIPNIWTTKPMVEISTLGEEETSEWEVSTPRNIYPRPCNWKKKEFQKWTQLQSQGIGISNFEGDTISNSWIKNYKGIPHRKLLTALQLRANVYPTREYLARGQKEAYIRSCRHCQAGNESCAHIIGQCPVVKDARIKRHNYICGMLVKEAKKKDWVVYQEPNIRDRDGELFKPDLIFVKDKQALVVDVTVRYEADDTTLEKAEKEKVKKYQHLEKEVQNLTNTDKVTFMGFPLGARGKWYTKNFDLLQTLGLSASKWERTARALASRALLTSVDIIHMFASKSSHSSVS

SEQ ID NO: 31454 - protein, 1045 aa, Pipra filicauda
MVTPGKWICEECERSFQSKIGLGQHKRLSHPEVRNQERIAATRPKAKTARKSARKCWSKEEEELLETLLKRYEGERYINKLIAEHIPSKTMKQISDKRRYMIPVQKEREDQKVYVQVENRKEQPANIDPSIPDRLRAHYVAKIEKGIRTRKINNYPRAFQKVVEGTADIHALINDITEEWYGHLEAEARCRAEEASNKKPKRGQNQDTQSKRKATKWMKKRAIKRGQYLRFQKLFYKDRGKLARIILDNIESVKCEIPLPEIHSVFKSRWETTGGFKGLGKFRSEGMADNNAFKAMITEKEITKNINEINKKAAPGPDGITIKDLTKMDPKYSETAEIFNLWLTSGKIPDMIRGCRTILLPKSTKPDRLKDINNWRPITIGSVLLRLFSRILTARLEKACPINPRQRGFIRSPGCSENLKLLQLLIKNAKREHKELGVVFVDIAKAFDTVSHEHIIAGLKQKGVDAHIIDLIKNMYENSYTQIGTKNEQSDPIQIKVGVKQGDPMSPLLFNLAMDPLLCELEQYGKGFHHRNNSITAMAFADDLVLLSGSWEGMKKNIEILESFCDLTGLKTQGEKCHGFFIKPTREAYTINDCPPWTIGGTPLNMVCPGSSEKYLGLQIDPWVQIAKPDLTSRIETWLDRISEAPLKPLQRVDILRTYAIPRVIYLADHTEIKAGFLETLDLKIRTTVKKWLHLPANTCDAIIYSSIKDGGLGITKLQALIPSVQARRLHRLAQCSDNTLKAVLQEENIMQTYEKLWTIAGGDKDKIPNIWTVKPMVVTSTLDDEKASEWEVSTPRNIYPRPCNWKKMEFQKWTQLQSQGIGVTNFEGDTISNNWLKNYRGIPHRKLLTALQLRANVYPTREYLARGQKEGYNRSCRHCQAGNESCAHIIGQCPVVKDARIKRHNYICGMLSEEAKKKDWVVYQEPNIRDREGELFKPDLISVKDKEALVVDVTVRYEADDTTLEKAEKEKVKKYQHLEKEVQDLTNTDKVTFMGFPLGARGKWYNKNFDLLQTLGLSASKRERTARALESRALFTSVDIVHVC

SEQ ID NO: 31455 - protein, 1245 aa, Pipra filicauda
MGWLLRLMWVSTGTQTDSRDWKPVVPKLNEVSSSLVTTSDEIELQHLEFASSKEIGNWQVTQILSQEEKLALFPDVYESSTSDSVRDNENNISDNNNEINGDEDDSFMLATEPALDSQKNRSPGKIPLVRLPDKNPSCPCCKTKIAGVERLIDHLLRSHGIRKTVFQCIKCDLQSDNYRSIVCHYPKCKGAIDMGPSGDWICEVCGRSFQTNRGLGQHKRLSHPEVRNQERIAATRPKERTARESSRKCWSKEEEELLEKLVKQYEGEKYINKLIAEHIPSKTIKQISDKRRHMFPVQKEREDRDGYVQVDKRKRHLEIETPSPDQLRVHYLAMITKGLKSRKMNNYSRVFQKIVEGKPEVHAIINDITIEWYGHLEARCRRRETSDVKMERGQIQGPQSKRKAANWMKKRAIKKGQYLRFQKLFYKDRGKLARIILDDIESVKCEIPLPEVHSVFKTRWETTGRFKNLGNFRSIGMADNNVFKAMITEKEIIKNINEMNKNTAPGPDGITVRELIKMDPKFTQITEMFNLWLTSGRIPDIIRECRTVLLPKSTKPDRLKDINNWRPITIGSVILRLFSRILTARLIKACPINPRQRGFIKSPGCSENLKLLQLLMKNAKREHNELGVVFVDIAKAFDTINHQHIITGLKQKGVDAHIINLIANMYENIYTRIGINNKQLDPIQINVGVKQGDPMSPLLFNLAMDPLLCELEQYGEGFKFRNKSITAMAFADDLVLLSGSWEGMKRNIEILETFCDLTGLKTQGEKCHGFLIKPTREAYTINDCPPWTIDGTPINMVNPGSSEKYLGVQIDPWIQIAKSDLSSRIETWLCRVSEAPLKPFQKVDMLKTYVIPRIIYLADHTEIKSGSLEALDLKIRMTVKKWLHLPASTCDAILYSSIKDGGLGIIKLQALIPSVQARRLHRLAQGSDDILRAVLVEENITQMYEKLWISAGGDKEKVPNIWAPKPTVQTATLGEEEISEGENNILKNNYPRPCNWKKKEFQKWTQLQSQGIGITNFEGDTISNNWIKNYRGIPHRKLLTALQLRANVYPTREYLARGKKDGYIRSCRHCQAENESCAHIIGQCPIVKDARIKRHNYICGMLAEEAKMKEWMVYQEPNIRDTDGELFKPDLIFVKDKKALVVDVTIRYEADDTTLDKAAKEKVRKYRHLEKEIKELTNTEKVTFIGFPLGARGKWYNKNFDLLQTLGLSASKRERTARALASRALFTSVDIVHIFASKSSTQLCK

SEQ ID NO: 31456 - protein, 771 aa, Dermanyssus gallinae
MAPQDANTHRILSDKHPNMPETAAYPAPPRGVPSADQINITPSEVRAAIQTFPNSSSGGPDGLKPRHLKDLIGKGDQICPLLFALTDFCNLVVNGRLPGFALSNFYGANLIALKKKDGGLRPIAVGNTLRRLACKVLIRKYMAPIIDRIAPVQLGCGVKGGCEAAVHAASAFVNTNSASNKVLIKLDFKNAFNSLRRDVILEAVKSNFPEMYPAVYQMYRSPSNLFWGEEIVLSRCGVQQGDPCGPALFCLAICQLLSALESEFKPWFLDDGTIGGTLDSALRDVEKIIEFGVTSGLQLNASKCELYVLSSDCAFRDECLRRAQGLLPDIKLCTEENIELLGAPLTTASAKLALNRKCELMDLWCSRLESLDAHPALFLMRTSLSTPRLIYILRCIDASAQKNILQQFDDKLRQCVNRVLNLNLDGANWDQATLPTTAGGLGIRRATDLAQTAFLGSITTLQELIISSSPFYITSPSNVKSFLERLMESKKEEFAAYHRVALDDTRQRALDAVVVEAIQKKLLDNTADALGKARLLAAFNDTSAKWLQAIPSPQLGTMLDNTTLRIVAGLRLGEAVCAPHSCSLCNTPVSPTGEHGLSCPRSCGRHSRHAALNEVISRALQSANVPCRKEPVGLAADSALRPDGMTLVPWSSGKALVWDATVWDTLAPSYRSRASRSAGAVANLAEQRKSLKYRELEASFIVQPVAIETLGVIGESTVKFLKEIGKRAASEKDEKRAGEFLLQRISIEVQRGNAAAVLGSLPSGSGLPGLL

SEQ ID NO: 31457 - protein, 968 aa, Dermanyssus gallinae
MHSRHRRLRRTLATEQVSIRGRLLLILMTNRQLDIRQWTTPLTHSNTETPTTTSSTRLPAPISPSTALTRTAQRLSAVRQNLKMLSIVPRGVRPIVAVELTNTIKSICSANDLDSWSRLAHFATTVLTIPRQKAKGKSLCSLIRDNLSRFRSRAPLDAAINANHVAAPKTNTNDDRQRARVAQAKLAQGDVSAAARILISTDSMAPQDANTHRILSDKHPNMPETAAYPAPPRGVPSADQINITPSEVRAAIQTFPNSSSGGPDGLKPRHLKDLIGKGDQICPLLFALTDFCNLVVNGRLPGFALSNFYGANLIALKKKDGGLRPIAVGNTLRRLACKVLIRKYMAPIIDRIAPVQLGCGVKGGCEAAVHAASAFVNTNSTSNKVLIKLDFKNAFNSLRRDVILEAVKSNFPEMYPAVYQMYRSPSNLFWGEEIVLSRCGVQQGDPCGPALFCLAICQLLSALESEFKPWFLDDGTIGGTLDSALSDVEKIIVFGVTSGLQLNASKCELYVLSSDCAFRDECLRRAQGLLPDIKLCTEENIELLGAPLTTASAILALNRKCELMDLWCSRLESLDAHPALFLMRTSLSTPRLIYILRCIDASAQKNILQQFDDKLRQCVNRVLNLDLDGANWEQATLPTTAGGLGIRRATDLAQTAFLGSITTLQELIISISPSNVKSFLERLMESKKEEFAAYHRVALDDTRQRALDAVVVEAIQKKLLDNTADALGKARLLAAFNDTSAKWLQAIPSPQLGTMLDNTTLRIVAGLRLGEAVCAPHSCSLCNTPVSPTGEHGLSCPRSCGRHSRHAALNEVISRALQSANVPCRKEPVGLAADSALRPDGMTLVPWSSGKALVWDATVWDTLAPSYRSRASRSAGAVANLAEQRKSLKYRELEASFIVQPVAIETLGVIGESTVKFLKEIGKRAASEKDEKRAGEFLLQRISIEVQRGNAAAVLGSLPSGSGLPGLL

SEQ ID NO: 31458 - protein, 968 aa, Dermanyssus gallinae
MHSRHRRLRRTLATEQVSIRGRLLLILMTNRQLDIRQWTTPLTHSNTETPTTTSSTRLPAPISPSTALTRTAQRLSAVRQNLKMLSIVPRGVRPIVAAELTNTIKSICSANDLDSWSRLAHFATTVLTIPRQKAKGKSLCSLIRDNLSRFRSRAPLDAAINANHVAAPKTNTNYDRQRARVAQAKLAQGDVSAAARILISTDSMAPQDANTHRILSDKHPNMPETAAYPAPPRGVPSADQINITPSEVRAAIQTFPSSSSGGPDGLKPRHLKDLIGKGDQICPLLFALTDFCNLVVNGRLPGFALSNFYGANLIALKKKDGGLRPIAVGNTLRRLACKVLIRKYMAPIIDRIAPVQLGCGVKGGCEAAVHAASAFVNTNSASNKVLIKLDFKNAFNSLRRDVILEAVKSNFPEMYPAVYQMYRSPSNLFWGEEIVLSRCGVQQGDPCGPALFCLAICQLLSALESEFKPWFLDDGTIGGTLDSALSDVEKIIEFGVTSGLQLNASKCELYVLSSDCAFRDECLRRAQGLLPDIKLCTEENIELLGAPLTTASAILALNRKCELMDLWCSRLESLDAHPALFLMRTSLSTPRLIYILRCIDASAQKNILQQFDDKLRQCVNRVLNLDLDGANWDQATLPTTAGGLGIRRATDLAQTAFLGSITTLQELIISISPSNVKSFLERLMESKKEEFAAYHRVALDDTRQRALDAVVVEAIQKKLLDNTADALGKARLLAAFNDTSAKWLQAIPSPQLGTMLDNTTLRIVAGLRLGEAVCAPHSCSLCNTPVSPTGEHGLSCPRSCGRHSRHAALNEVISRALQSANVPCRKEPVGLAADSALRPDGMTLVPWSSGKALVWDATVWDTLAPSYRSRASRSAGAVANLAEQRKSLKYRELEASFIVQPVAIETLGVIGESTVKFLKEIGKRAASEKDEKRAGEFLLQRISIEVQRGNAAAVLGSLPSGSGLPGLL

SEQ ID NO: 31459 - protein, 957 aa, Dermanyssus gallinae
MHSRHRRLRRTLATEQVSIRGRLLLILMTNRQLDIRQWTTPLTHSNTETPTTTSSTRLPAPISPSTALTRTAQRLSAVRQNLKMLSIVPRGVRPIVAVELTNTIKSICSANDLDSWSRLAHFATTVLTIPRQKAKGKDFRSRAPLDAAINANHVAAPKTNTNDDRQRARVAQAKLAQGDVSAAARILISTDSMAPQDANTHRILSDKHPNMPETAAYPAPPRGVPSADQINITPSEVRAAIQTFPNSSSGGPDGLKPRHLKDLIGKGDQICPLLFALTDFCNLVVNGRLPGFALSNFYGANLIALKKKDGGLRPIAVGNTLRRLACKVLIRKYMAPIIDRIAPVQLGCGVKGGCEAAVHAASAFVNTNSTSNKVLIKLDFKNAFNSLRRDVILEAVKSNFPEMYPAVYQMYRSPSNLFWGEEIVLSRCGVQQGDPCGPALFCLAICQLLSALESEFKPWFLDDGTIGGTLDSALSDVEKIIEFGVTSGLQLNASKCELYVLSSDCAFRDECLRRAQGLLPDIKLCTEENIELLGAPLTTASAILALNRKCELMDLWCSRLESLDAHPALFLMRTSLSTPRLIYILRCIDASAQKNILQQFDDKLRQCVNRVLNLDLDGANWEQATLPTTAGGLGIRRATDLAQTAFLGSITTLQELIISISPSNVKSFLERLMESKKEEFAAYHRVALDDTRQRALDAVVVEAIQKKLLDNTADALGKARLLAAFNDTSAKWLQAIPSPQLGTMLDNTTLRIVAGLRLGEAVCAPHSCSLCNTPVSPTGEHGLSCPRSCGRHSRHAALNEVISRALQSANVPCRKEPVGLAADSALRPDGMTLVPWSSGKALVWDATVWDTLAPSYRSRASRSAGAVANLAEQRKSLKYRELEASFIVQPVAIETLGVIGESTVKFLKEIGKRAASEKDEKRAGEFLLQRISIEVQRGNAAAVLGSLPLGSGLPGLL

SEQ ID NO: 31460 - protein, 968 aa, Dermanyssus gallinae
MHSRHRRLRRTLATEQVSIRGRLLLILMTNRQLDIRQWTTPLTHSNTETPTTTSSTRLPAPISPSTALTRTAQRLSAVRQNLKMLSIVPRGVRPIVAVELTNTIKSICSANDLDSWSRLAHFATTVLTIPRQKAKGKSLCSLIRDNLSRFRSRAPLDAAINANHVAAPKTNTNDDRQRARVAQAKLAQGDVSAAARILISTDSMAPQDANTHRILSDKHPNMPETAAYPAPPRGVPSADQINITPSEVRAAIQTFPNSSSGGPDGLKPRHLKDLIGKGDQICPLLFALTDFCNLVVNGRLPGFALSNFYGANLIALKKKDGGLRPIAVGNTLRRLACKVLIRKYMAPIIDRIAPVQLGCGVKGGCEAAVHAASAFVNTNSTSNKVMIKLDFKNAFNSLRRDVILEAVKSNFPEMYPAVYQMYRSPSNLFWGEEIVLSRCGVQQGDPCGPALFCLAICQLLSALESEFKPWFLDDGTIGGTLDSALSDVEKIIEFGVTSGLQLNASKCELYVLSSDCAFRDECLRRAQGLLPDIKLCTEENIELLGAPLTTASAILALNRKCELLDLWCSRLESLDAHPALFLMRTSLSTPRLIYILRCIDASAQKNILQQFDDKLRQCVNRVLNLDLDGANWEQATLPTTAGGLGIRRATDLAQTAFLGSITTLQELIISISPSNVKSFLERLMESKKEEFAAYHRVALDDTRQRALDAVVVEAIQKKLLDNTADALGKARLLAAFNDTSAKWLQAIPSPQLGTMLDNTTLRIVAGLRLGEAVCAPHSCSLCNTPVSPTGEHGLSCPRSCGRHSRHAALNEVISRALQSANVPCRKEPVGLAADSALRPDGMTLVPWSSGKALVWDATVWDTLAPSYRSRASRSAGAVANLAEQRKSLKYRELEASFIVQPVAIETLGVIGESTVKFLKEIGKRAASEKDEKRAGEFLLQRISIEVQRGNAAAVLGSLPSGSGLPGLL

SEQ ID NO: 31461 - protein, 968 aa, Dermanyssus gallinae
MHSRHRRLRRTLATEQVSIRGRLLLILMTNRQLDIRQWTTPLTHSNTETPTTTSSTRLPAPISPSTALTRTVQRLSAVRQNLKMLSIVPRGVRPIVAAELTNTIKSICSANDLDSWSRLAHFATTVLTIPRQKAKGKSLCSLIRDNLSRFRSRAPLDAAINANHVAAPKTNTNDDRQRARVAQAKLAQGDVSAAARILISTDSMAPQDANTHRILSDKHPNMPETAAYPAPPRGVPSADQINITPSEVRAAIQTFPNSSSGGPDGLKPRHLKDLIGKGDQICPLLFALTDFCNLVVNGRLPGFALSNFYGANLIALKKKDGGLRPIAVGNTLRRLACKVLTRKYMAPIIDRIAPVQLGCGVKGGCKAAVHAASALVNTNSASNKVLIKLDFKNAFNSLRRDVILEAVKSNFPEMYPAVYQMYRSPSNLFWGEEIVLSRCGVQQGDPCGPALFCLAICQLLSALESEFKPWFLDDGTIGGTLDSALSDVEKIIEFGVTSGLQLNASKCELYVLSSDCAFRDECLRRAQGLLPDIKLCTEENIELLGAPLTTASAKLALDRKCELMDLWCFRLESLDAHPALFLMRTSLSTPRLIYILRCIDASAQKNILQQFDDKLKQCVNRMLNLNLDGANWDQATLPTTAGGLGIRRAADLAQTAFLGSITTLQELIISISPSNVKSFLERLMESKKEEFAAYHRVALDDTRQRALDAVVVEAIQKKLLDNTADALGKARLLAAFNDTSAKWLQAIPSPQLGTMLDNTTLRIVAGLRLGEAVCAPHSCSLCNTPVSPTGEHGLSCPRSCGRHSRHAALNEVISRALQSANVPCRKEPVGLAADSALRPDGMTLVPWSSGKALVWDATVWDTLAPSYRSRASRSAGAVANLAEQRKSLKYRELEASFIVQPVAIETLGVIGESTVKFLKEIGKRAASEKDEKRAGEFLLQRISIEVQRGNAAAVLGSLPSGSGLPGLL

SEQ ID NO: 31462 - protein, 968 aa, Dermanyssus gallinae
MHSRHRRLRRTLATTQVSIRGRLLLILMTSRQLDIRQWTTPLTHSNTETPTTTSSTRLPAPISPSTALTRTVQRLSAVRQNLKMLSIVPRGVRPIVAAELTITIKSICSANDLDSWSRLAHFATTVLTIPRQKAKGKSLCSLIRDNLSRFRSRAPLDATINANHVAAPKTNTNDDRQRARVAQAKLAQGDVSAAARILISTDSMAPQDANTHRILSDKHPNMPETAAYPAPPRGVPSADQINITPSEVRAAIQTFPNSSSGGPDGLKPRHLKDLIGKGDQICPLLFALTDFCNLVMNGRLPGFALSNFYGANLIALKKKDGGLRPIAVGNTLRRLACKVLIRKYMAPIIDRIAPIQLGCGVKGGCEAAVHAASAFVNTNSASNKVLIKLDFKNAFNSLRRDVILEAVKSNIPAMYPAVYQMYRSPSNLFWGEEIVLSRCGVQQGDPCGPALFCLAICQLLSALESEFKPWFLDDGTIGGTLDSALSDVEKIIEFGVTSGLQLNASKCELYVLSSDCAFRDECLRRAQGLLPDIKLCTDENIELLGAPLTTASAELALNRKCELMDLWCSRLESLDAHPALFLMRTSLSTPRLIYILRCIDASAQKNILQQFDDKLRQCVNRVLNLNLDGANWDQATLPTTAGGLGIRRATDLAQTAFLGSITTLQELIISISPSNVKSFLERLMESKKEEFAAYHRVVLDDTRQRALDAVVVEAIQKKLLDNTADALGKARLLAAFNDTSAKWLQAIPSPQLGTMLDNTTLRIVAGLRLGEAVCAPHSCSLCNTPVSPTGEHGLSCPRSCGRHSRHAALNEVISRALQSANVPCRKEPVGLAADSALRPDGMTLVPWSSGKALVWDATVWDTLAPSYRSRASRSAGAVANLAEQRKSLKYRELETSFIVQPVAIETLGVIGESTVKFLKEIGKRAASEKDEKRAGEFLLQRISIEVQRGNAAAVLGSLPSGSGLPGLL

SEQ ID NO: 31463 - protein, 968 aa, Dermanyssus gallinae
MHSRHRRLRRTLATTQVSIRGRLLLILMTNRQLDIRQWTTPLTHSNTETPTTTSSTRLPAPISPSTALTRTVQRLSAVRQNLKMLSIVPRGVRPIVAAELTITIKSICSANDLDSWSRLAHFATTVLTIPRQKAKGKSLCSLIRDNLSRFRSRAPLDAAINANHVAAPKTNTNDDRQRARVAQAKLAQGDVSAAARILISTDSMAPQDANTHRILSDKHPNMPETAAYPAPPRGVPSADQINITPSEVRAAIQTFPNSSSGGPDGLKPRHLKDLIGKGDQICPLLFALTDFCNLVVNGRLPGFALSNFYGANLIALKKKDGGLRPIAVGNTLRRLACKVLTRKYMAPIIDRIAPIQLGCGVKGGCEAAVHAASAFVNTNSVSNKVLIKLDFKNAFNSLRRDVILEAVKSNFPAMYPAVYQMYRSPSNLFWGEEIVLSRCGVQQGDPCGPALFCLAICQLLSALESEFKPWFLDDGTIGGTLDSALSDVEKIIEFGVTSGLQLNASKCELYVLSSDCAFRDECLRRAQGLLPDIKLCTDESIELLGAPLTTASAELALNRKCELMDLWCSRLESLDAHPALFLMRTSLSTPRLIYILRCIDASAQKNILQQFDDKLRQCVNRVLNLNLDGANWDQATLPTTAGGLGIRRATDLAQTAFLGSITTLQELIISISPSNVKSFLERLMESKKEEFAAYHRVVLDDTRQRALDAVVVEAIQKKLLDNTADALGKARLLAAFNDTSAKWLQAIPSPQLGTMLDNTTLRIVAGLRLGEAVCAPHSCSLCNTPVSPTGEHGLSCPRSCGRHSRHAALNEVISRALQSANVPCRKEPVGLAADSALRPDGMTLVPWSSGKALVWDATVWDTLAPSYRSRASRSAGAVANLAEQRKSLKYRELETSFIVQPVAIETLGVIGESTLKFLKEIGKRAASEKDEKRAGEFLLQRISIEVQRGNAAAVLGSLPSGSGLPGLL

SEQ ID NO: 31464 - protein, 968 aa, Dermanyssus gallinae
MHSRHRRLRRTLATEQVSIRGRLLLILMTNRQLDIRQWTTPLTHSNTETPTTTSSTRLPAPISPSTALTRTVQRLSAVRQNLKMLSIVPRGVRPIVAAELTITIKSICSANDLDSWSRLAHFATTVLTIPRQKAKGKSLCSLIRDNLSRFRSRAPLDAAINANHVAAPKTNTNDDRQRARVAQAKLAQGDVSAAARILISTDSMAPQDANTHRILSDKHPNMPETAAYPAPSRGVPSADQINITPSEVRAAIQTFPNSSSGGPDGLKPRHLKDLIGKGDQICPLLCALTDFCNLVVNGRLPGFALSNFYGANLIALKKKDGGLRPIAVGNTLRRLACKVLIRKYMAPIIDRIAPVQLGCGVKGGCEAAVHAASAFVNTNSASNKVLIKLDFKNAFNSLRRDVILEAVKSNFPAMYPAVYQMYRSPSNLFWGEEIVLSRCGVQQGDPCGPALFCLAICQLLSALESEFKPWFLDDGTIGGTLDSALSDVEKIIEFGVTSGLQLNASKCELYVLSSDCAFRDECLRRAQGLLPDIKLCTDENIELLGAPLTTASAELALNRKCELMDLWCSRLESLDAHPALFLMRTSLSTPRLIYILRCIDASAQKNILQQFDDKLRQCVNRVLNLNLDGANWDQATLPTTAGGLGIRRATDLAQTAFLGSITTLQELIISISPSNVKSFLERLMESKKEEFAAYHRVVLDDTRQRALDAVVVEAIQKKLLDNTADALGKARLLAAFNDTSAKWLQAIPSPQLGTMLDNTTLRIVAGLRLGEAVCAPHSCSLCNTPVSPTGEHGLSCPRSCGRHSRHAALNEVISRALQSANVPCRKEPVGLAADSALRPDGMTLVPWSSGKALVWDATVWDTLAPSYRSRASRSAGAVANLAEQRKSLKYRELEASFIVQPVAIETLGVIGESTVKFLKEIGKRAASEKDEKRAGEFLLQRISIEVQRGNAAAVLGSLPSGSGLPGLL

SEQ ID NO: 31465 - protein, 968 aa, Dermanyssus gallinae
MHSRHRRLRRTLATEQVSIRGRLLRILMTNRQLDIRQWTTPLTHSNTETPTTTSSTRLPAPISPSTALTRTVQRLSAVRQNLKMLSIVPRGVRPIVAAELTITIKSICSANDLDSWSRLAHFATTVLTIPRQKAKGKSLCSLIRDNLSRFRSRAPLDAAINANHVAAPKTNTNDDRQRARVAQAKLAQGDVSAAARILISTDSMAPQDANTHRILSDKHPNMPETAAYPAPPRGVPSADQINITPSEVRAAIQTFPNSSSGGPDGLKPRHLKDLIGKGDQICPLLCALTDFCNLVVNGRLPGFALSNFYGANLIALKKKDGGLRPIAVGNTLRRLACKVLIRKYMAPIIDRIAPVQLGCGVKGGCEAAVHAASAFVNTNSASNKVLIKLDFKNAFNSLRRDVILEAVKSNFPAMYPAVYQMYRSPSNLFWGEEIVLSRCGVQQGDPCGPALFCLAICQLLSALESEFKPWFLDDGTIGGTLDSALSDVEKIIEFGVTSGLQLNASKCELYVLSSDCAFRDECLRRAQGLLPDIKLCTDENIELLGAPLTTASAELALNRKCELMDLWCSRLESLDAHPALFLMRTSLSTPRLIYILRCIDASAQKNILQQFDDKLRQCVNRVLNLNLDGANWDQATLPTTAGGLGIRRATDLAQTAFLGSITTLQELIISISPSNVKSFLERLMESKKEEFAAYHRVALDDTRQRALDAVVVEAIQKKLLDNTADALGKARLLAAFNDTSAKWLQAIPSPQLGTMLDNTTLRIVAGLRLGEAVCAPHSCSLCNTPVSPTGEHGLSCPRSCGRHSRHAALNEVISRALQSANVPCRKEPVGLAADSALRPDGMTLVPWSSGKALVWDATVWDTLAPSYRSRASRSAGAVANLAEQRKSLKYRELEASFIVQPVAIETLGVIGESTVKFLKEIGKRAASEKDEKRAGEFLLQRISIEVQRGNAAAVLGSLPSGSGLPGLL

SEQ ID NO: 31466 - protein, 968 aa, Dermanyssus gallinae
MHSRHRRLRRTLATEQVSIRGRLLLILMTNRQLDIRQWTTPLTHSNTETPTTTSSTRLPAPISPSTALTRTVQRLSAVRQNLKMLSIVPRGVRPIVAAKLTITIKSICSANDLDSWSRLAHFATTVLTIPRQKAKGKSLCSLIRDNLSRFRSRAPLDAAINANHVAAPKTNTNDDRQRARVAQAKLAQGDVSAAARILISTDSMAPQDANTHRILSDKHPNMPETAAYPAPPRGVPSADQINITPSEVRAAIQTFPNSSSGGPDGLKPRHLKDLIGKGDQICPLLCALTDFCNLVVNGRLPGFALSNFYGANLIALKKKDGGLRPIAVGNTLRRLACKVLIRKYMAPIIDRIAPVQLGCGVKGGCEAAVHAASAFVNTNSASNKVLIKLDFKNAFNSLRRDVILEAVKSNFPAMYPAVYQMYRSPSNLFWGEEIVLSRCGVQQGDPCGPALFCLAICQLLSALESEFKPWFLDDGTIGGTLDSALSDVEKIIEFGVTSGLQLNASKCELYVLSSDCAFRDECLRRAQGLLPDIKLCTDENIELLGAPLTTASAELALNRKCELMDLWCSRLESLDAHPALFLMRTSLSTPRLIYILRCIDASAQKNILQQFDEKLRQCVNRVLNLNLDGANWDQATLPTTAGGLGIRRATDLAQTAFLGSITTLQELIISISPSNVKSFLERLMESKKEEFAAYHRVVLDDTRQRALDAVVVEAIQKKLLDNTADALGKARLLAAFNDTSAKWLQAIPSPQLGTMLDNTTLRIVAGLRLGEAVCAPHSCSLCNTPVSPTGEHGLSCPRSCGRHSRHAALNEVISRALQSANVPCRKEPVGLAADSALRPDGMTLVPWSSGKALVWDATVWDTLAPSYRSRASRSAGAVANLAEQRKSLKYRELEASFIVQPVAIETLGVIGESTVKFLKEIGKRAASEKDEKRAGEFLLQRISIEVQRGNAAAVLGSLPSGSGLPGLL

SEQ ID NO: 31467 - protein, 885 aa, Dermanyssus gallinae
MLSIVPRGVRPIVAAELTSTIKSICSANDLDSWSRLAHFATTVLTIPRQKAKGKSLCSLIRDNLSRFRSRAPLDAAINANHVAAPKTNTNDDKQRARVAQAKLAQGDVSAAARILISTDSMALQDANTHRILSDKHPNMPETAAYPAPPRGVPSADQINITPTEVRAAIQTFPNSSSGGPDGLKPRHLKYLIGKGDQICPLLFALTDFCNLVVNGRLSGFALSNFHGANLIALKKKDGGLRPIAVGNTLRRLACKALIRKYMAPIIDRIAPVQLGCGVKGGFKAAVHAASAFVNTNSASNKVLIKLDFKNAFNSLRRDVILEAVKSNFSAMYPAVYQMYRSPSNLFWGEEIVLSTCGVQQGDPCGPALFCLAICQLLSALESEFKPWFLDAGTIGGTLDSALSDVEKIIEFGVTSDLQLNASKCELYVLSSDCAFRDECLRRGPGLLPDINLCTDENIELLRAPLTTASAKLALNKKCELMDLWCSRLESLDAHPALFLMQTSLSTPRLIYILRCIDASAQNNILQQFDDKLRQCVNRVLNLNLDGANWDQATLPTTAGGLGIRRAIDLAQTAFLGSITVLQELIISISPSNVKSFLERLMESKKEEFAAYHRVVLDDTRQRALDAVVVEAIQKKLLDNTADALGKARLLAAFNDTSAKWLQAIPSPQLGTMLDNTTLRIVAGLRLGEAVCAPHSCSLCNTPVSPTGEHGLSCPRSCGRHSRHAALNEVISRALQSANVPCRKEPVGLAADSALRPDGMTLVPWSSGKALVWDATVWDTLAPSYRSRASRSAGAVANLAEQRKSLKYRELETSFTVQPVAIETLGVIGESTENFPKEIGKRAASEKDEKRAGEFLLQRISIEVQRTNAAAVLGSLPSGSGLPGLL

SEQ ID NO: 31468 - protein, 968 aa, Dermanyssus gallinae
MHSRHRRLRRTLATEQVSIRGRLVLILMTNRQLDIRQWTTPLTHSNTETPITTSSTRLPAPISPSTALTRTAQRLSAVRQNLKMLSIVPRGVRLIVAAELTNTIKSICSANDLDSWSRLAHFATTVLTIPRQKAKGKSLCSLIRDNLSRFRSRAPLDAAINANHVAAPKTNTNDDRQRARVAQAKLAQGDVSAAARILISTDSMAPQDANTHRILSDKHPNMPETAAYPAPPRGIPSADQINITPSEVPAAIQTFPNSSSGGPDGLKPRHLKDLIGKGDQICPLLFALTDFCNLVVNGRLPGFALSNFYGANLIALKKKDGGLRPIAVGNTLRRLACKVLIRKYMAPIIDRIAPVQLGCGVKGGCEAAVHAASAFVNTNSASNKVLIKLDFKNAFNSLRRDVILEAVKSNFPEMYPAVYQMYRSPSNLFWGEEIVLSRCGVQQGDPCGPALFCLAICQLLFALESEFKPWFLDDGTIGGTLDSALSDVEKIIEFGVTSGLQLNASKCELYVLSSDCAFRDECLRRAQGLLPDIKLCTEENIELLGAPLTTASAILALNRKCELMDLWCSRLESLDAHPALFLMRTSLSTPRLIYILRCIDASAQKNILQQFDDKLRQCVNRVLNLDLDGANWDQATLPTTAGGLGIRRATDLAQTAFLGSITTLKELIISISPSNVKSFLERLMESKKEKFAAYHRVALDDTRQRALDAVVVEAIQKKLLDNTADALGKARLLAAFNDTSAKWLQAIPSPQLGTMLDNTTLRIVAGLRLGEAVCAPHSCSLCNTPVSPTGEHGLSCPRSCGRHSRHAALNEVISRALQSANVPCRKEPVGLAADSALRPDGMTLVPWSSGKALVWDATVWDTLAPSYRSRASRSAGAVANLAEQRKSLKYRELEASFIVQPVAIETLGVIGESTVKFLKEIGKRAASEKDEKRAGEFLLQRISIEVQRGNAAAVLGSLPSGSGLPGLL

SEQ ID NO: 31469 - protein, 960 aa, Dermanyssus gallinae
MHSRHRRLRRTLATEQVSIRGRLLLILMTNRQLDIRQWTTPLTHSNTETPTTTSSTRLPAPISPSTALTRTVQRLSAVRQNLKMLSIVPRGVRPIVAAELTNTIKSICSANDLDSWSRLAHFATTVLTIPRQKAKGKSLCSLIRDNLSRFRSRAPLDAAINANHVAAPKTNTNDDRQRARVAQAKLAQGDVSAAARIYISTDSMAPQDANTHRILSDKHPNMPETAAYPAPPRGVPSADQINITPSEVRAAIQTFPNSSSGGPDGLKPRHLKDLIGKGDQICPLLFALTDFCNLVVNGRLPGFALSNFYGANLIALKKKDGGLRPIAVGNTLRRLACKVLIRKYMAPIIDRIAPVQLSCGVKGGCEAAVHAASAFVNTNSASNKVLIKLDFKNAFNSLRRDVILEAVKSNFPEMYPAVYQMYRSPSNLFWGEEIVLSRCGVQQGDPCGPALFCLAICQLLSALESEFKPWFLDDGTIGGTLDSALSDVEKIIEFGVTSGLQLNASKCELYVLSSDCAFRDECLRRAQGLLPDIKLCTEENIELLGAPLTTASAKLALNRKCELMDLWCSRLESLDAHPALFLMRTSLSTPRLIYILRCIDASAQKNILQQFDDKLKQCVNRVLNLNLDGANWDQATLPTTAGGLGIRRAADLAQTAFLGSITTLQELIISISPSNVKSFLERLMESKKEEFAANHRVALDDTRQRALDAVVVEAIQKKLLDNTADALGKARLLAAFNDTSAKWLQAIPSPQLGTMLDNTTLRIVAGLRLGEAVCAPHSCSLCNTPVSPTGEHGLSCPRSCGRHSRHAALNEVISRALQSANVPCRKEPVGLAADSALRPDGMTLVPWSSGKALVWDATVWDTLAPSYRSRASRSAGAVANLAEQRKSLKYRELEASFIVQPVAIETLGVIGESTVKFLNEKDEKRAGEFLLQRISIEVQRGNAAAVLGSLPSGSGLPGLL

SEQ ID NO: 31470 - protein, 942 aa, Dermanyssus gallinae
MTNRQQDIRQWATPMTQNNTTAPSTSASTVRSPAPISPSTALTRTVQRLSAVRQNLKMLSIVPRGVRPTVAAELTNTIKSICTTNDLYSWSRLAHFATTVLTIPRQKLKGSSLCSLVRDNLSRFRSRSPLDATIIANKCAAPKTSRNDNRQRAREVQAKLAQGDVSAAARILISTDLMASQDSNTHRTLSEKHPDMPETSAFPPPPRDVPAADQINITPLEVRAAIQSFPNSSSGGPDGLKPRHLKDLIGKGAQICPLLLALTDFCNLVVNGRLPGFALSNFYGANLIALKKKDGGLRPIAVGNTLRRLAGKVLIRKFMAQIVDKIAPVQLGCGVKGGCEAAVHAARAFLNINSESNKVLIKLDFKNAFNSLRRDAILDTVRSDFPAIYPAVYQMYRSPSNLFWGKEIILSKCGVQQGDPCGPALFCLTICQLLSALESEFKPWFLDDGTIGGTLDSALSDVKKVIDFGVTSGLQLNASKCELLILSSDNAFRDECLRRAQNLLPDIKLCTDEDIELLGAPLTMASAKLALNRKCELMDLWCSRLKSLDAHPALYLMRTSLSTPRLIYILRCTDASAQRGILEQFDEKLRQCVKQVLNLNLDGVSWDQASLPTSAGGLGIRRATDLAQTAFLGSITTLHELIVSISPPNAKPFLERLMESKKEEFAARHRVVLDDARQSTLDAFVVEAIKKKILDNTVDTLGKARLLAAFNESSAKWLQAIPSPQLGTMLDNTTLRIVSGLRLGVAVCAPHACSLCDTPVSPRGEHGLSCSRSCGRHSRHAALNEVISKALQSANVPCRKEPVGLATDSALRPDGMTLVPWSSGKALVWDATVWDTLAPSYRDRASRSAGAVANLAEQRKSLKYRELEATFIVQPVAIETMGVMGESTVRFLREIGKRAASEKDEKRAGEFLLQRISIEVQRGNAAAVLGSLPSGSGLLGLT

SEQ ID NO: 31471 - protein, 942 aa, Dermanyssus gallinae
MTNRQQDIRQWATPMTQNNTTAPSTSASTVRSPAPISPSTALTRTVQRLSAVRQNLKMLSIVPRGVRPTVAAELTNTIKSICTTNDLYSWSRLAHFATTVLTIPRQKLKGSSLCSLVRDNLSRFRSRSPLDATIIANKCAAPKTSRNDNRQRAREVQAKLAQGDVSAAARILISTDLMASQDSNTHRTLSEKHPDMPETSAFPPPPRDVPAADQINITPLEVRAAIQSFPNSSSGGPDGLKPRHLKDLIGKGAQICPLLLALTDFCNLVVNGRLPGFALSNFYGANLIALKKKDGGLRPIAIGNTLRRLAGKVLIRKFMAQIVDKIAPVQLGCGVKGGCEAAVHAARAFLNINSESNKVLIKLDFKNAFNSLRRDAILDTVRSDFLAIYPAVYQMYRSPSNLFWGKEIILSKCGVQQGDPCGPALFCLTICQLLSALESEFKPWFLDDGTIGGTLDSALSDVKKVIDFGVTSGLQLNASKCELLILSSDNAFRDECLRRAQNLLPDIKLCTDEDIELLGAPLTMASAKLALNRKCELMDLWCSRLKSLDAHPALYLMRTSLSTPRLIYILRCTDASAQRGILEQFDEKLRQCVKQVLNLNLDGVSWDQASLPTSAGGLGIRRATDLAQTAFLGSITTLHELIVSISPPNAKPFLERLMESKKEEFAARHRVVLDDARQSTLDAFVVEAIKKKILDNTVDTLGKARLLAAFNESSAKWLQAIPSPQLGTMLDNTTLRIVSGLRLGVAVCAPHACSLCDTPVSPRGEHGLSCSRSCGRHSRHAALNEVISKALQSANVPCRKEPVGLATDSALRPDGMTLVPWSSGKALVWDATVWDTLAPSYRDRASRSAGAVANLAEQRKSLKYRELEATFIVQPVAIETMGVMGESTVRFLREIGKRAASEKDEKRAGEFLLQRISIEVQRGNAAAVLGSLPSGSGLLGLT

SEQ ID NO: 31472 - protein, 942 aa, Dermanyssus gallinae
MTNRQQDIRQWATPMTQNNTTAPSTSASTVRSPAPISPSTALTRTVQRLSAVRQNLKMLSIVPRGVRPTVAAELTNTIKSICTTNDLYSWSRLAHFATTVLTIPRQKLKGSSLCSLVRDNLSRFRSRSPLDATIIANKCAAPKTSRNDNRQRAREVQAKLAQGDVSAAARILISTDLMASQDSNTHRTLSEKHPDMPETSAFPPPPRDVPAADQINITPLEVRAAIQSFPNSSSGGPDGLKPRHLKDLIGKGAQICPLLLALTDFCNLVVNGRLPGFALSNFYGANLIALKKKDGGLRPIAVGNTLRRLAGKVLIRKFMAQIVDKIAPVQLGCGVKGGCEAAVHAARAFLNINSESNKVLIKLDFKNAFNSLRRDAILDTVRSDFPAIYPAVYQMYRSPSNLFWGKEIILSKCGVQQGDPCGPALFCLTICQLLSALESEFKPWFLDDGTIGGTLDSALSDVKKVIDFGVTSGLQLNASKCELLILSSDNAFRDECLRRAQNLLPDIKLCTDEDIELLGAPLTMASAKLALNRKCELMDLWCSRLKSLDAHPALYLMRTSLSTPRLIYILRCTDASAQRGILEQFDEKLRQCVKQVLNLNLDGVSWDQASLPTSAGGLGIRRATDLAQTAFLGSITTLHELIVSISPPNAKPFLERLMESKKEEFAARHRVVLDDARQSTLDAFVVEAIKKKILDNTVDTLGKARLLAAFNESSAKWLQAIPSPQLGTMLDNTTLRIVSGLRLGVAVCAPHACSLCDTPVSPRGEHGLSCSRSCGRHSRHAALNEVISKALQSANGPCRKEPVGLATDSALRPDGMTLVPWSSGKALVWDATVWDTLAPSYRDRASRSAGAVANLAEQRKSLKYRELEATFIVQPVAIETMGVMGESTVRFLREIGKRAASEKDEKRAGEFLLQRISIEVQRGNAAAVLGSLPSGSGLLGLT

SEQ ID NO: 31473 - protein, 942 aa, Dermanyssus gallinae
MTNRQQDIRQWATPMTQNNTTAPSTSASTVRSPAPISPSTALTRTVQRLSAVRQNLKMLSIVPRGVRPTVAAELTNTIKSICTTNDLYSWSRLAHFATTVLTIPRQKIKRSSLCSLVRDNLSRFRSRSPLDATIIANKCAAPKTSRKDNRQRAREVQAKLAQGDVSAAARILISTDLMASQDSNTHRTLSEKHPDMPETSAFPPPPRDVSAADQINITPLEVRAAIQSFPNSSSRGPDGLKPRHLKDLIGKGAQICPLLLALTDFCNLVVNGRLPGFALSNFYGANLIALKKKDGGLRPIAVGNTLRRLAGKVLIRKFMAQIVDKIAPVQLGCGVKGGCEAAVHAARAFVNINSESNKVLIKLDFKNAFNSLRRDAILDTVRSDFPAVYSAVYQMYRSPSNLFWGKEIILSKCGVQQGDPCGPALFCLTIRQLLSALESEFKPWFLDDGTIGGTLDSALSDVKKVIDFGVTSGLQLNASKCELLILSSDKAFRDECLRRVQNLLPDIKLCTDEDIELLGAPLTMASAKLALNRKCELMDLWCSRLRSLDAHPALYLMRTSLSTPRLIYILRCTDASAQRGILQQFDEKLRKCVKQVLNLNLDGVSWDQASLPTSAGGLGIRRATDLAQTAFLGSITTLHELIVSISPPNAKPFLERLMESKKEEFAASHRVVLEDARQSTLDAFVVKAIQQKILDNTVDTLGKARLLAAFNESSAKWLQAIPSPQLGTMLDNTTLRIVSGLRLGVAVCAPHACSLCDTPVSPRGEHGLSCSRSCGRHSRHAALNEVISKALQSANVPCRKEPVGLATDSALRPDGMTLVPWSSGKALVWDATVWDTLAPSYRDRASRSAGAVANLAEQRKSWKYRELEATFIVQPVAIETMGVMGESTVSFLREIGKRAASEKDEKRAEEFLLQRISIEVQRGNAAAVLGSLPSGSGLLGLT

SEQ ID NO: 31474 - protein, 942 aa, Dermanyssus gallinae
MTNRQQDIRQWATPMTQNNTTAPSTSASTVRSPAPISPSTALTRTVQRLSAVRQNLKMLSIVPRGVRPTVAAELTNTIKSICTTNDLYSWSRLAHFATTVLTIPQQKLKGSSLCSLVRDNLSRFRSRSPLDATIIANKCAAPKTSRNDNRQRAREVQAKLAQGDVSAAARILISTDLMASQDSNTHRTLSEKHPDMPETSAFPPPPRDVPAADQINITPLEVRAAIQSFPNSSSGGPDGLKPRHLKDLIGKGAQICPLLLALTDFCNLVVNGRLPGFALSNFYGANLIALKKKDGGLRPIAVGNTLRRLAGKVLIRKFMAQIVDKIAPVQLGCGVKGGCEAAVHAARAFLNINSESNKVLIKLDFKNAFNSLRRDAILDTVRSDFPAIYPAVYQMYRSPSNLFWGKEIILSKCGVQQGDPCGPALFCLTICQLLSALESEFKPWFLDDGTIGGTLDSALSDVKKVIDFGVTSGLQLNASKCELLILSSENAFRDECLRRAQNLLPDIKLCTDEDIELLGAPLTMASAKLALNRKCELMDLWCSRLKSLDAHPALYLMRTSLSTPRLIYILRCTDASAQRGILEQFDEKLRQCVKQVLNLNLDGVSWDQASLPTSAGGLGIRRATDLAQTAFLGSITTLHELIVSISPPNAKPFLERLMESKKEEFAARHRVVLDDARQSTLDAFVVEAIKRKILDNTADTLGKARLLAAFNESSAKWLQAIPSPQLGTMLDNTTLRIVSGLRLGVAVCAPHACSLCDTPVSPRGEHGLSCSRSCGRHSRHAALNEVISKALQSANVPCRKEPVGLATDSALRPDGMTLVPWSSGKALVWDATVWDTLAPSYRDRASRSAGAVANLAEQRKSLKYRELEATFIVQPVAIETMGVMGESTVRFLREIGKRAASEKDEKRAGEFLLQRISIEVQRGNAAAVLGSLPSGSGLLGLT

SEQ ID NO: 31475 - protein, 964 aa, Dermanyssus gallinae
MHSRHRRLRRTLATEQVSIRGRFLLILMTNRQLDIRQWTTPLTHSNTETPTTTSSTRLPAPISPSTALTRTVQRLSAVRQNLKMLSIVPRGVRPIVAAELTNTIKSICSANDLDSWSRLVHFATRVLTIPRQKAKGKSLCSLIRDNLSRFRSRAPLDAAINANHVAAPKTNTNDDRQRARVAQAKLAQGDVSAAARILISTDSMAPQDANTHRILSDKHPNMPETAAYPAPPRGVPSADQINITPSEVRAAIQTFPNSSSGGPNGLKPRHLKDLIGKGDQICPLLFALTDFCNLVVNGRLPGFALSNFYGANLIALKKKDGGLRPIAVGNTLRRLACKVLIRKYMAPIIDRIAPVQLGCGVKGGCEAAVHAASAFVNTNSASNKVLIKLDFKNAFNSLRRDVILEAVKSNFPEMYPAVYQMYRSPSNLFWGEEIVLSRCGVQQGDPCGPALFCLAICQLLSALESEFKPWFLDDGTIGGTLDSALSDVEKIIEFGVTSGLQLNASKCELYVLSSDCAFRDECLRLLPDIKLCTEENIELLGAPLTTASAKLALNRKCELMDLWCSRLESLDAHPALFLMRTSLSTPRLIYILRCIDASAQKNILQQFDDKLRQCVNRVLNLNLDGANWDQATLPTTAGGLGIRRAADLAQSAFLGSITTLQELIISISSSNVKSFLERLMESKKEEFAAYHRVALDDIRQRSLDAVVVEAIQKKLLDNTADALGKARLLAAFNDTSAKWLQAIPSPQLGTMLDNTTLRIVAGLRLGEAVCAPHSCSLCNTPVSPTGEHGLSCPRSCGRHSRHAALNEVISRALQSANVPCRKEPVGLAADSALRPDGMTLVPWSSGKALVWDATVWDTLAPSYRSRASRSAGAVANLAEQRKSLKYRELEASFIVQPVAIETLGVIGESTVKFLKEIGKRAASEKDEKRAGEFLLQRISIEVQRGNAAAVLGSLPSGSGLPGLL

SEQ ID NO: 31476 - protein, 1795 aa, Trachythela sp.
MPQCLYCGNYFKTRRTLTSHFEHTHHGQRRSVAAIPDQCEVTFISNLPTQTLDCPHPYCLFQSTDCSNTTALSKHFSVAHPFNELVILYLCNKCDEFIDPAERFPHNRAHMLSNSNGSPFDSVIPRINAHDSSLEFINVSVVQTQAPFHSPTTSQLRLAPTPPYKLPTASSPPKDQDLVISETQSTLSSPTAPSQHVCIAVSQSPSPSTPVSSPELIPQPRCSVPTSQSTFNGSPIANSPSPTPPHQPTPVLNPLETQSPSSSPISPSSAAFSHPCDELDLVPLPTSPVISLSPNDSFSLFSPLSGEDRALFPVSPSISQDYLNSPSLPFPSYPVIPVSTEYHQQITSITSAPSSLPPSESTSTRASPSFMEMRDYNRAACDKLKVLKESIAPLTTSPPFIRLPVITTPPPLPSTDLICISSPMPTINRCSSPALSISPNEPKSKVNELLCELSSCDNTNKELPGDIKRVVRQDTRTVVFKEDKRVVTLKSPLPPSRSDRVFNVSSSVANCKEAMALLSKTFNIPPASSPSAIIPIPSVEIISQPTTNSPSPSPFHQPSPCQLPLITQSPSTVQFVPSSPVPSSSPVGPHPSLSPVLSQSPTAPFSLLTPLQGESQVVCPLSPSASQDDLTSLSLPFPPPPGSVSDSSSPEKLSPSPSLISNIDYNKNLRARLKDLRDTSKTPSSPPMGPKTTATTANNRCQGSNMTIVPQRENSVFAPAPPITRQTHPISTVSYRNQHCVKKSKGVKDLSQLLKNMRPPPRPVVSSRVDPAAPCNSESVAEFDPEVDIDNPDPLSEDVLDLHYDEDIPSAQSRQHRPPDDVAPVQHASREPPLADDLNEALIDLNSSQDPLLPDEDRDRLQQFQAKWTGIFNDDSSWIDFSTNCERFAEEARSLAKELNKPPAARAQKNVDRPPPRRPPHGRPVQRYDPAAARRIQGLYRHSKKRAARKILTNNSVSFAGSVTDVETYFAEVLAEKQCNTNLLCESLRENVPSGEDYESTNDLYANLSQLEIATKLRSAANTSPGADRVEYAHLKRVDPSAQVLVLIFNRCMMQKNVPDQWKEALTILIYKKGSDSDVSNFRPIALMSCIYKLFMGVMAKRITKWSIDAGILSEEQKCARPSEGCYEHTYILKSVVQQARMNKKKLNIAWLDIRNAFGSVPHATIRATLRHIGFPPELTTLIMNAYSGATTVIKTPNGNTVAIPIEAGVKQGCPLSPILFNLCIELILRKVKNAASKLKSGSCIHYGTMVSCLAYADDLVILARSKQALQLLLDAASEGANILGLSFRPDKCASLTLTHTKQRATFVEQRDFTTQGNHIPALAQEESYRYLGIPIGIIHNIDDLPNIVPRLIQDIETIRTSLLAPWQKLDAIRTFIQPCLTYALRAGDPLKKSLDIYRKTLNKAIREICALPNRASSSYFFAHKKAGGLAFQDPKTECDIQAVVQAIRILSSSDPVVTTMARHELKYIVRRSTQSNPTAELISNYLSATQDSRTDHLYYSYSSLWSNVRKACRRLKVTIHYSDNDPPTISADESGKIESRQVTFFLHRLVQSRCAEDLMQLKDQGKVARCMSEDQYANGSSWHMTGLNIRFKDWRFIHKARLNVVPLNVNKHRYSNTCEKCRHCEQPETLPHVICHCRPHMVQIRERHNRIVERLTNAIRFGSVTTDKTIKDSNLRLRPDIVVEEDNRVLIIDVTCPFDNDVDALSEAAMAKVHKYQPLKEFVESKGKKCEILPFVVGALGSWYIQNEILISLLGMTRRYKSLFRKLCCSDAIQGSNNIYRLHLGCDDAAPLPP

SEQ ID NO: 31477 - protein, 1796 aa, Trachythela sp.
MPQCLYCGNYFKTRRTLTTHFENSHHGQRSSDACVIPEQCEVTFISNLPTQTLDCPHPYCLYQSVDCSNTTALSKHFSVAHPFNELVILYLCNKCDEFIDPAERFPHNRAHMLTNSNGSPFDRVIPRINAHDSSLEFINVSVVQSQAPFHSPTTSQLRLSPTPPYKLPTASSPPKDQDLVISETQSTLSSPTAPSQHVCIAVSQSPSPSTPVSSPELIPQPRCSVPTSQSTFNGSPIANSPSPTPLHQPTPDLNPLETQSPSSSPISPSSAAFSRPCDELDLVPFPTSPVISLSPNDSFSLFSPLSGEDRALFPVSPSISQDYLNSPSLPFPSYPVIPVSTEYHQQITSITSAPSSLPPSESTSTRASPSFMEMRDYNRAACDKLKVLKESIAPLTTSPPFIRLPVITTPPPLPSTDLICISSPMPTINRCSSPALSISPNEPKSKVNELLCELSSCDNMNKELPGDIKRVVRQDTRTVVFKEDKRVVTLKSPLPPSRSDRVFNVSSSVANCKEAMALLSKTFNIPPASTPSAIIPIPSVEIISQPTTNSPSPSPFHQPSPCQLPLVTQSPSTVQFVPSSPVPSSSPAGPHPSLSPVLSQSPTAPFSLLTPLQGESQVVCPLSPSASQDDLTSLSLPFPPPPGSVSDPSSPGKLSPSPSLISNIDYNKNLRARLKDLRDTSKTTSSPPMGPKTTATTANNRCQGSNTTMVPRRENPVFAPAPPITRQTHPISTVSYRKPSSVKKSKGVKDLSQLLKNMRPPPRPVVSSRVDLAAPCNSESVAEFDPVVDIDNPDPLSEDVLDLHYDEDIPSAQSRQDRPPDDVAPVQHTSREPPLADDLNEALIDLNSSQDPLLPDEDRDRLQQFQAKWTGIFNDDSSWIDFSTNCERFAEEARSLAKELNKPPAAREQKNVDRPPPRRPPHGRPVQRYDPAAARRIQGLYRHSKKRAARKILTNNSVSFAGSVTDVETYFAEVLAEKQCNTNLLCESLRENVPSGEDYESTNDLYANLSQLEIATKLRSAANTSPGADRVEYAHLKRVDPSAQVLVLIFNRCMMQKNVPDQWKEALTILIYKKGSDSDVSNFRPIALMSCIYKLFMGVMAKRITKWSIDAGILSEEQKCARPSEGCYEHTYILKSVVQQARMNKKKLNIAWLDIRNAFGSVPHATIRATLRHIGFPPELTTLIMNAYSGATTVIKTPNGNTVAIPIEAGVKQGCPLSPILFNLCIELILRKVKNAASKLKSGSCIHYGTMVSCLAYADDLVILACSKQALQLLLDAASEGANILGLSFRPDKCASLTLTHTKERVTFVEQRDFTIQGNHIPALAQEESYRYLGIPIGIIHNIDDLPNIVPRLIQDIETIRTSLLAPWQKLDAIRTFIQPCLTYALRAGDPLKKSLDIYRKTLNKAIREICALPNRASTSYFFAHKKAGGLAFQDPKTECDIQAIVQAIRILSSSDPVVTTMARHELKYIVRRSTQSNPTAELISKYLSATQDSRTDHLYYSYSSLWSNVRKACRRLKVTVHYSDNDPPTISADESGKIESRQVTFFLHRLVQSRCAEDLMQLKDQGKVARCMSEDQYANGSSWHMTGLNIRFKDWRFIHKARLNVVPLNANKHRYSNTCEKCRHCEQPETLPHVICHCRPHMVQIRERHNRIVERLTNAIRFGTVTTDKTIKDANLRLRPDIVVEEDNRVLIIDVTCPFDNDVDALSEAAMAKVHKYQPLKEFVESKGKKGEILPFVVGALGSWYKQNEILLSLLGMTRRYKSLFRKLCCSDAIQGSNNIYRLHLGCDDAAPLPP

SEQ ID NO: 31478 - protein, 1135 aa, Trachythela sp.
MSPALTQPTFCSPDLEGNDDLLFLRGSTNSSSSVNACPGMPSTELSPNPSTNSSRDNNSVAPPPPVTRLLHPTRRRHNVSQEVADALNNIRSRHRRQNKSSAATLVHNIDMLVNDDVSQHQGLGLDSDDDIDIDPHRDDLIPSAQPTSPRPPTRPPPPRSNPRDTPPPTVSEDDDDDVDVFNDSQALPIPKDDQQRMVAFRDKWCAHFLEDNLWSEFTEQCVAFATEARSLATELSKPPSARVKVDQPPRPPPRRPANGRPIAQFDPVAARRIQGLYRHSKKRAARKLMNDTMITYSGTLNDAHTYFENVFSEKRANASILGEGLATYVPSGEGHEDTDDLYASMAESEIASKLRSAANTSPGSDRCEYNHLKKLDPSAKILTLIFNRCQRQQNVPKPWKEALTILIYKKGDDSDVSNFRPIALMSVIYKIFMGVIAKRLTKWAIATGVLSDEQKSARPTEGCYEHTYMLKSLVADARRRKQKLFLSWLDIRNAFGSVPHNTISATLRHVGVPEDLVSLIMNAYRGATTVIRTPQGTTDPIEIQAGVKQGCPLSPILFNICIELILRMVKKKASQLKAGACLYHGSTILCLAYADDLVIIARNPKALQKLLDEASDGATILGFEFRPDKCASLSLNTDGRRTVETAVNDFLVQGSHIPALENEESYRYLGVPIGLIHNIDDIPNIVPRLIRDLEVIRSSLLAPWQKLDAIRTFIQPCLTYALRAGDPLKQSLKDYRSLLVKAMREICSLPTRATASYFFANKRVGGLAFQDPTIESDLQAIVQAIRILSSADEAVVNIARAELKSFVRRTTQSNPTADLISKYLSSAKDPRLEKLNYSTHSSLWSRVRKACRRQQVTFIYSDQNPPCVTADGSAQVTSKSVTFFLHRLVQQRYAESLMALPDQGKVARCLADDQYANGSSWHMTGLNIRFKDWRFVHRARLNVVPLNSNKSRFSNTSYECRHCPQPETLPHVICHCRPQMTQIRDRHNKIVERLVNSVRFGQITTDRAVQDSGYRLRPDIIVEEKNEVLIIDVTCPFDNDADALSTAAEAKFHKYQVLKEHFNSRGKNCEIFPFVIGALGSWYKQNELLCSKLGMTRRYRSLFRKLCCSDAIQGSTNIYRLHLGWDDATPLASTP

SEQ ID NO: 31479 - protein, 1659 aa, Trachythela sp.
MPQCLYCRIYFKTRQTLKKHFKRTHHGQRRSTAGDVPQQCELTFISNLPRQSLDCPHPYCLFQSVDCLNTGALSKHFSVAHPFNELVILYLCKKCDQYIDPAERFPHNRAHTDMDLNGLPMAHVIPKINALDNSLEFINVSVGKSPNPRSPPSPKSPIRLSPTPPYKLPGSNSPKVVHIPESQSTGVDSPLSHLPEPHVIPESQTTFSPSTPLPALDNIVRLTSSPTLELIDLSPPDSLVRMSYRVSSPDLCALLEVPSTNQRVLPQVDEYTTVYTSTPASGEILVSSPPPVLSDPLPAFQPLCSDTPNPSPDLFPTPMLPIDHLATQSTTSDNTPLVNTPPVSSLDSSLTPSAQFSPPASTINQCLSPALSLSPNESPTKISQLLGERSAQIKESVVMVCPRDAKQVVLQDTRTVVFSSASPTPVQPQHEQDKRVVTLKSPLPPPPPGLVFNMSASEANRKKALALLRETFKSPPILISSTPNSPLSSPLSSPPCVPIFYSPEEYEPSSLLEPCLSLPSTNRPMSPALTQPTFCSPDLEGNDDLLFLRGSTNSSSSVNACPGMPSTELSPNPSTNSSRDNNSVAPPPPVTRLLHPTRRRHNVSQEVADALNNIRSRHRRQNKSSAATLVHNIDMLVNDDVSQHQGLGLDSDDDIDIDPHRDDLIPSAQPTSPRPPTRPPPPRSNPRDTPPPTVSEDDDDDVDVFNDSQALPIPKDDQQRMVAFRDKWCAHFLEDNLWSEFTEQCVAFATEARSLATELSKPPSARVKVDQPPRPPPRRPANGRPIAQFDPVAARRIQGLYRHSKKRAARKLMNDTMITYSGTLNDAHTYFENVFSEKRANASILGEGLATYVPSGEGHEDTDDLYASMAESEIASKLRSAANTSPGSDRCEYNHLKKLDPSAKILTLIFNRCQRQRNVPKPWKEALTILIYKKGDDSDVSNFRPIALMSVIYKLFMGVIAKRLTKWAIATGVLSDEQKSARPTEGCYEHTYMLKSLVADARRRKQKLFLSWLDIRNAFGSVPHNTISATLRHVGVPEDLVSLIMNAYRGATTVIRTPQGTTDPIEIQAGVKQGCPLSPILFNICIELILRMVKKKASQLKAGACLYHGSTISCLAYADDLVIISRNPKALQKLLDEASDGATILGFEFRPDKCASLSLNTDGRRTVETAVNDFLVQGSHIPALENEESYRYLGVPIGLIHNIDDIPNIVPRLIRDLEVIRSSLLAPWQKLDAIRTFIQPCLTYALRAGDPLKQSLKDYRSLLVKAMREICSLPTRATASYFFANKRVGGLAFQDPTIESDLQAIVQAIRILSSADEAVVNIARAELKSFVRRTTQSNPTADLISKYLSSAKDPRLEKLNYSTHSSLWSRVRKACRRQQVTFIYSEQNPPCVTADGSAQVTSKSVTFFLHRLVQQRYAESLMALPDQGKVARCLADDQYANGSSWHMTGLNIRFKDWRFVHRARLNVVPLNSNKSRFSNTSYECRHCPQPETLPHVICHCRPQMTQIRDRHNKIVERLVNSVRFGQITTDRAVQDSGYRLRPDIIVEEKNEVLIIDVTCPFDNDADALSTAAEAKFHKYQVLKEHFNSRGKNCEIFPFVIGALGSWYKQNELLCSKLGMTRRYRSLFRKLCCSDAIQGSTNIYRLHLGWDDATPLASTT

SEQ ID NO: 31480 - protein, 1216 aa, Dallia pectoralis
MNISIDMASIPYHLQADQTGLSNLTPSVGLSGHREVQRAGPSSALLPGGGDARGYGSGSNKRKKKSEVVETDWELKRPRVDPAQLGSQAPSEALSKGNPAPYEDPTVITVLIPLMDLQCGLCGWTLGAVGRAARHFAVQHPAMLIVYQCRRCGRTDPNHHPISCHAPKCNTTAETWMGEFVCELCGKDFPKKVGLTQHRRHKHPAVYCGLASGIDAESRNAAKVGRKPMKVRKGSGDWLAAGTSEEREYVEQMEVGGQDASGPTSEGSYPKATRDRQSLGAELAIPKELPPPKSGLERILWERLTESGTKGSILIGGKTYSLEKIRQNVPLLDTWATDMLRRVREVSGDVRPPGGGGAGRAVVAEGSRALSRRAGHRRTQKLFENDRSKLAEILFDGAGWGKAPGPSAEIALAFKSGWDVADPYLGLGQFSSDHGADNIVFLRPITPDEVKSGLRSIKNGSAAGPDGLSKKALKTWDPTGTKLAKMYSMWLALGRMPKVFKQCRTTLIPKSLDPDVRAQTTGWRPLTIGSVVTRLYSKVLNSRLTEACSISPRQRGFISSPGCSENLLILDGLISETRRRSLGLAVVFIDFARAFDSVSHSHILDALRQRSLDSHIIRVIEDSYKGVTTTVAVEGEEGPTIDMRIGVKQGDPLSPLLFNLALDPVIATLERTGSGCPLEGGKQVCTLAFADDLVLLSDSWEGMRQNMVILESFCEVTGLKVQPTKCHGFLAQSRGGVRMVNRCEPWSLGEGMIHMVGPGETVKYLGVEISPWHGVVRPEMERKLGGWVSALSRSNLKPSQKVLMFNVYAMPRLTYEADHGGAGQLALRGLDGIIRKAVKGWLHLPLCTCNGLLYSRQKDGGLGVMKLASQIPSIQARRVFRLWHSTDEVTRDVTRRAVKPAKFLRLWINAGGKGSEAPVLAGVEWPDKGETELEVDRASAHKIPTGQVLGSTKRVLTVPDWRGNEFLHWMSLDVQGLGVQVFHGDKISNHWLALPTEFGFKQRHYIASLQLRANVYPTCESLSRGRSTIAGACHYCVSGTETCPHILGQCPAVKDSRIRRHHKLCDLLTEEAESAGWHVTKEMVYRTLSGAQRRPDLVFVKDGEALVVDVTVRFEMAQDTLKMAADEKVARYTPILPQVMRSTGTTKAKVYGFPLGGRGKWYRGNDGLLKRMGVSPSRIKAVAMLFSRRVLLYSLDVLRDFTRIGDEGDHEEEIEV

SEQ ID NO: 31481 - protein, 966 aa, Nymphon striatum
MELSDNTSSHIKPIKQRKCCSCTFKGNCSKCLCNKGNSKCVNCIPSFNGRCKNLISNDLSLALSQVSASNNPTPNHDASHLASSTPEVTCILCNSNFSTKQALTMHNRHHHPSLIFQDIAEALPSSSTDPIPTPSTTERRINELKKEFLPKFTSLEIFAKTHSNLLSHEDNFNNLYSAFIKKLLDFQPEFFAKKGRRQRKFLPSDDAKKKVLREKFERKRAQFYYYNDQKRLLRQVEAFESPPDNDDAFFSADEMHSHFSNLLSQDKACTVDPEYLPPPLSQDELMAFNLDVESYEKSNTSLSPELIFPLFRKFTNRTSPGIDGVRPSTFKKYDPEAIILSKIFSVVYFSNVFPSSWCTAKVSLLSKPGKDSTKLENRRPIAIFTYLRRLFSKVLVTQVKPFVDDLLHPSQRGFQPGRGCVENIFKLRQLIEFTKNHNKSCVIISFDARNAFNSVSRAHRNQCLNDLPLPPQLKLAFINLFENSNIKIQHGSQITKTIEVKDGVPQGDPASPLVFNLCINFILQHLHNHFQGRGIRLSENYECIALGFADDLVITANNVNDALDMALKLSFLLNQIGLELNLSKCKAFAININNPPIILSPDLPISFMDHSDALKYLGAQICLEDRPYKNIRDVVSKRCQALLNFPHLHNWQKLSFCRMFITSLLTYPAQTDFNLQISHAPDILQAVRAINLLLESVFQLRGIHRSFVYGSKAGGLGFPNPKWIIDGNAAVSAGYFLLSPDLQIQALISANSVNLNSLLHELSVDLVCSINPEINDCNLLVEQVVNVCTDNKKMKCKRITENLQDASCRAWNTTTSGIIAGSKIFQQSRYSSAFVRFPERFSNAEFHAAIRLRAGVADLRYMTHLSRKHGSDRCRLCHVSKETLGHVMGGCISLNGLVTYRHDFVLRLLFDQLTIKNPSWTFTLEPKLHANVVHHKPDIIASHTISHSTIIFSDYIRLNNPKRTIC

SEQ ID NO: 31482 - protein, 1210 aa, Chrysotoxum bicinctum
MMERRIMNLRQMRLPEEGAPTGPGTGDNASGQRPGNVRRPGRGIQQLESQPIRQRSQPTPTAPPTESAAQVQPELTQAGLPRRRMQWTRSMNEHVVRSYFKATELETLQIGYRQKLFHEFLIKYPELSYISEQRIADQYRAIRRLNLIPIARINEMKEEVRRDIEQSDQQNREPEETNHQEINTIEIQHQQQQRIEAIGPATSPGGHSLTSYLRNLMETALVEYEETNPTFRPKIPKINSSKKMAEIINLLNNIILPNHIHRATNLMEFHLLLYCSSVVVVKALGLKLLPVKESPQRRREKPSPKWEIRLNRKIDKLRLNIGQLTEYVRGIRSKKLEKSVRKLLRSYRIHSRYDEPNIAAEECLDTMKQKLSVISARLRKYKTSDRRKKSNLLFSKNERIFYRKLKEDSLNPNAKYPSQQEVKSFWEEQLSVTREFNPNGCWLQTEMQKMQLVVQQQQESFTVDEIGTIIKALHNWKAPGPDNLQNFWLKKFTCTWEKLTQLINEIMDEPHKMPEFLLQGVTYLLPKDMTNSHDPMKYRPITCLPTLYKIITSCIAKKVGEHCESNNIIAPQQNGCRKGSKGCKEQLIIDSVVCNQAATKNRNLYTAYIDYKKAFDSVPHDWLLKVLEVYKIDPKYITYLKHTMGNWNTEICLNTSNGTIKTSKIKIRRGIFQGDSFSPMWFILAMNPLSSSLNSTGYGFSVKEGPRELFRLSHLLYMDDIKIYAAKPSQLEHLLKIIETFSNDICMDFGLDKCRTLRTIRGKLQPEEFQLQDGQSIQAMIENETYKYLGINQARNIPHTAVKDEITKEFSRRVQLLSKSALKSKFLFKALNTYAIPVLSYSFGIIRWTPTDVEALERRIRTTLSKERKHHPKSAIERMALPRYMGGRGLTDIGNLLEGQKISLREYFYRKSETPDLHRAVCLADENSPLKLGQPDYQSREVTNREKIDQWMSKPLHGKHINAISQANVDIKASNYWLIAGTMFPETEGHMLAIQDQVIPTRNYLKRVIADATVLDDSCRYGCDAIENIHHIISGCTHFSGTEYKQRHDTIAKIVHQELACKHSLKREKEAHYLYKPTSVLEDESFRLYWDRTVLTNQSVPYNRPDIVFFDKKASKVALIDIAVPNTKALREKYTEKISKYAQLIEPIKRQWKVKDVKVIPLIVSSTAVIPHNLFDGLEILGLDKDLYKDFQKSVVLASTRIVRRFMDAN

SEQ ID NO: 31483 - protein, 1212 aa, Chrysotoxum bicinctum
MMERRIMNLRQMRLPEEGAPTGAGPGTGDNASGQRPGNVRRPGRGIQQLESQPIRQRSQPTPTAPPTESAAQVQPELTQAGLPRRRMQWTRSMNEHVVRSYFKATELETLQVGYRQKLFHEFLIKYPELSNISEQRIADQYRAIRRLNLIPIARINEMKEEVRRDIEQSDQQNREPEETNHQEINTIEVQHQQQQRIEAIGPAISPGGHSLTSYLRNLMETALVEYEETNPTFRPKIPKINSSKKMAEIINLLNNIILPNHIHRATNLMEFHLLLYCSSVVVVKALGLKLLPVKESPQRRREKPSPKWEIRLNRKIDKLRLNIGQLTEYVRGMRSKKLEKSVRKLLRSYRIHSRYDEQNIAAEECLDTMKQKLSVISARLRKYKTSDRRKKSNLLFSQNERIFYRKLKEDSLNPNAKYPSQQEVQSFWEEQLSVTREFNPNGCWLQTEMQKMQLVVQQQQEGFTVDEIGTIIKALHNWKAPGPDNLQNFWLKKFTCTWEKLTQLINEIMDEPHKMPEFLLQGVTYLLPKDMTNSHDPTKYRPITCLPTLYKIITSCIAKKVGEHCESNNIIAPQQNGCRKGSKGCKEQLIIDSVVCNQAATKNRNLYTAYIDYKKAFDSVPHNWLLKVLEVYKIDPKYITYLKHTMGNWNTEICLNTSNGTIKTSKIKIRRGIFQGDSFSPMWFILAMNPLSSSLNSTGYGFSVKEGPRELFRLSHLLYMDDIKIYAAKPSQLEHLLKIIETFSNDICMDFGLDKCRTLRTIRGKLQPEEFQLQDGQSIQAMIENETYKYLGINQARNIPHTAVKDEITKEFSRRVQLLSKSALKSKFLFKALNTYAIPVLSYSFGIIRWTPTDVEALERRIRTTLSKERKHHPKSAIERMALPRYMGGRGLTDIGNLLEGQKISLREYFYRKSETSDLHRAVCLADENSPLKLGQPDYQSREVTNREKIDQWMSKPLHGKHINAISQANVDIKASNYWLIAGTMFPETEGHMLAIQDQVIPTRNYLKRVIGDATVLDDSCRYGCDAIENIHHIISGCTHFSGTEYKQRHDTIAKIVHQELACKYSLKREKEAHYLYKPTSVLEDESFRLYWDRTVLTNQSVPYNRPDIVFFDKKASTVALIDIAVPNTKALQEKYTEKISKYAQLIEPIKRQWKVKDVKVIPLIVSSTAVIPHNLFDGLEILGLDKDLYKDFQKSVVLASTRIVRRFMDAN

SEQ ID NO: 31484 - protein, 926 aa, Cantharis rustica
MTHIPPPILTCPVEPDVRAPENIPADPSVGGPCDPMSAVRDENLNEEAAAPSEEIATTPILTSNLTCSDEIPWWEIFRREAADIEQVLPFAVELWGILERRLPTPGDLDAAVDAVTLACKADTEPSRRPVKPGRENFSKRTLERRTRFAKTQELFKRNPSQLANFVMGGNVQELTGEKKPGLPTEGIRKIYGELGGGNTDTGPLVVAGNDEKVSLITVREVNQKIQRLKNRGAAGPDGITKMGLRKIGTANALALVNNTIILTGHYPSAWRKNRTTMIPKEGKDPASAENWRPLTISSVMARLLSSCLKSRLELYANTSVRQRSFVEGNGCFLNATLLDEAIRSGKKTRLCAAKLDLTKAFDTIPDPAIAESLQRVGAPKALSNVVLEMYCGATTRITGTNITIPLGREVKQGDPLSPLLFNLVIDPTVAALESMGGFQIVAAKSLSILDFADEPLLAETPEKLQSMLDVTSTSLDGIVLRISVRKSAVFSLRGIRKTWVAEPITSTIQGTELRNYRVDERFDYLGVSFTLFEGLSNREHLERLKKATTLCGLLPLKPEQKASLLNQYILPKTLHRFTIDSPSKTSLVNIDDAIRGACKKFLHLHDSTTNHLFYTRKRDGGLGFPRLAHLVSLNAVKALSRMANDRDPLVRELAVRGDFGARIRRHAAQLNIRMPASRLDILQKKIGLKREEYSKWAQQESQGKGVTNFRDNPVANDWLLNGAALRSGELIDTLKMRTNTYGVREALKRAKLHHLDPLCRHCHLKIETLGHVLGECIAGRGPRIRRHNIIVAEIAKQVENKYTVYEEQSYRVADGALMRPDLVIKDANRAYIIDVTVRYETDSSMRKAADEKVRKYSALIPILRDAFKANTVEVVPIVFGSRGAVPFSTLNSLKNLKIPRKKAINFVYSILRSSVAIARAHIDYVS

SEQ ID NO: 31485 - protein, 761 aa, Cantharis rustica
MGGNVHELTGEKKPGLPTEGLRKIYGELWGGGNTDTGPLVVSGNDEKVSLITVREVTYKIQRLKNRGAAGPDGITKMGLRKIGTASALALVYNVIILTGHYPSACRRNRTTMIPKEGKDPASAENWRPLTISSVMARLLSSCLKSRLELANTSVRQRGFVEGNGCFLNATLLDEAIRRGKKTRLCAAQLDLTKAFDTIPHPAIAESLQRVGASKALSNVVLEMYYGATTRITGTNITIPLGRGVKQGDPLSPLLFNLVIDPTVAALESMGGFQIVAAKSLSILAFADDLLLLAETPEKLQSMLDVTSTSLDGIGLGISVKKSAVFSLRGTRKTWVAEPIAATIQGTKLRNYGVEERFDYLGVSFTLFEGLSNREHLERLKKAATLCGLLPLKPGQKACLLNQHILPKTLHRFTIDSPSKTSLVAVDDAIRGACKKFLHLHDCTTDHLFYARKRDGGLGFPRLAHLVSLNAVKALSRMANDRDPLVRELAVRGDFGARIRRHANQMNIRMPASRLDILQKKIGLKREEHSKWAQQESQGKGVSNFRDNPVANDWLLNGAALRSGELIDMLKMRTNTYGVREALKRAKLHHLDPLCRHCHLKIETLGHVLGECIAGKGPRIRRHNVIVAEIAKQVEGRYTVYEEQSYRVADGALMKPDLVIKDTNRAYIVDVTVRYETDSSLREAADEQIRKYSSLIPILRDAFKVNTVEVVPIVFGSRGAVPYSTLNSLKNLKIPRKKAIDFVYSILRSSVAIARAHIDYAN

SEQ ID NO: 31486 - protein, 1266 aa, Eurytoma brunniventris
MDREDSDLASEAEGSSFVSAGSSVAEIIANERGGATSGLGTPGSGVEVGGPTERLGSSVDDPRGVISVMCPFQDTEDCPLCRLRFSSMYEMEKHFRLHHPLTSVEWTCRVCNRRFKKVHGCRVHLALCKGQPAQPVGLTLRCSECDSSFRTQRGLSQHERHAHPSVRNAHRQEHAERVRGRAGRRNSVWTSEEMERLRQLNEVYRNERFPNVRLREFFPHRTLRQISDARTRLPPILAPNIVVEEEVRVEIDGTSDAEQASSAPAPEDTSSNRSSLGIEGLNPTPPRHTHSSDASNVLGTINSADQSAQNDQEGSSSNETGPGIPTISGVPPESSSPRNGAPGEPIRPAELPDWQEALITSFFEVRGLIPDSLRPGLIACYNNNIPGTVGEKLDRFIEGDLQNFLLGSSGGIERSTHHTRRRARRRNRRHPNRNQRRRYLYARCQDVFKNCPKKLVEVIEAGDLGLLGETQQLPSYHQVEAVYRELWSNEGDSHRAPPQSAQVVDDRILCRPFSIGEVREKILKLESSSAPGPDGIKKEHLRKAGVVPTLVMLFDLLLLYEHYPTSWKRNRTTLIPKVGRDKSDVRNWRPITIGSIIGRVFSSILDVRLRNCVQLNQRQRGFLSENGCRGNVALLEEGLRTAKSAGGGTFVVLDIHRAFDMVPHSVIRDGLVGKGIPVHFADFVCGMYRGCHTEIKVAEGRVVRVDLRRGVKQGDPLSPLLFDIVIDPLIEDIDNSGIGLELTDLLDVLHRETGGLAFADDLVLMAKTPAEAQRLLQLVSEYLSSIGMSLGVPKCSSFEIVSSGKTWYVRDPQLHIHGEAIKSVGPEEVLRYLGVVVGPWRGILRGSEVETINRFLSGLSRLPLKPMQKVDLLNTHILPKFVYSLSMTNPGSSVLKQIDREVRSYVKQFLHLVDSTTNHFFYASKSKGGLGLIKFEHTIPITVLRNGLKLKQSTDPISSAVGSNSRWNNILARSARAIRLNWPATLDEVEAAKVSLKLQNLKDWEKQLGQGQGVKYFRQDRTGNAWLSNYSLLKSSRQCDAIRLRTNTFGTRAVLSRFTPNMDVRCRRCGFERETLGHVLGSCIHTKPSRIHRHDEIKHLIANRLREAQPVMVEPWEAHPVMVEPTVSVGDRGAHPVMVEPREAHPVMVEPTISVGDSMFKPDLIVVNGDRALVVDVTVRYENQRYLHRAAADKVGKYQAILPSVKTMTRTSAAEVLAIVVGSRGCIPPATKASLIKLGINKKDWLTISLIALRSSIEIANRFIDD

SEQ ID NO: 31487 - protein, 894 aa, Ignelater luminosus
MILFEKRVDEWKAKFDNLLYNDEEFSHDVAEFGNFLVEVLDCLPGPKHPARKFYKARKMNGFNRNTETYKKSSNPERRSKRKKGQRKVEYKYQIVQYYYYNQRRKAVRRIYENNKQQRREIEPNEAYNFYKSKFEESNNHYRETYHEKITIEEKYHLNDLYIPEISVEDINWAINSIKVDTSPGPDRIIMRCIKNNKKIISILAKIGTIMIQNGYVPKSFKIARTVLIFTKGDKKDLTNWRPISICSLLRRIIEKIIDKQLRNYVHINQHQRGFMHIAGCHINNAIVENILENTKSNKKDLAMIFLDIEKAYDSIGHEHLKKVIASSGIPLKLQNLIINLHTNNVSYIDLGYCQTKPFKINKGVFQGAPLSPLLFNLCVNFIFDEISEFDVSNKYGFHLSNDSDICPVSIIGYAHDTLIVAKNIDAANELLVMTENKFHEIGLKVNHSKSSAIIIERGGLINKNLLTTSNNTIKSIDEGETIKYLGVTCSHTLILDTASSLKKIGQRLEILTKSNLLDPYQKLNIFNQYISPSLIYSLQTSPLEKLSKTFLNKIDNLIKSSIKEILQMPNDTPTNFLYSAKSVKGLEIFNCCWEAFIQQYNKFCILEISNCVFTQDSYEYKKRNCLKKLDIPDGNLNKIYQNKKPSKLIRTILRENEFKNWCNLPQKGKGVILYSQVKSSNRWIYNKHGLSNSEWIECLKMTCNVSAVRAVHGRSTHTYHCRHCNEFESLGHVLGYCDFGATARSRRHNEIRSVIARALKEKGFEVHEEIVGLSEKDSIRRIDIIAIDRIKNVAFIVDPTVRFESGLDQPKLVHDEKESIYKPTIPYYKDKFNVKDITIFGLLFGSRGTLTNSYINLRKYFNIPKCLDEEIILKILKSSVHILRNHLFGHRNVC

SEQ ID NO: 31488 - protein, 1136 aa, Androctonus mauritanicus
MTGPVSIPADVQERLKCAECDLLCKTERGLRTHWGHKHKSIEFRLRQPVQLEEPESSGNQDPGPSTSSESQPEQYACQNCDFVSKSRRGLGVHRQKKHLDAYNEELRVSTARPWSFEEYKVAAEIEAPLRLRYGAGVPIPNIQEIFQARFSTRAITQIQNLRKGNKRYKAILQERIEELRRQEEEVDGDDEEDSENTSLSSPNIAESSSSGESQESEESWASASEGEQPTTPSQQEETTGEEVPQDSPAQPEELTTALTEDVRKLADVLASSEEPFVPELTEIARDFLEGHDVEEALYGWVLSVARRKTEQVRERRPKGRKTKRRRRPRRKKRCHAPSRDRRHRRRQQYAKMQTLWRKDRSKAAKLALDGEVKGTLPSMKDMVDHWRPVLTRESEPAEVGPPTREADFMWLIDPVTVQEVETTKIPAASASGLDKLTFKQWRTIPSAATALFHNIIMAMGGFPASLLVSRTVFVPKKDQSKTPSDFRPISIASVCVRHLHKILVRRLLRTNIIDKRQRGLVDGCAENITVLSAIIADALANRRELHLLVTDIAKAFDSVSHHAIEAALVENNIPRPLVDYIITCYKRSTTVLQIAKETSDVIAVTKGVRQGDPLSSFIFAVVMDRIIAKVPNYIGYNLHGTNVNELLYADDEIKLASSVAGMQASIDITEGEAKTRGLTLKPEKCFAISYLPVGKQKKLKVSTAPTFQLSGGQKIRQLGPTELWTYLGVQFSSRGVRKPSRTLEEGLKNISTAPLKPQQRLQVLRTYLIPRYYHQLVLSRCTAKHLRALDRQVYTSVRKWLRLPVDVPLGYFHTPCRDGGLGLPSFRTTIPGLTLERLASLETSDAEASRAASRNPWVLRKKQWAADILANFNPPLLEVAARKTYWRDKLYGSTDGRELRESYKSTVSTSWIDKGCHQIPGRDYVQYHHVHVNALASRVRTSRGRRQHTNTMCRAGCLEEETTTHAIQRCFRTHGGRIERHHAVCKSVAEAMRDKGWAVSREVTVQGEHQTWRPDIIATREDQLVVIDPQIVSGVPDLNNTYQQKVAKYDAPEPKEAISRKFGIPTANIKVGAVTISWRGIWATRAVEFLKGTGVPQYVMEGMTTRVLQGSSTNWNRWNKMTTTLRGSAAPLRGVG

SEQ ID NO: 31489 - protein, 798 aa, Teleogryllus occipitalis
MKVKCARLRRYNEITKRKAQNAEFRFRQKEFLRKLNSHSNKQRVNINADFKTYSTNKWAKTSGFNKSGSWIKSIKKQHENLPQMNLKEITAKDIASAIGKTQNWKSPGPDRIQNFWLKYFTHAHESIAHCFTEVLNNPDKMPDYLSEGDTFLIFKKGNEQTPMNYRPITCLSTVYKLFTSVISEKIYLHCANNNIFEEEQKGCIKGAMGCKHQLIIDSVVLKQAQTKKRNLHICYIDYSQAFDSVPHKWLNEVLEIYKICPNVRNILQHLMNKWRTNVRFQGNILGKADVRKGIFQGDSLSALWFCLALNPLSTLLNNTKCGYRLNMKNTQRLTHLLYMNDLKLYAETHDKLESLISVAKMFSNDIGMKFGLDKCGIINIHKGNVQNTNQIFCDIKQIPPEETYRYLGNPQNHRLDHNRIKEELRIKYQERLTKLLNTYLSGGNLISAINTWAVPVLTYSFGIVKWTESDLEELDRSTRRLLHKFRCLHPNSSVKRLYLHRTMGGRGLVNIKTLCLRQEEKMRQVLLNSPDILMKLTVNEDRGFTPLNLHERNYDLNISTHQSNFNEWKQQEIHGRYPKLLFQEYVDRRSSVEWLLEKQIYPDTEGFIISIQDRVIKTRNYRKHCLKDGVVDKCRKCGAVGETIEHITAACSSLSDSAYLRRHNQVAKIVHRAIAIEHTLLDESTPQFYKYTPPPVLETSSTLLYWDRPVLTDRTVDYNRPDILLLDKKKKEGVIIDIAVPLSHNIKQKEQKKFRNMKTYELKYVWKLNATKIYPLVISAEGLVSKNVLKNLTELKLP

SEQ ID NO: 31490 - protein, 818 aa, Teleogryllus occipitalis
MKVKCARLRRYNEITKRKAQNAEFRFRQKEFLRKLNSDSNKQRVNINADFKSYWTNKWAKTGGFNESGSWIKSIKKQHENLPQMNLKEITAKDIASAIGKTQNWKSPGPDRIQNFWLKYFTHAHESIAHCFTEVLNNPDKMPDYLSEGDTFLIFKKGNEQTPMNYRPITCLSTVYKLFTSVISEKIYLHCVNDNIFEEEQKGCIKGAMGCKHQLIIDSVVLKQAQTKKRNLHICYIDYSQAFDSVPHKWLNEVLEIYKICPNVRNILQHLMNKWRTNVRFQGNILGKADVRKGVFQGDTLSALWFCLALNPLSTLLNNTKCDYRLNMKNTKRLTHLLYIDDLKLYAETHDKLESLISVAKMFSDDIGMKFGLDKCGIINIHKGNVQNTNQIVCDIKQIPPEGTYRYLGNPQNHRLGHNRIKEELRIKYQKRLTKLLNTYLSGGNLISAINTWAVPVLTYSFGIVKWTESDLEELDRSTRRLLHKFRCLHPNSSVKRLYLPRTMEGRGLVNIKTLCLRQEEKMRQVLLNSTDILMKLTVSEDRGFTPLNLHERNYDLNISTHQSNFNEWKQQEIHGRYPKLLFRDDVDRRSSVEWLLEFITEGLIMSIQDRVIKTRNYRKHCLKDVVDKCRKCGAVGETIEHITAACSSLSDSAYLGRHNQVAKIVHRAIAIEHKLLDESTPPFYKYTPPPVLETSSILLYWDRPVLTDRTVNYNRPDILLTDKKKKGVIIDIAVPLSHNIKQKETEKNSKYENLSYELKHVWKLNATKIYPLVISAEGQVSKNFLKNLTELKLPKNVLNMGQRAVLLQTAHIVRKFLS

SEQ ID NO: 31491 - protein, 770 aa, Tetramorium immigrans
MLIDDISEVQFPSRDTMIPFWEEVMSGKSDISPGLEVPKPTIKELWAPITAMEIKKARPPNTTSAGPDGLSARFLRKMPLEVLVRVLNIILWCGKTPSYLLESVTSLIPKKAKAATPADFRPITVSSVLVRTLHKVLATRMLGEIHLDQRQRAFRQTDGCADNVFLLDLILRYHHRHNKPLFMASIDIAKAFDSVSHKAIRETLEVMGLPAPMTKYIMDIYDRSVTRLCCDSWSSECIKPTCGVKQGDPMSPIIFNMIMDRLFRKLPDEIGTRIGDLNINATAFADDLVLFASTPVGLQKCLRIAGDFLKRCGLQINAAKSMTVALRNVPHEKKTVINRETVFEYDGRILPALRRSDEWKYLGIPFTPEGRMKLDILPKLVKSLNRLTKAPLKPQQRLFALRTVVIPALYHQLELGCVNISVLRKSDRALRNAVRRWLAMPADVPNAYIHASVRNGGLGIASLRWSTPIRRLNRLRKLPMADSQRSGAPGLFLRTEIDRCSTRLRDDNQQLLTIADVNVRWAKLLYGKVDGKGLRESKAKVPQQHVWIQDGTKFLSGKDFLQSCKLRINALPTKSRTARGRPKDRHCRAGCNRAETLNHVLQQCHRTHGFRIRRHDAIVSYMSRALEVRGYEVRVEPRIETEAGIRKPDIVAKLGVTAVVVDGQVVNDQINLDGAHQNKIDYYRDLEDRIKEMLNVQEIKFTSLTLSWRGIWSRQSAHDLLDLGLLRKKDIKVLSSRAIIGGLAIFHVFNKSTAVMGHRWRGDGGRVGVG

SEQ ID NO: 31492 - protein, 1013 aa, Tetramorium simillimum
MHINSNPGPSGLRGPVTRNRRIASAAPVGRDPDCRCLFPGCGRTFDSLIGRGVHHRAAHPDWYDSQQNTVAVKARWTDEETRLLARREVVLTRRGERFLNQVLTEEFPERTLESIKGKRRQEGYRRLVRELLAEASDDEEDDVVIVDEVRHTETPDEYRQAFAEFISSLPMPRRNDFLMAELLGICSSIRNKERDAIVEDLTLYLRRIFPVKTRNNTNKSRPVAQPISKKQARRAEYAKTQDLWRKNRNKCIRMLLDDVSEVQAPPKDVMVPFWEEIMRGHSNASPGQGSSSPTLKELWAPITMREIIRARPPNTTSSGPDGLTARLLRKVPMEVLIRVLNIILWCGKAPTYLLESITTLIPKKAKARMPADFRPITVSSVLIRTLHKILATRMMNAIQLDQRQRAFRPTDGCADNVFLLDLILRYHHKHKKPLFMASIDIAKAFDSVSHRAINETLQMMGLPTPMVRYISDIYDRSSTRLCCDSWMSDRIKPSCGVKQGDPMSPMIFNMIMDRLFRKLPDEIGARMGDLNINATGFADDLLLFASTPMGLQKSLNVAADFLGKCGLNINATKSMTVSLRNVPHEKKTVIDGETVFECGGRVLPALRRSSEWIYLGIPFTPEGRMKTDVHPKLVVSLEKLTKSPLKPQQRLYALRTMVIPALYHQLELGNVNISVLRKCDRTLRHAVRKWLALPTDVPNAYVHANVRVGGLGIASLRWSAPMRRLNRLKKLPIADLQRAAIPGSFWRAEIEKCSIRLREGDQQLSTLTEISERWAKLLHEKIDGKGLRESAKVPQQHAWIHEATRFLSGRDFLQSCKFRINAMPTRSRTARGRPKERCCRAGCNKAETLNHVLQQCHRTHGFRVRRHDALISYMSRALEVRGYEVRVEPRIETEMGVRKPDIVAKLGETAIVIDGQVVNDQIDLDAAHQRKADYYRNLEGRIKERFEVENVTFTSLTLSWRGIWSQQSAQDLLNLNLIRKKDIKVMSSRTIIGGLTIFHIFNKSTAVKGLVRR

SEQ ID NO: 31493 - protein, 937 aa, Pogonomyrmex californicus
MNDNPGPSGLRGPATRSRQMSSAVPVRSNSGIACEFPGCGRVFENKIGRGVHCRSAHPDWFDLQQNTVAVKARWTDEETRLLARREAELSMQGERFLNQALLRDFPERTLEGIKGKRKQQKYRTIVSEILASLSADSDGESHVTLDPLPPDEYRIRIREFIEALPAPERSDFRIVDLLSICDSLSRCSCDDILQQLTLYLRSVFPNKKPKTAKQSHQVAQTLSRKQARRAEYARTQDLWRKNRSKCLRMLLDDVADVHAPPRDVMVPFWKEVMRGRSDISPGPGQPKPVVRELWAPISALEIKKARPPSTTSAGPDGLSARFLRRVPMEVLVRVFNIILWCGRSPTYLLESLTTLIPKKAKASDPSDFRPITVSSVLVRTLHKVLASRMLHGVHLDPRQRAFRPTDGCSDNVFLLDLVLRYHHRHNKPLFIASVDIAKAFDSVSHGTIRDTLGNMGLPMPMIEYIMDVYKRSTTALCCDSWRSELISPACGVKQGDPMSPIIFNMIMDRLLTKLPDDIGARIGDMRINAAAFADDLLLFASTPMGLQKILNISIDYLKSCGLQINAAKSMTVSLRNVPHEKKTIIDKDTVFECDGGMLPSLRRSDQWKYLGVPFTPEGRLRMDIVPGLKSSLDKLTAAPLKPQQRLFALRTMVIPALYHQLELGNINISILRKSDRVVRAAVRKWLALPSDVPNAYIHANVKSGGLGIASLRWTAPMRRLNRLRRLPVADLQTGQIPGSFWRAEIEKCNTRLKDGSQRLQTLSDIDRRWAENLYSKVDGAGLRESAKVQQQHLWVSEGTRLLSGKDFLQSCKMRINALPTKSRTARGRPKDRFCRAGCNRAETLNHILQQCHRTHGFRIRRHDAVASYIARGLEVRGFSVSVEPRLEVESVVRKPDIIAKQGTTAVVLDAQIVNDQIDLDAAHHRKVEYYQSLEEQV

SEQ ID NO: 31494 - protein, 932 aa, Tetramorium simillimum
MDNNNNPGPSGLRGPTVRNRQVALAAPAERELEFRCLFPGCDRTFGTVIGRGVHQRVAHPDWNDARQNTVAIRARWTDEETRLLARREVKMIRRGERFVNQALRDEFPERTLEGIKGKRRQEGYRAIVRELLAEDSDDNDVIIVDEIQPTRVPDEYERAIEEFLASLPAPRNNEFSMVDLLEICRSLRNKDRETVAEELALYLRRVFPIQTRRSKNKRRPDTRPASKKQARRADYARTQDLWRKNRSKCIRMLLDDISEVQTPPKEVMVPFWEEVMKGHSDVSPGPERSDPVIKELWAPITSLEVKKARPPNTTSAGPDGLSARLLRGVPIEVLVRVLNIIMWCGKAPTHLLESVTTLIPKKAKARMPGDFRPITVSSVMVRTLHRILASRMLMAIHLDQRQRAFRPTDGCADNVFLLDLILRYHHKRKKPLFMASIDIAKAFDSVTHKAIEETLRVKGLPTPMIKYIVDVYTRSSTRLYCSSWTSERINPTCGVKQGDPMSPMIFNLIMDRLFKRLPEEIGVRIGDLNINATGFADDLLLFASTPMGLQKSLNIATNFLKKCGLNINAAKSMTVALRNVPHEKKTVIDRETVFECEGRVLPALKRSDEWRYLGIPFTPEGRMKMDVQPRLTESLERLTKAPLKPQQRLFALRTMVIPALYHQLELGNVNVSFLRKGDRALRHAVRKWLGLPSDVPNAYIHANVRDGGLGIASLRWNAPVRRLNRLKKLPIAELQRTGAPGTFWREEIERCITRLRDGDQQLATLADVGKRWARQLHEKVDGKGLRESAKVPQQHVWIHEATRFLSGRDFLRSCKFRINAMPTRSRTARGRPKERCCRAGCNGPETLNHILQQCHRTHGFRVRRHDALVSYMCRALEIRGYEVRVEPRFATEAGVRKPDVVAKLGRTAIVLDGQVVNDQIDLDAAHQHKVEY

SEQ ID NO: 31495 - protein, 1043 aa, Tetramorium bicarinatum
MAERCYGEPGPRGLPTPLAQLSAGPNNRKQPRMDNSSNPGPSGLRGPVTRSRQVASAAPAGQDLEHACLFPGCNRTFGTTTGRGVHHRVAHPDWYDARQNVVAVKARWTEEETRLLARHESVLIRQGVRFLNQALSNEFPGRTFDSIKSKRKQVGYQRLVQEMLAEAPDDEEERPEDEVQDIGTPDDCERTIAEFITSLPVPSHNNFAIAELLRICRSIPNNNRDAVFEELTLYLRRIFPARTREVRGQTDPEDRRMSKKQKRRAEYAKTQDLWRKNRSKCIRMLLDDISDVQAPPKEVMVPFWEEVMRGNHDTSPGLEGSSPVVRELWAPITVMEIKRAYPPNTTSAGPDGLSARFLRKVPMDVLVRILNLILWCGKAPQRLLESVTTLIPKKARAATPAEFRPITVSSVLIRTLHKVLATRMLGAIHLDQRQRAFRPTDGCADNVFLLDLILRYHHKNKKPLFIASIDIAKAFDSVSHKAIKETLRIKGLPAPMVNYISNVYEKSSTRLSCNPWISESIKPTCGVKQGDPMSPIIFNLIMDRLFGRLPEEIGARIGDLNVNATAFADDLLLFASTPIGLQKSLKITTDFLKKCGLQINAAKSMTVALRNVPHEKKTVIDRETVFECDGRILPALRRSDEWWYLGIPFTPEGRVRLDIQPRLEESLGKLAKAPLKPQQRLFALRTMVIPALYHQLELGNVNISILRKGDRLIRNAVRKWLGMPTDVPNAYIHASIRDGGLGIASLRWNAPMRRLNRLRRLPIANSQRMGAPGSFWKAEIDRCNSRLSDDGQQLLTLTDINKRWAKLLYEKIDGVGLRESARVPQQHVWVHEGTKFLSGRDFLQSCKFRINAMPTRSRTARGRPKERYCRAGCNNAETLNHVLQQCHRTHGHRVRRHDALVSYVSRAIEVRGYEVRVEPRIVTDAGVRKPDIVAKLGTEAIVLDGQVVNDQIDLNAAHLKKIRYYQDMEDRIKENFGVQTVRFTSITLSWRGVWSQQSANDLLNLNLIRKKDIKVMSSRTIIGGLAIFHVFNKSTAVMGRVGR

SEQ ID NO: 31496 - protein, 985 aa, Wasmannia auropunctata
MPLSAPDGQDPEDYACEYPGCDRSFKTKTGRGVHYRKSHPDWYDQRQNTVAVKARWSEEETRMLARRESELIHQGEKFLNQELLRDFPDRSLESIKGKRKQQAYRAIVREMLDQIPEEDEAESSDHRPDDSADEYRGAIKQYLDSLSTPQRNDFSMAELLRICRSLSSGDEDAVLDSLSLYIGRVFPKKDRRERREATPEPAAVSGKQKRRAEYARTQDLWRKNRSKCLRMLLDDVTEVRYPPKDVMAPFWGEVMQGHADDSPGYKEPRPIVKELWAPITSLEIKRALPPNTTSSGPDGLSARLLRGVPSEVLVRILNIIVWCGKAPSRLLESLTTLIPKKSGAKEPSDFRPITVSSVLIRTLHKILASRMLRAISLDNRQRAFRPVDGCADNVFLLDLILRYHHRQKKPLFMASVDIAKAFDSVSHKTIRETLQVMGLPSPMVEYIADVYKRSTTRLYCDSWTSEGIKPTCGVKQGDPMSPIIFNMIMERLLAQLPEDIGVRIGGMTINAAMFADDMLLFASTPMGLQKCLNVSTNYLKKCGLHINATKSMTVALRNVPHEKKTVIDRDTVFECEGRMLPALKRSDEWKYLGIPFTPEGRIKVDVFLKLKASLTRLTKAPLRPQQRLFALRTMVIPALYHQLELGSVNISVLRKGDRLLRAAVRAWLALPTDVPNAYIHANIRDGGLGVASLRWCAPARRLGRLKRLSLTELLAGVEPGAFWRAEIERCHERLKDGGQQMKSQADIEKRWANILHEKIDGRGLKESAKVPQQHTWIQDGTRFLSGKDFLQSCKLRINALPTRSRTARGRPKERFCRAGCHKTETLNHILQQCHRTHGFRIRRHDAMMSYACRALETCGYQVSVEPHLQTEAGLRKPDVIAKLGETAIVLDGQVVGDQVNLDVAHQRKIDYYRNIENVVKERFGVRTVIFTSLTLSWRGIWSRESVAHLLGLGIIRIKDIKVLSSRAIIGGLAMFHVFNRSTAVR

SEQ ID NO: 31497 - protein, 1150 aa, Magicicada septendecim
MNANDNNGDEMVHELSVVGVPWAASQCRLCGNWYTLAKDYVRHYEDAHPVASLRFKCDRCGSLFARWHGACVHYAKCRGPVASPPRGFPCSQCERRFPTQRGLTLHRNHQHPVERNAERADVRPARVPAVRASSVWSEGEDRVLKEKYLEFAARGKKQGYSLFIATYLPLKTDKQIRDRVRTLKGHGLLPGDPRPPLRADGAADGARPVGGPLVENLGPDIVVEEGVPEAPIPPEQGTAVGPVEEAEPPHQLDDGVGEVPALDDGVAPLVEVVEDVAARPIEEAPWVMYLRGLDVGGLPLAQQIVGLIDHINGETLDSIVTQLHADLVQLGPERGAAPNRGGRPGRRAERTRRRVRIYAKTQELYRRNPSRLAELVLKDNLGDLLEEGDKPNPPVEAVAYFQDLWGTAQPCGPDLPVVEGDDRDVPFITLGEVRAKIRRLKAGGAPGPDGVVKGGLLQYRGIAEVLTALFNVALFGGVYPSPWKLHRTTLIPKRGKDLSRPENWRPITIAPLLARLFSGLVESRLTTFTTLSAAQRGFRPGLGCHTNCVVLDELIRLGKKAELVGVLLDVAKAFDTVTHGAIQMALRRQRVPPLLCRLVQAMYEGATTRLGSFGVDVAIRRGVKQGDPMSPLLFNLVLDPLLQQLQNTEYGFGLGEGRLAAMAYADDVAVFSSSVESMGRMLELASDYLDSAGMALSVGKCVAFHLERRGDAWVSLPVQLAVRGGALRSLGVHEPFQYLGLTYTLSRGFYNKTHLGTLMDSVRRVRRLSLKPQQKVVLAMQYVVPAFAHRMTIDLPSTTALKNVDRALRGEIKKMLHLPQSVTDCVFYARKRDGGLGFPNLATQIRVCGLRADLKLVNSGDPLVRCLAEAGGWAARLENLARQLDLGWPCDMQAVEGRRRELKLSVTGRWAELSSQGVGVNWFANDPHGNCWLLEPMMLRPGQFIDALKLRTNTFGTRVALGRELAEPDVLCRRCRLKPETLGHVIGECVAGRRARIERHNWLVGRIAERCRQNALEVCREQSFTLPDGTTLRPDLVIKHQETAAVVEVTVPFENKTSLQDAAYTKVSKYLPALPTIQEQLHATVGAVIPVVVGARGALPRFTVTALRKLGLGDRVSLLDIALTALRTSIDIARCHMDYARRGRPGGDPP

SEQ ID NO: 31498 - protein, 1221 aa, Magicicada septendecula
MLLACRQQQGACQWALEGCILHPTLTTYRGLTPLVREHLYSSAVQIIEPRLPGGIPVPPPGRIDLERDDLRPDNPNNNDEEGDAGLSVVGVPWNVSQCRLCGNWYTLAKDFIRHYEDAHPATSLRFRCDRCRSLFARWHGTCVHHAKCRGHVASPPRGLECPNCERRFPTQRGLTLHRNHQHPVERNAERAADRPARVRGIRASSVWTEGEDRVLIEKYVEFTSGGRKQGYSLFVQTFLPLKTDKQIRDRARTLKGHGLLPGVPRPPVIPDRVVEEAPPVEEPLVENLGPAVIMEEGVPEAPLPPEQGTAVGPVDEAEPPNQLADMVGEVPTPDEGTIEFVERVEDVADRPIEEAPWVLYLRDLDVGGLPLAQRIIALIGDINERSLNEIVNLLHADLVQLGPERGAAPNRGGKPGRRAERTRRRIRVYARTQELYRRNPSRLAELVLNNNIGDLLEEGDKPNPPVEAVPYYQDLWGTAQPCRLGLPLPIQDDRDVPFITLGEVKAKIRRLKAGGAPGPDGVTKSGVLNYRGIAEVLTALFNVALFGEVYPSPWKVHRTTLIPKRGKDPSRPENWRPITIAPLLARLFSGLVETRLSSFTTLSTAQRGFRPGLGCHTNCVVLDELIRLGKKAELVGVLLDVAKAFDTVTHEAIQVALRRQRVPNLLCRLVQKMYDGASTRLGSFGVDAALHRGVKQGDPLSPLLFNLVLDPLLQQLQETDYGFGLGEGRLAAMAYADDVAIFSPSEESMNRMLNLTSEYLDSVGMTLSVRKCVSFHLKQRGDAWVSLPVQLAVRGEPLRSLGVHEPFPYLGLTYTLSRGFYNKFHLGTLMDSVRRVRRLSLKPQQKVVLAMQYVVPSFAHRMTIDLPSANALKNVDRALRGEIKRILHLPQSVTDCVFYARKRDGGLGFPNLATQIRVCGLRAGLKLTSSEDPLVQSLAEAGGWAARLERLARQLDLGWPCDMQAVEERRRDLKLSVWGRWAELSSQGVGVNWFANDPHGNCWLLDPMLLRPGQFIDALKLRTNTFGTKVALGRELAEPDVMCRRCRLKPETLGHVIGECIAGKRARIERHNWLVGKIAERCRSNGVDVFREQAFTLPDGTTLRPDLVIKHRETAAVVEITLPFENKDSLQTAAYTKVSKYLPALPTIQEQLATTVGAVIPVVVGARGALPRFTVTALKKLGLGDRVSLTDIVLTALRTSIDIARCHMDYVRRGRPGGDPP

SEQ ID NO: 31499 - protein, 1386 aa, Curetis bulis
MEKRINHRYNLRSLPGGYRQGTSGADAGCGSMQAIGDKELSRRTLVGNEPEDITADEHHHLSLASSPSPYGSLESSNSSYHSWHDQQTSESSSFTSSPDDVVQVAKAVNPAPTFDVKQARKKWSPDMNEFLLRTYLYITHLETNIKGYLPILHSQFIDKYSDMKVSRQRVGDQRRAIIKNKLLTQEVIDKIYKEVQESLQTSQNSTDQPNYHNAQNQHRLKWTSEHNESIMRIYYKITNLERNKSAYRQVLHQSFIEKFPQFSHVTEQRIADQRRIIVTKRYISEDKLNDIKKQVEAEIQESEIQIQTQPDNNQQNININNESLNIIENDELPFHPNNNIVLTNIERKEDIDILFNSALDYYKYISPNQRNRIPKQKGSKNFNLIIEYINNIIIPENTSVNSDFNHLHCVIYCAAWTAAKANGAKLHIPHTDKNFSSHDKFKPKWQIRLEKKITNLRKSIGRLTQFLKGNRNRKLITNIEEICRQNRLHTIHEDLNKHPEEVLDTLKQKLTIASCRLKRYKKCTQRKKQNSLFNHNEKQFYSTLKSNINTNEQQCNGSVPDIKVIRQFWSEIWETSVEHNKDCYWIDEEKDKFNNIPEMQFELINIEILHNVIKKLHNWKSPGTDHIHNYWYKKFTQTHRYILQHINSFIQNPDSLPSFVTEGVTFMLAKDLQNTDNPAKYRPITCLQNIYKIITSCLTQYIYNHIDNNNIMSEQQKGCKRFSQGCKEQLLIDSVILGEVQKNKLDLYSTYIDYQKAFDSVPHSWLLEILNIYKIHPLIINFLQTTMTKWTTKIKLRTNSTYIESDLIKIRRGIFQGDTLSPLWFCLALNPLSNHLNSVNLGYRFNIDVQATSKINHLMYMDDIKLFGKDNTELHTLIDITYNFSIDIRMKFGIDKCKINSVKSGEYVNCSHSLNDGEDIISLDINNSYKYLGYQQSKLVHHKNIKMDLKQQYQQRLNAILKTQLNSRNMVKAINSYAIPILTYSFGVIKWSKTDISSLQRDMRVKLTKFRKHHPKSCIQRLTIPRLEGGRGIVDIQNLYNTQISNLKKYFEKKAEQLHLYSIINNSDKKYTPLNLSIPLEQITTTIQTKSKQAKIDEWNQKALHGRHRHDLEETFVDKKASNAWLDKGELFPETEGFMVAIQDQVIETRNYKKFIMKIQNLGTDKCRLCNTSSETIQHITGACNKIAQTDYKYRHDQVANIIHQRLSIKHKLGETKGITEDQTDICPLTKNKIHSYNLPYYKYIPPSVIENKEYKLYFDRAILTDRTVHYNRPDIVLVDKLNKHTFLIDIAIPNTNNLQKTISEKLRKYTELQEEVKRMWHMKAVTIIPIVISATGVVPKLLFDSLRSLGLPKNTFINLQKATILNTCRIVRKFLQLDSNTSATQ

SEQ ID NO: 31500 - protein, 1410 aa, Emesis temesa
MEATRKKRKYIPQAGTYAQCNGESRPELFSLGSSTYSGESNVSQPSTQKYNLRPRTSNGRVISKMHIINQKPLSHIVSSSKLQSSPLLSQSQSPSSLQSQTHPLKIVEPPQSPSFDNFSLGTLFESSRSSLHSFETSLHNSLTTSTSSSLISNVVAPQTNVDYMAPTSDKHSARKKWTSEMNTFIMRSYFILTNMEKDLTGYLSQLHRLFLDRFPNMNVSKQRVGDQRRAIIRNKLLSLEEIANIKLQAVDERTTNNTESLMTAPRANTTRRKWSNDINEAIIRTYLEVTEMEKNKTAYRKKLHVRIIGDHPEFAEVSEQRIADQRRIIVLNKLISEDRLQEIKNEVARMIADKQIETSDAINSVHITLNKSAENTENCTEVISHEYENFERNSVNVNDETDYSSLSVSLIRIFKETYERFKHTSPTNRPFIPKQKSSKKFKHIIQCINTEIIPSFIHADQHYNETNLIIYCAAYTAAIANGSNIEDSPPNIVFKNKLPPWQHRLNKRIQMLRKEIGRMTQFMMGNRNSKVTSSVNSIREKYKNHATHDDNNFTDLQFLDTLKQKLCVTASRLKRYTNCTLRKKQNSQFNNSEKQFYRQLKTSHMVTPINNSLTLNPQKTYEYWNNIWANPVIHNDTAPWIETEINTCFGIPPMEFKHIPVDVFKIALYRAHNWKAPGSDNIQNFWYKKFTSLHSILYNHINDFVSQPHTMPEFITEGKTYLIPKGKISDKPEQYRPITCLQTMYKLITSCLTEIIYEHISSKNILTEEQKGCCKNSRGCKEQLIIDSVVMKQALNNKKDISTMYIDYQKAFDSIPHTWLLKALNIYKIHPDIIAFLKNAMDHWKTQIKLENSLDQVSFTIPIKRGIFQGDSLSPLWFCLSLNPLSKMLRASPAGFPIRYGTRSIKLSHLLYMDDIKLYSNSTQSLHTLADITQLFSHDINMVFGIDKCKTLTVKRGNIEKNRYKLISGEIIEAMDLNNSYKYLGMQQARQIEQKNIKLDISKEFKIRLNEILKTSLVSKNIIKAINTYVVPVLTYTFGVIKWSRTDLQKFQRIISTSLTQHRKHHPKSCTQRLTLPRELGGRGLIDIQNLHNKQITNLRNFFFEKATLSDIHYAIVQSDTKLTPLNLQNNNPQPNEIITDINQKLAAWKQKSLHGRHLNELLKEHVDKKASNIWLQKGQLFPETEAFMLAIQDQVVNTLNYQKYITNTLGANNDTCRRCQNGSETIQHITGSCKAIAQTDYKHRHDQVGAIIHQYLAYKYKLIKNKTPYYKYKPEAVLENKEYRLYWDRTIMTDKTIHYNRPDITIFAKNDKTVYFIDVSICNTHNLQLNFTEKISKYTELSIEVQTQWGVKTVKTIPITISTTGVIPKNLHSSLRYLNIPPGIYIQLQKAVILNTCRIVRKFLSGSFN

SEQ ID NO: 31501 - protein, 1412 aa, Emesis brimo
MEATRKKRKYIPQAGTNAQCDGESRPELFSLGSSTYSGESNVSQPSTQKYNLRPRTSDGRVINKMHIINKKPSPNIITSSKLQFSPLPSQPQSPSSLHSVSQTQPLTIVVPSQSPSLDNFSFGTLFESSRSSLNSYETSFHNSLTTSTSSSLISDVVTPETNVDYLAPTSGQRSARKKWTSEMNTFIMRSYFILTNMEKDLTGYLPQLHRQFIERFPNMNVSKQRVSDQRRAIIRNKLLALEEIANIKLQAAGEKTTNNTESLTTAPRTNATRRKWSNEINEAIIRTYLEVTEMGKNKTAYRKKLHARIIEDHPEFADVSEQRIADQRRVIVLNKLISEGRLQEIENEVAKMIADKQIETSDAIYSVHVSLNKSAENPANCTDVISREYENFERNSVNVNDGTDYSSLKVSLFSKFKESYERFKHTNPTSRPFIPKQKSSKKFKHIIQYINTEIIPSFIEADQHYNETCLIIYCAAYTAAIANGSNIEDSPANIVFKNKFPPWQYRLNKRIQVLRKEIGRMTQFIKGNRNNKVTSTVNSIREKYKNHATHDDNNLTDLQFLDTLKQKLCVAASRLKRYTNCTFRRKQNSQFNNSEKQFYRQLKNSHMVTPINNSPILNPQKTNEYWHNIWANPVIHNDTAPWIETEINTCSDIPPMEFNHIPIDVFKIALYKAHNWKAPGSDNIHNFWYKKLTSLHSILYNHINDFLAQPHTMPEYITEGKTYLIPKGEKSDKPEQYRPITCLQTMYKLITSCLTAIIYEHISSNNILTEEQKGCCKNSRGCKEQLIIDSVVMKQALNHKKDISTMYIDYQKAFDSIPHSWLLKVLNIYKIHPNIIAFLKNAMDHWKTQIKLEKTLDQVSFTIPIKRGIFQGDSLSPLWFCLGLNPLSKMLRASPAGFPIRLGTRSIKFSHLLYMDDIKLYSNSSRSLHTLADITQLFSHDINMVFGIDKCKTLTVKRGHIEKNSYKLISGETIEAMDLNNSYKYLGMQQTRQIEQKNIKLNITKEFKIRLNKILKTSLVSRNIIKAINTYVIPVLTYTFGVIKWSRTDLQKLQRVISTSLTQHRKHHPKSCTQRLTLPRELGGRGIIDIQNLHNKQITNLRNFFFEKAALSDIHYSIVQSDTKLTPLNLQNCNPQPNENITDINQKLAAWKQKSLHGRHLNELLKGHIDKKASNAWLQKGQLFPETEAFMLAIQDQVINTLNYQKYITNTLEARSDTCRRCQKGSETIQHITGSCKAIAQTDYKHRHDQVGAIIHQHLAYKFKLITNKMPYYKYKPEAVLENKEYRLYWDRTIMTDKTVHYNRPDITIFAKNYQTVYFIDVSICNTHNLQLNFTEKISKYTDLAIEVQTQWGVKLVKTIPITISTTGVIPKNLHSSLRYLNIPPGIYIQLQKAVILNTCRIVRKFLSGSFN

SEQ ID NO: 31502 - protein, 913 aa, Apodemia duryi
MPPWQQRLNKRIEMLRKDIGRMTQFMKGNRNSKITTAVNSIREKYKNHASYEDNNFTDLQFLDTLKQKLCVTASRLKRYTNCTLRKKQNLQFNNSEKQFYRQLNDSHVVTPSDNSPVLDPQKAYEYWYNIWANPVSHNDKSAWIESEINTCHNMPQMKFEYIPIDVFKNALSKAHNWKAPGSDNIQNFWYKKLTSLHSILYNHINEFVTQPHTMPEYITEGKTYLIPKNGKSDRPDQYRPITCLQNIYKLITSCLIEIIYQHVISNSILTEEQKGCRKNSRGCKEQLIIDSVVMKQALINKKDISTMYVDYQKAFDSIPHTWLLKVLDIYKIHPDIIAFLKNAMGQWKTEIKLDTPLAQEVLKIPIKRGIFQGDSLSPLWFCLGLNPLSKMLQASPTGFPIGCGTRSVKLSHLLYMDDIKLYSNNTQSLHTLADITQQFSLDINMTFGIDKCKTLTVKKGNIESNIYMLTSGETIEAMDSNSTYKYLGMQQARQVDQKNIKVNIIKEFKRRLNKILKTNLVSRNLIKAINTYVVPVLTYTFGVINWSQTDLQKLQRTINTSLTQHRKHHPKSCTQRLTISRELGGRGLIDIQNLHNKQITNLRKFFFEKTTSSHIHYAVAQSDYKFTPLNLQNRNIQSNENIIDMKQKLAAWKQKSLQGRHLTELLKEHIDRKASNVWLQKGQLFPETEAFMLAIQDQVISTLNYQKHITHTLQASTDTCRRCQRGSETIQHITGSCRAIAQTDYKHRHDQVAAIIHQHLAYKYKLISNKIPYYKYKPEVVLENKECRLYWDRTIATDKTIYYNRPDITIFDKNDQTVYFIDVSICNTHNLQFNFSEKISKYTDLAIEVQTQWGVRTVRTIPITISTTGVIPKSLHLSLKYLNIPPGIYIHLQKAVILNTCRIVRKFLSGSFY

SEQ ID NO: 31503 - protein, 1412 aa, Symmachia rubina
MVATRKRSKCIPQAGTNAQREGESRPELNSSGSSTYSGESNVSQPSTSRYNLRPRSTSGKKNSTVGIVPKISTPNTLTKSSTQSKTILQASLQLPSHSPSNSRSPSQLHSQSLASHNSSICSLFESPRSSLQSYEKEHNNSSTSASSLISTSEVVTPETNVDHLVSNCDKKRAKKKWTSEMNTFIMRTFFIITNLEKDMRNYLTLLHRKFLEKFPYVNVSKQRIGDQRRAIVRNKLLSMEEITEIKIEAVRELETSNIESADLLLPKAGTRRKWNNEINEAIIRTYYEITDLERNKTAYRKTLHSRIIENYPDFAEVTEQRVADQRRVIIQNKLITDEKLKEIKHDIEKKLAKKQADKKDMENEVQISSNELMESYEGNFSYEHGEHIVNRFVNNIVSNDAEIDYSDLKGFLKNTYKATYEKFKNTNPTNRPSILKQKLSKKFKQVIQHINLEILPEFLCVDQRYDKTNLMIYCAAYTAAIANGSKIKDTQLNKVWKDKIPSWQYRLKKKIQTLRKEIGRMTQFINGNRSSKVITTVTAIREKYKIHSSHEDVNITDLQFLDTIKQKLTVTASRLKRYTNCTLRKKQNSQFANSEKQFYRQLSNDDILTSPNDSITLDPQKAYDYWHNIWANPVSHNHAAFWIENEILTLNDIPQMKFEFIPAEVFKTVLSKMHNWKAPGSDHIQNFWYKNFTSMHPILHNHINDFITQPHSMPTYITQGVTYLIPKGKKTDKPEKYRPITCLQTIYKIMTSCITEIIYDHINSNNILTEEQKGCRKNSKGCKEQLIIDSVLMKQAFHGKKDISTMYVDYQKAFDSVPHSWLLQILDIYKIHPHIKDFLKHAMGNWKTQIKLNKRTDYQDLNIPIKRGIFQGDSLSPLWFCLSLNPLSKMLRASTASFPLIYDSQSIKLSHLLYMDDIKLYGNSLTSLLTLADITQNFSNDINMKFGIDKCKILTVTNGCVVANNYSLTSGETIEAMSPNCSYKYLGMQQARQIEQKQIKLNVGKEFKHRINQVLKTHLTAKNLIKALNTYAVPVLTYTFGIINWSRTDLQKLQRTLHTSLTHNRKHHPKACIQRLTLPRQEGGRGLLDIENLHNKQIVNFRKFFFNKAEFSEIHYAVVQSDTKLTPLNLQNRNFQQNEKLNDLNQKIAAWKQKSLHGRHINELLKEHIDAKASNAWLRHGQLFPETEAFMLAIQDQVINTYNYQKFITHTLQSTTDTCRRCRSGSETIQHITGSCKAIAQTDYKHRHDQVAATIHQLLAYKYNLILSKVAYYKYKPEAVLENKECKLYWDRTVITDKTIHFNRPDITLFDKTTQTAYFVDVSICNTHNLQQNFSAKISKYTDLAIEVQRQWRVKTVKTVPIVISTTGVIPKSLHSSLKNLDIQPSTYIQLQKAVILNTCRLVRKFLSCTLF

SEQ ID NO: 31504 - protein, 1494 aa, Caria ino
MNLVVVGGLKTREHYYQSEHRDNIPQKRGTKHMMPIPSRLLSSNQSFPTQRREMQDTRTFYNLRSLPGGRRGAPGAGAGCFRMRDTGDVVLSRRVPVTQSATADRRELNRRANGVDATAEIPYADLPSLSSLNTHNNRSQSNLKKYNLRPRVTDSKKMRKKNLTHKNTDTSSSIKPLILQATEANSPLQSTSHSPNSSISTLFESPRSSLHSYESGNHISLTPTSHSTSMSDDVVPETINVNNLAPTSDKSRARKKWTNEMNTFIMRSYFIETNMERNTKGYLSPLHTKFIQQFPYMNVTKQRIGDQRRAIIKNKLLSVQEISDIKMQAMNEIEGNHRDPVESTQFTSVTRRKWNNEINEAIIRAYYEITNLESNKTAYRKMLHARIIEEFPNFADVSEQRIADQRRVIIRNKLISAEKLKEIQEHVRRNNRQHSEINNTTENVTQTPTDFFENNDSRSISLTHHEYNLNLESNTVSYLTNIVNEDFKTSISNIFKEAHHKFKHTNPTNRPFIPKQKLSKKFNDIVQYINKEIIPTYVKEDQSFDKTHLIIYCAAYTAALANDSKIKEIQTNRNSYPKIPHWQYRLEKRIQTLRKEIGRMTQFMNGNSSYKVITSVNLIKEKYKIHSSHEENNITELQFLDTLKQKLSVTASRLKRYVNCTLRKKQNSQFITSEKQFYRQLGNNTTAINSAINTPTLNPQKAYEYWHNIWAYPVHHNDTATWIETEINTLSNLPHMQFEYIPVEVFKNVLSKIHNWKAPGSDHIHNFWYKKFTSLHSYLHNHINDFILQTQTMPSYITEGITYLIPKSKETDKPDQYRPITCLQTIYKIITSCITDILYEHVRSNNILTEEQKGCCKNSRGCKEQLIIDSVVMKQAFNNKKDISIMYVDYQKAFDSIPHSWLLQVLDIYKIHPHIKTFLKSAMDNWKTQIKLNSEVNQSNFYIPINRGIFQGDSLSPLWFCLGLNPLSKMLKSSPAGFSLGHSIDGQHITLSHLLYMDDIKLYSFSTQSLYRLADITQNFSNDINMKFGINKCKILTVKKGIIKRNNYLLTSGESIEAMNPNSTYKYLGIQQARQIEQKQVKSTVIKEFKHRINKIIKTNLWAKNLTKAINTFVIPVLTYTFGIIKWTRTDLQTLQRTINKSLTLNRKHHPKSCTQRLTLPRAVGGRGIIDIENMHNRQIAGLRKFFFEKAELSDIHNAIIQFDTKLTPLNLYDRNPQPNEKVNDIDQKITAWKQKSLHGRHLNELHKQHVDKKSSNAWLQIGQLFPETEAFMLAIQDQVINTLNYQKYITRTLQTAADVCRRCKTGSETIQHITGSCKAIAQTDYKHRHDQVAAIIHQQLAYKYNLISNKIPYYKYKPEAVLENTEYRLYWDRTIVTDKTIHYNRPDITIFAKNDQIVYFIDVSICNTHNLQVNYSEKISKYIDLAIEVQTQWRVRTVKTVPITISTTGVIPKNLHLSLKSLDIQPSIYVQLQKAVILNTCRLVRKFLSYSQI

SEQ ID NO: 31505 - protein, 1399 aa, Nymphidium onaeum
MEQNLKKYNLRSLPGVRRGAPGAGAGCFSMRDTGGEALSRRAPVTQGTTAERRELNRRANDVDDTAEELNKEITICDKSNNSQVSTPTLQSPSARLSPASTLKTASSITFDSPRSSLHSFETENSLTSTNYTSSDITSVAVAPETNVHQMAPTTDTNRARKKWTKEMNKFIMRSYYIHTDMESNLRGYLTPLHQHFTEHFPYMDVSKQRIGDQRRAIVRNKLLTAEEMNDVRLMAANETQSPHLRQRTINSAEKTQRRKWSNEINESIIRIYYELTELDTNRTGYRRLLHTKITEKYPELADVSEQRIADQRRVIIRNKLISEAKLAEIQSQVRLSIAVDQAELYINETVPNVTESQEVTEDNNTPLNISVHIVNTSLTNTVTEQNDTIQINPNYSIHETFKKAMDQLEHTHPVDRPYIPKQKVSKKFKDTIHCINTEIIPKYIQFDQHFDKTNLIMYCAAYTAAVTNGSKILDSSATNRYTNNNTPGWLRRLHKKLQTLRKEIGRMTQFIKGNKSNKIVSSVSLIKDKYLVHSLHESNNTTDMQFLDTLKQKLSATANRIKRYTNCTLRKKQNAQFINSEKQFYRQLDSNGNDTSASSTNSLTAEKAFEYWHNIWAYPVIHNESAPWIETEKIKQCNLPEMKFECVTLEVFEKVLSKTKNWKAPGCDHIQNFWYKKFTSMHPLLYNHINDFIKHPDNMPEYITQGITYLIPKDGKTDKPEKYRPITCLQTIYKIITSCLTEIIYEHVSTNNILAEEQKGCCKNSRGCKEQLIIDSVAMKQAFNRKTDISTMYIDYQKAFDSIPHSWLLHILDIYKIHPDIKLFLKTTMNHWTTKIKLGKENKCDNIDIPIKRGIFQGDSLSPLWFCMGLNPLSNMLIDSQKGLPIRHNNQTAILSHLLYMDDIKLYSNSTQSLHKLADITQNFSRDINMKFGIDKCKTLCVSKGKIKLNNYVLTSGETIDAMSSTCSYKYLGMHQARQINQKHIKANIKKKFKYRINRILKTRLVSKNLIKAINTFAIPVLTYTFGVINWSHTDLQSLQRIINTSLTFHRKHHPKSCIQRLTLPREEGGRGIIDVENLHNKQITNLRSFFFKKADSSIIHHLISQNDTKLTPLNLHIRDAQSNEKITSVDQKIAAWKQKSLHGRHLSELQKSHVDIKASNAWLQYGTLFPETEAFMLAIQDQVINTYNYQKHITRTLTLATDTCRLCRSSSETIQHITGSCKAIAQTDYKHRHDQVAAIIHQYLALKYKLIFDKVPYYKYVPESVLENKDYRLYWDRTIVTDKTIHCNRPDLTLFSKTNRTVQFIDISICNTHNLQTNYSEKISKYTELSIEVQSQWKVKSVKTIPIVISATGVIPNNLKTSLLNLDIEPAIYIQLQKAVILNTCRLVRKFLSGNAAQ

SEQ ID NO: 31506 - protein, 1446 aa, Symmachia rubina
MHLGYPLQTNHFQLETPFMEQDRRIYNLRPLPGGRRGAPGAGAGCYSMWDTGGEALSRRASVTQDATAERQKLNRRAKDVEATAEVLGEDTILTCSAEKIVLQATRTTYSLRPRSTSGTTRSRDNCKNTIDNTRPATLTVLSSPTLSLNSSPYSIFDSPISSLNSYETQIINDSLSSTSKASSSHSITSVSATPETTVDQLAPTTDNNRARNKWTKEMNVFIMRSYFIHTKLETDLRGYLTPLHKQFLEYFPNMKVSKQRIGDQRRAIIRNKLLTENEIADIKNSASNELQVSPIERIQTTPFNKITRRKWSTDINESIMRIYYEITDLENNKTAYRKTLHARIIEEYPQLADISEQRIADQRRVILRNKLISEKKLAEIQSEVRFKIVAKETELTNNQVHMSSNISQVTIEETIMPTNSQNHRNTVVIAMSETDDACRTSLKDTVLNTFEKTLERFRHTNPTQRPYIPKQKPSKKFNFILQYLNTEIIPKFIQPEQHFDTTHLIIYCAAYTAAVTNGSRIVDVPQTNCYKKDRIPSWLCRLQKKVETLRKEIGRMTQFIRGNRSTKIVTTVSLVKSKYEIHSSHEQNNITDLQFLDTLKQKLSATANRIKRYTNCTLRKTQNSKFINSEKQFYRQLQNNHTTTENYSEVLSFKETFEYWHNIWANPVLHNNEAPWIETEQNNLIHIPEMEFENIPIEVFEKVLKKTQNWKAPGSDHIQNYWYKKLTRLHPLLYNHINDFIKNPNSMPSHITQGITYLIPKGKRTDKPENYRPITCLQTIYKIITSCITEIMSDYIFTNNILTEEQKGCCKNSQGCKEQLIIDSILMKQAFNKKTDLKTMYVDYQKAFDSIPHSWLLRVLDIYKIHPVIKLFLKNVMCYWNTQIKLTQADDSEELNIPIKRGIFQGDSLSPLWFCLGLNPLSNMLKSSKTGLPIKYNNHCIIVSHLLYMDDIKLYSNSLQSLYKLADITQQFSNDINMKFGVDKCKILSVSKGVVELNNYTLSSGEIIEAMDSSNTYKYLGMQQAMQIDQKHMKKTITKEFKHRINKILKTYLVSKNLVKAVNTFAIPVLTYSFGIIKWSRTDLQNLQRNINTSLTFHRKHHPKSCIQRLTLSREEGGRGIIDIPNLHSRQITNLRNYFFAKANRSELHYIIAQNDTRITPLNMQDKNIQLNERITDADQKIAAWKQKSLHGRHLKEVQKPHVDKKASNAWLQHGQLFPETEAFMLAIQDQVINTYNYQKHITRTLTLPTDTCRRCKNSSETIQHITGSCKAIAQTDYKHRHDQVAAIIHLALAYNYKLIKDKIPYYKYKPESVLENKEYKMYWDRTIVTDKTVHCNRPDITVFAKEQQTVYLIDISICNTHNLVVNHSEKINKYIDLAIEIQSQWRVKTVKTVPIVISTTGVIPKSLNTSLITLDLEPNMFIQLQKAVILNTCRIVRKFISGGFS

SEQ ID NO: 31507 - protein, 1251 aa, Apodemia mejicanus
MEMSFKDSRSGPLPGGYRQGTSGAGAGRDSMRTASGSSLNRRARVGNEPEETTAEHNRNADDVLQSRLSPTRSAGTLEPTTTRSISNDARRKWSQEELHELMFCFYKAKAEGLGYIARLLSLFKERNPDNPKTSKFTGNTLANQARSVINRKLISTEVLDQIKQNAELSTLTPTSNTQPENILNEECPLNLEQVQPQSECNRSIQLSNNIFTSNNHNSKNDSAMIQMDTLNLEVNEEQDPDINTLLQILSETREIEIGERQYLPKPNFSKQFFEHLNKINNFLPNLLNSELSLRDLNDIIYAAAKTLVVINKQNPYTPSKIAKERSDPPWKIRIKNKINELRKDLGRFTEIRRGVNTNKMNKIRNNLYIKYNILNETDRDNTIEIIKQRIKATSGRLRRYEEMNNRKIQNKHFRENQHTFYRKLENKQQEATKLPSKEDIEYFWEEILSNPVTYNKQANWINQIVQSTNHIHEHNFTSIDKDMVNTTVTKMQNWKTPGIDKIQNYYLKYLTSTHKYIANIYNKILEGLEPIDDWFTTGQVLLIPKDKDTQDPKNWRPIACLPSMYKLLTSILTNELYTHCTNNNILAPEQRGCRRGARGCKDHLMLNKAILEDAHLAQKNLSMGWIDYRKAFDSVSHEWLIKVLQIYKCPGNILSFLQKVMPKWKVVMTARSREDCVTTHPIPIRRGIFQGDSLSPLLFCLVINPLSQILNKYISKGYNLKDNTYINHLLYMDDLKIYANNRNNLQVLLDSTEIFTADIGMRFGLNKCNILHIESGKRASYQGQGHVLLSGERFEVLKENYKYLGIYESGQIDHKTLREIISKEYFRRVKCILSSHLNSVNIITSINTYAIPILLYSFGVVNYKTSDLNYIDVKTRKLLSLYKIHKQKADKDRLYITRPEGGRGLLNIEMLYKTHVLKQKQYFNNNPDKIIEAIVQHDKRKDKYSIDKEAKEIASELNLQIEQGVTNKELKLATTKKHIYEWRVKPLHGQFHRTVLEKPNINKVESFLWLKRKPVSPVLEGKIFAIQDQAIITRQHERDIHKKQIDGKCRLCSAKDETIHHIITGCEKLAGNYYTKRHNNIVQYVFWCLLQKHNFISEKMWWKETLSYPQVKENDEAKLLWEFPVQTDTEIQNNRPDIIYIDKNENKTFLIDVTIPSDYNIGPKEIEKLSKYQPLKTEINRIWKTNTTIVPIVIGATGVVGFSLYKYCKMLNCHIDINIMQKQAAIHTTTIVSKVLGENVFIEDNTVSPLP

SEQ ID NO: 31508 - protein, 1251 aa, Apodemia duryi
MEMSFKDSRSGPLPGGYRQGTSGAGAGRDSMRTASGSSLNRRARVGNEPEETTAEHNRNADDVLQSRLSPTRSAGTLEPTTTRSISNDARRKWSQEELHELMFCFYKAKAEGLGYIARLLSLFKERNPDNPKTSKFTGNTLANQARSVINRKLISTEVLDQIKQNAELSTLTPTSNTQPENTLNEECPLNLEQVQPQSECNRSIQLSNNIFTPNNHNSKNDSAMIQMDTLNLEVNEEQDPDINTLLQILSETREIEIGKRQYLPKSNFSKQFFEHLNKINNFLPNLLNSELSLRDLNDIIYAAAKTLIVINKQNPYTPSKIAKERSDPPWKIRIKNKINELRKDLGRFTEIRRGVNTNKMNKIRNNLYIKYNILNETDRDNTIEIIKQRIKATSGRLRRYEEMNNRKIQNKHFRENQHTFYRKLENKQQEATKLPSKEDIEYFWEEILSNPVTYNKQANWINQIVQSTSHIHEYNFTSIDKDMVNITVTKMQNWKTPGIDKIQNYYLKYLTSTHKYIANIYNKILEGLEPIDDWFTTGQVLLIPKDKDTQDPKNWRPIACLPSMYKLLTSILTNELYTHCTNNNILAPEQRGCRRGARGCKDHLMLNKAILEDAHLAQKNLSMGWIDYRKAFDSVSHEWLIKVLQIYKCPTTILSFLQRVMPKWKVVMTARSREDCVTTHPIPIRRGIFQGDSLSPLLFCLVINPLSQILNKYISKGYNLKDNTYINHLLYMDDLKIYANNRNNLQVLLDSTEIFTADIGMRFGLNKCNILHIESGKRASYQGQGHVLLSGERFEVLKENYKYLGICESGQIDHKTLREIISKEYFRRVKCILSSHLNSVNIITSINTYAIPILLYSFGVVNYKTSDLNYIDVKTRKLLSLYKIHKQKADKDRLYITRPEGGRGLLNIEMLYKTHVLKQKQYFNNNPDKIIEAIVQHDKRKDKYSIDKEAKEIASELNLQIEQGVTNKELKLATTKKHIYEWRVKPLHGQFHRTVLEKPNINKVESFLWLKRKPVSPVLEGKIFAIQDQAIITRQHERDIHKKQIDGKCRLCSAKDETIHHIITGCEKLAGNYYTKRHNNVVQYVFWCLLQKHNFISEKMWWKETLSYPQVKENDEAKLLWEFPVQTDTEIQNNRPDIIYIDKNENKTFLIDVTIPSDYNIGPKEIEKLSKYQPLKTEINRIWKTNTTIVPIVIGATGVVGFSLYKYCKMLNCHIDINIMQKQAAIHTTTIVSKVLGENVFIEDNTVSPLL

SEQ ID NO: 31509 - protein, 1248 aa, Melanis pixe
MWTVSGSSLNRRARVGEPENTTADHSRDADDALQSRPSPTSSAGSSEPTMTRFISSDARRKWSQEEMHELMFCYFKAKSEGVGYISRLVSLFKERNPNNPKVAKFTGNTLSNQARSILNRKMISAEVLDGIRQRAEQLTSSSQQHTNLYHTPSQYTHQTSTSPHPINNNTQHNQQQNSYSEGCLSNTDQILTNHPMESIAPSIDINDNLNSHTQQNIIITDVDSENLEVHEDQNTVINTLLQILSETKEISVEERECLPKPTFNKIFFQNLQTINTFLPTLLNGELTLKQLNDTIYAAAKTLIILNKQKPYIPSRITKSDKNPPWKLRLKNKIEVLRKDLGRLTEIKRGISTNRMNKIKRKLFDKYNIFNENEHDNTIELLKQRIKATSGRLRRYDDINNRKNQNKQFRENQHKFYRKLEKRHQVANEIPSKETIEDFWKEILSNSVSYNKQANWIDEVETSMTNLQTHNFTNVDMESIDLAVKKTHNWKLPGIDKIQNYYLKYFTNTHKYIADIFNKILEDSMQVDDWFTTGQVILIPKDADTKDPKNWRPIACLPTMYKLLTSILADTLYAHCDKNNIMAPEQRGCRRGARGCKDHLMLNKAILEDAHLAQKNLSMGWVDYRKAFDSISHDWLLKVLDIYKCPAIISNFLKKVMPTWRVIMTARNESNCVTTDPIFIRRGIFQGDSLSPLLFCLAVNPLSQILNKYEFKGYHLKEQSYINHLLYMDDLKLYSKSRDNLQVLLDSTEIFTADIGMSFGLSKCKVLHLVGGRRSDFQGQGHILLSGEEFEILNENQSYKYLGINESGKIDHKILRDTISREYFRRVKCLVSSHLNAVNVITAINTYAVPVLLYSFGIVNYKNSDLSKIDIKTRKLLTINKIHNQKADKERLYLNRLEGGRGLLNIETLHKAQILKYRQYLNAKQDYLIEAIERHDKRRDKYSIDKEAKKIARELQLQIRQEYTDKEIKSAINKKRIDEWKVKPLHGQFCRSVLDKQNIDKTGSFMWFKKKPLSSSLEASIFSIQDQAIVTRQHERDIHKKQVDGKCRLCSAKDETIHHITTGCEKLAGNYYTKRHNNVVQYVFWALLQKHKFVIEKLWWKEALTHPQVRENDEAKLLWEMPVQTDTEIQNNRPDIIYIDKTDNKTYLIDVAIPSDYNIGPKEIEKLSKYQPLKTEINRLWKTNTTIVPIIIGATGIIGQSLHRYCRMLNCRIDISIMQKQAAIHTASIVSKVLGDNVFVGGNTESSLP

SEQ ID NO: 31510 - protein, 1217 aa, Calephelis perditalis
MWTVSGSSLNRRARVGNEPEETTAEYIRDAGDALQSRPSPSSSAGSSEPTTTRFISNDARRKWSQQEMHELMYCYFKAKSEGVGYIAKLLTLFKERNPDNPKINKFNGNTLSNQARSILNRKTISLEVLNKIKQRAEQSSSSTHTTYTHDNVEPSPQLETNNTHHTQPDNRNENIMDLELVFTPPEHNIERPNSISNSEHIQSQQNTASVEFDMENLEVQENQDPVINTLLQTLSETMEITIEERQYLPKPSFNKQFYGNLHKINNFLPTLLNGQVTLRQLNDTIYSAAKTLIILNKQKPYTLTTTTRTKKDPPWKIRLKNKIADLRKDLGRLTEIKRGITTDRMSKVKRKLYDKYNIFSEQDQDYTMELIKQRIKATSGRLRRYDDMNNRKIQNKQFKENQHKFYKKLENKQQVANETPSQETIEGFWKEILSNPLTYNKQASWISEIETITTDIQTYKFTKVDAETVSYAAKKTHNWKSPGIDKIQNYYLKYFTSTHKYLAETYNNIIDGSELLDEWFTTGKVILIPKNKDTKDPKNWRPIACLPTMYKLLTSILADTLYTHCNNNKILAPEQRGCRRGARGCKDHLMLNKAILEDAHLCHKNLSMGWIDYRKAFDSISHEWLLKILDIYKCPPIISNFLKKVMPSWHVIMTANSEKGAITTEPIIIRRGIFQGDSLSPLLFCLAINPLSKILNKYEYKGYHLKEQSYINHLLYMDDLKLYSNSRDNLQVLLDSLEIFTADIGMSFGLSKCNVLHLVGGRRSEYLGEGHVLLSGEKFDVLKEGQSYKYLGINESGKIDHKTLRESISREYFRRVKCLANSHLNAINVITAINTYAVPVLLYSFGIVNYKTSDLTKIDIKTRKLLTINKIHNQKADKERLYLNRLEGGRGLLNIEMIHKTQILKYRQYLFEKQDHLIEAIEIHDKRKDKYSIDKEAKEIVNELKLQNRQKYTDTEIKHAITKKRIDDWKAKPLHGQFYRSVMEKQNIDKEVSFLWFKKKPVSPSLEASIFSIQDQAIVTRQHERDIHKKQVDGKCRLCSAKDETIHHITTGCEKLAGSYYTKRHNNVVQYIFWALLQKHNFDIEKLWWKEILTHPQVRKNDEAKLLWEIPIQTDTSIQNNRPDIIYIDKTNNKTYLIDIAIPSDYNIGPKEIEKLSKYQPLKTEINRLWNTNKTIVPIIIGATGMIGHSLHRYCNMLNSRIDISIVQNKQLFILHL

SEQ ID NO: 31511 - protein, 1238 aa, Apodemia duryi
MEMSFNESSLGPLPGGYRQGTSGAGAGRDSMRTVSGSSLNRRARVGDEPEETTAEHNRDADDALQSRPSPTCSAGPSELTTTRLIPNDARRKWSEEELHELMFCFYKAKSEGLGYIARLHTLFKERNPENIKARKFTGNTLANQARSVINRNILSTEVLEQIKKDALNINTESIHYEEPLPSLEQSQSPHVHNRHFQMNNYNLNQSGTKIQWNDQNLEVNEEQDPVINFLLQILSETKEIAMEERQSLPKPIFNKQFLENFHKINKFLPTILNSDISLRDLNDVIYASAKTLIILNKQEPYIMSEANRRGRDPPWKTRMKNKIEDFRKDLGRLLEIKKGVNTNKIIKIQRKLYNKYKILNESKLEITIEFIKQRIKAISGRLRRYEDINNRKIQNKQFKENQHKFYRILANKQKEVTAIPSKEDIEKFWKGIFSKPISYNKEATWINEIEQTLTRIHRDDNIKIDTETVHLMVKKIHNWKTPGIDKIQNYYLKYLTNTHRYIADSYNKILNGSEQIDDWFTTGQVLLIPKGQNTEDPKNWRPIACLPTMYKLLTSILTNILYAHCVNNNIMAPEQRGCRRGARGCKDHLMLNKAILEDAHLSQKNLSMGWIDYRKAFDCVSHEWLLKVLNIYKCPEVMLKFLEKVMPKWQVVMTARSQGSCVNTHPISIRRGIFQGDSLSPLLFCLAINPLSQILNKYTTKGYNLRDSTYINHLLYMDDLKLYANSRNNLQVLLDSTEVFTKDIGMQFGINKCNVLHLAGGKRSDYQGHGHILLSGEVFEVLKENQNYKYLGIDESGHIDHKTLRDTIAKEYFRRVKCLLSSHLNSVNIITAINAYAVPILLYSFGIVNYKLSDLKHIDVKTRKLLAINNIHKQKADKERLYISRSEGGRGLLNIEMTYKTQILKYKQYFNNNQDKITETIIQHDKKKDKYSIDKEANDIITELNLQNEQTITNEEIKLATNRKQINVWKTKPLHGQFYGSVLEKPNIDKKSSFLWLKKKPVSPSLEAAIFAIQDQAVVTRQHERDIHKKQVDGKCRLCLTKDETITHIISGCEKLAGSYYTKRHNNVVQYVFWKILHKHNFVIENMWWKETLACPQVRENVDAKLLWEIPVQTDKEIQNNRPDIIYINKRENKTYLIDIAIPSDYNIGPKEIEKLSKYQPLKTEINRLWNTTTTIIPIIIGTTGVIGHSLHRYCKMLDCNLDVGIMQKQASIHTAAIISKVLGENIFIETNTGSSLP

SEQ ID NO: 31512 - protein, 1056 aa, Bostrychus sinensis
MASASADVEPSNPSSSTSNSFSCPLCPRVFSRRCDLTRHLNRHERNPTAHLAQLYEVSQIDQLLICPHCPASFAKKRGLSQHLRLKHLSDYNTVKLSQLPVSSYHWSTLEDANLIRLANELWSDHMQLTSLHRAIQRQLTNRTAEAIKRRLLKLQWSPPSSQPLQEEIPSSSNTSPSSNPPPDSCDPLDSSFTVPLNVSNIDLLAAASTQLKTDGSDPYNFRSLSSFSDSILLNPPSTSPDLSPLNDFCSTNFPHLWRRSIRKLRHVDPPSSRAKLRKLQYGHIQRLYKTRIKDAASTILDGHWQTAFMDSVSNIPDFDNYWHGVLSSSCFTDNRPTRNVLSPHPELMAPISPHEVSRSLKELQGSAPGVDRIRAPDLLRVNPSLIAGFMNLLLGCEYVPPHLSVARITFIPKIPMPTKPEDYRPISVEPILLRCLHKVLSYRWMPLFPIERSQFGFLQRDGCYESTTLLHSLLRYSHSSLKELSFASIDISKAFDTICHDSLLRGASAFGAPPLLINYLRSFYRNSVSCFNDLTLHPQRGVRQGDPLSPLLFIMALDEPLNLSSSRGFRIGDNEIHHLAYADDVILISPSRAEIEVKVSQFNDLISLNGLSLNNMKSFCVNIRINGHEKTSVLDTSPFVHNIRSLQPTDSFQFLGVPFNWKGKLPTNALNDLSFMLTNLSKAPLKPHQRLHILKFFLLPRLTHTLSLSVVHLKTLKSLDLLIRNEIRRWLRLPKDTPTSFIYATISDGGLGVPHLQSSTIFNRRSRLEKMLASSDPVLHWAASEPSTASIHKIDMVDVRINNEIVATKEAAKAGWSRALYNSLDGSALQGAASSPHSHIWLRNPSRVFPRLYIRSIQLRAGVLGTKVRRSRGRQPTPITCRGPCQSPESLSHILQTCMVTHPSRCKRHDRVVTTMVKKLRRTNEQCFVEPRIPLKISFCKPDVIVIREKTAYVLDVCICDPNNMHYSYNTKTQKYGSPSCIASIKHYFNSINIPVSHVVQMPIIINHRGLIFPKSASHLSSHSFSKLDISDICLTTLQGCLQTYDFYMRGAPITL

SEQ ID NO: 31513 - protein, 1246 aa, Metaphire vulgaris
MSSQTVISQPASQNTIKPLGICSHCKTARHVYKNSGLIHLHGPRNNICSGSNKPPLAIHSVTDDSYTSLQSLNDTSLSSVLQSQNCIEVTEISHPDFHHGVIKHIPKGARTTVALHLASLLDRICSGHNRTENWIALLNVGQEILGTFPRGGRRNNLIATIKKRVSACQEALTSAVTPPPTTTTRQRPKKSPLVSHQHWLRAVCSKLEDGNVRAALRILCSDDSLVDADATSVEELRSKHPEPTDNNRIPSPDNDVQPLQVTTSEILREIRSFPSGSSGGPDGIRPQHILELVNHSDTGPALLSSLANFINLLLRGDCPEVVRPVLFGGNLLALRKKTGGLRPIAIGYYWRRLASKCANSFAISQVVDRLAPLQLGIGTPGGCEAAVHSARRFLDALGPDSVLVKLDFRNAFNSLSRSAMLTAVLSATPSIYPYCHAAYAEASTLKFGQYKLLSQSGAQQGDPLGPFLFCMTIQPLLESLSSELRIGFLDDLTIGGTIQEAARDVEILSDEASKIGLSLNVNKCEIISNSIHSSLPGILSQFLPVPRNEACLLGAPLSTGIALSRCLEYRRDELALGISRIKDLPRHDALTLLRCSINSSRMLYTLRCAPCMDHPTLVQFDELLRTGLSQVLNLNLSAEHWLQATLPIRDGGLGIRRSTSLALPAFLASAAGTARLQTSILANTAIPEDAHLNAAMTRWSLECNEPDIVAGENLRRQSAWDRPLVERDIFHLKSTITSDFHQARINAITAPHSGDWLFCLPITALGLRLDDEAVRIATGLRLGVDLCAPHLCCCGMPVTSDGSHGLSCRLGPGRIARHAALSDVIWRALSKAGIPSRKEPVGLTRSDGKRPDGQTLIPWENGKCLTWDVTVIDTLASSYRTVAAQSPGGPSEIAATRKIDKYVNALPIYAFVPLAFETLGPINVEGLTFIRRIGRLLSQLSGDHRETSFLLQLISVTIQRFNAVAFHGTFSEFQSNSELCGDGGSVLDDFLGHGDVDSSDNQIEDLCSVKSLACYTNVQNLDTSECERDQSRPIHNSAAGLSDPLVEQRESQENSLDFSSEITTENKKRAEVIAQNYPEGLESATVLSVLNLAQSQHGCLPISTRKLFVENDTNEKMSNAVVGVSVNDVDHREFVTKFSAFLKKSVPMAVPFSNTKLRFPAGFRIIIEGFARKVLEISQTTSLPTDPFTSTVHCRSEQKVVTIPLKSAQKKRITHTTVALLRERNRKRSRVQTTKLSPSKSKAITV

SEQ ID NO: 31514 - protein, 1335 aa, Coeliades ramanatek
MNTETKKKYNLRSLSKANRDKPHGTGSLRSVGEEELEPSSPNSITSSIFSSLSSSSSISTNSLGVEDVVQETAQAAKPAPITAKVPTRNKWSKDMNTYIWRIYLHITKLETENITSYLPELHKQFIHKYPQIQVSRQRIGDQRRAILRNRLLSQEEMDNIYADVTKDLDIGNTHVATRPQITLGQRMRWSTEHNEYIMRSYYRITKLETDMTSYRKTLHQDFVTAFPDFAHVTEQRVADQRRVIINNKKITEERLEALKQEVASEIQVLCDDTMRISNEMPQETIDVNNINHIDILNEDSIVDTVTTETSNNMVRNHTIDQTFKESLSYYTGIDPTKRDWIPKQKPSRKFSTIIHYINNILLPEHINSDSDFMILQNVLYCAAWTAAKINGAKIAIPPSKKIQNKKWSPKWQIRLERKIDFLRSQIARLTQYMRGVRSIKLCKQVDIIIKTYKTHTIHEEPNTQLPHFIDTLKQKLTVASSRLRRYKMCTLRKTQNSKFNFHEKGFYRLLSDTTTNNKTNNNNVQNLPSSSDLQKFWSEIWENPINHNSEAEWIKQEGTYNNSETMHFEHISLETFKSTIDKLHNWKTPGSDHIHNFWYKKFTYIHPHLYNHLNNFIQNPQLIPKYITSGTTYMISKDKKKLDNPANYRPITCLQTVYKIFTSCLSQIINEYIDTNKILTEEQKGCRKLSRGCKEQLTIDSVVLKRVEKEKEDLFTMYIDYQKAYDSVPHSWLVQILQIYKIHPQIVRVLQNLMANWTTSLILETANKRIETGTIKIQRGLFQGDALSPLWFCLALNPLSNMLNTSNIGYPVKFKCEQTNKQIHLLNHLLYMDDIKLYASTEEELSKLAHLTETFSQDICMQFGIDKCRTNSVKSGRICKIYYEMQSGKTIDPLEEKETYKYLGYHQSTKIDHKEIKEKLTQQLKRRINSVLKSHLNSRNITKAINTYAIPILTYSFGIVKWTNSNLKHLQRVLNTSLTRHRKHHPRSCLQRLTLPRDEGGRGFIDIANLHNKQIKSLRSYFHSRASSSHLHNSIVQNDHKLTPLNLCDRESQSNESEINKQTKILQWTQKSLHGRHRLILNHATVDKRASNEWLKRGELFPETEGFMLAIQDQVIETRNYQKFIMKSSISSDRCRRCNSSAETIQHITGACKAIVQTDYKHRHDQVTKIIHQQIALKHKLLSKPSTPYYNYIPDIILENNTHKLYYDRAILTDKTIHFNRPDIILIDKINKAAYLIDVAVPNSHNIQHTIAEKLSKYTDLRDEVIRMWHLQKAVVVPIVISTTGVIPHQLHSSLRTLNLPHHTFANIQKAVILNTCRLTRKFLQTDKNSSLPDT

SEQ ID NO: 31515 - protein, 906 aa, Hasora chromus
MRGVRSEKLDKQIDLIVKKHTTHTIHEEPNTQLSHFLDTMKQKLTVASSRLKRYKMCTLRKAQNSQFGFYEKGFYRTLNDTTTNKTNNSELDIHNTPTQNDLYQFWSKIWENPINHNCNAEWIKNEQRNSIKETMQFELISIETLKNTLDKLHNWKSPGSDNIHNYWYKKFTYIHPYLHNHLNKFIQNPQLIPKYITTGISYLIPKDKNDMVNPAKYRPITCLQTIYKIFTSCLAQIIYEHLDTNNILTEEQKGCRKHSRGCKEQLTIDSVIMKQVQKEKKDLFTMYIDYQKAYDSVPHSWLVQILHIYKIHPQIILFLQNVMANWTTRLILDTANGRIETDSIKIQRGIFQGDALSPLWFCLALNPLSNLLNLSNIGYPIHFDSQQPNKQEKLLSHLLYMDDIKLYANTEDELNSLAELAETFSQDICMQFGIDKCKTNSVKGGQNYKYYYPMQTGETIDPLEENEAYKYLGYHQSKNIHDKEIKVSLTQKFKHRVNSVLKSQLNSRNITKAINTYAIPILTYSFGIVKWTKAELKLLQRIISTSLTRHRKHHPRSCVQRLTLPRDEGGRGFIDVINLHNKQIKSLRNYFHSRTLTSNLHNAIVQNDHKLTPLNLCNREMQSNETCIDKQTKISEWTQKSLHGRHRQVLNHATVDKRASNEWLKRGELFPETEGFMIAIQDQVIETRNYQKFIMKSPIPSDRCRRCNSAAETIQHITGACKAIVQTDYKHRHDQVTKIIHQQLALKHRVLLKPYTPYYNYVPDVVLENETHKLYYDRAILTDKTIHFNRPDLVLIDKINKTAYLIDVAVPNSHNLQNTIAEKLSKYTDLKDEVIRMWQLQKAIIVPIVISTTGVIPSQLHNSLKTLDLPQYTFTNLQKAVILNTCRLTRKFLQTDKDQNFIDYRI

SEQ ID NO: 31516 - protein, 1417 aa, Hasora badra
MAEGELSRKRSLPDTRRPRGVFSLTRHAGLCRARQLSSYAELVAPQWADYGMNTNTLKNKYNLRSLSKLHQETTSGTRSVRKISEEEEVLNRQNQKPYPIEQPSSPLSSSSSLFPSIPSSSCSIRSTSSLSTNSTLVEDVVQLTDKVVDTVPISTTSKRYKWTKDMNIFILRTYLHLTKLETDNTQYLQELHAKFSGKFPHMQVSRQRVGDQRRAIIRNELLGKQEIDNIYTEVRIELDLGEVGDSNYTVNTLQTGQRMRWNNEINEAIMRFYYRITKLETDMTAYRKRLHQDFITAFPNLAHVTEQRVSDQRRIIVNNKRISDERLEVLKKEIATELQLSRNESLTNNEAVTTHPTDDTLNFIYDIDPNCINDTQTTHIPLTIYRNTNIDETFKEALTYYTDTHPTKRDRIPKQKSSKKLATIVHYINSILLPEQLNEDADFETLQTVIYCAAWTAAKCNGAKLTMSPNLCLLRYGGKRRRPKWQIRLERKVEDLRVKIARLTHYILGSRSKNLEREISIIFKKYKIHTSHEEPNDQLSHFLDTLKQKLTVASSRLKRYKMCTLRKHHNRQFDTNEKLFYRSIKDTYNNQKNNHDTVTHNSPTPNELHKFWSEVWEKPITHNSEADWIQNEHTRITPSVAMQFEQISITTFRNAIDKLQNWKSPGSDHIHNYWYKKLTHIHPHLYKFINQFIQNPQNIPKYITEGITYMISKDKNDMQNPGKYRPITCLQTIYKIMTSCIAQVIYEYVDTNTILTEEQKGCRKLSQGCKEQLTIDSIVMKEVKKKKKDLYTMYIDYQKAYDSVPHSWLVKVLQIYKIHPQIINFLKDVMTKWTTQLILPTQDGTIETELIRIQRGIFQGDALSPLWFCLALNPLSHMLKSSNIGHSLQYQTDQDQIVETQINHLLYMDDIKLYAEKEEELMDLAYITEKFSKDVQMQFGIDKCKINSVKAGLTYRHYYTMETGEQIDPLDDNAAYKYLGYNQSKDIHTKEIKASLTQQFKHRINSILKTQLNSRNITKAINTYAIPILTYSFGIINWSHTELKQLQRIINTSLTKHRKHHPRSCIQRLTLPRIEGGRGFIDITNLHNRQIKNLRHYFHNRAISSTLHNAIIQNDHKLTPLNLANKSVQNNEAQIDKQTKILEWAQKSLHGRHRQVLSQATVDKDASNEWLKRGDLFPETEGFMVAIQDQIIETRNYQKYIIKAQIPSDSCRRCNSSSETIQHITGACKAIVQTDYKHRHDQVANIVHQKLALKHKLILEPPTPYYKYVPETVLENRTHKLYFDRAILTDKTIHYNRPDIVLIDKINKHAFLIDIAIPNSHNLQNTISEKLAKYTDLKDEVMRLWQLNKVTIVPIVISTTGVIPVQLHQSLKTLNLPPYTFVNLQKAVILNTCRITRKFLQTDRDHIGKLQDSHTEP

SEQ ID NO: 31517 - protein, 1368 aa, Hasora chromus
MNTNLSKNKYNLRSLSKVHYETRSGTMSMRKISEEEEVLNRQNQTPDPIEQPSSPISSPGSLFPSIPSSSCSIRSISSLSTSSTSVEDVVQVTDNVVDTVPIPTTSKRYKWTKDMNIFILRTYLQLTKLETDNTQYLQDLHSKFSEKFPHMQVSRQRVGDQRRAIIRNELLKKHEIDKINTEVRIELDLSGLSDSNNTVNTLQTGQRMRWNNEVNEAIMRFYYRITKLETDMTAYRKRLHQDFITTFPNLAHVTEQRVSDQRRIIVNNKRISDERLEVLKNEIATELQISRNESLTNNEAVTTYPADDTSNFIYDIDPNCINETLTTHIPSTIHRNANIDETFKEALNYYTDTHPTKRDRIPKQKSSKKLAIIVHYINNIILPEQLNEDSDFKTLQTVIYCAAWTAAKCNGAKLTMSSNLCLLGYHGKRRRPKWQLRLERKVEDLRVKIGRLTHYILGSRSKNLEREINIIFKKYKIHTTHEEPNDQLSHFLDTLKQKLIVASSRLKRYSKCTLRKHHNRQFDTNEKVFYRSIKDNCNKQQSNHDINTHNTPTPNELHTFWSEVWETPVTHNSEADWIQTEHTRMTPSIAMQFEQIPIATFKHAIDKLQNWKSPGSDHIHNYWYKKLTHIHSYLYKFINQFIQNPQHTPKYITEGITYMISKDKNDMQNPGKYRPITCLQTIYKILTSCIAQVIYKYIDTNTILTEEQKGCRKSSQGCKEQLTIDSVVMKEVKKKKKDLFTMYIDYQKAYDSVPHSWLVKVLEIYKIHPQIINFLKNVMSKWTTQLILPTREGTVETEFIRIQRGIFQGDALSPLWFCLALNPLSHMLKSSNVGHSLQYQTEQDQTIITQISHLLYMDDIKLYAETEDELKDLAYITESFSKDVRMQFGIDKCKINSVKAGHTYKHHYTMETGEQIDPLDESTAYKYLGYNQSSDIHTKEIKASLTQQFKHRINSILKSQLNSRNITKAINTYAIPILTYSFGIINWSKTELKQLQRIINTSLTKHRKHHPRSCIQRLTLPRNEGGRGFIDITNLHNRQIKNLRHYFHNRAISSTLHNAIIQTDHKLTPLNLADKSIQNNEAQIVMQTKVVQWAQKSLHGRHRQVLSQATVDKDASNEWLKRGDLFPETEGFMVAIQDQIIETRNYQKYIIKTQIPSDSCRRCNSSSETIQHITGACKAIVQTDYKHRHDQVANIVHQKLALKHKLILEPPTPYYKYVPETVLENRTHKIYFDRAILTDRTIHYNRPDIVLIDKLNKHASLIDIAIPNSHNLQNTISEKLAKYTDLKDEVMRLWQLNKVTIVPIVISTTGVIPVQLHQSLKTLDLPSYTFVNLQKAVILNTCRITRKFLQTDRDHIGRLQDIQTENNT

SEQ ID NO: 31518 - protein, 1116 aa, Ips nitidus
MATKLRENFPNIYYMRKNYSTSESSSESTQEETSQDKEDMTDKEDTPNQDPHQHQPDEIKQGEAGPDSEAGSSGTERRVEEENVQPPIYQSDRPTEQDAEFLQIKTHFQKLLNQVGDKRKKIQKFLVRPSNKTKLSKINTILEEEITNIQNSNKKEAEKRKAIKAAIYAAGKTIREILMPKIGTKPKYCFTQNKIKKLDIHLKNANNIRELGSKKPTKKLMKEIQTIKKLKMTLPQYIESTQERKTMLEARLEVQKRAEERNQLRKKFYDRPSIDILNTHREPVELQPGEAEEYYRNLYKKQQDNIPTPTFNKWLKKLRKYTRKTATPRALYQDNIEQEIEQALQKAAPWKAPGEEGIPTYIYKILKAAKTYLTRYLTDIVNNKIKFTETDVRARVTLIYKKGTKTDPANYRPISLLNTDYKIVTSVIASKIKQVIPKWALPPEQLAQSGMWGTAHELSMDKSIRSLARYRRVPNFSAWYDFRKAYDSVHHKHLKRLIDVLPLHQNIRTAIKTALKQWSMRIQVGKPMTNPVPVRRGMLQGDSIGPLLFTLVTAGVIDLKTDSQVTKINRGKQHVIAYMDDFKCHAPSRQGLETLTIQLTNAAGELGLELNRDKCGQYVRTAQIDDAGDQAPFLPQIRDGYKYLGLEQLEQDSLVNFKKMEEKAQAGLRRILESGLTTGQKMHLINTTIIPAVVYVTANIAPDEKRATTLKRCRDLDTMIRTMLVDHKVKGKTSSNAAVYRPVKRGGLGLKSLEHETELGYIRKGIYLDQHKHMVECKRRYLDLQKGGWRNPLSDMAWVLDKYDIEVQDDQNIKERCQKTVREATKNYQEKLGNEWSRNMHYGRIVLKEGNKLTIPAFTSPYLDTWRRGMLNSAAEEQLHSLAMAQNRRRCRRGCDAVETAYHVSSACVDNSYTTRHDYVVHWIVKTIMQAMRAPKKCFKHFQFGRATCSETFQTGERTIKISAGKKILTGQLLYHNKPDIVVHLTNPDEIYVFEVAISHLQNIRGQEKLKKARYTINSLNHISDINQLNDLERDRNLVTEMAEMHRCPVRFAVCVVGAYGEILATEEYKNFQTMLRDRLKCSQKAIKILANKISCSVAVSTSNMLIRRLNEPQAT

SEQ ID NO: 31519 - protein, 1261 aa, Spioniades abbreviata
MRLRNRKLPQAGTHEGESRPGPSSSGSPTYSGGGNVSHTATQFLTVAADQTPVHEIIQPANSRPNIPAADVSQEACVNQPATTKAGKPRVRMKWDDNINIFIIRTYLEVTKLETDKTMYLNKLFEQFKLQYPHINVTSQRIADQRRVIIRNKLLSDDQINSIKKEIAEKLQKEGNGSDIPVSESSFPAGIEISIASNVHLHDPPPKLHPTVLESQSHTITSNASTQTSTMHATTTNSTTQHDEVVQVDNNTVQELLNELQTSLILFTGTNPTTRPKLPRLRENKKLYVLVNIFNNQILNKYYSIDSNLTDIHTLIYCSALVISRRLGYKITNKTAIHNSFSRKPAWQIRLEKDISNLRADIGRLTQYVNNNRHKKLVHKVNLIFDKYKIHSSHEKYNARPEEFLDTLKQKLTLKSQRLARYIKALARKEDNKAFERSEKGFYRSLNYKNTDIMNKVPNKEELKKYWADIWKKDKEHNEQASWIKEEEQKSETIEPMEFTDVTKTDIEYVSRRMKNWKATGTDNLHNFWIKKFTVLHEILSKIITDIIKCASELPVFITEGITFMIPKTNNTEDPSQYRPIACLPTIYKLITACITLKINTHLRNNNILAEEQKGCRQNHRGCKEQLIIDSTIMKHASTHHRNLHLTYIDYKKAFDSVPHSWLIRVLQIYKINPHIITFLENVMSNWKTKLYLSLNGSSTPIITDVIPIANGIFQGDSLSPLWFCLALNPLSSLLNKDNSGYRLAKETNISHLLYMDDLKLFAKSAKEMNSLIDITTKFSNDINMTFGLDKCKTLKLRRGNVERNMDTRYDIFKLMDENDTYKYLGLCEGRSINHTAIKKDLNKEYVRRLNQICKKQLSSKNMFKAINTFAVPVLTYTFGIIKWTTTDIRSLEIKTRTTLTKHKYLHPKSAIERLTMERINGGRGLIDLRNLWEGQIINLRNFFYTKSTDSLLHNATIESDMNYTPLNLNKKNISFITTTDYEGEKLEKWRSKELHGRHVHDLEQHHINKQASNRWLKLGSLFPETEGFLIAIQDQVINTKNYRKYILKDPNMQNDACRKCHRLPETIQHITSACPSLTQTDYTHRHNQVAYYIHQKVAHKYNLISTKLLPYYHYTPKPVLESDSHKMYFDRSILTDKTIHNNRPDITLIDKRNKIVYLIDISVPNTHNLQKTITEKINKYTELKEEVIRIWKMNKVHIVPLVLSTTGVIPKHLLHSLKLLDLPENSYITMQKTAILNTCRIVRKFLQEDNLNEPKSGVHLA

SEQ ID NO: 31520 - protein, 1094 aa, Junonia neildi
MNNASVEEAINNDQTIAASISVESNSQITELSNYNLQTPSGSSSLPKTQFSLYSNVSTQTGEVRTDLSLTTEPSTIPVTESLVQDLHNKLETAMSLYIGTDPSCRPGLPKIKESKQLYNLIEVFNHKIVDKFHFIDSDITHLHTLIYCTALVISTELGYKVFTDKTKTHKQRNQYKPSWQIRLENDIKNLRRDIGRLTQYINNNRSDKVVENVNKIFDSYKIHSSHEPNNRRPEEFLDTLKQKLTLKSQRLARYTKALQRKEDNTLFTTNEKGFYRKLKATEDNTASELPGKVELQNYWTNIWKKESDHNSKAHWIEEEEERAKTIEPMESIHITKSDIETVTRKMKNWKAPGIDGVYNFWYKKLVILHEALARAVSDLIVGATELPTFVTSGITFMLPKSNNTTDPSQYRPITCLPTIYKLITSCITLKINEHIFRNNILAEEQKGCRKNHMGCKEQLVIDSTILKHATTKNRNLYVTYIDYKKAFDSVPHSWLIHILKIYKINSHIITFLENAMRNWRTTLTVKNKYDSTTTDEIPISNGIFQGDSLSPLWFCLALNPLSNLFNNTSYGYKLTSNTSINHLMYMDDIKLFAKSEKEINKLIDITIKFSEDINMTFGMDKCKILKMKTGKIITNNEEQANYFDILGENETYKYLGINESRAINHTQIKKTIMNECVSRINTICKKQLYSKNLFKAINTYAIPVLTYSFGVIKWTITDIKKIEIKIRTTLTKHNYLHPKSAIERISIQRIKGGRGLMDIKALWENQIQNLRNFFYSKAESSKIHMATIESDNNYTPLNLKNRQREVRSSKNSESDKLNNWRSKELHGRHIHDIEQNNIDQQASNMWLKLGYLFPETEGFIIAIQDQVINTRNYRKFILKDPNTTTDKCRKCNRLPETIQHITSACPSLTQTDYTHRHNQIVHMIHQKLAIKHKLIEGNLSPYYQYTPKPVLESSNHKIYFDRAILTDKTIHNNRPDITLIDKINKITYLIDVAVPNTHNLQKTISEKVHKYTELKEEVIRIWKMNKVYIVPLVLSSTGVIPKYLHHSLRIVDLPANTYIQAQKAVILNTCRIVRKFLQDDSPTLITIDNDSHLA

SEQ ID NO: 31521 - protein, 1178 aa, Junonia stemosa
MSWNNEINTFIMRTYLYITKLETDMTMYCNRLFDQFKLKYPNLNVTPQRIADQRRVIIRNRLLSEEVIDKLKREVAEQIRNEEGMNNASVEEAINNDQTIAASISVESNSQITELSNYNLQTPSGSSSLPKTQFSLYSNVSTQTGEVRTDLSLTTEPSTIPVTESLVQDLHNKLETAMSLYIGTDPSCRPRLPKIKESKQLYNLIEVFNHKIVDKFHFIDSDITHLHTLIYCTALVISTELGYKVFTDKTKTHKQRNQYKPSWQIRLENDIKNLRRDIGRLTQYINNNRSDKVVENVNKIFDSYKIHSSHEPNNRRPEEFLDTLKQKLTLKSQRLARYTKALQRKEDNTLFTTNEKGFYRKLKATEDNTASELPGKVELQNYWTNIWKKESDHNSNAHWIEEEEEWAKTIKPMESIHITKSDIETVTRKMKNWKAPGIDGVYNFWYKKLVILHEALARAVSDLIVGATELPTFVTSGITFMLPKSNNTTDPSQYRPITCLPTIYKLITSCITLKINEHIFRNNILAEEQKGCRKNHMGCKEQLVIDSTILKHATTKNRNLYVTYIDYKKAFDSVPHSWLIHILKIYKIDSHIITFLENAMRNWRTTLTVKNKYDSTTTDEIPISNGIFQGDSLSPLWFCLALNPLSNLFNNTSYGYKLTSNTSINHLMYMDDIKLFAKSEKEINKLIDITIKFSEDINMTFGMDKCKILKMKTGKIITNNEEQANYFDILGENETYKYLGINESRAINHTQIKKTIMNECVSRINTICKKQLYSKNLFKAINTYAIPVLTYSFGVIKWTITDIKKIEIKIRTTLTKHNYLHPKSAIERISIQRIKGGRGLMDIKALWENQIQNLRNFFYSKAESSKIHMATIESDNNYTPLNLKNREREVRSSKNSESDKLNNWRSKELHGRHIHDIEQNNIDLQASNMWLKLGYLFPETEGFIIAIQDQVINTRNYRKFILKDPNTTTDKCRKCNRLPETIQHITSACPSLTQTDYTHRHNQIVHMIHQKLASKHKLIEGNLSPYYQYTPKPVLESSSHKIYFDRAILTDKTIHNNRPDITLIDKINKITYLIDVAVPNTHNLQKTISEKVHKYTELKEEVIRIWKMNKVYIVPLVLSSTGVIPKYLHHSLRIVDLPANTYIQAQKAVILNTCRIVRKFLQDDSPTLITIDNDSHLA

SEQ ID NO: 31522 - protein, 1299 aa, Junonia genoveva
MENKYNKKYNLRSRHQASVTSSESQQLSIENPSQLKQTTIQPSPLNHSPSSRSSSPHSLLESPNSLLEFSRRISTDKTTATEISEQITNNQIRSVSPAKDVSQGPSVHQPATTKAGKPRVRMSWNNEINTFIMRTYLYITKLETDMTMYCNRLFDQFKLKYPNLNVTPQRIADQRRVIIRNRLLSEEVIDKLKREVAEQIRNEEGMNNASVEEAINNDQTIAASISVESNSQITELSNYNLQTPSGSSSLPKTQFSLYSNVSTQTGEVRTDLSLTTEPSTIPVTESLVQDLHNKLETAMSLYIGTDPSCRPRLPKIKESKQLYNLIEVFNHKIVDKFHFIDSDITHLHTLIYCTALVISTELGYKVFTDKTKTHKQRNQYKPSWQIRLENDIKNLRRDIGRLTQYINNNRSDKVVENVNKIFDSYKIHSSHEPNNRRPEEFLDTLKQKLTLKSQRLARYTKALQRKEDNTLFTTNEKGFYRKLKATEDNTASELPGKVELQNYWTNIWKKESDHNSKAHWIEEEEERAKTIEPMESIHITKSDIETVTRKMKNWKAPGIDGVYNFWYKKLVILHEALARAVSDLIVGATELPTFVTSGITFMLPKSNNTTDPSQYRPITCLPTIYKLITSCITLKINEHIFRNNILAEEQKGCRKNHMGCKEQLVIDSTILKHATTKNRNLYVTYIDYKKAFDSVPHSWLIHILKIYKIDSHIITFLENAMRNWRTTLTVKNKYDSTTTDEIPISNGIFQGDSLSPLWFCLALNPLSNLFNNTSYGYKLTSNTSINHLMYMDDIKLFAKSEKEINKLIDITIKFSEDINMTFGMDKCKILKMKTGKIITNNEEQANYFDILGENETYKYLGINESRAINHTQIKKTIMNECVSRINTICKKQLYSKNLFKAINTYAIPVLTYSFGVIKWTITDIKKIEIKIRTTLTKHNYLHPKSAIERISIQRIKGGRGLMDIKALWENQIQNLRNFFYSKAESSKIHMATIESDNNYTPLNLKNREREVRSSKNSESDKLNNWRSKELHGRHIHDIEQNNIDLQASNMWLKLGYLFPETEGFIIAIQDQVINTRNYRKFILKDPNTTTDKCRKCNRLPETIQHITSACPSLTQTDYTHRHNQIVHMIHQKLASKHKLIEGNLSPYYQYTPKPVLESSSHKIYFDRAILTDKTIHNNRPDITLIDKINKITYLIDVAVPNTHNLQKTISEKVHKYTELKEEVIRIWKMNKVYIVPLVLSSTGVIPKYLHHSLRIVDLPANTYIQAQKAVILNTCRIVRKFLQDDSPTLITIDNDSHLA

SEQ ID NO: 31523 - protein, 1299 aa, Junonia pacoma
MENKYNKKYNLRSRHQASVTSSESQQLSIENPSQLKQTTIQPSPLNHSPSSRSSSPHSLLESTNSLLEFSRRISTDKTTATEISEQITNNQIRSVSPAKDVSQGPSVHQPATTKAGKPRVRMSWNSEINTFIMRTYLYITKLETDMTMYCNRLFDQFKLKYPNLNVTPQRIADQRRVIIRNRLLSEEVIDKLKREVAEQIRNEEGMNNASVEEAINNDQTIAASISVESNSQITELSNYNLQTPSGSSSLPKTQFSLYSNVSTQTGEVRTDLSLTTEPSTIPVTESLVQDLHNKLETAMSLYIGTDPSCRPRLPKIKESKQLYNLIEVFNHKIVDKFHFIDSDITHLHTLIYCTALVISTELGYKVFTDKTKTHKQRNQYKPSWQIRLENDIKNLRRDIGRLTQYINNNRSDKVVENVNKIFDSYKIHSSHEPNNRRPEEFLDTLKQKLTLKSQRLARYTKALQRKEDNTLFTTNEKGFYRKLKATEDNTASELPGKVELQNYWTNIWKKESDHNSNAHWIEEEEERAKTIEPMESIHITKSDIETVTRKMKNWKAPGIDGVYNFWYKKLVILHEALARAVSDLIVGATELPTFVTSGITFMLPKSNNTTDPSQYRPITCLPTIYKLITSCITLKINEHIFRNNILAEEQKGCRKNHMGCKEQLVIDSTILKHATTKNRNLYVTYIDYKKAFDSVPHSWLIHILKIYKIDSHIITFLENAMRNWRTTLTVKNKYDSTTTDEIPISNGIFQGDSLSPLWFCLALNPLSNLFNNTSYGYKLTSNTSINHLMYMDDIKLFAKSEKEINKLIDITIKFSEDINMTFGMDKCKILKMKTGKIITNNEEQANYFDILGENETYKYLGINESRAINHTQIKKTIMNECVSRINTICKKQLYSKNLFKAINTYAIPVLTYSFGVIKWTITDIKKIEIKIRTTLTKHNYLHPKSAIERISIQRIKGGRGLMDIKALWENQIQNLRNFFYSKAESSKIHMATIESDNNYTPLNLKNREREVRSSKNSESDKLNNWRSKELHGRHIHDIEQNNIDLQASNMWLKLGYLFPETEGFIIAIQDQVINTRNYRKFILKDPNTTTDKCRKCNRLPETIQHITSACPSLTQTDYTHRHNQIVHMIHQKLASKHKLIEGNLSPYYQYTPKPVLESSSHKIYFDRAILTDKTIHNNRPDITLIDKINKITYLIDVAVPNTHNLQKTISEKVHKYTELKEEVIRIWKMNKVYIVPLVLSSTGVIPKYLHHSLRIVDLPANTYIQAQKAVILNTCRIVRKFLQDDSPTLITIDNDSHLA

SEQ ID NO: 31524 - protein, 1178 aa, Junonia coenia
MSWNNEINTFIMRTYLYITKLETDMTMYCNRLFDQFKLKYPNLNVTPQRIADQRRVIIRNRLLSEEVIDKLKREVAEQIRNEEGMNNASVEEAINNDQTIAASISVESNSQITELSNYNLQTPSGSSSLPKTQFSLYSNVSTQTGEVRTDLSLTTEPSTIPVTESLVQDLHNKLETAMSLYIGTDPSCRPRLPKIKESKQLYNLIEVFNHRIVDKFHFIDSDITHLHTLIYCTALVISTELGYKVFTDKTKTHKQRNQYKPSWQIRLENDIKNLRRDIGRLTQYINNNRSDKVVENVNKIFDSYKIHSSHEPNNRRPEEFLDTLKQKLTLKSQRLARYTKALQRKEDNTLFTTNEKGFYRKLKATEDNTASELPGKVELQNYWTNIWKKESDHNSNAHWIEEEEERAKTIEPMESIHITKSDIETVTRKMKNWKAPGIDGVYNFWYKKLVILHEALARAVSDLIVGATELPTFVTSGITFMLPKSNNTTDPSQYRPITCLPTIYKLITSCITLKINEHVFRNNILAEEQKGCRKNHMGCKEQLVIDSTILKHATTKNRNLYVTYIDYKKAFDSVPHSWLIHILKIYKIDSHIITFLENAMRNWRTTLTVKNKYDSTTTDEIPISNGIFQGDSLSPLWFCLALNPLSNLFNNTSYGYKLTSNTSINHLMYMDDIKLFAKSEKEINKLIDITIKFSEDINMTFGMDKCKILKMKTGKIITNNEEQANYFEILGENETYKYLGINESRAINHTQIKKTIMNECVSRINTICKKQLYSKNLFKAINTYAIPVLTYSFGVIKWTITDIKKIEIKIRTTLTKHNYLHPKSAIERISIQRIKGGRGLMDIKELWENQIQNLRNFFYSKAESSKIHMATIESDNNYTPLNLKNREREVRSSKNSESDKLNNWRSKELHGRHIHDIEQNNIDLQASNMWLKLGYLFPETEGFIIAIQDQVINTRNYRKFILKDPNTTTDKCRKCNRLPETIQHITSACPSLTQTDYTHRHNQIVHMIHQKLASKHKLIEGNLSPYYQYTPKPVLESSSHKIYFDRAILTDKTIHNNRPDITLIDKINKITYLIDVAVPNTHNLQKTISEKVHKYTELKEEVIRIWKMNKVYIVPLVLSSTGVIPKYLHHSLRIVDLPANTYIQAQKAVILNTCRIVRKFLQDDSPTLITIDNDSHLA

SEQ ID NO: 31525 - protein, 1299 aa, Junonia evarete
MENKYNKKYNLRSRHQASVTSSESQQLSIENPSQLKQTTIQPSPLNHSPSSRSSSPHSLLESPNSLLEFSRRISTDKTTATEISEQITNNQIRSVSPAKDVSQGPSVHQPATTKAGKPRVRMSWNSEINTFIMRTYLYITKLETDMTMYCNRLFDQFKLKYPNLNVTPQRIADQRRVIIRNRLLSEEVIDKLKREVAEQIRNEEGMNNASVEEAINNDQTIAASISVESNSQITELSNYNLQTPSGSSSLPKTQFSLYSNVSTQTGEVRTDLSLTTEPSTIPVTESLVQDLHNKLETAMSLYIGTDPSCRPRLPKIKESKQLYNLIEVFNHKIVDKFHFIDSDITHLHTLIYCTALVISTELGYKVFTDKTKTHKQRNQYKPSWQIRLENDIKNLRRDIGRLTQYINNNRSDKVVENVNKIFDSYKIHSSHEPNNRRPEEFLDTLKQKLTLKSQRLARYTKALQRKEDNTLFTTNEKGFYRKLKATEDNTASELPGKVELQNYWTNIWKKESDHNSNAHWIEEEEERAKTIEPMESIHITKSDIETVTRKMKNWKAPGIDGVYNFWYKKLVILHEALARAVSDLIVGATELPTFVTSGITFMLPKSNNTTDPSQYRPITCLPTIYKLITSCITLKINEHVFRNNILAEEQKGCRKNHMGCKEQLVIDSTILKHATTKNRNLYVTYIDYKKAFDSVPHSWLIHILKIYKIDSHIITFLENAMRNWRTTLTVKNKYDSTTTDEIPISNGIFQGDSLSPLWFCLALNPLSNLFNNTSYGYKLTSNTSINHLMYMDDIKLFAKSEKEINKLIDITIKFSEDINMTFGMDKCKILKMKTGKIITNNEEQANYFDILGENETYKYLGINESRAINHTQIKKTIMNECVSRINTICKKQLYSKNLFKAINTYAIPVLTYSFGVIKWTITDIKKIEIKIRTTLTKHNYLHPKSAIERISIQRIKGGRGLMDIKALWENQIQNLRNFFYSKAESSKIHMATIESDNNYTPLNLKNREREVRSSKNSESDKLNNWRSKELHGRHIHDIEQNNIDLQASNMWLKLGYLFPETEGFIIAIQDQVINTRNYRKFILKDPNTTTDKCRKCNRLPETIQHITSACPSLTQTDYTHRHNQIVHMIHQKLASKHKLIEGNLSPYYQYTPKPVLESSSHKIYFDRAILTDKTIHNNRPDITLIDKINKITYLIDVAVPNTHNLQKTISEKVHKYTELKEEVIRIWKMNKVYIVPLVLSSTGVIPKYLHHSLRIVDLPANTYIQAQKAVILNTCRIVRKFLQDDSPTLITIDNDSHLA

SEQ ID NO: 31526 - protein, 1299 aa, Junonia litoralis
MENKYNKKYNLRSRHQASVTSSESQQLSIENPSQLKQTTIQPSPLNHSPSSRSLSPHSLLESPNSLLEFSRRISTDKTTATEISEQITNNQIRSVSPAKDVSQGPSVHQPATTKAGKPRVRMSWNNEINTFIMRTYLYITKLETDMTMYCNRLFDQFKLKYPNLNVTPQRIADQRRVIIRNRLLSEDVIDKLKREVAEQIRNEEGMNNASVEEAINNDQTIAASISVESNSQITELSNYNLQTPSGSSSLPKTQFSLYSNVSTQTGEVRTDLSLTTEPSTIPVTESLVQDLHNKLETAMSLYIGTDPSCRPRLPKIKESKQLYNLIEVFNHKIVDKFHFIDSDITHLHTLIYCTALVISTELGYKVFTDKTKTHKQRNQYKPSWQIRLENDIKNLRRDIGRLTQYINNNRSDKVVENVNKIFDSYKIHSSHEPNNRRPEEFLDTLKQKLTLKSQRLARYTKALQRKEDNTLFTTNEKGFYRKLKATEDNTASELPGKVELQNYWTNIWKKESDHNSKAHWIEEEEERAKTIEPMESIHITKSDIETVTRKMKNWKAPGIDGVYNFWYKKLVILHEALARAVSDLIVGVTELPTFVTSGITFMLPKSNNTTDPSQYRPITCLPTIYKLITSCITLKINEHIFRNNILAEEQKGCRKNHMGCKEQLVIDSTILKHATTKNRNLYVTYIDYKKAFDSVPHSWLIHILKIYKIDSHIITFLENAMRNWRTTLTVKNKYDSTTTDEIPISNGIFQGDSLSPLWFCLALNPLSNLFNNTSYGYKLTSNTSINHLMYMDDIKLFAKSEKEINKLIDITIKFSEDINMTFGMDKCKILKMKTGKIITNNEEQANYFDILGENETYKYLGINESRAINHTQIKKTIMNECVSRINTICKKQLYSKNLFKAINTYAIPVLTYSFGVIKWTITDIKKIEIKIRTTLTKHNYLHPKSAIERISIQRIKGGRGLMDIKALWENQIQNLRNFFYSKAESSKIHMATIESDNNYTPLNLKNRQREVRSSKNSESDKLNNWRSKELHGRHIHDIEQNNIDLQASNMWLKLGYLFPETEGFIIAIQDQVINTRNYRKFILKDPNTTTDKCRKCNRLPETIQHITSACPSLTQTDYTHRHNQIVHMIHQKLASKHKLIEGNLSPYYQYTPKPVLESSSHKIYFDRAILTDKTIHNNRPDITLIDKINKITYLIDVAVPNTHNLQKTISEKVHKYTELKEEVIRIWKMNKVYIVPLVLSSTGVIPKYLHHSLRIVDLPANTYIQAQKAVILNTCRIVRKFLQDDSPTLITIDNDSHLA

SEQ ID NO: 31527 - protein, 1299 aa, Junonia evarete
MENKYNKKYNLRSRHQASVTSSESQQLSIENPSQLKQTTIQPSPLNHSPSSRSSSPHSLLESPNSLLEFSRRISTDKTTATEISEQITNNQIRSVSPAKDVSQGPSVHQPATTKAGKPRVRMSWNNEINTFIMRTYLYITKLETDMTMYCNRLFDQFKLKYPNLNVTPQRIADQRRVIIRNRLLSEEVIDKLKREVAEQIRNEEGMNNASVEEAINNDQTIAASISVESNSQITELSNYNLQTPSGSSSLPKTQFSLYSNVSTQTGEVRTDLSLTTEPSTIPVTESLVQDLHNKLETAMSLYIGTDPSCRPRLPKIKESKQLYNLIEVFNHKIVDKFHFIDSDITHLHTLIYCTALVISTELGYKVFTDKTKTHKQRNQYKPSWQIRLENDIKNLRRDIGRLTQYINNNRSDKVVENVNKIFDSYKIHSSHEPNNRRPEEFLDTLKQKLTLKSQRLARYTKALQRKEDNTLFTTNEKGFYRKLKATEDNTASELPGKVELQNYWTNIWKKESDHNSKAHWIEEEEERAKTIEPMESIHITKSDIETVTRKMKNWKAPGIDGVYNFWYKKLVILHEALARAVSDLIVGATELPTFVTSGITFMLPKSNNTTDPSQYRPITCLPTIYKLITSCITLKINEHIFRNNILAEEQKGCRKNHMGCKEQLVIDSTILKHATTKNRNLYVTYIDYKKAFDSVPHSWLIHILKIYKIDSHIITFLENAMRNWRTTLTVKNKYDSTTTDEIPISNGIFQGDSLSPLWFCLALNPLSNLFNNTSYGYKLTSNTSINHLMYMDDIKLFAKSEKEINKLIDITIKFSEDINMTFGMDKCKILKMKTGKIITNNEEQANYFDILGENETYKYLGINESRAINHTQIKKTIMNECVSRINTICKKQLYSKNLFKAINTYAIPVLTYSFGVIKWTITDIKKIEIKIRTTLTKHNYLHPKSAIERISIQRIKGGRGLMDIKALWENQIQNLRNFFYSKAESSKIHMATIESDNNYTPLNLKNRQREVRSSKNSESDKLNNWRSKELHGRHIHDIEQNNIDQQASNMWLKLGYLFPETEGFIIAIQDQVINTRNYRKFILKDPNTTTDKCRKCNRLPETIQHITSACPSLTQTDYTHRHNQIVHMIHQKLASKHKLIEGNLSPYYQYTPKPVLESSSHKIYFDRAILTDKTIHNNRPDITLIDKINKITYLIDVAVPNTHNLQKTISEKVHKYTELKEEVIRIWKMNKVYIVPLVLSSTGVIPKYLHHSLRIVDLPANTYIQAQKAVILNTCRIVRKFLQDDSPTLITIDNDSHLA

SEQ ID NO: 31528 - protein, 1226 aa, Junonia neildi
MENKYNKKYNLRSRHQASVTSSESQQLSIENPSQLKQTTIQPSPLNHSPSSRSSSPHSLLESPNSLLEFSRRISTDKTIATEISEQITNNQIRSVSPAKDVSQGPSVHQPATTKAGKPRVRMSWNNEINTFIMRTYLYITKLETDMTMYCNRLFDQFKLKYPNLNVTPQRIADQRRVIIRNRLLSEEVIDKLKREVAEQIRNEEGMNNASVEEAINNDQTIAASISVESNSQITELSNYNLQTPSGSSSLPKTQFSLYSNVSTQTGEVRTDLSLTTEPSTIPVTESLVQDLHNKLETAMSLYIGTDPSCRPRLPKIKESKQLYNLIEVFNHKIVDKFHFIDSDITHLHTLIYCTALVISTELGYKVFTDKTNTHKQRNQYKPSWQIRLENDIKNLRRDIGRLTQYINNNRSDKVVENVNKIFDSYKIHSSHEPNNRRPEEFLDTLKQKLTLKSQRLARYTKALQRKEDNTLFTTNEKGFYRKLKATEDNTASELPGKVELQNYWTNIWKKESDHNSNAHWIEEEEERAKTIEPMESIHITKSDIETVTRKMKNWKAPGIDGVYNFWYKKLVILHEALARAVSDLIVGATELPTFVTSGITFMLPKSNNTTDPSQYRPITCLPTIYKLITSCITLKINEHIFRNNILAEEQKGCRKNHMGCKEQLVIDSTILKHATTKNRNLYVTYIDYKKAFDSVPHSWLIHILKIYKIDSHIITFLENAMRNWRTTLTVKNKYDSTTTDEIPISNGIFQGDSLSPLWFCLALNPLSNLFNNTSYGYKLTSNTSINHLMYMDDIKLFAKSEKEINKLIDITIKFSEDINMTFGMDKCKILKMKTGKIITNNEEQANYFDILGENETYKYLGINESRAINHTQIKKTIMNECVSRINTICKKQLYSKNLFKAINTYAIPVLTYSFGVIKWTITDIKKIEIKIRTTLTKHNYLHPKSAIERISIQRIKGGRGLMDIKALWENQIQNLRNFFYSKAESSKIHMATIESDNNYTPLNLKNREREVRSSKNSESDKLNNWRSKELHGRHIHDIEQNNIDLQASNMWLKLGYLFPETEGFIIAIQDQVINTRNYRKFILKDPNTTTDKCRKCNRLPETIQHITSACPSLTQTDYTHRHNQIVHMIHQKLASKHKLIEGNLSPYYQYTPKPVLESSSHKIYFDRAILTDKTIHNNRPDITLIDKINKITYLIDVAVPNTHNLQKTISEKVHKYTELKEEVIRI

SEQ ID NO: 31529 - protein, 1299 aa, Junonia zonalis
MENKYNKKYNLRSRHQASVTSSESQQLSIENPSQLKQTTIQPSPLNHSPSSRSSSPHSLLESPNSLLEFSRRISTDKTTATEISEQITNNQIRSVSPAKDVSQGPSVHQPATTKAGKPRVRMSWNNEINTFIMRTYLYITKLETDMTMYCNRLFDQFKLKYPNLNVTPQRIADQRRVIIRNRLLSEEVIDKLKREVAEQIRNEEGMNNASVEEAINNDQTIAASISVESNSQITELSNYNLQTPSGSSSLTKTQFSLYSNVSTQTGEVRTDLSLTTEPSTVSVSESLVQDLHNKLETAMSLYIGTDPSCRPRLPKIKESKQLYNLIEVFNHKIVDKFHFIDSDITHLHTLIYCTALVISTELGYKVFTDKTKTHKQRNQYKPSWQIRLENDIKNLRRDIGRLTQYINNNRSDKVVENVNKIFDSYKIHSSHEPNNRRPEEFLDTLKQKLTLKSQRLARYTKALQRKEDNTLFTTNEKGFYRKLKATEDNTASELPGKVELQNYWTNIWKKESDHNSNAHWIEEEEERAKTIEPMESIHITKSDIETVTRKMKNWKAPGIDGVYNFWYKKLVILHEALARTVSDLIVGATELPTFVTSGITFMLPKSNNTTDPSQYRPITCLPTIYKLITSCITLKINEHIFRNNILAEEQKGCRKNHMGCKEQLVIDSTILKHATTKNRNLYVTYIDYKKAFDSVPHSWLIHILKIYKIDSHIITFLENAMRNWRTTLTVKNKYDSTTTDEIPISNGIFQGDSLSPLWFCLALNPLSNLFNNTSYGYKLTSNTSINHLMYMDDIKLFAKSEKEINKLIDITIKFSEDINMTFGMDKCKILKMKTGKIITNNEEQANYFDILGENETYKYLGINESRAINHTQIKKTIMNECVSRINTICKKQLYSKNLFKAINTYAIPVLTYSFGVIKWTITDIKKIEIKIRTTLTKHNYLHPKSAIERISIQRIKGGRGLMDIKALWENQIQNLRNFFYSKAESSKIHMATIESDNNYTPLNLKNREREVRSSKNSESDKLNNWRSKELHGRHIHDIEQNHIDLQASNMWLKLGYLFPETEGFIIAIQDQVINTRNYRKFILKDPNTTTDKCRKCNRLPETIQHITSACPSLTQTDYTHRHNQIVHMIHQKLASKHKLIEGNLSPYYQYTPKPVLESSSHKIYFDRAILTDKTIHNNRPDITLIDKINKITYLIDVAVPNTHNLQKTISEKVHKYTELKEEVIRIWKMNKVYIVPLVLSSTGVIPKYLHHSLRIVDLPANTYIQAQKAVILNTCRIVRKFLQDDSPTLITIDNDSHLA

SEQ ID NO: 31530 - protein, 1299 aa, Junonia grisea
MENKYNKKYNLRSRHQASVTSSESQQLSIENPSQLKQTTIQPSPLNHSPSSRSSSPHSLLESPNSLLEFSRRISTDKTTATEISEQITNNQIRSVSPAKDVSQGPSVHQPATTKAGKPRVRMSWNSEINTFIMRTYLYITKLETDMTMYCNRLFDQFKLKYPNLNVTPQRIADQRRVIIRNRLLSEEVIDKLKREVAEQIRNEEGMNNASVEEAINNDQTIAASISVESNSQITELSNYNLQTPSGSSSLPKTQFSLYSNVSTQTGEVRTDLSLTTEPSTIPVTESLVQDLHNKLETAMSLYIGTDPSCRPRLPKIKESKQLYNLIEVFNHKIVDKFHFIDSDITHLHTLIYCTALVISTELGYKVFTDKTKTHKQRNQYKPSWQIRLENDIKNLRRDIGRLTQYINNNRSDKVVENVNKIFDSYKIHSSHEPNNRRPEEFLDILKQKLTLKSQRLARYTKALQRKEDNTLFTTNEKGFYRKLKATEDNTASELPGKVELQNYWTNIWKKESDHNSNAHWIEEEEERAKTIEPMESIHITKSDIETVTRKMKNWKAPGIDGVYNFWYKKLVILHEALARAVSDLIVGATELPTFVTSGITFMLPKSNNTTDPSQYRPITCLPTIYKLITSCITLKINEHIFRNNILAEEQKGCRKNHMGCKEQLVIDSTILKHATTKNRNLYVTYIDYKKAFDSVPHSWLIHILKIYKIDSHIITFLENAMRNWRTTLTVKNKYDSTTTDEIPISNGIFQGDSLSPLWFCLALNPLSNLFNNTSYGYKLTSNTSINHLMYMDDIKLFAKSEKEINKLIDITIKFSEDINMTFGMDKCKILKMKTGKIITNNEEQANYFDILGENETYKYLGINESRAINHTQIKKTIMNECVSRINTICKKQLYSKNLFKAINTYAIPVLTYSFGVIKWTITDIKKIEIKIRTTLTKHNYLHPKSAIERISIQRIKGGRGLMDIKELWENQIQNLRNFFYSKAESSKIHMATIESDNNYTPLNLKNREREVRSSKNSESDKLNNWRSKELHGRHIHDIEQNNIDLQASNMWLKLGYLFPETEGFIIAIQDQVINTRNYRKFILKDPNTTTDKCRKCNRLPETIQHITSACPSLTQTDYTHRHNQIVHMIHQKLASKHKLIEGNLSPYYQYTPKPVLESSSHKIYFDRAILTDKTIHNNRPDITLIDKINKITYLIDVAVPNTHNLQKTISEKVHKYTELKEEVIRIWKMNKVYIVPLVLSSTGVIPKYLHHSLRIVDLPANTYIQAQKAVILNTCRIVRKFLQDDSPTLITIDNDSHLA

SEQ ID NO: 31531 - protein, 1285 aa, Fabriciana adippe
METRSKKVRIWPLPEGDRRGAPGADAGCLSMRSIGGTELNRRVSTDKNVTAEVTNQLTFDDRQKVNSIHSSRSVTPTTSAADVSQGTSVQQPVTTKAGKPRVRMKWDSEINTFIMRTYLYITKLETDMTMYGSKLFEQFKLKYPDLNVTAQRVADQRRVILRNRLLSEEVINKLKKEISEQINYEERMTNTPTPVTTCIVNSTLTPVETNSKITEPSTNILFSLSQRTYVPESQVSLMSFNISQASVSTQTEVPTSDLLQITESVAIDQYELPNSLIQDLHNKLETTLMLYTGTDPSHRPKLPKLRENNKLYDLVRIFNQILVKFHSVDSDITQLHTLIYCVALVISKELGYKTYSDAITYKKKSLNKPEWQIRLENDIKKLRVDIGRLTQFINNNRSNKLVKHVNKILSSYKIHSSHEKNNSRPKEFLDTLKQKLTLKSQRLARYKKSLQRKEDNKLFTNNEKDFYRRLKNVQDNTIRELPAENELKDYWTNIWKKDKDHNNSAKWIEKVEETAKTIKPMEFIDVNKIDIEKVTKKMKNWKAAGVDGVHNFWYKKLVVLHQALAVAISDVIKGTAEFPSFLTKGITYMLPKSNNTTDPSQYRPITCLPTIYKLITSCIALKINKIHNNILAEEQKGCRQNHMGCKEQLIIDSNILKHATTHNRNLFLTYIDYKKAFDSIPHSWLIRILQIYKIDSCIISFLEDVMRTWRTTILLNNGCNCIVTDDIPISNGIFQGDSLSPLWFCLALNPLSYLLNSPNSGYRLTSNTYISHLMYMDDIKLFAKSDKEIKKLIEITAEFSNDINMTFGVDKCKILKLRSGKIETKSNESNDYFNVMGENESYKYLGLHEGRTINHTQIKKDLSNECFSRLHKICKKTLYSKNLVKAINTYVIPVLTYSFGVVKWSATDINKLEIKLRTTLTKYNYLHPKSAIERMTVQRSKGGRGVIDIRVLWEKQIQNLRNFFYSKAETSQIHLATVETDTNYTPLNLNNKVREFISSQDYESEKLTKWRNKELHGRHIHDLEQNHVDIQASNQWLKLGYLFPETEGFIIAIQDQVINTRNYKKFILKDSTLKSDKCRKCHRQPETIQHITSACPSLTQTDYTHRHNQVAHMIHQKLASKHKLIQGKPQPYYQYTPKPVLESSNYKIYFDRAILTDKTIHNNRPDITLIDKINKITYLIDIAVPNTHNLQKTITEKIHKYTELKEEVIRIWKMNKVYIVPLVISSTGVIPKYLLHSLRVLDLSHNTFISMQKATILNTCRIVRKFLQDDSPNHQNISNVDSHLA

SEQ ID NO: 31532 - protein, 1379 aa, Erynnis tages
MKKSNISSYVRDKIEGLDCTVEKRRYNLRPLSGGRRRNNEADIDMRKPQANLQKPTPEIAIPISHPSSPLSSNHSLFQSHPSSPHSFENPSVSRSTTASPMSVDVGQEANADQNGKPINMKLRSRTVVTKESLPGAGVGRLSIRTIGGEGFCGRPSARYAEQCESSKALVDTYSDEYRYESGTVFRASDVSQEAVAIQPVTTKAGKPRMRMKWDDEINTFIMRTYLYITKLEADRTMYPKKLYDQFKLKYPHIKVNSQRIADQRRVIVRNKLLSDNQINDLKQEIALRLQNEKNAIDVPASHITTPAPYVASQSDNYNFVNPTTSLLPTTCESQPLTLTSNAPTQTSTPCATIHTSNVEHDKTLDNSTVEELVNELKSNLNLYSGTNATTRPKLPRLRENKHLYVLVNTFNNQILNKFYNIDSNLIDIHTLIYCSALVISKRLGCNVTNETLTKRKPNQRKPTWQIRIEKDISNLRADIGRLTQYMNNNRHPKLVRKVDLIFNKYKFHASHVKQNTRPEEFLDTLKQKLTLKSKRLARYNKSLQRKQDNKLFERNEKGFYRTLNNKTGETVNGVPKEEDLKNYWAGIWKKTKEHNEEASWIKEEEKKAETIEPMEFTDISKTDIEYVTRKMKNWKATGVDNIHNFWFKKFTTLHNILAKIITDILKGTSDLPSFVTEGITFMIPKSSNTADPSQYRPITCLPTIYKLITACITQKINKHLNFNNIIAEEQKGCRQNHRGCKEQLIIDSTIMKHATSHNRNLNLTYIDYRKAFDSVPHSWLTRVLKIYKINPYIITFLEDAMRNWKTKLYLNLHTNNKPIITETIPIANGIFQGDSLSPLWFCLALNPLSSLLNKNNSGYKLTRKIHVSHLMYMDDIKLFAKTEKEMNGLIKTTTQFSNDINMSFGLDKCKTLKLHKGKLNSNTDDRYDIFALMEENDTYKYLGLCEGRCINHTIIKKDLTIEYIRRINALCKRQLSSRNLFKAINTFAVPVLTYTFGIIKWTVTDIRNLEIKTRTTLTKHKYLHPKCAIERLTLKRPSGGRGLIDIKKLWEGQITNLRKFFYEKSTSSKIHEAVIESDVNYTPLHLSNKNQEFMTPIDHDKEKLERWRNKELHGRHAHDLEQPHVHAQASNRWLKIGTLFPETEGFLLAIQDQVINTKNYKKHILKDPTIKNDSCRKCHRLPETIQHITSACPSLTQSDYTHRHNQVAYYIHQKLASKYHLISNKILPYYQYTPKPVLESKSHKMYFDRPILTDKTIHYNRPDIILIDKTNKTAYLIDISIPNTHNLQKTITEKIQKYTELKEEGTRIWNMNRVYIVPLVLSTTGVIPKHLFHSLKLLNLPESSFITMQKAVILNTCRIVRKFLQEESLIDLESDVHLV

SEQ ID NO: 31533 - protein, 1264 aa, Helias cama
MELRSRNVSKGPLPEGNRRGTPGADAGRLSMRTIGGEGFTGRPSAGSPEQCESSRTSVDTSSDEYRYDSRTASPASDVSQATVVTQPATTKAGKPRVRMKWDDEINTFIMRTYLYITKLETDRTMYPKKLFDQFKLKYPHLNVTSQRIADQRRVIVRNKLLSDDQISRIKQEIATKLQDEESGSSVLVSQNFLPDNIFDPSNCNLNNTTALILPTISESQPLILTSSVSTQTSLVSDVIHSPEVEYDEIDNNTVQELVNELQTNLTLYNGSNATTRPKLPRLRENKQLYSLVNTFNNKILNKFYSIDSDLIDIHILIYCSALVISRRLGHKTTKEAIIKSKPLRNKPAWQIRLEKDISNLRADIGRLTQYINNNRHKKLLNKISVIFNKYKFHSSHEKHNLRPEEFLDTLKQKLTLKSQRLSRYIKSLQRKENNKWFETNEKSFYRNLNNKAAETINVVPNQEELENYWADIWKSKKVHNEEASWIKEEENRVETIEPMEFSDLTKADIEYVTRKMKNWKATGTDSIHNFWFKKFSSLHNILAQIITNILKGTSELPMFVTEGITYMIPKNSNTADPSQYRPITCLPTIYKLITACITLKINTHLNNNNILAEEQKGCRQSHRGCKEQLIIDSTIMKHATSHNRNLNVTYIDYRKAFDSVPHSWLIRVLQIYKINPNIVKFLENIMSNWKTKLYLNLRSGNKPIITDSIPIANGIFQGDSLSPLWFCLALNPLSSLLNKNNIGYKLTKETHISHLIYMDDLKLFAKSEKEMHNLIKTTNQFSNDINMSFGIEKCKTLKLIKGKLNNNVDSRYDFFTLMEENETYKYLGLCEGRCINHTVIKKDLTHEYLHRMNQLCKKQLSSRNLFKAINTFAIPVLTYTFGIIKWSNTDIRNLEIKTRTTLTKYKYLHPKSAVERLTIKRANGGRGLIDIKKLWEGQVSNLRHFFYTKSPNSKIHKAIIESDVNYTPLHLNDRNKQFMIPADYEREKLEKWRRKELHGRHAHDLEQPHIDMQASNRWLKVGCLFPETEGFLIAIQDQVISTKNYKKYIIKDPNITSDKCRKCHRLPETIQHITSACSSLTQTDYTHRHNQVVYYIHQKLASKHHLITTKLLPYYQYTPKPVLESDSHKMYFDRSILTDKTIHNNRPDITLIDKSNKIAYLIDISIPNTHNLQKTISEKLHKYVELKEEVIRIWKLNKVYIVPLVLSTTGVIPRHLFHSLKLLGLPENSYITMQKAAILNTCRIVRKFLQEDNNIEPENSVHLV

SEQ ID NO: 31534 - protein, 766 aa, Helias cama
MEFNDLTRADIEYVTSRMKNWKATGTDNVHNFWFKKFSALHDILAQIISSILKGESELPAFVTEGITFMIPKNSNTADPSQYRPITCLPTIYKLITACLTLKINTHLNTNNILAEEQKGCRQNHRGCKEQLIIDSTIMKHATSHNRNLNLTYIDYKKAFDSVPHSWLIRVLQIYKINPYLIAFLESVMGSWRTKLYLNLKTSDSPILTDVIPIANGIFQGDSLSPLWFCLAINPLSSLLNKNNYGYKLAKETHISHLIYMDDLKLFAKSEKEMHALIKITEQFSDDIKMSFGLDKCRTLKLKKGKVNSNTDSRHDIFTVMEENETYKYLGLCEGRCINHTVIKKDVTFEYFRRINQICKKQLNSRNLFKAINTFAIPVLIYTFGILKWTATDIRNLEIKTRTTLTKYKYLHPKSAIERLTIKRLDGGRGLSDIRKLWEGQITNLRNFFYAKSVNSAIHNAVIESDVNYTPLHLNNKNKQLMIPNDYEKEKQDKWRSKELHGRHFHDLEQPHINMQASNRWLKLGSLFPETEGFLIAIQDQIINTKNYKKYILKDPFITNDKCRRCHRLPETIQHITGACPSLTQSDYTHRHNQVAYYVHQKLANKHHLIPKKLLPYYQYTPKPVLESNSHKMYFDRSILTDKTIHNNRPDITLIDKTNKVAYLIDISIPNTHNLQKTISEKLHKYTELKEEVTRIWKLDKVYIVPLVLSTTGVVPKYIFHSLKLLDLPDNTYITMQKAAILNTCRIVRKFLQEENTNVSESVVHLA

SEQ ID NO: 31535 - protein, 1265 aa, Chiomara georgina
MELRSRIVSRGPLPEGNRRGTPGADAGRLSMRTIGGEGFTGRPSAGSPEQCESSSSSRMSVETSSDTYDSRAVSPVSDVSQVTVVNQPVTTKTGKPRVRMKWDEEINTFIMRTYLYITKLETDRTMYPKKLFDQFKLKYPHMNVTSQRIADQRRVIVRNKLLSDEQINKIKQEIATRLQDEESGNSVSVQNNTSDNVLDPSHYNCNNQASSILPSITESQPLTLTLNVATQTSSISSIVRSPDVGYIEVINNSTVQELVNELQTTLTLYNGTNATTRPKLPRLTENKQLYSLVNIFNTKILNKFYSIDSSLTDIHTLIYCSALVISKRLKYKISSETLTKRKPYNNKPAWQIRLEKDISTLRADIGRLTQYINNNRHAKLVRKIDLIFNKYKFHSSHEKHNFRPEEFLDTLKQKLTLKSQRLARYMKSQKRKEDNKLFERNEKLFYRRLSNKDVGTVSEVPNEEELKNYWADIWGNKKEHNEEAEWIKEEEKKVETIEPMEFHDISKADIEFVTSKMKNWKATGNDYIHNFWLKKFSALHDILAQIITCILKGTLELPSFVTEGITVMIPKNTNTSDPSQYRPITCLPTIYKLITGCLTLKINTHLNNNNILAEEQKGCRQNHRGCKEQLIIDSTIMKHATSHNRNLNLTYIDYRKAFDSVPHSWLIRVLQIYKINPYIITFLEGIMGSWKTKIYLNINSSIKPIITEVIPITKGIFQGDSLSPMWFCLALNPLSSLLNRNNSGYKLNKETHISHLIYMDDLKLFAKSDKEMHNLIKTTKQFSNDINMSFGLDKCRTLKLRKGKINSNVDSVNDIFNLMDENDTYKYLGICEGRCINHTTIKKGVIHEYFRRIHQICKKQLYSKNLFKAINTFAIPVLIYTFGIIKWSATDIRNLEIKTRTTLSKYKYLHPKSAIERLTIKRTDGGRGLSDIKKLWTGQITNLRKFFYTKSDNSMIHKAIIELDDNYTPLNLHNKNKEYMIPTEYEKEKQERWRSKELHGRHFHDLEQPHIDMQASNKWLKLGSLFPETEGFLIAIQDQVINTKNYKKYILKDPNITNDKCRKCHRLPETIQHITSACPNLTQNDYTHRHNQVAYYVHQKLASKHQLISNQRLPYYEYTPKPVLESDSHKMYFDRSILTDKTIHNNRPDITLIDKINKIAYLIDISIPNTHNLQKTISEKLHKYTELKEEVIRIWKLHKVYIVPLVLSSTGVVPRYIFHSLKLLDLPENSYITMQKAAILNTTRIVRKFLQEDSTNIPESDVHLV

SEQ ID NO: 31536 - protein, 1266 aa, Camptopleura auxo
MELRSRIVSRGPLPGGNRRGTPGADAGRLSMRTIGGEGFTGRPSAGSPEQCESSRASVDTSSDEYKCDSRAVSPASDVSQATAVTNPATTKAGKPRVRMKWDDEINTFIMRTYLYITKLETDRTMYPKKLFDQFKLQYPHINVTSQRIADQRRVIVRNKLLSDDQINRIKLEVAARLQDVESGHSALISQTYLHDDNVLDPSNYNLNNTTTSVLPSISESQPLTLTSNVSTQASLVSAIVYPPDVEYYEVVDNSIVQELVNELQTNLTLYNGTNATTRPKLPRLRENKQLYALVNIFNRQILNNFYSIDSNLIDIHTLIYCSALVISRRLGYKITKESIIKPKPNYTKPAWQIRLEKDISNLRADIGRLTQYINNNRHPKLVSKINIIFGKYKFHSSHEKHNLRPEEFLDTLKQKLTLKSQRLSRYIKSLRRRENNKWFENNEKGFYRNLNNKTAEVINGVPNQEELKNYWANIWGNKKAHNKEASWIKEEENKVETVEPMEFSDVTRTDIEYVTRKTKNWKATGTDSIHNFWFKKFSSLHDILAQIITNILKGTSEFPIFITEGITYMIPKNSNTTDPSQYRPITCLPTIYKLITACITHKINKHLNKYNILAEEQKGCRQSHRGCKEQLIIDSTIMKHATSHNRNLNLTYIDYRKAFDSVPHSWLIHVLQIYKINPHIIQFLENIMSNWKTKLCLNPKSSIKPIITESIPIANGIFQGDSLSPLWFCLAINPLSSLLNKNNRGYKLTKETHISHLIYMDDLKLFAKSEKEMHTLIKTTNQFSDDINMSFGFEKCKTLKLSKGKLNSNTDSRYDFFTLMEENETYKYLGLCEGRCINHTAIKKDLTHEYLHRINQLCKKQLSSRNLFKAINTFAIPVLIYTFGIVKWSTTDIRNLEIKTRTTLTKYKYLHPKSAIERITMKRPNGGRGLSDIRKLWEGQISNLREFFYAKSISSKIHEAIIESDINYTPLHLNDRNKQFTMPTNYEKEKLQKWRSKELHGRHAHDLEQPHIDMQASNRWLKIGSLFPETEGFLIAIQDQVINTKNYKKYILKEPNIINDNCRKCHRLPETIQHITSACSSLTQTDYTHRHNQVVHYVHQKLASKHHLITNKLLPYYQYTPKPVLENNSHKMYFDRSILTDKTIHNNRPDITLIDKINKTAYLIDISIPNTHNLQKTISEKLHKYVELKEEVIRIWKLHKVYIVPLVLSSTGVIPKNLFHSLKLLGLPDNSFITMQKAAILNTCRIVRKFLQEDNNIEPESGVHLA

SEQ ID NO: 31537 - protein, 1234 aa, Ebrietas anacreon
MRTIGGEGFTGRPSAGSPEQCESSRTSVDTSSDEYKCDSRAVSPTSDVSQVTIVTQPVTTKAGKPRVRMKWNDEINTFIMRTYLYITKLETDRTMYPKKIFDQFTIKYPHIKVTSQRIADQRRAIVRNKLLSDDQFDKIKQEVVTKLQDEESENSALVSQTYSPGNVLDPSRCNLNNTATSILPTISESQPLTLTSNVSTQTSLVTTVVQSPEVEYDEVDNSLAQELTNELQTNLTLYNGTNATTRPKLPRLRENKQLYALVNTFNRQILNNFYSIDSNLIDIHTLIYCSALVISRRLGYKITKEYTIKLKPNYNKPAWQVRLEKDISNLRADIGRLTQYINNNRHAKLVSKVNAIFDKYKFHSSHEKHNLRPEEFLDTLKQKLTLKSQRLSRYIKSLQRKENNKWFEKNEKGFYRHLSNKDAATINGVPDQEELKNYWADVWGNQKLHNEEASWIKEEESRVETIEPMEFVDLTRSDIEYVTKKMKNWKATGIDSIHNFWLKKFSSLHNILAQIITNILNGSSELPTFVTEGITYMIPKNSNTTDPSQYRPITCLPTIYKLITACITLKINIHLNNNNILAEEQKGCRQNHRGCKEQLLIDSTLMKHATSHNRNLSLTYIDYRKAFDSVPHSWLVRVLQIYKINPHITKFLENVMCNWKTKLCLNLKSNIKPIITEGIPIANGIFQGDSLSPLWFCLALNPLSTLLNKNNKGYKLTKDTHISHLIYMDDLKLFAKSEKEMHTLIKTTNQFSDDINMSFGFEKCKTLKLSKGKLNSNTNSSYDIFTLMGENDTYKYLGLCEGRCINHTAIKKDLTHEYLHRLNQLCKKQLSSRNLFKAINTFAIPVLTYSFGIVKWTATDIRNLEIKTRTTLTKYKYLHPKSAIERITIKRPNGGRGLSDIKKIWEGQISNLRNFFYAKSSNSKIHKAIIESDLNYTPLQLCDKNKQFMMPTDYEKEKLQKWRSKELHGRHAHDLEQPHIDIQASNKWLKLGSLFPETEGFLIAIQDQVICTKNYKKYILKDSNTTNDSCRKCHRLPETIQHITSACSSLTQTDYTHRHNQVVYYVHQKLASKHHLITKKLLPYYQYTPKPVLENCSHKMYFDRSILTDKTIHNNRPDITLIDKINKTAYLIDISIPNTHNLQKTISEKLHKYAELKEEVNRIWKLNKVYIVQLVLSTTGVIPKYLFHSLKLLGLPENSYITMQKAAILNTCRIVRKFLQEDNNIQPESGVHLV

SEQ ID NO: 31538 - protein, 1387 aa, Erynnis tages
MKKSNISSYVRDKIEGLDCTVEKRRYNLRPLSGGRRRNNEADIDMRKPQANLQKPTPEIAIPISHPSSPLSSNHSLFQSPPSSPHSFENPSVSRSTTASPMSVDVGQEANADQNGKPINMKLRSRTVVTKESLPGGKRRGMPGAGVGRLSIRTIGGEGFCGRPSARYAEQCESSKALVDTYSDEYRYESGTVFPASDVSQEAVAIQPVTTKAGKPRMRMKWDDEINTFIMRTYLYITKLETDRTMYPKKLYDQFKLKYPHIKVNSQRIADQRRVIVRNKLLSDDQINGLKQEIALRLQNEKSAIDVPASHITTPAPYVASQSDNYNFVNPTTSLLPTTCESQPLTLTSNAPTQTSTPCATIHTSNVEHDKTLDNSTVEELVNELQSNLNLYSGTNATTRPKLPRLRENKHLYVLVNTFNNQILNKFYNIDSNLIDIHTLIYCSALVISKRLGCNVTNETLTKRKPNQRKPTWQIRIEKDISNLRADIGRLTQYMNNNRHPKLVRKVDLIFNKYKFHASHVKQNTRPEEFLDTLKQKLTLKSKRLARYNKSLQRKQDNKLFERNEKGFYRTLNNKTGETVNGVPKEEDLKNYWADIWKKTKEHNEEASWIKEEEKKAETIEPMEFTDISKTDIEYVTRKMKNWKATGVDNIHNFWFKKFTTLHNILAKIITDILKGTSDLPSFVTEGITFMIPKSSNTADPSQYRPITCLPTIYKLITACITQKINKHLNFNNIIAEEQKGCRQNHRGCKEQLIIDSTIMKHATSHNRNLNLTYIDYRKAFDSVPHSWLTRVLKIYKINPYIVTFLEDAMRNWKTKLYLNLHTNNKPIITETIPIANGIFQGDSLSPLWFCLALNPLSSLLNKNNSGYKLTRKIHVSHLMYMDDIKLFAKTEKEMNGLIKTTTQFSNDINMSFGLDKCKTLKLQKGKLNSNTDDRYDIFALMEENDTYKYLGLCEGRCINHTIIKKDLTIEYIRRINALCKRQLSSRNLFKAINTFAVPVLTYTFGIIKWTVTDIRNLEIKTRTTLTKHKYLHPKCAIERLTLKRPSGGRGLIDIKKLWEGQITNLRKFFYEKSTSSKIHEAVIESDVNYTPLHLSNKNKEFMTPIDHDKEKLERWRNKELHGRHAHDLEQPHVHAQASNRWLKIGTLFPETEGFLLAIQDQVINTKNYKKHILKDPTIKNDSCRKCHRLPETIQHITSACPSLTQSDYTHRHNQVAYYIHQKLASKYHLISNKILPYYQYTPKPVLESKSHKMYFDRPILTDKTIHYNRPDIILIDKTNKTAYLIDISIPNTHNLQKTITEKIQKYTELKEEGTRIWNMNRVYIVPLVLSTTGVIPKYLFHSLKLLNLPESSFITMQKAVILNTCRIVRKFLQEESLIDLESDVHLV

SEQ ID NO: 31539 - protein, 1264 aa, Potamanaxas melicertes
MELRSRIVRRGPLPGGNRRGTPGADAGRLSMRTIGGEGFTGWPSAGSPEQCESSRTSVETSSDEYKYDSRTVSPASDVSQTTVVIQPATTKAGKPRVRMKWDDDINIFIMRTYLYITKLETDRTMYPKKLFDQFKLKYPHINVTSQRIADQRRVIVRNKLLSDVQINSIKQEVAIRLQNEESENSISVTQTSPSHTVSNQLNSDVNYPSTSLLPTIFESQSLTLTSDASTQTLTMSTSTHMPEVEQVELIDNSTVQELINELQTNLTLYNGTNATTRPKLPRLRENKQLYVLVNTFNSQILNKFYSVDSNLTDIHTLIYCSALVISKRLGYKIIKEPLTKRKIYSKPPWQIRLEKDISNLRADIGRLTQYINNNRHAKLVRKINLIFTKYKFHSSHEKNNLRPEEFLDTLKQKLTLKSQRLARYVKSLQRKEDNKLFERNEKGFYRNLSNRATETVKEVPNKEELKNYWADIWGKKKNHNEEANWIKEEEKRVETIEPMEFFDLTKTDIEYVTRKMKNWKATGTDSIHNFWFKKFSVLHDILARIINDILKGASEIPTFITEGITFMIPKNDNTNDPSQYRPITCLPTIYKLITSCITLKINLHLNNNNILAEEQKGCRQNHRGCKEQLIIDSTIMKHATSHNRNLNLTYIDYRKAFDSVPHSWLIHVLQIYKINPHIIAFLESVMRNWKTKLCLRLNNSIKPIITEVIPIANGIFQGDSLSPLWFCLALNPLSSLLNKNNSGYKLTKETYISHLMYMDDIKLFAKSEKEMHCLINTTTQFSNDINMAFGLDKCKTLKLFKGKLNSNIDTRYDIFTLMDENDTYKYLGLCEGRCVNHTAIKKELTCEYFRRINQICKKHLSSRNLFKAINTFAIPVLIYTFGVIKWTATDIRNLEIKTRTTLTKYKYLHPKSAIERLTIKRQDGGRGLSDIKKLWEGQITNLRNFFYAKSNNSTIHKAIIESDLNYTPLNLNNTNIQLMISTDYEKGKLDRWRNKELHGRHVHDLEQSHINKEASNRWLKLGSLFPETEGFLVAIQDQVINTKNYAKYILKDPNMKNDSCRKCHRLPETIQHITSACSSLTQSDYTHRHNQVVYYIHQKLASKYHLINTKLLPYYQYTPKPVLESGSHKMYFDRSILTDKTIHNNRPDVTLIDKINKTAYLIDISIPNTHNLQKTITEKIHKYTELKEEVSRIWKMNKVYIVPLVLSTTGVIPKYLFHSLKLLDLPENSYITMQKAAILNTCRIVRKFLQEENIYEPLSDVHLV

SEQ ID NO: 31540 - protein, 1163 aa, Timochares trifasciata
MKWDDEINTFIMRTYLYITKLETDRTMYPKKLFDQFRLKYPHINVTSQRIADQRRVIVRNKLLSDNQINRLKQEVATRLQDEESENAVLVSQTYSHENVLDPSNYKTNNTTTSILTTNFETQPLTTNVSTQTSLESAIVHPPDVEYDVVDNNTVQELVDDLQTNLTLYNGTNVTTRPKLPRLRENKQLYKLVNTFNSQILNKFYSIDSNLIDIHTLIYCSALVITKRLGYKINKELIKKPKPHNKPAWQIRLEKDISNLRADIGRLTQYINNNRHTKLVSKISIIFSKYKFHSSHEKQNLRPEEFLDTLKQKLRLKSQRLSRYIKSLQRKENNKWFEKNEKGFYRNLNHTSAEIINGTPSQEELKNYWSDIWSNKKMHHEESSWIKEEESRVETIEPMELSDLTRTDIEYVTRKMKNWKATGTDGIHNFWIKKFSELHNILAQIITDILKGTSELPIFVTEGITYMIPKNSNTTDPSQYRPITCLPTIYKLITACITLKINRHLNNNNILAEEQKGCRQSHRGCKEQLIIDSTIMKHATTHNRNLNITYIDYRKAFDSVPHSWLIRVLQIYKINPHIVKFLENIMSNWKTKLCLNLKSSIEPITTEGIPIANGIFQGDSLSPLWFCLALNPLSSLLNKNSNGYKLTKETHISHLIYMDDLKLFAKSEKEMSTLIKTTKQFSDDINMSFGFEKCKTLKLHKGKLNSKPDSRYDFFTLMGENETYKYLGLCEGRCINHKDIKKDLTHEYLHRINQLCKKQLNSRNLFKAINTFAIPVLTYTFGVVKWTITDIRNLEIKTRTTLTKYKYLHPKSAIERITIKRPNGGRGLSDIKKLWEGQIANLRNFFYAKSINSKIHKAIIESDINYTPLQLYDRNKQFMIPTDYEKEKLEKWRSKELHGRHAHDLEQAHVDMQASNRWLKLGSLFPETEGFLIAIQDQVMNTKNYKKYIIKDPNITSDSCRKCHRLPETIQHITSACSSLTQSDYTHRHNQVVYYVHQKLASKHNLITNKLLPYYQYTPKPVLESDSHKMYFDRSILTDKTIHNNRPDITLIDKINKTAYLIDISIPNTHNLQKTISEKLHKYVDLKEEVIRIWNLHKVYIVPLVLSTTGVIPKNMFHSLKLLGLPENSYIIMQKAAILNTCRIVRKFLQEENNNEPESGVHLV

SEQ ID NO: 31541 - protein, 1254 aa, Pyrgus malvae
MELRSRVILRKEPLPEGDRRGTPGADAGRLSMRTIGGEGFTGRPSAGTPEQCESSRSSVETTSDEYKYDSRAVSPASDVSQAAVANQPATTKAGKPRVRMKWDDEINTFIMRTYYYITRLEKDRTMYPKKLFDQFKIKYPQLNVNSQRVADQRRVIIRNKLLSDDKINSIKQEVAEKLQEEENGINITDSEPNYTLTSSMPPSLLPIIPESHYETLKSNASTQTSAIHITIPVPATQHNNVVDDKLVQELVTELQTALTLFSGTNATSRPKLPRLRENKQLYLLVNIFNKHVLDKFYSIDSELIHIHTLIYCTALVISKRLGYKITNEPAVKRNLNNRKPAWQIRLEKDISILRVEIGRLTQYTNINRHAKLIRKVSLIFDKYKIHSSHEKHNIRPEEFLDTLKQKLTLKSQRLARYIKALQRKEDNTTFERSEKSFYRKINNKASMTTNGTPSKEELQDYWANIWKKSKMHNEQADWIKEEEQKAGTIESMEFTDISKTDIEYVTRKLKNWKATGTDHIHNFWIKKLTKLHDILAKAITDILIGASELPSFATEGITFMIPKSNNTSDPSQYRPITCLPTIYKLITACITMKMNIHLTNNNILAEEQKGCRQNHRGCKEQLIIDSTIMKHATLHNRNLNLTYIDYKKAFDSVPHSWLIRILHIYRINSHIITFLEGVMSNWKTRLYLHPSENETPIITEVIPIAKGIFQGDSLSPLWFCLALNPLSSLLNKHNYGYKLTKETTISHLMYMDDIKLFAKSPKEMNSLIKLTTQFSNDINMTFGLDKCKTLKLQKGKLNANIENTYDIFTIMNEHDTYKYLGLHEGRCINHTEIKKHLTTEYIRRLNQICKRQLYSKNMFKAINTFAIPVLTYTFGIIKWSVTDIKHLEIKTRTTLTKHKYLHPKSAIERLTIKRIDGGRGLIDLKKLWDGQIANLRNFFYLKSNNSPIHNAVIQLDINYTPLNLNNKNIPFPLPVDYQKEKLGSWRGKELHGRHAHDLEQTYINKHASNKWLTLGTLFPETEGFLIAIQDQVINTKNYKKYILKDPKSQSDKCRKCHRLPETIQHITSACPSLTQTDYTHRHNQVAHYVHQKIASKYNLISNKLLPYYQYTPKPVLESASHKIYFDRSILTDRTIHNNRPDITVIDKTSKIGYLIDISIPNTHNLQKTITVKLHKYVELKEEIIRIWKLNTVYIVPLVISSTGMIPKCLSHYLNLLDLPENCYITMQKAAILNTCRIVRKFLNENDSNSDVHLA

SEQ ID NO: 31542 - protein, 1146 aa, Mylon lassia
MELRSRIVRRGPLPGGNRRGTPGADAGRLSMQTIGGEGFTGRPLAGSPEQCESSRTSVETSSDEYKYDSRSVSPASDVSQATVVIQPATTKAGKPRVRMKWDDDINTFIMRTYLYITKLETDRTMYPKKLFNQFKLKYPHINVTSQRIADQRRVIVRNKLLSDDQINFIKQEVSMRLQNEESENSISGPETSTYYGVSDPSNCDINNPTTSRLPTILESQLLTCTSNASTQTSAMSISEHSPEVEQVELMHNNTVQELINELQTNLTLYNGTNATTRPKLPRLRENKQLYVLVNTFNSQILNNFYSINSNLTDIHTLIYCSALVISRRLGYKINNESHKKGKPYYSKPAWQIRLEKDISNLRADIGRLTQYINNNRHTQLVRKVNLIFDKYKFHSSHEKHNFRPEEFLDTLKQKLTLKSQRLARYVKSLQRKEDNKWFERNEKGFYRNLNSRVTETVKEVPNKEELKNYWADIWGKRDDHKEEASWIKEEEKRAETIEPMEFVDLTKTDIEFVTRKMKNWKATGTDNIHNFWFKKFSILHDILARIITDILKGTSELPIFVTEGITFMIPKNENTNDPSQYRPITCLPTIYKLITACITLKLNIHLNHNNILAEEQKGCRQNHKGCKEQLIIDSTIMKHATTHNRNLNLTYIDYRKAFDSVPHSWLIHVLKIYKVNPHIVAFLKGVMRNWKTKLCLHLNTSIQPIITEVIPITNGIFQGDSLSPLWFCLALNPLSSLLNNKNYGYKLDKDTYINHLMYMDDIKLFAKSEKEMHGLIKATTEFSNDINMTFGLDKCKTLKLVRGKLNSNTDSRYDIFTLMEENDTYKYLGLLEGRCIDHTVIKKDLSNEYFRRINQICKKYLSSRNLIKAINTFAIPVLIYTFGVIKWTATDIKNLEIKTRTTLTKYKYLHPKSAIERLTIKRQNGGRGLSDIKKLWEGQIANLRNFFYAKSNNSTIHRAITELDVNYTPLHLNNRNKQLMTPTDYEKEKVERWRSKELHGRHVHDLEQPHINKQASNRWLKLGSFYPETEGFLIAIQDQVINTKNYKKYILKDPNITNDSCRKCHRLPETIQHITSACPSLTQSDYTHRHNQIAYYIHQKLASKYNLITNTLLPYYQYTPKPVLESGSHKMYFDRSILTDKTIHNN

SEQ ID NO: 31543 - protein, 767 aa, Boloria selene
MDHINITKIDIEKVTKKMKNWKAAGVDGAHNFWLKKLVALHQALAVAISDIIKRTAEIPSFLTKGLTYMLPKSSNTTDPSQYRPITCLPTIYKLITSCIALKINTHVICNNILAEEQKGCRQNHMGCKEQLIIDSNILKHATTHNRNLFLTYIDYKKAFDSIPHSWLIRILQIYKINSDIISFLEDAMRTWRTTLLVNNGCNSIIIDDIPITNGIFQGDSLSPLWFCLALNPLSYLLNSQNSGYKLTSNTNITHLMYMDDIKLFAKSEKEINKLIEITAEFSKDINMTFGVDKCKILKLRSGKIITNNSEPADYFDVMGEHESYKYLGLHEGRTINHTQIKKDLSNECFSRLNKICKRTLCSKNLVKAINTYVIPVLIYSFGVVKWTVTDINKLEIKIRTTLTKYNYLHPKSAIERMTVQRGKGGRGVIDIRVLWEKQIQNLRNFFYSKAETSQIHLAIVETDTNYTPLNLNNKDREFISIKDYEVEKLTKWRSKELHGRHIHDLELNHIDLQASNQWLKLGYLFPETEGFIIAIQDQVINTRNYKKFILKDPALKSDKCRKCHRLPETIQHITSACPSLTQTDYTHRHNQVAHMIHQKLASKHNLIQGKLQPYYQYTPKPVLESDKYKIYFDRAILTDKTIHNNRPDITLTDKINKITYLIDIAVPNTHNLQKTITEKIHKYTELKEEVIRIWKMNKVYIVPLVLSSTGVIPKYLLHSLRILDLSPNTFINMQKATILNTCRLVRKFLQDDSPNHQSLNNDDSHLA

SEQ ID NO: 31544 - protein, 1286 aa, Boloria selene
METRSKKVRIRPLPEGDRRGAPGADAGCLSMRTIGCTKLNRRVSTDKNVTAEVSNQPNFNNRQEDNSNSSRSVTPTTPAADVSQGTSVHQPVTTKAGKPRVRMKWDSEINTFIMRTYLYITKLETDMTMYGSKLFEQFKLKYPELNVTAQRVADQRRVIIRNRLLSEEVINKLKKDISEQINYEERMTNTSALVSTDLMNSVITPNESNSKLTDLNTNIPLPLSQRSYVPESQLSLMSLNISQSSVSTQTEAPMSDLLQSPESIAIVQNEVSNSFIQDLHNKLETTLVMYTGTDPTHRPKLPKLRENKKLYDLVGIFNQISVKFISIDSDIKQLHTLIYCIAFVISKELGYKIYSNKIHIKKSSLHKPEWQIRLENDIRKLRVDIGRLTQFINNNRSNKLVKHVNKIFTSYKVHSSHEKNNSRLEEFLDTLKQKLTVKSQRLARYKKSLQRKEDNKLFINNEKDFYRRLKDIQDNTVRELPAENELKDYWTNIWKKDTDHNNYAKWIERVEETAKTIEPMDHINITKIDIEKVTKKMKNWKAAGVDGVHNFWLKKLVALHQALAVAISDIIKRTAEIPSFLTKGLTYMLPKSSNTTDPSQYRPITCLPTIYKLITSCIALKINTHVICNNILAEEQKGCRQNHMGCKEQLIIDSNILKHATTHNRNLFLTYIDYKKAFDSIPHSWLIRILQIYKINSDIISFLEDAMRTWRTTLLVNNGCNSIIIDDIPITNGIFQGDSLSPLWFCLALNPLSYLLNSQNSGYKLTSNTNITHLMYMDDIKLFAKSEKEINKLIEITAEFSKDINMTFGVDKCKILKLRSGKIITNNSEPADYFDVMGEHESYKYLGLHEGRTINHTQIKKDLSNECFSRLNKICKRTLCSKNLVKAINTYVIPVLIYSFGVVKWTVTDINKLEIKIRTTLTKYNYLHPKSAIERMTVQRGKGGRGVIDIRVLWEKQIQNLRNFFYSKAETSQIHLAIVETDTNYTPLNLNNKDREFISIKDYEVEKLTKWRSKELHGRHIHDLELNHIDLQASNQWLKLGYLFPETEGFIIAIQDQVINTRNYKKFILKDPALKSDKCRKCHRLPETIQHITSACPSLTQTDYTHRHNQVAHMIHQKLASKHNLIQGKLQPYYQYTPKPVLESDKYKIYFDRAILTDKTIHNNRPDITLTDKINKITYLIDIAVPNTHNLQKTITEKIHKYTELKEEVIRIWKMNKVYIVPLVLSSTGVIPKYLLHSLRILDLSPNTFINMQKATILNTCRLVRKFLQDDSPNHQSLNNDDSHLA

SEQ ID NO: 31545 - protein, 1286 aa, Boloria selene
METRSKKVRIGPLPEGDRRGAPGADAGCLSMRTIGGTKLNRRVSTDKNVTAEVSNQPNFNNRQEDNSNSSRSVTPTTPAADVSQGTSVHQPVTTKAGKPRVRMKWDSEINTFIMRTYLYITKLETDMTMYGSKLFEQFKLKYPELNVTAQRVADQRRVIIRNRLLSEEVINKLKKDISEQINYEERMTNTSALVSTDLMNSVITPNESNSKLTDPNTNIPLPLSQRSYVPESQLSLMSFNISQSSVSTQTEAPMSDLLQSPESIAIVQNEVSNSFIQDLHNKLETTLVMYTGTDPTHRPKLPKLRENKKLYDLVGIFNQISVKFISIDSDIKQLHTLIYCIAFVISKELGYKIYSNKIHIKKSSLHKPEWQIRLENDIRKLRVDIGRLTQFINNNRSNKLVKHVNKIFTSYKVHSSHEKNNSRLEEFLDTLKQKLTVKSQRLARYKKSLQRKEDNKLFINNEKDFYRRLKDIQDNTVRELPAENELKDYWTNIWKKDTDHNNYAKWIERVEETAKTIEPMDHINITKIDIEKVTKKMKNWKAAGVDGVHNFWLKKLVALHQALAVAISDIIKRTAEIPSFLTKGLTYMLPKSSNTTDPSQYRPITCLPTIYKLITSCIALKINTHVICNNILAEEQKGCRQNHMGCKEQLIIDSNILKHATTHNRNLFLTYIDYKKAFDSIPHSWLIRILQIYKINSDIISFLEDAMRTWRTTLLVNNGCNSIIIDDIPITNGIFQGDSLSPLWFCLALNPLSYLLNSQNSGYKLTSNTNITHLMYMDDIKLFAKSEKEINKLIEITAEFSKDINMTFGVDKCKILKLRSGKIITNNSEPADYFDVMGEHESYKYLGLHEGRTINHTQIKKDLSNECFSRLNKICKRTLCSKNLVKAINTYVIPVLIYSFGVVKWTVTDINKLEIKIRTTLTKYNYLHPKSAIERMTVQRGKGGRGVIDIRVLWEKQIQNLRNFFYSKAETSQIHLAIVETDTNYTPLNLNNKDREFISIKDYEVEKLTKWRSKELHGRHIHDLELNHIDLQASNQWLKLGYLFPETEGFIIAIQDQVINTRNYKKFILKDPALKSDKCRKCHRLPETIQHITSACPSLTQTDYTHRHNQVAHMIHQKLASKHNLIQGKLQPYYQYTPKPVLESDKYKIYFDRAILTDKTIHNNRPDITLTDKINKITYLIDIAVPNTHNLQKTITEKIHKYTELKEEVIRIWKMNKVYIVPLVLSSTGVIPKYLLHSLRILDLSPNTFINMQKATILNTCRLVRKFLQDDSPNHQSLNNDDSHLA

SEQ ID NO: 31546 - protein, 1100 aa, Boloria selene
MTNTSALVSTDLMNSVITPNESNSKLTDPNTNIPLPLSQRSYVPESQLSLMSLNISQSSVSTQTEAPMSDLLQSPESIAIVQNEVSNSFIQDLHNKLKTTLVMYTGTDPTHRPKLPKLRENKKLYDLVGIFNQISVKFISIDSDIKQLHTLIYCIAFVISKELGYKIYSNKIHIKKSSLHKPEWQIRLENDIRKLRVDIGRLTQFINNNRSNKLVKHVNKIFTSYKVHSSHEKNNSRLEEFLDTLKQKLTVKSQRLARYKKSLQRKEDNKLFINNEKDFYRRLKDIQDNTVRELPAENELKDYWTNIWKKDTDHNNYAKWIERVEETAKTIEPMDHINITKIDIEKVTKKMKNWKAAGVDGVHNFWLKKLVALHQALAVAISDIIKRTAEIPSFLTKGLTYMLPKSSNTTDPSQYRPITCLPTIYKLITSCIALKINTHVICNNILAEEQKGCRQNHMGCKEQLIIDSNILKHATTHNRNLFLTYIDYKKAFDSIPHSWLIRILQIYKINSDIISFLKDAMRTWRTTLLVNNGCNSIIIDDIPITNGIFQGDSLSPLWFCLALNPLSYLLNSQNSGYKLTSNTNITHLMYMDDIKLFAKSEKEINKLIEITAEFSKDINMTFGVDKCKILKLRSGKIITNNSEPADYFDVMGEHESYKYLGLHEGRTINHTQIKKDLSNECFSRLNKICKRTLCSKNLVKAINTYVIPVLIYSFGVVKWTVTDINKLEIKIRTTLTKYNYLHPKSAIERMTVQRGKGGRGVIDIRVLWEKQIQNLRNFFYSKAETSQIHLAIVETDTNYTPLNLNNKDREFISIKDYEVEKLTKWRSKELHGRHIHDLELNHIDLQASNQWLKLGYLFPETEGFIIAIQDQVINTRNYKKFILKDPALKSDKCRKCHRLPETIQHITSACPSLTQTDYTHRHNQVAHMIHQKLASKHNLIQGKLQPYYQYTPKPVLESDKYKIYFDRAILTDKTIHNNRPDITLTDKINKITYLIDIAVPNTHNLQKTITEKIHKYTELKEEVIRIWKMNKVYIVPLVLSSTGVIPKYLLHSLRILDLSPNTFINMQKATILNTCRLVRKFLQDDSPNHQSLNNDDSHLA

SEQ ID NO: 31547 - protein, 1257 aa, Fabriciana adippe
MRSIGGTELNRRVSTDKNVTAEVTNQLTFDDRQKVNSIHSSRSVTPTTSAADVSQGTSVQQPVTTKAGKPRVRMKWDSEINTFIMRTYLYITKLETDMTMYGSKLFEQFKLKYPDLNVTAQRVADQRRVILRNRLLSEEVINKLKKEISEQINYEERMANTPTLVTTCIVNSTLTPVETNSKITEPSTNILFSLSQRTYVPESQVSLMSFNISQASVSTQTEVPTSDLLQITESVAIDQNELPNSLIQDLHNKLETTLMLYTGTDPSHRPKLPKLRENNKLYDLVRIFNQILVKFHSVDSDITQLHTLIYCVALVISKELGYKTYSDAITYKKKSLNKPEWQIRLENDIKKLRVDIGRLTQFINNNRSNKLVKHVNKILSSYKIHSSHEKNNSRPEEFLDTLKQKLTLKSQRLARYKKSLQRKEDNKLFTNNEKDFYRRLKNVQDNTIRELPAENELKDYWTNIWKKDKDHNNSAKWIEKVEETAKTIKPMEFIDVNKIDIEKVTKKMKNWKAAGVDGVHNFWYKKLVVLHQALAVAISDVIKGTAEFPSFLTKGITYMLPKSNNTTDPSQYRPITCLPTIYKLITSCIALKINTHVIHNNILAEEQKGCRQNHMGCKEQLIIDSNILKHATTHNRNLFLTYIDYKKAFDSIPHSWLIRILQIYKIDSCIISFLEDVMRTWRTTILLNNGCNCIVTDDIPISNGIFQGDSLSPLWFCLALNPLSYLLNSPNSGYRLTSNTYISHLMYMDDIKLFAKSDKEIKKLIEITAEFSNDINMTFGVDKCKILKLRSGKIETKSNESNDYFNVMGENESYKYLGLHEGRTINHTQIKKDLSNECFSRLHKICKKTLYSKNLVKAINTYVIPVLTYSFGVVKWSATDINKLEIKLRTTLTKYNYLHPKSAIERMTVQRSKGGRGVMDIRVLWEKQIQNLRNFFYSKAETSQIHLATVETDTNYTPLNLNNKVREFISSQDYESEKLTKWRNKELHGRHIHDLEQNHVDIQASNQWLKLGYLFPETEGFIIAIQDQVINTRNYKKFILKDSTLKSDKCRKCHRQPETIQHITSACPSLTQTDYTHRHNQVAHMIHQKLASKHKLIQGKPQPYYQYTPKPVLESSNYKMYFDRAILTDKTIHNNRPDITLIDKINKITYLIDIAVPNTHNLQKTITEKIHKYTELKEEVIRIWKMNKVYIVPLVISSTGVIPKYLLHSLRVLDLSHNTFISMQKATILNTCRIVRKFLQDDSPNHQNISNVDSHLA

SEQ ID NO: 31548 - protein, 1286 aa, Boloria selene
METRSQKVRIGPLPEGDRRGAPGADAGCLSMRTIGGTKLNRRVSTDKNVTAEVSNQPNFNNRQEDNSNSSRSVTPTTPAADVSQGTSVHQPVTTKAGKPRVRMKWDSEINTFIMRTYLYITKLETDMTMYGSKLFEQFKLKYPELNVTAQRVADQRRVIIRNRLLSEEVINKLKKDISEQINYEERMTNTSALVSTDLMNSVITPNESNSKLTDPNTNIPLPLSQRSYVPESQLSLMSLNISQSSVSTQTEAPMSDLLQSPESIAIVQNEVSNSFIQDLHNKLETTLVMYTGTDPTHRPKLPKLRENKKLYDLVGIFNQISVKFISIDSDIKQLHTLIYCIAFVISKELGYKIYSNKIHIKKSSLHKPEWQIRLENDIRKLRVDIGRLTQFINNNRSNKLVKHVNKIFTSYKVHSSHEKNNSRLEEFLDTLKQKLTVKSQRLARYKKSLQRKEDNKLFINNEKDFYRRLKDIQDNTVRELPAENELKDYWTNIWKKDTDHNNYAKWIERVEETAKTIEPMDHINITKIDIEKVTKKMKNWKAAGVDGVHNFWLKKLVALHQALAVAISDIIKRTAEIPSFLTKGLTYMLPKSSNTTDPSQYRPITCLPTIYKLITSCIALKINTHVICNNILAEEQKGCRQNHMGCKEQLIIDSNILKHATTHNRNLFLTYIDYKKAFDSIPHSWLIRILQIYKINSDIISFLEDAMRTWRTTLLVNNGCNSIIIDDIPITNGIFQGDSLSPLWFCLALNPLSYLLNSQNSGYKLTSNTNITHLMYMDDIKLFAKSEKEINKLIEITAEFSKDINMTFGVDKCKILKLRSGKIITNNSEPADYFDVMGEHESYKYLGLHEGRTINHTQIKKDLSNECFSRLNKICKRTLCSKNLVKAINSYVIPVLIYSFGVVKWTVTDINKLEIKIRTTLTKYNYLHPKSAIERMTVQRGKGGRGVIDIRVLWEKQIQNLRNFFYSKAETSQIHLAIVETDTNYTPLNLNNKDREFISIKDYEVEKLTKWRSKELHGRHIHDLELNHIDLQASNQWLKLGYLFPETEGFIIAIQDQVINTRNYKKFILKDPALKSDKCRKCHRLPETIQHITSACPSLTKTDYTHRHNQVAHMIHQKLASKHNLIQGKLQPYYQYTPKPVLESDKYKIYFDRAILTDKTIHNNRPDITLTDKINKITYLIDIAVPNTHNLQKTITEKIHKYTELKEEVIRIWKMNKVYIVPLVLSSTGVIPKYLLHSLRILDLSPNTFINMQKATILNTCRLVRKFLQDDSPNHQSLNNDDSHLA

SEQ ID NO: 31549 - protein, 1286 aa, Paramimus stigma
MLIFNMPTLQPVSNEMKFIYLFKYVYIYGGYIKQNFQAYFTGYNNNNNNNNNNKPDTVAVNEPAIRKLQPPTAETSSDVYKYDSRAVTPASDASQAAVAIQPTTTKAGKPRVRMKWDDEINTFIIRTYYYITKLERDRTMYAKKLFDKFKEKYPHINVSSQRIADQRRVIVKNKLLSDDKINSIKREISIRLQKEESEQNTPVSENNIGMEHDNNTLPNSVNSNFHNTSPLSLLIVSESPPLNVNASIQTSTNETYVLPVKISQNEEVINDSTIQEMIDELQTSLLLYSGSNVTSRPKLPRLRENKQLYTLVNILNNKVLYKFYNIDSDLTDIHTLIYCSALVISKRLGYKVNQTNQINMKSKTNYRKPAWQIRLEKDVIILRTEIGRLYQYLNNNRHANLIRKVKIIFEKHKIHSSHDKDNIRPEEFLDTLKQKLSLKCQRLARYKKSLQRKEDNKMFERHEKTFYRNFNKNITEIINGVPTKEELESYWSDIWRKKEEHNEQAPWIQEEEQRVNSIKPMEFTHITETDVESITSRMKNWKATGNDHIHNFWIKKFSALHGILAKIITNIIKGTSELPAFATEGITFMIPKNNNTVDPSQYRPITCLPTIYKLVTACLTSKINAYITNNKILAEEQKGCRQNHKGCKEQLIIDSTIMKHATSRYRNLNLTYIDYKKAFDSVPHSWLTRVLKIYKINPQIIKFLENVMNNWKTKLCLSINCNEKPIITDFIPIANGIFQGDSLSPLWFCLAINPLSFLLNKNNNGYRLTKETSISHLLYMDDIKLFAKSEKEMHNLIKITTQFSNDINMSFGFDKCKTLKLYKGKINNNNNSNFNIFTLMDENDTYKYLGLCEGRSINHTKLKKDLGSEYFRRINQICKKQLNSKNMFKAINTYAIPVLTYTFGIIKWSSTDIRNLEIKTRTTLTRYKYLHPKSAVERLTVKRLEGGRGLTDLKKLWEGQKANLRTFFYTKATHSAIHRATIEADLNYTPINLNYKNIALIKPEEYEKEKLDKWRSKELHGRHANDLKQPHIDTQATNRWLKIGSLFPETEGFLIAIQDQVINTKNYKKYILKEPNILNDKCRKCNRLPETIQHITGACPSLTQNDYTHRHNQVAYYVHQKLANKYNLIQNKLLPYYEYTPKPILENNSYKMYFDRSILTDKTIHNNRPDITLIDKINKLGYLIDVAVPNTHNLQKTITEKINKYTELKEEITRIWKIEKVYIVPLVLSSTGVIPKNLSASLKLLDLPQNCYITMQKAVILNTCRIVRKFLQEDLSNEHESDVHLV

SEQ ID NO: 31550 - protein, 1245 aa, Charidia lucaria
MRLRSRQIPQAGTREGESRPGPSSSGSPSYSGGGNVSHMTAQPNAVAVNERAIRKLQPPPEGTSTDAYKYDSRPVTPASDASQAAVAIQPTTTKAGKPRVRMKWDDDINTFIIRTYYYITKLERDRTMYPKKLFDKFKEKYPHINVSSQRIADQRRVIIRNKLLSENKISSIKKEISIILQKEESEQNTLVLESNDNIVEHNNNTLSNSVNSNFDNTSSLTLPFISESLSTSTIQTNIPPVKITQNDEVINDSTIQEITDELQTNLLLFSSSNVTSRPKLPRLRENKQLYTLINIFNNKILYKFFNIDSDLTNIHTLIYCSALVISKKLGYKVNQASKLNIKIKTNNRKPAWQIRLEKDVSILRTEIGRLYQYLNNNRHANLVRKVKLIFEKHRIHSSHDKDNIRPEEFLDTLKQKLSLKCQRLARYKKSLQRKEDNKMFERHEKSFYRNFNKNLTEITNGIPTKEELESYWSDIWRKKKEHNEQATWIQEEEQNVKSIEPMEFTHITETDIENVTRRMKNWKATGNDHIHNFWIKKFSALHEILAKIITNIIKGTTELPAFATEGITFMIPKNNNTVDPSQYRPITCLPTIYKLVTACLTLKINAHITNNKILAEEQKGCRQNHKGCKEQLIIDSTIMKHATSRNRNLNLTYIDYKKAFDSVPHSWLSRVLKIYKINPQIIKFLENVMSNWKTKLCLSINCNEKPIITEVIPVANGIFQGDSLSPLWFCLALNPLSFLLNKNNNGYRLTKETSISHLLYMDDIKLFAKSEKEMHNLIKITTQFSSDINMSFSFDKCKTLKLYKGKISTNNNSNFDIFTLMNENDTYKYLGLCEGRCINHTKLKKNLSSEYFRRINQICKKQLNSKNMFKAINTYAIPVLTYTFGIIKWTSTDIRNLEIKTRTTLTRYKYLHPKSAVERLTVRRLEGGRGLIDLKKLCEGQKSNLRNFFYTKATHSAIHKATIEADFNYTPINLNYKNSSSIKPEEYEKEKIAKWQSKELHGRHANDLKQSHIDIQASNRWLKIGSLFPETEGFLIAIQDQVINTKNYKKYILKEPNMLNDKCRKCYRLPETIQHITGACPSLTQNDYTHRHNQVAYYVHQKLAKKYNLIPNKLLPYYEYTPKPILESNSCKMYFDRSILTDKTIHNNRPDITLIDKINKLGYLIDVAVPNTHNLQKTITEKIHKYTELKEEIIRIWKIEKVYIVPLVLSSTGVIPKNLLVSLKLLDLPQNSYITMQKAVILNTC

SEQ ID NO: 31551 - protein, 1263 aa, Timochares trifasciata
MELRSRIVSRGPLPGGNRRGTPGADAGRLSMRTIGGEGSTGRPSAGSPEQCESSRTSEDTSSDENKCDSRAVSPASDVSQATVVIQPATTKVGKPRVRMKWDDEINTFIMRTYLYITKLETDRTMYPKKLFDQFKLKYPHINVTSQRIADQRRVIVRNKLLSDDQINRLKEEIATRLQEEESGNSMPVSECHSTNIVLNPSNNNNSTTSSLPHFSPLQPLTLLSNASTQTSTVSDVVHTPDVKHDECLDNSTVQELVNELQTNIALYDGTNATTRPKLPRLRENKQLYLLVNTFNNQILNKFYSIDSSLLDLHTLIYCSALVISRRLGYKITNEPHIKFKRYNNKPAWQIRLEKDISNLRADIGRLTQYINNNRHLRLLRKIDLIFNKYKYHSSHEKQNIRPEEFLDTLKQKLTLKSQRLARYIKSLQRKEDNKMFERNEKLFYRSLNNKAVETVNGVPNEEELKNYWAEIWKNKKDHNEDASWIKEEERKAQTIEPMELDDLTRADIEYVTSKMKNWKATGTDNVHNFWLKKFTILHDIMAQVITSILKGESELPTFVTEGITFMIPKNSNTTDPSQYRPITCLPTIYKLITACITLKINTHLDTNKILAEEQKGCRQNHRGCKEQLIIDSTIMKHATSHNRNLNLTYIDYRKAFDSVPHSWLIRILQIYKINPHLIAFLGNIMGNWKTKLYLNLKTGIKPIITEVIPIANGIFQGDSLSPLWFCLALNPLSSLLNKNKSGYKLSGDTHISHLIYMDDLKLFAKSDKEMHALIKTTKQFSNDISMSFGLDKCRTLKLRRGKLNSNTDSRYDIFTLMEENETYKYLGLNEGRCINHTVIKKDVTDEYFRRVNQICKKQLNSRNLFKAINTFAIPVLIYTFGIVKWSATDIRNLEIKTRTTLTKYKYLHPKSAIERLTIKRLNGGRGLSDIRKLWEGQITNLRNFFYDKSVNSTIHKAIIESDVNYTPLHLNNQNKQLMVFTDYEKEKQGKWRSKELHGRHCHDLEQPHINMQASNRWLKLGSLFPETEGFLIAIQDQVINTKNYKKYILKDPSITNDKCRKCHRLPETIQHITSACPSLTQSDYTHRHNQVVYYIHQKLAKKHHLVSNKSLPYYQYTPKPVLESDSHKMYFDRSILTDKTIHNNRPDITLIDKINKVAYLIDISIPNTHNLQNCISEKLHKYTELKEEVIRIWKLHKVYIVPLVLSTTGVIPKYIFHSLQLLDLPANSYITMQKAAILNTCRIVRKFLQEENPNVPESDVHLV

SEQ ID NO: 31552 - protein, 1252 aa, Gorgythion begga
MELRSRIVSRGPLPEGNRRGTPGADAGRLSMRTIGGEGFTGRPSAGSPEQCESSSSNRTSVETSSDTYDSRAVSPVSDVSQVTVVNQPATTKAGKPRVRMKWDDEINTFIMRTYLYITKLETDRTMYPKRLFDQFKLKYPHINVTSQRIADQRRVIVRNKLLSDEQINDIKQEIAKRLQDEETGSSVSVSQTNSPIPYSLIVDQESQLPTLSSNVATQTSSMSTIVYSTDVGCDEAIDNNTVRELTNELQTNLTLYTGTNATTRPKLPRLRENKQLYTLVNTFNRHILHKFYSIDSNLTDIHTLVYCSALVISRKLGYKVSNETFIKRKPYYNKPAWQIRLEKDISTLRADIGRLTQYINNNRHARLVRKIDIIFSKYKFHSSHEKHNIRPEEFLDTLKQKLTLKSQRLARYMKSLQRKEDNRLFEKNEKVFYRSLSNKTVEIANGLPNEEELKNYWTTIWGNKKGHNEEAGWIKEEEKNVETIEPMEFHEVTRSDIEYVTGKMKNWKATGNDNIHNFWLKKFYILHDILAQIITSILKGTSELPSFVTEGITVMIPKNSNTTDPSQYRPITCLPTIYKLITACITLKINTHLNSNNILAEEQKGCRQNHRGCKEQLIIDSTIMKHATSHNRNLNLTYIDYKKAFDSVPHSWLIRILQIYKINPYIISFLEGIMSNWKTKLYLNLNNSIKPILTEVIPIANGIFQGDSLSPLWFCLALNPLSSLLNKNNFGYKLSRETHISHLIYMDDLKLFAKSDKEMHNLITTTTQFSNDINMSFGLDKCRTLKLKKGKINSNIDSRNDIFTLMDESETYKYLGLCEGRCLDHTTLKKDVSHEYFRRVNQICKKQLYSKNLFKAINTFAIPVLIYTFGILKWSATDIKNLEIKTRTTLTKYKYLHPKSAIERLTIKRSDGGRGLIDIKKLWTGQITNLRKFFYTKSVNSILHKAVIELDVNCTPLNLNDRNKQYTIPTDYEKEKQERWRRKELHGRHFHDLEQPHINTQASNKWLKLGSLFPETEGFLIAIQDQVINTKNYKKYILKDPNTTNDICRKCHRLPETIQHITSACPSLTQSDYTHRHNQVAYYIHQKLANKHRLITNKLLPYYEYMPKPVLESDSHKMYFDRSILTDKTIHNNRPDITLIDKINKTAYLIDISIPNTHNLQKTISEKLHKYTELKEEVIRIWKLHKVYIVPLVLSTTGVIPKYLFQSLKLLDLPENSYITMQKAAILNTARIVRKFLQEDNFNAPESDVHLA

SEQ ID NO: 31553 - protein, 1219 aa, Chiomara georgina
MRTIGGEGFTGRPSAGSPEQCESSSSSRMSVETSSDTYDNRAVSPVSDVSQGTVVNQPATTKAGKPRVRMKWDDEINTFIMRTYLYITKLETDRTMYPKKLFDQFKLKYPHINVTSQRIADQRRVIVRNKLLSDEQINKIKQEITERLKDEESGSSIPVSLTNSPDIILDSESQPLTLTSNVATQTSSMSTIVQSPDEGYDELIDNDTVQELVNELQTNLTLYNGTNPTTRPKLPRLRENKQLYKLVNIFNSQILNKFYSIDSNLIDIHTLIYCSALVISRRLKYKVREETLIKRKPYCNKPAWQIRLEKDISNLRADIGRLTQYVNNNRHAKLVRKVDLIFNKYKFHSSHEKDNIRPEEFLDTLKQKLTLKSQRLARYMKSLQRKEDNRLFEKNEKIFYRSLSNKTAETVNGVPNEEELKNYWANIWGNKKGHNEEAGWIKDEEKIVETIEPMEFNDVTRSDIEYATSKMKNWKATGNDSIHNFWLKKFVVLHDILAQIITSILKGTSELPSFVTEGITVMIPKNSNTTNPSQYRPITCLPTIYKLITACITLKINAHLNSNNILAEEQKGCRQNHRGCKEQLIIDSTIMKHATSHNRNLNLTYIDYKKAFDSVPHSWLIRVLHIYKINPYIIKFLESIMSNWKTKLYLNLNISNKPIVTEVIPIANGIFQGDSLSPLWFCLALNPLSSLLNKNNSGYKLSRETHISHLVYMDDLKLFAKSDKEMHDLIKTTQQFSNDINMSFGLDKCRTLKLKKGKVNSNIDSTHDIFTLMDESEMYKYLGLCEGRCINHTTIKKDVTHEYFRRINQICKKQLYSKNLFKAINTFAIPVLIYTFGIVKWSATDIKNIEIKTRTTLTKYKYLHPKSAIERLTVKRSDGGRGLSDIKKLWTGQITNLRKFFYAKSVNSLIHKAIIELDVNFTPLNLSDRNKQYVIPKDFEKEKQERWRSKELHGRHLHDLEQPHINMQASNRWLKLGSLFPETEGFLIAIQDQVINTKNYKKYILKDPATTNDICRKCHRLPETIQHITSACPSLTQSDYTHRHNQVAYYVHQKLAYKHHLISNKLLPYYEYIPKPVLESDSHKMYFDRSILTDKTIHNNRPDITLIDKINKVAYLIDISIPNTHNLQKTISEKLHKYSELKEEVIRIWKLQRAYIVPLVLSTTGVIPKYIFHSLKLLELPENSYITMQKAAILNTTRIVRKFLQEDNTNYPESDVHLV

SEQ ID NO: 31554 - protein, 1224 aa, Pholisora mejicanus
MELRNRIISRGPLPEGNRRGTPGADAGRHSMRTIGGEGFTGRPFAGSPEQCESSQSSVETSSDDYKYDSRADSPASDVSQAAIANQPATTKAGKPRVRMKWDDEINTFIMRTYFYITKLETDRTMYLKKLFDKFKRKYPHINVSSQRIADQRRAILRNKLLSDDEINSIKQEIAKLLEHEDNGSDILGTETTNEQNFQDPSPPLLPSTFESHPLTLNASTQTSTIQIIAQTIQAEKHNEVIDDNTVQNLVDELQTNLTLFSGTNASARPKLPILKENKELYKFVNIFNSQILHKFYSINSDLVYIHTLIYCSALVISKRLGYTINNQKFKHRSYNKKPAWQRRLEKDISTLRTNIGRLTQYINNNRHIKLIRKVESIFNKYKIHSSHEKPNIRPEEFLDTLKQKLTLKSQRLARYKKALQRKEDNRMFERSEKAFYRNFNLKITEIPKTAPNEAELRNYWTDIWKKDRTHNKQASWIKEEEQKTENIETMKFTDITKTDIEYVTRRMKNWKATGNDNVHNFWIKKFSALHEILAKIITDVIQGASELPLFATEGITFMIPKNSNTEDPSQYRPISCLPTIYKLITACITLKINNHLANYKILAEEQKGCRQNHRGCKEQLIIDSTIMKHATSHNRNLNVTYIDYKKAFDSVPHSWLIHVLQIYKINPQIVTFLQNTMSNWRTKIYLSLSSSDKPIVTEVIPITNGIFQGDSLSPLWFCLALNPLSSLLNKNKSGYKLTKETCISHLMYMDDIKLFSKSVKEMNSMIQITTQFSNDINMSFGLEKCKTLKLHKGKVDSNINSKYDNFTIMEENDTYKYLGLYEGRGINHTGIKKNITQEYFHRLNQICKKQLNSKNMFKAINTFAVPVLTYTFGVIKWTATDIRNLEIKTRTTLTKHKYLHPKSAIERLSIKRISGGRGLIDLTRLWEGQKENLRNFFFAKSSNSDIHKAVVEADVNYTPLNLNNKKINITKPIDYEKEKLGRWRGKELHGRHINDLEHPYIDAQASNRWLKIGSLFPETEGFLIAIQDQVINTKNYKKYILKEPNMSNDNCRKCHRLPETIQHITSACPTLTQSDYTHRHNQVAYYIHQKLANKYKLIQSKILPYYQYTPKPVLEGDNYTMYFDRAILTDKTIHNNRPDITLIDKLNKTVYLIDVSIPNTHNLQKTITDKIHKYTELKEEITRIWKMNKVYIVPLVLSTTGVIPKCLSHYLRLLDLPENSFKAT

SEQ ID NO: 31555 - protein, 1234 aa, Cycloglypha thrasibulus
MRTIGGEGFTGRPSAGSPEQCESSRSSVDTSSDEYKCDSRAVSPASDVSQATVVTQPVTTKAGKPRVRMKWDDEINTFILRTYLYITKLETDRTMYPKKLYDQFTLKYPHLKVTSQRIADQRRVIIRNKLLSDDQINRIKQEVATRLQDEESGNSAHLSQTHSPDNVLHPSKYNHNNATTSILPTITESQSLTLTSNVSTQTSLVSAIVHSPDVKYDVVDNNTAQKLLDELRTNLTLYNGTNATTRPKLPRLRENKQLYALVNTFNRQILNKFYSIDSNLIDIHTLIYCSALVITKRLGYNITKECTIKPKPNHNKPAWQVRLEKDISNIRADIGRLTQYINNNRHPKLVSKINVIFDKYKFHSSHEKHNFRPEEFLDTLKQKLTSKSQRLSRYIKSQQRKENNRWFEKNEKGFYRHLNNKAEETINGMPKEEELKNYWADVWNNKKVYNEEASWIKEEESRVETIEPMEFSDLTKCDIEYVTRKMKNWKATGTDNIHNFWYKKFSSLHNILAQIITNILNGSSELPTFVTEGVTYMIPKNSNTTDPSQYRPITCLPTIYKLITACITLKINTHLNNNNILAEEQKGCRQSHKGCKEQLIIDSTIMKHATSHNRNLNLTYIDYRKAFDSVPHSWLVRVLHIYKINPHIIKFLENVMSNWKTKLFLNLKSSIKPVITEGIPVANGIFQGDSLSPLWFCLALNPLSSLLNKNNKGYKLTKETHISHLIYMDDLKLFAKSEKEMHNLIKITNQFSNDINMSFGFEKCKTLKLSKGKLNSNTDSRYDYFTLMGENETYKYLGLHEGRCINHTAIKKDLIHEYLHRINQLCKKQLSSRNLFKGINTFAIPVLTYSFAVVKWTSTDIRNLEIKTRTTLTKYKYLHPKSAIERITIKRTNGGRGLSDIKKLWEGQISNLRNFFYAKSSNSKIHKAIIESDINYTPLQLCDRNKQFIMPTDYEKEKLQKWRSKELHGRHAHDLEQPHIDVQASNRWLKLGSLFPETEGFLIAIQDQVISTKNYKKYILKDPNITNDSCRKCHRLPETIQHITSACSSLTPTDYTHRHNQVVHYVHQKLASKHHLVTNKLLPYYQYTPKPVLESDSHKMYFDRSILTDKTIHNNRPDITLIDKINKTAYLIDVSIPNTHNLQKAISEKLHKYAELKEEVNRIWKLHKVYIVPLVLSTTGVIPKYLFHSLKLLDLPENSYVTMQKAAILNTCRIVRKFLQEDSNIEPESGVHLV

SEQ ID NO: 31556 - protein, 828 aa, Myrinia binoculus
MFERSEKGFYRNLNNKTIETVNGVPKKEELKNYWTDIWKKDKEHNEQAIWIKEEVQKAETIEPMEFTDVTNTDIQYVTRKMKNWKATGTDNIHNFWIKKFSALHDILAKIITDILKGVSDLPTFATEGITFMIPKNNNTVDPSQYRPITCLPTIYKLITACITLKINIHLTNNNILAEEQKGCRQNHRGCKEQLIIDSTIMKHATSRNRNLNITYIDYRKAFDSVPHSWLIRILEIYKINPYIITFLENIMSKWKTKIHLNHSNNKPIITEVIPIANGIFQGDSLSPLWFCLALNPLSTLLNKNSGGYKLTKEINISHLMYMDDIKLFAKSSKEMNSLIKVTTEFSNDINMSFGLSKCKTLKLQKGKVNSNTESRYDIFTLMEKNDIYKYLGLCEGRSINHTVIKKDLSTEYSRRLHQICKKQLSSKNIFKAINTYAVPVLTYTFGIIKWTATDIRNLEIKTRTILTKHKYLHPKSAIERLTIKRMNGGRGLIDLKKLWEGQVLNLRNFFYAKSTNSAIHNATINSDINYTPLNLSNKNTKIINPTDYEKEKLERWRSKELHGRHAHDLEQPHINTQASNRWLKLGSLFPETEGFLIAIQDQVINTKNYKKYILKDPNVNNDKCRKCHRLPETIQHITSACPCLSQNDYTHRHNQVTYYVHQKLAKKCNLLSQKMLPYYQYIPKPVLESDSYKMYFDRAILTDKTIHNNRPDITLIDKANKTVYLIDVSIPNTHNLQKTITEKIQKYTELKEEISRIWKLNKVYIVPLILSTTGVIPNCLSHYLQLLGLPENSYITMQKAAILNTCRIVRKFLQEDNINEPQSDVHLV

SEQ ID NO: 31557 - protein, 911 aa, Pyrgus malvae
MRLEKDISILRADIGRVTQYINNNRHPKLISKIESIFKKYKVHSLHEKLNNRPEEFLDTLKQKLKLKSQKLARYIKALRRKEDNKMFDRSEKCFYRNLNYKATGIVTASPTEDELKNYWVNVWKENKQHNEEANWIKEEEQKAEAIESMEFTDITKTDIEFVTRRMKNWKATGSDNVHNFWIKKFTALRDILAKSITDILRGVSELPTFATEGLTFMIPKSNNTADPSQYRPITCLPTIYKLITSCITLKVNAHLTNNNILAEEQKGCRQNHRGCKEQLIIDTTVMKHATTHNRNLNITYIDYKKAFDSVPHSWLIRVLHIYKINPSIIEFLEGVMSNWRTRLYLQPGNNNKPIITEVIPIANGIFQGDSLSPLWFCLAVNPLSSLLNKSNGGYKLSKEANISHLLYMDDIKLFAKSSKEMNNLIKITTQFSNDINMSFGLDKCKTLKLHKGKHCSDEDSRYDIFTLMNEHDTYKYLGLLEGRCINHTVIKKQVSNEYFRRLNQICKKQLISKNIFKAINTFAIPVLTYTFGIIKWTATDIKHIEIKTRTILTKYKYLHPKSAIERLTIKRMNGGRGLIDLRKLWEGQIINLRNFFYTKSNTSIIHKAITEIDTNYTPLNLSNKNIQFISPTDYEKQKLDRWRSKELHGRHMHDLEQPHINTQASNRWLTLGSLFPETEGFLISIQDQVINTKNYKKYILKDPKVQNDKCRKCHRLPETIQHITSACPSLSQNDYTHRHNQVAYYIHQKIAKKYNLIPNKLLPYYQYIPKPVLESASHRIYFDRAILTDKTIHNNRPDITLIDKTNKVVYLIDISIPNTHNLQKTITDKLHKYIELKEEILRIWKMNRVYIVPLVLSSTGVIPKSLSHYLQLLDLPDNCYITMQKAAILNTCRIVRKFLNEDEPDSDAHLA

SEQ ID NO: 31558 - protein, 1217 aa, Gorgopas trochilus
MADSTLPASVIIEGGELIILLPVAEGQHLQCPLCVGTACFKGVRRIENLCRHGKEAHAQVPVRFRCRGCGFVAPEGKRYPRKVVNLHCATCVPAAIVPPSGHDGARRRSIRARLGTLRSANTANGASLDRRPGSGEVPSDRVQSVDASVPSPLNRVSDATLGSSPNPPTPGERRQRSPEVLGPANYAHNSEESQSSSPIQNVDRVSPARAQPDEVVESSFITRTPTHPPEALPILESLTSERLGPEPQTGGSEVMDGLAIEGVEPERIGPNHPSPEQRRLVDELNAVRDVGPFNDLAVRVMHFLGRLSDGRARSEGVHRPNRDGRDRDPIAAATHIQRLYRGNRRRAVRTILAGPMVACEVDAVTVETYFRNAAAHRDGLAEWPEVFERATPTDLSNEVLCSPFVRQKVAQKLRSRTNTAPGPDGLTYAALKRADPGAHVLTALYNAAWRMEVIPDCWKDSDTILIFKKGDKADLDNWRPIAMGNTCAKLFATLLSERLKKWATINSRFSASQKGFRQYEGCHENNFVLQEAVRDARLERRELVVAWLDLESAFTSVPHSSIDRALLGHQVPEKVRAVIGSLNEGNRTRVRVGGTCTGEILLQAGVRQGCPLSPDLFNLTLEVVLRSMTRSGEGYSMGDHRVTALAYADDVAVLADSTDGMRRLLLAAEEAAIAVGLKFNAAKCATLHVTGDRVEQTSFTIGGCPVRALGAEPDDKYEYLGIPTGVQSTQTPVKAIKEVIEDAQKLDGSLLAPWQKLDAVGTFLLPRLTFAMRGGTLEKEYLREADRVVKGLAKKWLSLPQRASAEVVSLPPSRGGGGLLPLADMYEVSRVTQAYRMLCAPDRTVSGIAKDGLFRTVSERLRRPATGADVARYLSGELDVPRSSSKGTFWSASRTSSCRLKTRTGLRWAWCDRTEELHLRLAEATRITPATRGTVFKQLRLKLVEHHARTLTAKPDQGRVMDVTMGSRHANHFLRSGSFTRFCDWRFIHRARLGVLPLNGTKRWQTTTDKRCRRCGYEVETLPHVLNHCGVHAAARQLRHNAVQDRLVKASKSQGTIAVNRCVEGITGDVATLRPDIVVRDEVRKSITIVDVAIPFENRREAIDAARRDKINKYAPVADQLRAQGYRVTVEPFAVGALGAWDPRNERVLRDLRISRRYARMMRRLMVSDTIRWSRDIYVEHVTGARQFRVPEVLPPEQLQSTEQTEREISRQQINSR

SEQ ID NO: 31559 - protein, 1203 aa, Pellicia arina
MADMAARPTPIVVEGDNFIVLLPIAEDQHLQCPLCVRAGSFKGLRKIENFNRHCKDAHATMRVTYRCSGCGFVAPVEKRYPRKVVSQHCASCVPSVVTGPSGHDSERRYAIRRRLGTSRHTQPGSGVEMNSGSGEAPNNMTMANEATEPSMLNRVSVAQPAASLRPSSPDDTSRDSGVLGPVNDSPSIWQPTSSREVFSTPSQLNANANTPPGRTSPDGIVESPNLIPDPIPATVIPQAPCAQDVTERTAQESTADDPRSRTQVVRQFELPEVNRTRGDPPAIDQVVTSQITMETTERTPTDTSGVRRPNLSYPTQEQRRLVDELSGVSDVESLNELADQVTRFFARLLDRSTTDQQTQNRHGRSNEVRQALDPIAEATRIQRLYRGDRKKAVRCILAGSSPVCEVDASTVQAHFSNLAAPKEGQDVWPDVFDHTAPSETSDEQLCEPFARKRVAQKLRSRTVTAPGPDGLTYAVLRRADPGAHVLTALYNTVWRIGIIPESWKQSVTVLIYKKGDKTDLNNWRPITLGNTCAKLFAALLSEKLKKWATANGRLSDSQKGFRHYEGCHEHNFVLQEVIRHAKLERRQLVVAWLDLESAFTSVPHSSIDRALEGHRVPERIRHMIGALNEGNRTRIRVGRTFTDEINLQAGVRQGCPLSPDIFNLTLEVVLRDMARTGEGYTVGSNRICNLAYADDIAILADSVDGMRRLLETAEKAAHAVGLKFNAAKCAALHINGGEVQHTFNIGGDPIRSMGSNPEDAYVYLGIPTGAQERQTPVKAIAEVIADARKLDESLLAPWQKLDAVGTFIVPRLDFIMRGGTLAKEYLSEADRVLRGLAKRWMHLPKRASAEIVYLPPSQGGGGLLPLADLYDIHKVTQAYKMLYTTDPSVNTIARDGLTQTVSKRVKRPAAEVDIAGYMSGELEMPRSSGKGTFWSAARTSICRLKQKTGLRWVWCCRSGAWNLRLPGVTTITPATRGMTFKTLRLQLVKYYAQKLTAKPDQGRVLEVTMGSRYANHFLRSGRYTRFCDWRFVHRARLGVLPLNATKRWQVAADERCRGCGYEKETLPHVLNHCGVHSALRQIRHNNIQDRLVKAVKCPGTISVNRHVEGVVGDAGSQRPDIVIRDDRLKTITIVDVAVPFENRRVAFDAARREKTDKYASLAGQLRAQGYKVTVDAFMVGALGAWNLRNERVLRDLKSQQEIR

SEQ ID NO: 31560 - protein, 868 aa, Hesperopsis alpheus
MQHLYRGNKKKAIRRILLGPAEVCEVDVATVESFFGDLAARRDGQEEWPEVFDRVPPTEASNNQLCEPFTRQKVAHKLRSRTNTAPGPDGITYAALKRADPGAHVLTALYNAVWRLASVPDCWKDSVTVLIHKKGDKDNLNNWRPIAMGNTCAKLFAALLSERLNKWATTNNRLSASQKGFRQCEGCHENNFVLQEAIRDAKLEQKELLVAWLELESAFSSVPHSSINRALEGHCVPYKVRAVVRSLNDGNRTCIRTNNTSTREILLQAGVRQGCPLSPDLFNLTLEVVLRQVMRSGEGYGCGNYKISCLAYADDLVILADSVMGMTRLLQAAEGAASAVGLNFNSAKCATLHLIGDKVQESVFNVGGSLVRTLGSNSDDQYKYLGIPVGFQVQHTPIRSLKEIIKDARAIDASLLAPWQKLDAVGTFLMPRMEFGMRGGTLEKEYLKETDRVLRGLAKKWLNLPQRASAEIISLPTSWGGCGLLPLTDMYEVSRVTQAYRMLSAPDDNVRSIAKEGLFRTVSERLKKKASGEDIARYLSGKLDMARSSCKGTFWSGVRTSSCKLASKIGLRWIWCSRTEALSLQLPNALITPQARGVVFRQLRLQLVLHYAEILKAKPDQGRTFEVGMGSRYGNHFLRSGSFTRFCDWRFIHRARLGVLPLNATKRWQSTVDKRCRRCGYDLETLPHVLNHCGVHAAARQLRHNTVQNRLVRAIKTPGIVAVNRSVVGVSGRVSTLRPDITVRDEARKSIAIVDIAIPFENRRRAFDEARLDKARKYAPLADQLRAQGYHVSIDAFIVGSLGAWDPRNERVLRNLRVSRVYARLMRRLMVSDTIRWSRDIYVEHVTGVRQFRVSVAPIAEAPADQTE

SEQ ID NO: 31561 - protein, 1191 aa, Pholisora mejicanus
MADSARPASVVVEGGDFFVLLPIAEGQQIQCPLCIRAGRFQGVRRVENFCRHCKDAHATMVVKYRCCRCGFEAPQGKRYPRKIVTQHCASCVPTSVTAPSGHDSERRRLIRSRLGTLRSAASTARRVNVAEEPGSNRSPGVLSQSGDEIEPSPVNRVPVVPPVEPSHTMVNCAESSGPPLATRRSPSPPSLEGVNPGGGLESSNITRAPTRLPDMHPSSNVILSEQPRPEHVEEAVVMGSVDSGAATGTAEPRSRRLHDLTPEQRRLVDELNAVQDPNLLNDLSQRVTQFLVGMSDRNTTSQRTGGRVRRANVERRDPDLIMAATRLQRLYRGNRRAAVRRILGGPATVCEIDVATVDAYYRELAAQRDGQNEWPEVFNQNPPTDISNEQLCEAFSRQKVAKKLRSRTNTAPGPDGMTYAALRRADPAAHVLTALYNAVWRLSVIPDNWRDSVTVLIFKKGVKEDLKNWRPIAMGNTCAKLFATLLSERLKRWATVNNRFSASQKGFRQYEGCHENNFVLQEAIRDAKNGQKELVVAWLDLESAFTSVPHSSIDRALEGHQVPERVRAVISSLNENNRTRIRVGDTYTEEIVVRAGVRQGCPLSPDTFNLTLEVVLRHMMRSGEGYALGSHRIASLAYADDLAILSDSVEGMRRLLKAAEEAASAVGLNFNAAKCATLHLVGDKVQQSSFHVGGRMVRALDSDDSYRYLGVPTGFQDHTPVDALKGIIADARAIDASLLAPWQKLDAVGTFLLPKMEFGMRGGTLKKECLREVDRVLRALSKKWMSLPQRASAEIVSLPPSWGGGGLLPLADIYEVSRVTQAFRMLSASDGTVSGIARSGLFRTVSDRLKKAASGEDVARYLSGEVDMARSSGKGTFWSAVRKSSCRLATKTGLRWIWCSRTDTIRLLTTGATIAPEARGVVFRQLRSQLVQHYARKLVAKPDQGRVFEVAIGSRYGNHFLRSGSFTRFCDWRFIHRARLGVLPLNGTKRWQSTSDKRCRRCGYEAETLPHVLNHCGVHAAARQLRHNALQDRLLQATKAPGVMAVNRCVEGVTGSASTLRPDITLRDEGRKSIAIVDVAVPFENRREAFDAARRDKLRKYAPLADQLRAQGYHVTVDAFVVGSLGAWDPRNERVLRDLRVSRGYARLMRRLMVSDTIRWSRDMYVEHVSGVRQYQDPGTPVGESATSRTE

SEQ ID NO: 31562 - protein, 973 aa, Ophraella communa
MSQPPHSSLAPPGFSSQPLQTNHQCTLCPRNFATQRGLRIHFTSIHNKIPKVKTSTSQPQPTVPASSASDIITPRPDVTELWKILSKLKRTVPVVQRIPRGARPTVASALTTTINRVVRENNYSSWYDLLTFAYRTLHVDKNTKTSLIKTIKSNCTNPNHTHPQPNGDGTSSRQTTSKPYDLRKNVEAKVGAYDIRAASRLLFSNDELAPDSKETLEALQSKHPSSQLNSTMPDTQLPSDTELPNVDADSILPAIMSFNNGSSGGLDALTPQHLKDLMVVSLGDAGRALLCSLASLVNLMLSGTVCSEIIDVLYGANLCALKKKDGGIRPIAVGTTFRRLVSKVGCRIVSTTLTSKFQPLQMGFGSKSGCETAVHATRTFLKSDSGEVLLKVDVRNAFNSIDRGSFLRTAKEDIPVLFPYLLQCYGQPSNLCYKSDHMESAVGCQQGDPLGPALFSLGIHSIISKLKSNLNLWYLDDGTLGGSAESVADDLTYLIDGFASIGLELNTSKCELFISPSISFDSKQDIVTRFDKICPQIKVIEPVTLRLLGAPLLDEAVAPFVREQISTFSTFSDRLQKVSAHVALVIIKFCLFLPKSTYVLRCSPLWKFPELLVEMDSTISIILSQILNIKFTERSWSQASLPIRMGGIGIRKISTVALPAFLSSTHGCQNLFSKIVNSSLGPSEIDNASDAKTLWCSSYNDTPEVVHSQKQWDTISCKAVQRTLLASSPDDTDRARLHACFEKESGLWLNAMPIPGIGTSLDNTSLTLLIGLRIGARLTHPHLCRCGEQVTELGYHGLSCSKSAGRIPRHFSLNDITRRALASANVPAALEPNGIVRSDGKRPDGLTLVPWSRGRSVVWDATCVDTVAPSNIQLTKFVAGAAATAAEVRKCRKYSDIGSSYSFVPLAFETMGAWGPLTKGFIKELSARIIETTGDRKAGSYLGQRISLAIQRGNVASLLGTMPSSDTPEIAPF

SEQ ID NO: 31563 - protein, 973 aa, Ophraella communa
MSQPPHSSLAPPGFSSQPLQTNHQCTLCPRNFATQRGLRIHFTSIHNKIPKVKTSTSQPQPTVPASSASDIITPRPDVTELWKILSKLKRTVPVVQRIPRGARPTVASALTTTINRVVRENNYSSWYDLLTFAYRTLHVDKNTKTSLIKTIKSNCTNPNHTHPQPNGDGTSSRQTTSKPYDLRKNVEAKVGAYDIRAASRLLFSNDELAPDSKETLEALQSKHPSSQLNSTMPDTQLPSDTELPNVDADSILPAIMSFNNGSSGGLDALTPQHLKDLMVVSLGDAGRALLCSLASLVNLMLSGTVCSEIIDVLYGANLCALKKKDGGIRPIAVGTTFRRLVSKVGCRIVSTTLTSKFQPLQMGFGSKSGCETAVHATRTFLKSDSGEVLLKVDVRNAFNSIDRGSFLRTAKEDIPVLFPYLLQCYGQPSNLCYKSDHMESAVGCQQGDPLGPALFSLGIHSIISKLKSNLNLWYLDDGTLGGSAESVADDLTYLIDGFASIGLELNTSKCELFISPSISFDSKQDIVTRFDKICPQIKVIEPATLRLLGAPLLDEAVAPFVREQISTFSTFSDRLQKVSAHVALVIIKFCLFLPKSTYVLRCSPLWKFPELLVEMDSTISIILSQILNIKFTERSWSQASLPIRMGGIGIRKISTVALPAFLSSTHGCQNLFSKIVNSSLGPSEIDNASDAKTLWCSSYNDTPEVVHSQKQWDTISCKAVQRTLLASSPDDTDRARLHACFEKESGLWLNAMPIPGIGTSLDNTSLTLLIGLRIGARLTHPHLCRCGEQVTELGYHGLSCSKSAGRIPRHFSLNDITRRALASANVPAALEPNGIVRSDGKRPDGLTLVPWSRGRSVVWDATCVDTVAPSNIQLTKFVAGAAATAAEVRKCRKYSDIGSSYSFVPLAFETMGAWGPLTKGFIKELSARIIETTGDRKAGSYLGQRISLAIQRGNVASLLGTMPSSDTPEIAPF

SEQ ID NO: 31564 - protein, 1311 aa, Riptortus pedestris
MTLRVAYSVTSYLCVHKLQQVLVDKWWCGALAKVMNINPFLRAKCSPSTSGEASDTGAQGSEPRENRQGATGNDQARPRLSLQGPQVLIVDVPFRPVDCSVCQGAGKGRYLATDLTNMLRHARAKHADQELRFRCRGCQSLYSNKQSAVCHVPKCPGPRVDPRPRSAGHMCASCGQKFPTARGLGQHVRHAHPDVANVKRQPPEPKAGPSRPVPSAAGKLFSPEEIKIMLDMEVVERGNSRIALRMREVLKSKTAKQIRDKRGSVVYARMRDARLAEVDRVAALGGVPEERSSPEVPQTGHEEASGFAAPAIGSTGCDAAVGEGRSHSQTPPTPSRISITGMEEGMSEATSQSGTGNPGSVETLEKSPGAGPGLAATGAEKVCCEQERVLEEEVGLPPTDSAVIEDTPAVADPIGGGLDTGPEPIDRVDTSAEPPRSEVWREEMLRHIETWDISKLSDSAFELAKLMKRGVDSQEAMDSLYDQFLSFLGPTTQVVKPARARSKKKKKGSDRRAYKRFLYSRAQDLFKKEPALLAQHIRTGVDHAASSPAYELDRNDVQDLYTHLWGAEGWLRLEDLPDHPGAEAVAVDRLLGVVTGAEVQQRLRRVKGSSAPGPDGVKKDNLQGAVRTNLLAGLYNLVLVTGILPSRWKENRTALIFKEGKDKTKVSDYRPLTIGSLLSRLFWGIVDSRLRESVKLHPRQKGFVAEAGCFSNVRLVCEAVRTMKASQGGVGIQVDISKAFDTVPHKAIAWALKRKGLPPELVDLVVRSYDGVHTKIAHPRGSIDVAIRRGVKQGDPLSPMLWNLVLDALIEELERMPGLDMGGVNLSCLAFADDLYFMASDALKAQALLDCAVDYLGALGMSISASKSFAWGIRIHHGSWSIYDPGIERLGERIPAVKASDWLTYLGVRFSPWSGISLEAARDEFSQALKRLVDVRLKPDQKLLLLTRYLLPHYSHQLVIAVPAISNLRDMDQELRVCVKRFMHLPMSVANGLIHCGKRDGGLGVPRLAEVIPRVALGVGLRLARSEDPVIRHIWRDSHTVARLDRIAKSIRLNIPYTETDLQKFKSRCRKNELDVWAGLVAQGRSVRSHADDRVGNAFLADPKLLKPCRFITALQLRSNTACNKTTLHRADPRMDLTCRRCHAAKETLAHILGACMHTKNERIHRHDEIVNFVESVAQNESTGNAVTTEATLTLPGGEKLKPDLIVSNREGVFVVDVTVRHEDKDYLRKAREEKVAKYEKLLPEARKLFSASDGSVAEVLPIVVGTRGAMPPTTIKALSRVGLVKRADLKTISLMALRSSIEIYHRFMDA

SEQ ID NO: 31565 - protein, 1472 aa, Amphibalanus amphitrite
MDTDDSDSPIEGFDPRDGNWVTASRKKKPKRRRDQATNENAHQRQTAIGRSRPPATTQLTASLSCQACRSRSSRKAAITCSLCGQRWHTSCAKLTIQQARALSVWHCQQCLGRPAATLEPPTQTSEAPLCGIAAGLSKLRASTKVIARIPKAARSLVADSLSEVVNEAVNSPTSSSSWWKFLSFAFVALRTPDSTNSGERGPTLASHIRRQVAGLDSAAPPSRTVERRAPTPRTTTPDSLARRVRAKCADGDIRAGLRLLTSSDTFVDPSAEVIAALRLKHPLAPLDQSLPPPPAASDPPPLTVTEEQVRAAIFSMPPGSSAGLDGIRPLHLRQLLSRETAESGRRLLSSLTALTNLVLRGLVPECGRDALFGASLCALRKKDGGLRPIAVGSVFRRLPGRIAARHIADIIGPELRPTQLGVGTPLGCEAAVHAVREFINSDSTSSDTPRVMVKIDVRNAFNTIRRDVILARIHERCPEVYPLAYQAYHLPTPLHIGDQTVLSATGVQQGDPLGPAAFALGVDACARAIRSPLNVWYLDDATIAGPADVVQSDLHSLAKALTELGLQLNPAKCEVAIIDAAPQLAQNAAVDSIRSVLPEITEIPLHSVTLLGAPLQDASLTAAANGAAELIGRLCTRLTHLDRHTGLFFLVHYASAPRLQYLLRSAPLYKVVPALKLVDELVRETLVDITNVNINDQLWEQAKLPFRLGGLGVRSVEDLALPCYISSLHAALPLLRSISPGLLPASGVPPTLQTAIHRFSEVTGTEQLPPASAVSSQRAWDTLSATAIRDKMVNSANQLHRARLVAASQPHTAAWLQAVPVPSLGLHLDEESVRVAVALRLGATVCEQHRCRLCGRQVDQLGHHGLSCVKSAGRLPRHAQLNDVVRRGLASAGIPSILEPVGLDRGDGKRPDGLTLFPYSGGMCLTWDATCADTFADTVLIQTALEPGAAARAAEDRKRRHYSEISSRFKFVPIAVETSGVLGPVTSKFIRELGQLITTRTGERRETEWLLQRLSIAVVRGNAAAVLATAATDRARADRRQQPPPDVTGVRTRPSPPPSATTGRASAKQTARQASPEFLADEPLALPSEESSAPPNTRLSHHSLPGNPSEDGGGTGSESDGRPLGLTGLRNTGNTCFLNTVVQCLSNTRALHDYILRDGRSSDASMPAAATKGSLMNTFSALIRDMWTSSDETERVLTTAPLKSMIQRLAPRFMGSQQQDAQEFLRYLLQGLHEDVNRVTSRPKPITTDIDDSLSASQKSMEAWKRFLRLENSKFVDLFVGQLKATLRCTVCGHASVTFDPFWDLSLPIPSRSGQVRLQACFDLFTKEEVLDGDEKPTCSKCQKRQKCTRSLSIQKFPRILVVHLKRFSPQERFRGKLNTTVDFSVNGLDLSPYSAGQTPCRYSLYGVANHSGTLLSGHYTAHCRHPYTAEWYEYNDSRVHVMDQRSVNSGKAYVLFFELAGSKHRSGSTHV

SEQ ID NO: 31566 - protein, 1883 aa, Oscheius sp.
MGENLGVATYVSVSVKRKVEVAKESVPLSDSKGIKVKESALKMSPHDSKGFLVIDGLKKDKDSVASVSRVTNGFQEGDDKGNKVMKVKDVVLVRDHKGDTGIEPAPKKSSHVSTGLSVKEGKRKATDPVDSGSRDAKGTKKGDDKGNKGKKDLGDKGSMPIEKAIRAEKGGMKGNGKSDMGIKVPEMVGSEKDKSSKSTNMTNSGKLIIPDLEIIKEKRDSTDESHIVIRCPTPRCMLCTECDHYFPLASGKEWDDGKMKTARSRIVSHYKVHHKTAPPVIWFDCRFCGITIEKGWDMHRSFKKIADHIECHGQPYKRDRLLGNYVCGKCWIPFHSSCCLGYHVCEGKKSTEDMLVRLSEWKKMKKSEGSEHKSGNSVSQISAIPEATGVSPQVIMDPQTTQEKKVELPPPVAPGFEPLFAKPGVSSWFTDDIMSWVVPMLTEFETILPAEWTVFENPVFGLSTDHIKDMLATGKPFFIIPNVNGNHWVLVMLLLKNGKVKGTFMDPLHTKVVPPSVKNTLKDLEVVWEIGWQIYAIVEKQQNNFDCGPFVCLMIQVLNALLLGQNPKVQKMDQFKEALRKSYLTRLLPCAPSVPETIPEVVQTPPIQVAPLETRVPHVENALESSKRVPQKSTHCQVSTHQAPPPKPCVPQVEIPEKPIKRDAINKKFLPLYRNLGKESIFSDDLIRWSLENLVNFPVFTIENGKLPSAFTEDGNLLKSTLDSEYGLLFLEKINKAWVLYVVHEEQGLVNIDYFHPFNKTPNQVTIDIFKDLGTLVVGNIYQQLKGKISQISFENMGPWLCSVAWSWYEKITIDFEVNLWNPETVRGNLKKIYEEILATPKPTDSRLTAEGTIIPDLMSMELSPPESMNKRPSKEEAEEVNKFILKWLKHKYEEYLEEGPNKAQFEWLADTLTLAVNYASRGKSFELHQLLHKNMCPSGDADGITVQTSKRKPRKRKAPQSLDFNCHMTMVLAFNKNRRKVIELLGGKKSVDCPIPLEVLRSYWVNECKEVPVDDEVIQEVCAKIPSIDIPKAFNLPFTRKKIKEVLKDAKPGSTPGEDGLTYEDWKLIDPDCKILHFILNECRIHQWIPKSWRISKTIFIFKGGDIMDPANWRPIALLPTVYKLYTGVWNRCLMNVQGCLSTNQRGFQRNVASNINIQIIQAIILDARLNNNNLCIGFLDLKNAFGSLLSTLLIGVLRAFGFPESFVEIVQDLYTGIKTKIVTALGESNPFDQPTGTRQGDPISPTFFNIGLESVIRLLLAKEGSYTIGNHSYSLLAYADDLAVIDTNCFRLQKKLNLLADEASKVNLIFKPSKCCALIFRGGSTKTEQNLIVSGEVIPRMSKYDHFKYIGVPVGFNAHCNIQKLSTECKDLCDRIQESNLTPHQKLEAMSDFVWPKLTHIFQYGAPIWSQVKILSEYMVFQAKKTLLLRNEQNATYILCPKNKGGSGLLTPEDLGRVLFIGNILKNIWSENEYLSDASRHMLTLWASETAHDTVPSFPEAIRTLSELAEKDVINKNLEGTRLALMMRHFVRGCKKSNDSSAIFEKFTLTSDMNGSINLTCKLVGSTELTIFTSAQRDIIIGNLSDLVKDGIYRKWIRERKEYTGAIRAANLDSAVSSFFWKQNAVHLSEADQKFIHRARTLGTDLPGDFFCMIARAYTKNPPNTLCIWCKTKRSLIHVINCCEVRKLDIIARHNAVQDLLVQAWRIGSKSSYLLLQDCTVAEAKGTKELEKKRPDFVLRHQRQDNEEFIVVDVACPYELNETSLNVSEVRKLNKYEPISEKIRRQHPLAKVTTAALIVGSLGSWNPENDKTLKLVGIPSNLCSLVAKLMVKTSISWSRYIYNKDIIGDSYFGSPPDRVILGDYLPKSGNKENSPKNPRVE

SEQ ID NO: 31567 - protein, 1238 aa, Teladorsagia circumcincta
MSRVADTVEDNGPHSRSPALASARQRTSQLPSLGQPSLRGAAGPNEPSAQGTTVVSRRSSLWSTNELNKLADLVNRHRDASGRIQWRNLGPAWESLRNANDPQRTIAALKGAYAKLARNEGRATNENAARAQGAGAADLREDAERQSGQNDQRDREPVDVTNAGERREPDAGNTPTEQEPRQESGGGSEELMADLGARFLKYYRIAIATQDRQPVRRPKGEIPKVLLQVGNEILAEELRKRKIKSLTSLNAAVYAIARAVSGRAVEDASRRLEPERERFKEAIQLRSTLIRFISVLVGELRRRLGTEGGPGGQGRPSPLYLEVSRLYKVSRTVDVRRLCIRLRDQLNIVQQDIKRMEDAKRRFQVRRRGPPLIAREPRDQGGNVPVDQVREYWAPIVGEVQPFVETEELAAWSRAHRQAGNIHVDIDLTEDDWRTLFSRIKPWKATGPDGIQGFWWKHLPEAKERLKEWCIRALHRRREKIPRWLCRGRVVLIPKGKSAAPGPGDFRPIACLNTCYKVLTAMIANRIAKCTRDRFPKEQVALRKGIWGCTHAHILDQTVCRDAIKHRAELHMLWVDMTKAFDSVSHGAVRWTVRQWGIPNPIIALLQRIMSKQSVRYYGYQDNKSVRSAPLEIRNGLMQGDTLSPLLFCLSIAPISGWLSSNIEPYKTKTGSSSKGEGSLEVGHIFYMDDLKVYTTNWRDLVKAKVGIQRVAEQLGLKMNPQKCAVKSLNVAAEGGTEIGEIPILGLNSFYKYLGAEQDTLVSMREVWQRVQANAWNTAVRIMNSELTVRQKVQGYNQTVIPKLKYAVSCVIFGKGRLDSLKKRARDFDIRVRKLLEESKMRFGYSCVARLYVSKEEGGLGLKSVEEEVEHTIVYTWCYLSSNPDFIVPYQLAESLRASSKRSLTTDFKSVMVANGLEGRVTRTLLTFIEVDGRSYDSATKAARAISTLVHQRWAQFQMSEWKKRRVASRVLEDPDGRFQLNHKDSFLWLSKGWVSSEVLRNVWAVQEGSLLTRASAPGRAVQAPATCRMGCPMRETAEHIVSCCEHWRTNIMVERHDDVARVIYYSLKRKYGLANEVTNTHEPHVLVGSNVEIHWNNPVHTSESLKHNRPDILVWDRNARRIWIIEISVSWYTRIANQERKKISKYGVNSTLPEDTDLSLYRPGPNLKAVLQKDRRCRVDIVPIVLGTCGECSKSLRQNVQNLRLPDKTDFIIEKLSRNAILGTNWLVRSHLARNDE

SEQ ID NO: 31568 - protein, 1259 aa, Haemonchus placei
MLVERRMAKPTHRGGTHSRSPPSGSPRARTSQLPSSGQTHNSPPLDPVRGRTSQLPSSGQQNLANVVAEPNEPNAQSEATSRKGYLWTTHELNKLAELVGRHRDAGGRIRWRDLAPAWERLRGNNEPSRSVYALKGAYAKLARCSGQAVGANAARANQAQAVASEEGSQPTEQDGQDDLRDASRARNGPEPEASQEAPQEAREESGNGNSDLKADLSARFRKYYRIAISTQDRQPIVRPRGEIPGPFLQVGNEILVEEFQRTGSKKLTSLNAAVYAIARAICAKAAEEASERLKPVKESFREATQLRSTLISFISVLAAELLRRSTGGNGRGGRGRPSPKYLEVARLYKVSRTSEVQRLLIKFRDELNIVQMDIKKMEDAKKRFLVRRRGPPCVAREPRLQGGNVPVDLVREYWKPIVGEAQPFTETVELATWSQTHRQTRNIHTDVDLSQEDWKTLFSKVKPWKATGPDGIQGFWWKYLPAAKERLKEWCLRALHRRREGIPRWLCRGRVVLIPKGKSGASGPGDFRPIACLNTCYKVLTAMIANRISACVGERFPSEQVALRRGVWGCTHAHILDQTVCRDAMKHRAELHMLWVDMTKAFDSVSHDAVRWTLKQWDVPLAIRLLLNKIMSKQSVRYCGFQNGKAVKSAPLDVRNGLMQGDTLSPLLFCLAIAPISGWLRSNIEPYRTRTGGGARSEGRLEMNHIFYMDDLKVYTTSWEDLVKAKVGIQRVAEQLGLKMNPSKCAVKTLNTTAGEQTGMGDIPILGSNSFYKYLGMEQGALVSMRQVWPRVQKNAWETAVRIMSSELTVSQKVAGYNQTVIPKIKYAMSCVIFGAGRLCSLRKQARAFDIRVRKLLVDTHIRFTSSCFARLYVKKEIGGLGLKSAEEELDHSIVYTWCYLASNPDFIVPYQLAESLRASNKRSLTTDFRAVIAANGLEGKVTRTLLTFIEVNGRSYQTATGAARAISSLIRERWADAHLANWKERQVASRVLQGMGDPQRLCPKDSFLWSSKGWVSSEVLRNVWAVQEGSLLTRASAPRRAEQTPVNCRMGCPMRETAEHIVSCCSHWRTNIMVERHDDVARVIYYSLKKKYGLKSKESNTHEPHILVGTGVEIHWNNPVYTSEGLKHNRPDILVWDRQEKHIWIIEISVSWFTRISSQEQRKVFKYSVNSTLPEDTALGDFRPGPNLKAVLQKDRKSRVDVIPIVLGTCGECTPALRQYVQSLKLPDRTSFILEKLARAAVLGTNRLVKCHLANGEE

SEQ ID NO: 31569 - protein, 1117 aa, Cerceris rybyensis
MPTAPPRGVPRATGERTRHSRPANAALAWAFAPMVPLGCHPNGTYNAGPINKRNYNLRRGPRPAGPASSPPHDSSSVSIPLDSLTDFPVLSSSPGNFPCPNCERVFMSKIGLGVHRRRAHLAVVNEEIDVERTKRPWSDEELRLMAREEAVAVRQGVRFVNKHLLTVVPSRTLDAIKGARRGQRYKTLVEAAMAEMSADSDGSGDDYHSADESVESVPPEPSDFSHSQARTSFPSQSGVGREENYSSHLAAIEELLPVVRNIRGWNSNILIRIATDVVRGVDVKGSISEWIGGVFPPVDHHPRPQALRRVVNPSKRARRRAEYARVQCMFRTQMSRAVRELLDATSSGVASSVPDVRVMAEHWGPFVSQSSAPAPPVAPTARLRELECLWRPVTCDEVANNNLPLQSAPGVDGITVRQWRAVPTSIKALLFNVVLATGGFSAATLVSRTIFVPKKTSSSNPADYRPISIMSVVVRHLHKILARRIRGVEIIDLRQRCFDDGCGENVAVLATLLLESRTRLKELHVASLDVAKAFDSVSHEAIVATLRRRGMPHGFIDYVAHLYANSSTLFEVRGGRSELFKIGRGVRQGDPLSPALFCLVVDTMLAAVPPDVGFHLGEHRLGCIAYADDVLLFAATKWGLQSSLTAVESKAREQGLSFNAGKCSVLSLVPSGRDKKIKIVSAPTFQLMDGSFIPQITSTAEWRYLGVDFKPDGPGKVEVDLTTYLDRITRAPLKPQQRLKILRCFLLPRFYHALVLGGVTLGKLRALDLLTRRAVRGWLRLPRDTPTAYFHASTISGGLGIPALTTTIPGLLWQRLSSLGNSRSPTLRLIADGEWVTRRLRWARNFLCSSGVFLRSKYLREKWWAQRLYSGVDGYELRECHRTPLSSWWVDGGSHAIPGRDYVQHTHVRINALPSLVRVSRGLRRAALPTMCRAGCQVTETAAHIIQGCHRTHGGRILRHNAVCRTVAAGLRRVGWTVLEEPQYVTAEGKRKPDLVCGREGQVIVVDSQVVSGVAPLDESHERKKGYYESNTSLVEAVASAMGVQAENVKFSSCTLSWRGIWSSKSADCLLDMGLSKGLLRGITTRVLQGSHTNWTRWNRMTTRGTSGTGVTRTGVG

SEQ ID NO: 31570 - protein, 948 aa, Cerceris rybyensis
MTLLRRGEKFINKYLVGVVSSRTLDAIKGARRGQHYKSLVAAVMAETLTDSDGSGDSYHSADESDNPHPPEPSDSSHVSSSPSTLPQSSDDREAGYSSHKTAIEELLSVVRNIRGWNSNILVQLSTDVLGRVDVKSSIGTWLGGVFPPVDPHPRPHTSVSFRTQMSRAARELLDATSSGAAASVPDVSVMAERWGPFVSQVSDPALPVATTAQLRELECLWHPVTCEEVANNNLPLQSAPGIDGITVRQWRAVPSSIKALLYNVVLATGGFPAAALVSRTIFVPKKTSSSDPADYRPISVMSVVVRHLHKILAKRIRGVGIIDLRQRCFDDGCGENVSALATLLLESRSKLKELHVAPLDVAKAFDSVSHEAIVATLKRRGMPCGLTDYVAHLYANSATLFEVRGRRSELFKLGRGVRQGDPLSPALFCLIVDTMLAAVPPDVGFHLGEHRLGCLAYADDVLLFAATKWGLQTSLTAVESKAREHGLRFNSGKCSVLSLVPSGKQKKIKIVSTPTFQLLDGSFIPQITSTAEWRYLGVDFKPEGPRKVEVDLKIYLDRLTRAPLKPQQRIRIMRCFLLPRLYHSLVLGRVTLGKLRALDLQTRKAVRGWLRLPMDTPTGYFHSSTISGGLGIPALSTTIPGLLWQRLSNLENSRSPTLRFIANSEWVTRELRWAKNCLSSTGDFLSTKYRREKWWAQLLYSSVDGYELRECHRSPLSSWWVDGGSHAVPGRDYVQFTHVRINALPTRIRVSIGLRRATLPIMCRAGCRVTETAAHVIQGCHRTHGGRILRHNAICRIVAAGLRRVGWTVPEEPQYVTAEGKRKPDLVCARAGQVVVADSQVVSGVAPLDESHERKVSYYQNNTSLVEAVASRMGVQGDNVRFSSCTLSWRGIWSSKSADYLLGMGLSKGLLKGITTRVLQGSHTNWTRWNQMTSNGPPRSREERTGIG

SEQ ID NO: 31571 - protein, 960 aa, Tenthredo notha
MKTLETRFRGERCINVCMRLISSKRMDIIKRSRPRAIELTDESGDEAGSHPETSDEEQSSSTQGEAQELTEEEDDSWKERIKQYIDSIQFPQSSDYAEDGKALREAWSQTVAQELPRVTNAWIEIFTGALLQIDIPRKSNDKNGRQKDNRSNPKRKPNRPAGRVLNHKQRKKLCYARCQELFANCPKKLVDAAVSGDHSVVQLKAEPPPKDLVREYYEGIWGRPGPIVGNNVTRNRLLKMEEVLKPLTVQEVKARIARILGDSAPGPDQIRKGHLTRAGVPEALTILYNILVLEGIYPDTWRRNRTTLIPKPGKDATAIKNWRPITIGSMMARIFSGLLDQRLRMVIKQTSRRKGFTNSNGCQQNVSLLGEGIESMKLDAGGVATIVDISKAFDSIPHSALRKGLGAKRIPAHLIHLVEEMYRECTTLIQAGNKQKVSIQLRRGVKQGDPLSPLLFNLAMEEVIERLDTETQGVTVGGHNLSVMAFADDVVVLGRDCKVAQKQLEALDTYLDNMGMELSIPKCQTFQIVPTRKSWYAKDPGLTIRGQNVQYVEPQEVCTYLGAKISPWMGLGRESIVPKTTSIINNLKRLKLKPWQKLELLKRHILPRFTYELVVNLPAKGTLKLLDNSIRQHVKEILHLLTSTATGFFYTPVRDGGLGLMRYERVVGFAALKGRLIMAQSEDQALSGAMTEKEHETKKLAHNIKVKWPISLDELDQAKRKARKSESHSWRVLPSQGQGVTDYAGDKVGNRWLAQPSILQGSRLIDAIRLRTNTFGTRVVLARTNKGIDTACRRCKTAPETLGHILGLCTHTKAARIRRHDDIRRLLTDKLSRTYTVFEEATVNELGELKKPDLIVCDQDTARILDVTVRYESGNRLREARTEKIEKYRRTVELIRQRTGKIRGEVVPIVIGSRGVMPRQTREALQALGLKAADLLTISMIALRASIEIANAFIEYDQIQ

SEQ ID NO: 31572 - protein, 1140 aa, Colias croceus
MNETNKSGYRPLLYSKFIESFPELNFLSEQRLSDQIRVILNGNRISVTEREAIKNTIGAQDLNRQPTELSNETTQEAYTDNYNTNLLISTSSLTPTHTNINHSCTLSPQEPEHSEDNLVRDDLAQNDIYVLKLIREMEIMYAFYYDTDPTTRPKLPRLKANKKLFELIYIFNHYILSKFYSLDSDLSHIHTIIYCTALIISRELGYKINTDMSDVQLRNPDKKKPAWQNRLELDIQQLRADIGRLTRYIRGDRSPNLTNKVNKIFENAKVHSTHERNNVTPDEYLDTLKQKLSLKAHRLSRYKKSLMRKQDNRLFNTNEKIFYRTLHSANEDNDTELAPPENELRNYWNDIWGISKNFNESAEWIKEETERWSEVEEMDFSEITTQDIQILTQNMKNWKAAGIDCIHNFWYKKLTSLHTILAKIITDLIKNTTGLPEFITTGITYMIPKGKQTADPSQYRPITCLPTIYKLITSCITNKLVTHLESHNIIAEEQKGCRRNHRGCKEQLVIDSTILKHASNHNRNLNITYIDYKKAFDSVPHSWLIHILQIYKVNSSIITFLQNCMVNWKTSLRLKTKTTHITTEQIQIKNGIFQGDSLSPLWFCMALNPLSNLLSRKGMGYQLTNDTAVTHLMYMDDIKLFGKSQKEIKTLLEITTEFSSDINMSFGIDKCKAIHIKKGKISNKEAIILNSDTIITAMGDNDLYKYLGILQGNTIHHTQLKKDFSREYVKRVTVLCKRKLNAKNLIKSINTYAVPVLTYSFGLIKWSKTDIRRLEIKTRAILSKYNYHHPKSAIERLTVNREKGGRGLIDLNRLWQKQIEDIRDFFYKKAETSKLHAATIAEDNNYTPLNLKHKEINFKTRQEQEKLKIDTWRQKELHGRHLKELEKSNIDLQASNEWLKKGYLFPETEGFAIAIQDQVINTRNYKKYILKENIPIDRCRKCQRQPETIQHITGACSSLAQNDYTHRHNQVVHYLHQKLAVKYNFNKGKLLPYYNYKPKPVLDSPTSKIYFDRAILTDKTIHFNRPDITLLNKITKTAYLIDVTIPNTHNIQKAISEKLHKYTELKEEILRIWNLRTVYIIPIVLSCTGVIPKNLHHSLKLLDLPKNTFITMQKAVILNTCRIVRKFLSDSEITGTDNYI

SEQ ID NO: 31573 - protein, 1416 aa, Colias croceus
MRLRSTRILPQAGTEANSGGESRPEPSGSGRALRTLGEGNESQLTQSQTVVSYSHVSQTTSEPSYLSRSSSTNDLMHSPSSSSISINSSSSSTHTSIPPTLADVEQEAVATNPAPTATSNKRTRIYWTNEMNMFIWRTYLQITNLEQNTKQYLDPLYKAFTDKFPHIIVTKQRIGDQKRAIINNKMLPLDVLEKIKQEVLKSKGIRTRNNAEIPTSCLTQNQSNQNSNKTFATNTTSTNVLNNMRPLVTKAGKQRQRLQWTDEINKELLRCYYIVTMNETNKSGYRPLLYSKFIESFPELNFLSEQRLSDQIRVILNGNRISVTEREAIKNTIGAQDLNRQPTELSNETTQEAYTDNYNTNLLISTSSLTPTHTNINHSCTLSPQEPEHSEDNLVRDDLAQNDIYVLKLIREMEIMYAFYYDTDPTTRPKLPRLKANKKLFELIYIFNHYILSKFYSLDSDLSHIHTIIYCTALIISRELGYKINTDMSDVQLRNPDKKKPAWQNRLELDIQQLRADIGRLTRYIRGDRSPNLTNKVNKIFENAKVHSTHERNNVTPDEYLDTLKQKLSLKAHRLSRYKKSLMRKQDNRLFNTNEKIFYRTLHSANEDNDTELAPPENELRNYWNDIWGISKNFNESAEWIKEETERWSEVEEMDFSEITTQDIQILTQNMKNWKAAGIDCIHNFWYKKLTSLHTILAKIITDLIKNTTGLPEFITTGITYMIPKGKQTADPSQYRPITCLPTIYKLITSCITNKLVTHLESHNIIAEEQKGCRRNHRGCKEQLVIDSTILKHASNHNRNLNITYIDYKKAFDSVPHSWLIHILQIYKVNSSILTFLQNCMVNWKTSLRLKTKTTHITTEQIQIKNGIFQGDSLSPLWFCMALNPLSNLLSRKGMGYQLTNDTAVTHLMYMDDIKLFGKSQKEIKTLLEITTEFSSDINMSFGIDKCKAIHIKKGKISNKEAIILNSDTIITAMGDNDLYKYLGILQGNTIHHTQLKKDFSREYVKRVTVLCKRKLNAKNLIKSINTYAVPVLTYSFGLIKWSKTDIRRLEIKTRAILSKYNYHHPKSAIERLTVNREKGGRGLIDLNRLWQKQIENIRDFFYKKAETSKLHAATIAEDNNYTPLNLKHKEINFKTRQEQEKLKIDTWRQKELHGRHLKELEKSNIDLQASNEWLKKGYLFPETEGFAIAIQDQVINTRNYKKYILKENIPIDRCRKCQRQPETIQHITGACSSLAQNDYTHRHNQVVHYLHQKLAVKYNFNKGKLLPYYNYKPKPVLDSPTSKIYFDRAILTDKTIHFNRPDITLLNKITKTAYLIDVTIPNTHNIQKAISEKLHKYTELKEEILRIWNLRTVYIIPIVLSCTGVIPKNLHHSLKLLDLPKNTFITMQKAVILNTCRIVRKFLSDSEITGTDNYI

SEQ ID NO: 31574 - protein, 987 aa, Clostera curtula
MIVLVFILVILVLICIQQRQMAHCVEAEGTSANTNNCCVQCSPVRFFNTLRGLNIHIGKVHKPDPHALSEEQAVHNISQSQRPLPNNPSTPFWKYLGNLKSSVPVLKRIPRGARITIAKQLSKDIQNAISSNSKASWEHLITFPYRILHVATSRHNNQSLTHLLKKNCVSATSNFTIPILSSSSRSFRCNLQKSKLVENKLSDGDVKGAARLLFSDDTIAPTTPDTLLSLLSKHPTSAANVHLLEPPLPSDPYLQVTTEEVTRAILSFPNGSASGFDALSPQHLKDLTGAGIGTSGTTLVADLTALVNFMLSGKVNNQVVDILYGANLCALTKKDGGVRPIAVGCTYRRLTAKVCCASKRNEISSYLKPRQLGFGTRGGCEAAVHAVRNFLNRDSGEVLLKVDVKNAFNSVDRVTMLSQIKQNVPDLYNFIWQCYSTTSKSSKLIYSNNLIESSVGCQQGDPLGPAIFSLCIQPIIHILGSKLNVWYLDDGTIGGEVNTVLKDLTTLQAEFAKIGLVLNTSKCELYISESCTDQIGVLQKFTALAPDIKRIHKHSLRLLGAPVFEESVPSFIEEKNLNFTMKTDKLSEINSHMAFFIIRYCLFVPQFMYFLRCCPLWKHTELLQSLDNIVKSTLICILNTPLDDRAWSQASLPIRLGGLGIRKISSVSLPAYLSSVHSNTNLIEEILRPAFGNVEILDHNEARNHWLSICLNSTEPDNLSSQRQWDEPLCELLRVNLLDTSSSSTERARLLASKTWESGLWLQALPSTHIGTLMDSTAFRLAVCLRLGTTCVVPHRCHCGESVDRLAHHGLSCQRSVGRIPRHASLNDIIRRSLITSNVPAILEPNGLWRDDGKRPDGMTVIPWKMGRPLVWDVTCVDTLAPSHLPRTSVEAGSAADFAENRKRRKYSRLDEGYLFEPFAVETLGPWGPSAHRLFRDLSRRLVDTSGDQRAGTYLAQRISIAIQRGNAASLLGTLPSGGDWAQLNFL

SEQ ID NO: 31575 - protein, 979 aa, Clostera curtula
MIVLVFILVILVLICIQQRQMAHCVEAEGTSANTNNCCVQCSPVRFFNTLRGLNIHIGKVHKPDPHALSEEQAVHNISQSQRPLPNNPSTPFWKYLGNLKSSVSVLKRIPRGARITIAKQLSKDIQNAISSNSKASWEHLITFPYRILHVATSRHNNQSLTHLLKKNCVSATSNFTIPILSSSSQSFRCNLQKSKLVESKLSDGDVKGAARLLFSDDTLAPTTSDTLLSLLSKHPTSAANVHLLEPPLPSDPYLQVTTEEVTRAILSFPNGSASGFDALSPQHLKDLTGAGIGTSGTTLVADLTALVNFMLSGKVNNQVVDILYGANLCALTKKDGGVRPIAVGCTYRRLTAKVCCASKRNEISSYLKPRQLGFGTRGGCEAAVHAVRNFLNRDSGEVLLKVDVKNAFNSVDRVTMLSQIKQNVPDLYNFIWQCYSTTSKLIYSNNLIESSVGCQQGDPLGPAIFSLCIQPIIHILGSKLNVWYLDDGTIGGEVNTVLKDLTTLQAEFAKIGLVLNTSKCELYISESCTDQIGVLQKFTALAPDIKRIHKHSLRLLGAPVFEESAPSFIEEKILNFTMKTDKLSEINSHMAFFIIRYCLFVPQFMYFLRCCPLWKHTELLQSLDNIVKSTLICILNTPLDDRAWSQASLPIRLGGLGIRKISSVSLPAYLSSVHSNTNLIEEILRPALGNVEILDHNEARNHWLSICLNSTEPDNLSSQRQWDEPLCELLRVNLLDTSSSSTERARLLASKTWESGLWLQALPSTHIGTLMDSTAFRLAVCLRLGTTCVVPHRCHCGESVDRLAHHGLSCQRSVGRIPRHASLNDIIRRSLITSNVPAILEPNGLWRDDGKRPDGMTVIPWKMGRPLVWDVTCVDTLAPSHLPRTSVEAGSAADFAENRKRRKYSRLDEGYLFEPFAVETLGPWGPSAHRLFRDLSRRLVDTSGDQRAGTYLAQRISIAIQRGNAASLLGGAVVAIGHN

SEQ ID NO: 31576 - protein, 984 aa, Clostera curtula
MIVLVFILVILVLICIQQRQMAHCVEAEGTSANTNNCCVQCSPVRFFNTLRGLNIHIGKVHKPDPHALSEEQAVHNISQSQRPLPNNPSTPFWKYLGNLKSSVPVLKRIPRGARITIAKQLSKDIQNAISSNSKASWEHLITFPYRTLHVATSRHNNQSLTHLLKKNCISATSNFTIPILSSSSRSFRCNLQKSKLVENKLSDGDVKGAARLLFSDDTLAPTTPDTLLSLLSKHPTSAANVHLLEPPLPSDPYLQVTTEEVTRAILSFPNGSASGFDALSPQHLKDLTGAGIGTSGTTLVADLTALVNFMLSGKVNNQVVDILYGANLCALTKKDGGVRPIAVGCTYRRLTAKVCCASKRNEISSYLKPRQLGFGTRGGCEAAVHAVRNFLNRDSGEVLLKVDVKNAFNSVDRVTMLSQIKQNVPDLYNFIWQCYSTTSKLIYSNNLIESSVGCQQGDPLGPAIFSLCIQPIIHILGSKLNVWYLDDGTIGGEVNTVLKDLTTLQAEFAKIGLVLNTSKCELYISESCTDQIGVLQKFTALAPDIKRIHKHSLRLLGAPVFEESVPSFIEEKILNFTMKTDKLSEINSHMAFFIIRYCLFVPQFMYFLRCCPLWKHTELLQSLDNIVKSTLICILNTPLDDRAWSQASLPIRLGGLGIRKISSVSLPAYLSSVHSNTNLIEEILRPAFGNVEILDHNEARNHWLSICLNSTEPDNLSSQRQWDEPLCELLRVNLLDTSSSSTERARLLASKTWESGLWLQALPSTHIGTLMDSTAFRLAVCLRLGTTCVVPHRCHCGESVDRLAHHGLSCQRSVGRIPRHASLNDIIRRSLITSNVPAILEPNGLWRDDGKRPDGMTVIPWKMGRPLVWDVTCVDTLAPSHLPRTSVEAGSAADFAENRKRRKYSRLDEGYLFEPFAVETLGPWGPSAHRLFRDLSRRLVDTSGDQRAGTYLAQRISIAIQRGNAASLLGTLPSGGDWAQLNFL

SEQ ID NO: 31577 - protein, 1292 aa, Leptidea sinapis
MEELIYCYFKAKLEGPGYIARLQQLFCNRNPDNPKIHKFNGNTLSNQARRIIKQNVLPKNTLDTIQKTIENEPLQTHNSITPITESNEVLTSHNTEIFYGDRRRRWTQQEKEELMFCYFKAKNEAMEYISELEQLFKQRNPDNPKIHRFNGNTLSNQARRILKHNLISQELLNQIKHNAENEMHQSHPINIDTHTNTTSTLVLDNTTEETNEQDTLDIQSRNRFDSEIAQWPVTCDNVEEQNPLVIQFLQCLAETKEIPIEERDYLPKAKINRQFLQNLTIIDNYLPTILVSNCTLRGTNDIIYYAARTLIVNNNQHPYSPSSTIKPHRDPPWKNRIKIKIERLRKELGQMVEMSRGVNSRKMIKIRDKLYAKYKIKYEIELKSKEEILKQRIKALAGRIKRYEEINSRKRQNKMFTEDEHRLYRSLDSNNENIDVMIPSKHITEEFWTNILSQPVEYNHQAKWILDMEQSNNNIITSSADVITSEQIKHSLSKMLNWKAPGQDKVQNYYLKYFTKTHDHLAMLYTRVLKGEELLEDWLTTGKVILIPKNKDTENPKNWRPIACLPSMYKLLTSLLSDQLYSHCLTNNIMAPEQRGCRRGARGCKDHLMLNKAILEDAHEAQKNLSMGWIDYQKAFDSVSHEWLLRVLDIYRCPPVIKSFLERAMPKWKVIMTAKGSTDSYTTEPIYVRRGIFQGDSLSPLLFCLAINPISTILEKYQNKGYHLKDSVWINHLIYMDDLKVYANNKTNLKILLDSVEIITTDIGMSFGLDKCNILHITAGYRNHTDGNEHILLNGNTFKQLKLVQTYKYLGINESGKINHSDIRDQLTKEYFRRVKKITNSYLNARNLIKGINTYAVPVLMYSFGVINYKNSDLKRIDMKTRKLLAIKKAHQQKADVDRIYLPIAMGGRGLINLENLYKAHILKYKQYLEQKNDKLIEAITQHDRNRETHSIYKDSYEIEKELKLTTGKDHTKIEIKNSIIKKQNEAWRNKSLHGQFPKKVLDLTNVDKELTFKWLKKQPISPTLESSLFAIQDQANTDGKCRLCANKDETVQHLLAGCEKLAGTYFVKRHNNLVQYVFWCLAKKNEIDVNKLWWQEELKQPMLKENSIAKLMWEIPVQTDITITHNRPDLIHIDKQNNHTYLIDISVPSDYNIGAKEIEKISKYHPLKVELSRLWNTTVSIIPIVVGATGAVTKSLKRYCDKLDANINIHILQKQAALHSSTIISKVLGDTVFVSQSSQTHQQHTAHSNTQSTSSYHTSTSDIQLQGSTVRSHNILNGGIEQDHNSRYPFS

SEQ ID NO: 31578 - protein, 1457 aa, Fabriciana adippe
MPREGWNIEVCVSDGNLIDGQRSYSSTFNMKRQLRNTRIGSLPGGDRRGTSGADAGRDSIRAVSDSLLSRRAEVGVPEHVTAEQRGGGETGDALQSREFTPTQHSAGSSVTTTSTCINEDKKRKWSMKEMEELIYCYFKAKLEGPGYIARLQQLFCNRNPDNPKIHKFNGNTLSNQARRIIKQNVLPKNTLDAIQKTIENQSQLAHNSLIPITENSDILTTFTRSPSTNQSQQISSSNVETQNTEIFHGDRRRRWTQQEEEELMFCYFKAKYEATEYISKLEQLFKQRNPNNPKIHRFNGNTLSNQARRILKQNLISQELLNRIKRNAESEAQQSHPSNTNSHTNTTPTLVLDNTIEETNEQDISNIQSSSRSVSVMAQFPVTYDSDEEQNPLIVQFLQCLAETKEIPIEERDYLPKAKINRQFLQNLTIIDNYLPTILASNCTLRDTNDIIYSAARTLIVNNNQHPYSPSSTIKPHVDPPWKNRIKAKIERLRKELGQMVEISRGVNSRKMIKIRDKLYAKYNIQNEIEHKSREEILKQRIKALAGRIKRYEEINSRKQQNKMFTEDEHRLYRSLDSKRENIDVKIPSKHNTEKFWTNILSQPVEYNHQAEWILEMEQSNNNITMNSSEEITTEQIKHSLSKMLNWKAPGQDKVQNYYLKYFTRMHDHLAMLYTRVLKGEEPLDDWLTTGKVILIPKNEDTENPKNWRPIACLPSMYKLLTSILSDQLYTHCLANNIMAPEQRGCRRGARGCKDHLMLNKAILEDAHEAQKNLSMGWIDYQKAFDSISHEWLLRVLDIYRCPPVIKRFLERAMPKWKVIMTAKGSTDSYTTEPIYVRRGIFQGDSLSPLLFCLALNPISTILGKYQKKGYHLKDSVWINHLVYMDDVKVYANNKTNLKILLDSVEIFTTDIGMSFGLDKCNILHITAGYRNHTDGNEHILLNGNTFKQLKLDQTYKYLGINESGKINHSDIRDQLTKEYFRRVKKLTNSHLNARNLIKGINTYAVPVLMYSFGVINYKNSDIKRIDVKTRKLLAIKKAHQQKADVDRIYLPIAMGGRGLINLENLYKAHILKYKQYLEQKNDYLIEAIAHHDKNRGKYSIYKEAEEIEKELKLTRGKDHTKIEIKNSIIKKQNEAWRNKNLHGQFPKKVLDLANVDKELTFKWLKKQPISPSVESSLFAIQDQAVLTRQHERDILKRNTDGKCRLCANKDETVQHLLAGCEKLAGTYFVKRHNNLVQYVFWCLAKKNKIEVNKLWWKEELMQPTLKENSTAKLIWEIPVQTDVTITHNRPDLIYIDKQNNHTYLIDISVPSDYNIGAKEIEKISKYHPLKVELSRLWNTTVTTIPIVVGATGAVTKSLKRYCDKLDANINIHILQKQAALHSSTIISKVLGDTVFVTQSSQAYQQHIAQSNTQPTSTYHSSTSQSTTQPSSDQHTFAASDSHTQEHTDPSQPYLPQ

SEQ ID NO: 31579 - protein, 1123 aa, Leptidea sinapis
MHQSHPIDIDTHTNTTSTLVLDNTTEETNEQDTLDIQSRNRFDSEIAQCPVTCDNEEEQNPLVIQFLQCLAETKEIPIEERDYLPKAKINRQFLQNLTIIDNYLPTILASNCTLRGTNDIIYSAARTLIVNNNQHPYSPSSTIKPHRDPPWKNRIKIKIERLRKELGQMVEISRGVNSRKMIKIRDKLYAKYKINNEIELKSTEELMKQRIKALAGRIKRYEEINSRKRQNKMFTEDEHRLYRSLDNNNEKIDVMIPSKHITEEFCTNILSQPVEYNHQAKWILDMEQSNNNIITSSADVITSEQIKHSLSKMLNWKAPGQDKVQNYYLKYFTKTHDHLAMLYTRVLKGEELLEDWLTTGKVILIPKNKDTENPKNWRPIACLPSMYKLLTSLLSDQLYTHCLTNNIMAPEQRGCRRGARGCKDHLMLNKAILEDAHEAQKNLSMGWIDYQKAFDSVSHEWLLRVLDIYRCPPVIKSFLERAMPKWKVIMTAKGSADSYTTEPIYVRRGIFQGDSLSPLLFCLAINPISTILEKYQNKGYHLKDSVRINHLIYMDDLKVYANNKTNLKILLDSVEIFTTDIGMSFGLDKCNILHITAGYRNHTDGNEHILLNGNTFKQLKLDQTYKYLGINESGKINHSDIRDQLTKEYFRRVKKITNSYLNARNLIKGINTYAVPVLMYSFGVINYKNSDLKRIDMKTRKLLAIKKAHQQKADVDRIYLPIAMGGRGLINLENLYKAHILKYKQYLEQKNDKLIEAITQHDKNRETHSIYKDSYEIEKELKLTTGKDHTKIEIKNSIIKKQNEAWRNKSLHGQFPKKVLDLANVDKELTFKWLKKQPISPTLESSLFAIQDQAVLTRQHERDILKRNTDGKCRLCANKDETVQHILAGCEKLAGTYFVKRHNNLVQYVFWCLAKKNEIDVNKLWWQEELKQPMLKENSIAKLMWEIPVQTDITITHNRPDLIHIDKQNNHTYLIDISVPSDYNIGAKEIEKISKYHPLKVELSRLWNTTVSIIPIVVGATGAVTKSLKRYCDKLDANINIHILQKQAGLHSSTIISKVLGDTVFVSQSSQAHQQHTANSNTQSTSSYHSSTSDTQLQGSTVRSHNILNGGIEQDHNSRYPFS

SEQ ID NO: 31580 - protein, 1123 aa, Leptidea sinapis
MHQSHPIDIDTHTNTTSTLVLDNTTEETNEQDTLDIQSRNRFDSEIAQCPVTCDNEEEQNPLVIQFLQCLAETKEIPIEERDYLPKAKINRQFLQNLTIIDNYLPTILASNCTLRGTNDIIYSAARTLIVNNNQHPYSPSSTIKPHRDPPWKNRIKIKIERLRKELGQMVEISRGVNSRKMIKIRDKLYAKYKINNEIELKSTEEIMKQRIKALAGRIKRYEEINSRKRQNKMFTEDEHRLYRSLDNNNEKIDVMIPSKHITEEFWTNILSQPVEYNHQAKWILDMEQSNNNIITSSADVITSEQIKHSLSKMLNWKAPGQDKVQNYYLKYFTKTHDHLAMLYTRVLKGEELLEDWLTTGKVILIPKNKDTENPKNWRPIACLPSMYKLLTSLLSDQLYTHCLTNNIMAPEQRGCRRGARGCKDHLMLNKAILEDAHEAQKNLSMGWIDYQKAFDSVSHEWLLRVLDIYRCPPVIKSFLERAMPKWKVIMTAKGSADSYTTEPIYVRRGIFQGDSLSPLLFCLAINPISTILEKYQNKGYHLKDSVRINHLIYMDDLKVYANNKTNLKILLDSVEIFTTDIGMSFGLDKCNILHITAGYRNHTDGNEHILLNGNTFKQLKLDQTYKYLGINESGKINHSDIRDQLTKEYFRRVKKIKNSYLNARNLIKGINTYAVPVLMYSFRVINYKNSDLKRIDMKTRKLLAIKKAHQQKADVDRIYLPIAMGGRGLINLENLYKAHILKYKQYLEQKNDKLIEAITQHDKNRETHSIYKDSYEIEKELKLTTGKDHTKIEIKNSIIKKQNEAWRNKSLHGQFPKKVLDLANVDKELTFKWLKKQPISPTLESSLFAIQDQAVLTRQHERDILKRNTDGKCRLCANKDETVQHILAGCEKLAGTYFVKRHNNLVQYVFWCLAKKNEIDVNKLWWQEELKQPMLKENSIAKLMWEIPVQTDITITHNRPDLIHIDKQNNHTYLIDISVPSDYNIGAKEIEKISKYHPLKVELSRLWNTTVSIIPIVVGATGAVTKSLKRYCDKLDANINIHILQKQAALHSSTIISKVLGDTVFVSQSSQAHQQHTANSNTQSTSSYHSSTSDTQLQGSTVRSHNILNGGIEQDHNSKYPFS

SEQ ID NO: 31581 - protein, 1403 aa, Leptidea sinapis
MKRQLRNTRNGSLPGGDRRGTSGADAGRDSIRTVSDSLLSRRAEVGEPERITAEQRGGGETGDALQRGEFTPTQHSAGSSVTTTNINEDKKRKWSTEEMEELIYCYFKAKLEGPGYIARLQQLYCNRNPDNPKIHKFNGNTLSNQARRIIKQNVLPKNTLDTIQKTIENEPLQTHNSITPITENNEVLTSHNTEIFYGDRRRRWTQQEKEELMFCYFKAKNEAMEYISELEQLFKQRNPDNPKIHRFNGNTLSNQARRILKHNLISQELLNQIKHNAENEMHQSHPIDIDTHTNTTSFLVLDNTTEETNEQDTLDIQSRKRFDSEIAQWPVTCDNVEEQNPLVIKFLQCLAETKEIPIEERDYLPKAKINRRFLQNLTIIDNYLPTILVSNCTLRGTNDIIYSAARTLIVNNNQQPYSPSSTIKPHRDPPWKNRIKIKIERLRKELGQMVEMSRGVNSRKMIKIRDKLYAKYKIKNEIELKSTEEIMKQRIKALAGRIKRYEEINSRKRQNKMFTEDEHRLYRSLDSNNENIDVMIPSKHITEEFWTNILSQPVEYNHQAKWILDMEQSNNNIITSSADVITSEQIKHSLSKMLNWKAPGQDKVQNYYLKYFTKTHDHLAMLYTRVLKGEELLEDWLTTGKVILIPKNKDTENPKNWRPIACLPSMYKLLTSLLSDQLYSHCLTNNIMAPEQRGCRRGARGCKDHLMLNKAILEDAHEAQKNLSMGWIDYQKAFDSVSHEWLLRVLDIYRCPPVIKSFLERAMPKWKVIMTAKGSTDSYTTEPIYVRRGIFQGDSLSPLLFCLAINPISTILEKYQNKGYHLKDSLWINHLIYMDDLKVYANNKTNLKILLDSVEIFTTDIGMSFGLDKCNILHITAGYRNHTDGNEHILLNGNTFKQLKLDQTYKYLGINESGKINHSDIRDQLTKEYFRRVKKITNSYLNARNLIKGINTYAVPVLMYSFGVINYKNSDVKRIDMKTRKVLAIKKAHQQKADVDRIYLPIAMGGRGLINLENLYKAHILKYKQYLEQKNDKLIEAITQHDKNRETHSIYKDSYEIEKELKLTTGKDHTKIEIKNSIIKKQNEAWRNKSLHGQFPKKVLDLANVDKELTFKWLKKQPISPTLESSLFAIQDQAVLTREHERDILKRNTDGKCRLCANKDETVQHLLAGCEKLAGTYFVKRHNNLVQYVFWCLAKKNEIDVNKLWWQEELKQPMLKENSIAKLMWEIPVQTDITITHNRPDLIHIDKQNNHTYLIDISVPSDYNNGAKEIEKISKYHPLKVELSRLWNTTVSIIPIVVGATGAVTKSLKRYCDKLDANINIHILQKQAALHSSTIISKVLGDTVFVTQSSQIHQQHTAHSNTQSTSSYHTSTSDIQLQGSTVRSHNILDGGIEQDHNSRYPFS

SEQ ID NO: 31582 - protein, 1191 aa, Leptidea sinapis
MFCYFKAKNEAMEYISELEQLFKQRNPDNPKIHRFNGNTLSNQARRILKHNLISQELLNQIKHNAENEMHQTHPIDIDTHTNTTSFLVLDNTTEETNEQDTLDIQSRKRFDSEIAQWPVTCDNVEEQNPLVIKFLQCLAETKEIPIEERDYLPKAKINRRFLQNLTIIDNYLPTILVSNCTLRGTNDIIYSAARTLIVNNNQQPYSPSSTIKPHRDPPWKNRIKIKIERLRKELGQMVEMSRGVNSRKMIKIRDKLYAKYKIKNEIELKSTEEIMKQRIKALAGRIKRYEEVNSRKRQNKMFTEDEHRLYRSLDSNNENIDVMIPSKHITEEFWTNILSQPVEYNHQAKWILDMEQSNNNIITSSADVITSEQIKHSLSKMLNWKAPGQDKVQNYYLKYFTKTHDHLAMLYTRVLKGEELLEDWLTTGKVILIPKNKDTENPKNWRPIACLPSMYKLLTSLLSDQLYSHCLTNNIMDPEQRGCRRGARGCKDHLMLNKAILEDAHEAQKNLSMGWIDYQKAFDSVSHEWLLRVLDIYRCPPVIKSFLERAMPKWKVIMTAKGSTDSYTTEPIYVRRGIFQGDSLSPLLFCLAINPISTILEKYQNKGYHLKDSLWINHLIYMDDLKVYANNKTNLKILLDSVEIFTTDIGMSFGLDKCNILHITAGYRNHTDGNEHILLNGNTFKQLKLDQTYKYLGINESGKINHSDIRDQLTKEYFRRVKKITNSYLNARNLIKGINTYAVPVLMYSFGVINYKNSDVKRIDMKTRKVLAIKKAHQQKADVDRIYLPIAMGGRGLINLENLYKAHILKYKQYLEQKNDKLIEAITQHDKNRETHSIYKDSYEIEKELKLTTGKDHTKIEIKNSIIKKQNEAWRNKSLHGQFPKKVLDLANVDKELTFKWLKKQPISPTLESSLFAIQDQAVLTRQHERDILKRNTDGKCRLCANKDETVQHLLAGCEKLSGTYFVKRHNNLVQYVVWCLAKKNEIDVNKLWWQEELKQPMLKENSIAKLMWEIPVQTDITITHNRPDLIHIDKQNNHTYLIDISVPSDYNIGAKEIEKISKYHPLKVELSRLWNTTVSIIPIVVGATGAVTKSLKRYCDKLDANINIHILQKQAALHSSTIISKVLGDTVFVTQSSQIHQQHTAHSNTQSTSSYHTSTSDIQLQGSTVRSHNILDGGIEQDHNSRYPFS

SEQ ID NO: 31583 - protein, 1081 aa, Fabriciana adippe
MAQCPVTYDSDEEQNPLIVQFLQCLAETKEIPIEERDYPPKAKINRQFLQNLTIIDNYLPTILASNCTLRDTNDIIYSAARTLIVNNNQHPYSPSSTIKPHVDPPWKNRIKAKIERLRKELGQMVEISRGVNSRKMIKIRDKLYAKYNIQNEIEHKSREEILKQRIKALAGRIKRYEEINSRKQQNKMFTEDEHRLYRSLDSKRENIDVKIPSKHNTEKFWTNILSQPVEYNHQAEWILEMEQSNNNITMNSSEEITTEQIKHSLSKMLNWKAPGQDKVQNYYLKYFTRMHDHLAMLYTRVLKGEEPLDDWLTTGKVILIPKNEDTENPKNWRPIACLPSMYKLLTSILSDQLYTHCLANNIMAPEQRGCRRGARGCKDHLMLNKAILEDAHEAQKNLSMGWIDYQKAFDSISHEWLLRVLDIYRCPPVIKRFLERAMPKWKVIMTAKGSTDSYTTEPIYVRRGIFQGDSLSPLLFCLALNPISTILGKYQNKGYHLKDSVWINHLVYMDDVKMYANNKTNLKILLDSVEIFTTDIGMSFGLDKCNILHITAGYRNHTDGNEHILLNGNTFKQLKLDQTYKYLGINESGKINHSDIRDQLTKEYFRRVKKLTNSHLNARNLIKGINTYAVPVLMYSFGVINYKNSDIKRIDVKTRKLLAIKKAHQQKADVDRIYLPIAMGGRGLINLENLYKAHILKYKQYLEQKNDYLIEAIAHHDKNRGKYSIYKEAEEIEKELKLTRGKDHTKIEIKNSIIKKQNEAWRNKNLHGQFPKKVLDLANVDKELTFKWLKKQPISPSVESSLFAIQDQAVLTRQHERDILKRNTDGKCRLCANKDETVQHLLAGCEKLAGTYFVKRHNNLVQYVFWCLAKKNKIEVNKLWWKEELKQPTLKENSTAKLIWEIPVQTDVTITHNRPDLIYIDKQNNHTYLIDISVPSDYNIGAKEIEKICKYHPLKVELSRLWNTTVTTIPIVVGATGAVRKSLKRYCDKLDANINIHILQKQAALHSSTIISKVLGDTVFVTQSSQANQQHIAQSNTQSTSTYHSSTSQSTTQPSSDQHTFAASDSHTQEHTDPSQPYLPQ

SEQ ID NO: 31584 - protein, 1403 aa, Leptidea sinapis
MKRQLRNTRNGSLPGGDRRGTSGADAGRDSIRTVSDSLLSRRAEVGEPERITAEQRGGGETGDALQRGEFTPTQHSAGSSVTTTNINEDKKRKWSTEEMEELIYCYFKAKLGGPGYIARLQQLFCNRNPDNPKIHKFNGNTLSNQARRIIKQNVLPKNTLDTIQKTIENEPPQTQNSITPITENNEVLTSHNTEIYYGDRRRRWTQQEKEELMFCYFKAKNEAMEYISELEQLFKQRNPDNPKIHRFNGNTLSNQARRILKHNLISQELLNQIKHNAENEMHQSHPIDIDTHTNTTSTLVLDNTTEETNEQDTLDIQSRNRFDSEIAQCPVTCDNEEEQNPLVIQFLQCLAETKEIPIEERDYLPKAKINRQFLQNLTIIDNYLPTILASNCTLRGTNDIIYSAARTLIVNNNQHPYSPSSTIKPHRDPPWKNRIKIKIERLRKELGQMVEISRGVNSRKMIKIRDKLYAKYKIKNEIELKSTEEIMKQRIKALAGRIKRYEEINSRKRQNKMLTEDEHRLYRSLDSNNENIDVMIPSKHITEEFWTNILSQPVEYNHQAKWILDMEQSNNNIITSSADVITSEQIKHSLSKMLNWKAPGQDKVQNYYLKYFTKTHDHLAMLYTRVLKGEELLEDWLTTGKVILIPKNKDTENPKNWRPIACLPSMYKLLTSLLSDQLYTHCLTNNIMAPEQRGCRRGARGCKDHLMLNKAILEDAHEAQKNLSMGWIDYQKAFDSVSHVWLLRVLDIYRCPPVIKSFLERAMPKWKVIMTAKGSADSYTTEPIYVRRGIFQGDSLSPLLFCLAINPISTILEKYQNKGYHLKDSVWINHLIYMDDLKVYANNKTNLKILLDSVEIFTTDIGMSFGLDKCNILHITAGYRNHTDGNEHILLNGNTFKQLKLDQTYKYLGINESGKINHSDIRDQLTKEYFRRVKKITNSYLNARNLIKGINTYAVPVLMYSFGVINYKNSDLKRIDMKTRKLLAIKKAHQQKADVDRIYLPIAMGGRGLINLENLYKAHILKYKQYLEQKNDKLIEAITQHDKNRETHSIYKDSYEIEKELKLTTGKDHTKIEIKNSIIKKQNEAWRNKSLHGQFPKKVLDLANVDKELTFKWLKKQPISPTLESSLFAIQDQAVLTRQHERDILKRNTDGKCRLCANKDETVQHILAGCEKLAGTYFVKRHNNLVQYVFWCLAKKNEIDVNKLWWQEELKQPMLKENSIAKLMWEIPVQTDITITHNRPDLIHIDKQNNHTYLIDISVPSDYNIGAKEIEKISKYHPLKVELSRLWNTTVSIIPIVVGATGAVTKSLKRYCDKLDANINIHILQKQAALHSSTIISKVLGDTVFVSQSSQAHQQHTANSNTQSTSSYHSSTSDTQLQGSTVRSHNILNGGIEQDHNSRYPFS

SEQ ID NO: 31585 - protein, 1191 aa, Leptidea sinapis
MFCYFKAKNEAMEYISELEQLFKQRNPDNPKIHRFNGNTLSNQARRILKHNLISQELLNQIKHNAENEMHQSHPIDIDTHTNTTSFLVLDNTTEETNEQDTLDIQSRKRFDSEIAQWPVTCDNVEEQNPLVIKFLQCLAETKEIPIEERDYLPKAKINRRFLQNLTIINNYLPTILVSNCTLRGTNDIIYSAARTLIVNNNQQPYSPSSTIKPHRDPPWKNRIKIKIERLRKELRQMVEMSRGVNSRKMIKIRDKLYAKYKIKNEIELKSTEEIMKQRIKALAGRIKRYEEINSRKRQNKMFTEDEHRLYRSLDSNNENIDVMIPSKHITEEFWTNILSQPVEYNHQAKWILDMEQSNNNIITSSADVITSEQIKHSLSKMLNWKAPGQDKVQNYYLKYLTKTHDHLAMLYTRVLKGEELLEDWLTTGKVILIPKNKDTENPKNWRPIACLPSMYKLLTSLLSDQLYSHCLTNNIMAPEQRGCRRGARGCKDHLMLNKAILEDAHEAQKNLSMGWIDYQKAFDSVSHEWLLRVLDIYRCPPVIKSFLERAMPKWKVIMTAKGSTDSYTTEPIYVRRGIFQGDSLSPLLFCLAINPISTILEKYQNKGYHLKDSLWINHLIYMDDLKVYANNKTNLKILLDSVEIFTTDIGMSFGLDKCNIIHITAGYRNHTDGNEHILLNGNTFKQLKLDQTYKYLGINESGKINHSDIRDQLTKEYFRRVKKITNSYLNARNLIKGINTYAVPVLMYSFGVINYKNSDVKRIDMKTRKVLAIKKAHQQKADVDRIYLPIAMGGRGLINLENLYKAHILKYKQYLEQKNDKLIEAITQHDKNRETHSIYKDSYEIEKELKLTTGKDHTKIEIKNSIIKKQNEAWRNKNLHGQFPKKVLDLANVDKELTFKWLKKQPISPTLESSLFAIQDQAVLTRQHERDILKRNTDGKCRLCANKDETVQHLLAGCEKLAGTYFVKRHNNLVQYVFWCLAKKNEIDVNKLWWQEELKQPMLKENSIAKLMWEIPVQTDITITHNRPDLIHIDKQNNHTYLIDISVPSDYNIGAKEIEKISKYHPLKVELSRLWNTTVSIIPIVVGATGAVTKSLKRYCDKLDANINIHILQKQAALHSSTIISKVLVDTVFVTQSSQIHQQHTAHSNTQSTSSYHTSTSDIQLQGSTVRSHNILDGGIEQDHNSRYPFS

SEQ ID NO: 31586 - protein, 1403 aa, Leptidea sinapis
MKRQLRNTRNGSLPGGDRRGTSGADAGRDSIRTVSDSLLSRRAEVGEPERITAEQRGGGETGDALQRGEFTPTQHSAGSSVTTTNINEDKKRKWSTEEMEELIYCYFKAKLGGPGYIARLQQLFCNRNPDNPKIHKFNGNTLSNQARRIIKQNVLPKNTLDTIQKTIENEPLQTQNSITPITENNEVLTSHNTEIFYGDRRRRWTQQEKEELMFCYFKAKNEAMEYISELEQLFKQRNPDNPKIHRFNGNTLSNQARRILKHNLISQELLNQIKHNAENEMHQSHPIDIDTHTNTTSTLVLDNTTEETNEQDTLDIQSRNRFDSEIAQCPVTCDNEEEQNPLVIQFLQCLAETKEIPIEKRDYLPKAKINRQFLQNLTIIDNYLPTILASNCTLRGTNDIIYSAARTLIVNNNQHPYSPSSTIKPHRDPPWKNRIKIKIERLRKELGQMVEISRGVNSRKMIKIRDKLYAKYKIKNEIELKSTEEIMKQRIKALAGRIKRYEEINSRKRQNKMFTEDEHRLYRSLDSNNENIDVMIPSKHITEEFWTNILSQPVEYNHQAKWILDMEQSNNNIITSSADVITSEQIKHSLSKMLNWKAPGQDKVQNYYLKYFTKTHDHLAMLYTRVLKGEELLEDWLTTGKVILIPKNKDTENPKNWRPIACLPSMYKLLTSLLSDQLYTHCLTNNIMAPEQRGCRRGARGCKDHLMLNKAILEDAHEAQKNLSMGWIDYQKAFDSVSHVWLLRVLDIYRCPPVIKSFLERAMPKWKVIMTAKGSADSYTTEPIYVRRGIFQGDSLSPLLFCLAINPISTILEKYQNKGYHLKDSVWINHLIYMDDLKVYANNKTNLKILLDSVEIFTTDIGMSFGLDKCNILHITAGYRNHTDGNEHILLNGNTFKQLKLDQTYKYLGINESGKINHSDIRDQLTKEYFRRVKKITNSYLNARNLIKGINTYAVPVLMYSFGVINYKNSDLKRIDMKTRKLLAIKKAHQQKADVDRIYLPIAMGGRGLINLENLYKAHILKYKQYLEQKNDKLIEAITQHDKNRETHSIYKDSYEIEKELKLTTGKDHTKIEIKNSIIKKQNEAWRNKSLHGQFPKKVLDLANVDKELTFKWLKKQPISPTLESSLFAIQDQAVLTRQHERDILKRNTDGKCRLCANKDETVQHILAGCEKLAGTYFVKRHNNLVQYVFWCLAKKNEIDVNKLWWQEELKQPMLKENSIAKLMWEIPVQTDITITHNRPDLIHIDKQNNHTYLIDISVPSDYNIGAKEIEKISKYHPLKVELSRLWNTTVSIIPIVVGATGAVTKSLKRYCDKLDANINIHILQKQAALHSSTIISKVLGDTVFVSQSSQAHQQHTANSNTQSTSSYHSSTSDTQLQGSTVRSHNILNGGIEQDHNSRYPFS

SEQ ID NO: 31587 - protein, 1194 aa, Fabriciana adippe
MFCYFKAKYEATEYISKLEQLFKQRNPNNPKIHRFNGNTLSNQARRILKQNLISQELLNRIKRNAENEAQQSHPSNTNSHTNTTPTLVLDNTIEETNEQDISNIQSSSRSVSVMAQFPVTYDSDEEQNPLIVQFLQCLAETKEIPIEERDYLPKAKINRQFLQNLTIIDNYLPTILASNCTLRDTNDIIYSAARTLIVNNNQHPYSPSSTIKPHVDPPWKNRIKAKIERLRKELGQMVEISRGVNSRKMIKIRDKLYAKYNIQNEIEHKSREEILKQRIKALAGRIKRYEEINSRKQQNKMFTEDEHRLYRSLDSKRENIDVKIPSKHNTEKFWTNILSQPVEYNHQAEWILEMEQSNNNITMNSSEEITTEQIKHSLSKMLNWKAPGQDKVQNYYLKYFTRMHDHLAMLYTRVLKGEEPLDDWLTTGKVILIPKNEDTENPKNWRPIACLPSMYKLLTSILSDQLYTHCLANNIMAPEQRGCRRGARGCKDHLMLNKAILEDAHEAQKNLSMGWIDYQKAFDSISHEWLLRVLDIYRCPPVIKRFLERAMPKWKVIMTAKGSTDSYTTEPIYVRRGIFQGDSLSPLLFCLALNPISTILGKYQKKGYHLKDSVWINHLVYMDDVKVYANNKTNLKILLDSVEIFTTDIGMSFGLDKCNILHITAGYRNHTDGNEHILLNGNTFKQLKLDQTYKYLGINESGKINHSDIRDQLTKEYFRRVKKLTNSHLNARNLIKGINTYAVPVLMNSFGVINYKNSDIKRIDVKTRKLLAIKKAHQQKADVDRIYLPIAMGGRGLINLENLYKAHILKYKQYLEQKNDYLIEAIAHHDKNRGKYSIYKEAEEIEKELKLTRGKDHTKIEIKNSIIKKQNEAWRNKNLHGQFPKKVLDLANVDKELTFKWLKKQPISPSVESSLFAIQDQAVLTRQHERDILKRNTDGKCRLCANKDETVQHLLAGCEKLAGTYFVKRHNNLVQYVFWCLAKKNKIEVNKLWWKEELKQPTLKENSTAKLIWEIPVQTDVTITHNRPDLIYIDKQNNHTYLIDISVPSDYNIGAKEIEKISKYHPLKVELSRLWNTTVTTIPIVVGATGAVTKSLKRYCDKLDANINIHILQKQAALHSSTIISKVLGDTVFVTQSSQAYQQHIAQSNTQPTSTYHSSTSQSTTQPSSDQHTFAASDSHTQEHTDPSQPYLPQ

SEQ ID NO: 31588 - protein, 1403 aa, Leptidea sinapis
MKRQLRNTRNGSLPGGDRRGTSGADAGRDSIRTVSDSLLSRRAEVGEPERITAEQRGGGETGDALQRGEFTPTQHSAGSSVTTTNINEDKKRKWSTEEMEELIYCYFKAKLGGPGYIARLQQLFCNRNPDNPKIHKFNGNTLSNQARRIIKQNVLPKNTLDTIQKTIENEPLQTHNSITPITENNEVLTSHNTEIFYGDRRRRWTQQEKEELMFCYFKAKNEAMEYISELEQLFKQRNPDNPKIHRFNGNTLSNQARRILKHNLISQELLNQIKHNAENEMHQSHPIDIDTHTNTTSTLILDNTTEETNEQDTLDIQSRNRFDSEIAQCPVTCDNEEEQNRVVIQFLQCLAETKEIPIEERDYLPKAKINRQFLQNLTIIDNYLPTILASNCTLRGTNDIIYSAARTLIVNNNQHPYSPSSTIKPHRDPPWKNRIKIKIERLRKELGQMVEISRGVNSRKMIKIRDKLYAKYKIKNEIELKSTEEIMKQRIKALAGRIKRYEEINSRKRQNKMFTEDEHRLYRSLDSNNENIDVMIPSKHITEEFWTNILSQPVEYNHQAKWILDMEQSNNNIITSSADVITSEQIKHSLSKMLNWKAPGQDKVQNYYLKYFTKTHDHLAMLYTRVLKGEELLEDWLTTGKVILIPKNKDTENPKNWRPIACLPSMYKLLTSLLSDQLYFHCLTNNIMAPEQRGCRRGARGCKDHLMLNKAILEDAHEAQKNLSMGWIDYQKAFDSVSHEWLLRVLDIYRCPPVIKSFLERAMPKWKVIMTAKGSTDSYTTEPIYVRRGIFQGDSLSPLLFCLAINPISTILEKYQNKGYHLKDSVWINHLIYMDDLKVYANNKTNLKILLDSVEIFTTDIGMSFGLDKCNILHITAGYRNHTDGNEHILLNGNTFKQLKLDQTYKYLGINESGKINHSDIRDQLTKEYFRRVKKITNSYLNARNLIKGINTYAVPVLMYSFGVINYKNSDLKRIDMKTRKLLAIKKAHQQKADVDRIYLPIAMGGRGLINLENLYKAHILKYKQYLEQKNDKLIEAITQHDKNRETHSIYKDSYEIEKELKLTTGKDHTKIEIKNSIIKKQNEAWRNKSLHGQFPKKVLDLANVNKELTFKWLKKQPISPTLESSLFAIQDQAVLTRQHERDILKRNTDGKCRLCANKDETVQHLLAGCEKLAGTYFVKRHNNLVQYVFWCLAKKNEIDVNKLWWQEELKQPMLIENSIAKLMWEIPVQTDITITHNRPDLIHIDKQNNHTYLIDISVPSDYNIGAKEIEKISKYHPLKVELSRLWNTTVSIIPIVVGATGAVTKSLKRYCDKLDANINIHILQKQAALHSSTIISKVLGDTVFVSQSSQTHQQHTAHSNTQSTSSYHSSTSDTQLQGSTVRSHNILNGGIEQDHNSRYPFS

SEQ ID NO: 31589 - protein, 1199 aa, Boloria selene
MFCYFEAKSEGTEYISKLEKLFKERNPNNDKIHRFNGNTLSNQARRILKQNLISQELLNRIKRNAENEAQQPHPSNTNMHTNTSLTVGSDNSVEETNEQDIPNIQSSNKSVSVMEQWPLTYDHYEEQNPLIVQFLQCLAETKEIPIEERDYLPKAKINKQFLQNLAIINNYLPTILASNCTLRDTNDIVYSAARILIVNNKQNPYSPSSTFKPHTDPPWKNRIKVKIERLRKELGQMVEISRGVNTRKMMKIKDKLYAKYNIQNEIEHKSREEILKQRIKALAGRIKRYEDINNRKQQNKLFTEDEHRLYRNLDNKKENIDVKLPSKHNIEKFWTNILSQPVEYNHQAKWILDIDQSNNNIITTSSEEISTEQIKHSLSKMLNWKAPGQDKIQNYYLKYFTKLHDHLAMIYTRVLKGDEPLEDWLTTGKVILIPKNEDTENPKNWRPIACLPSMYKLLTSILSDQLYTHCLANNIMAPEQRGCRRGARGCKDHLMLNKAILEDAHEAQKNLSMGWIDYQKAFDSISHEWLLRALDIYRCPPVIKSFLERAMPKWKVIMTAKGSTDSYTTEPIYVRRGIFQGDSLSPLLFCLALNPISKILGKYQNKGYHLKDSVWINHLVYMDDLKVYANNKTNLKILLDSVEIFTADIGMSFGLDKCNILHITAGHRNHTDGNEHILLNGNTFKQLKLDQTYKYLGINESGKVNHSDIRDQLTKEYFRRVKKITSSYLNARNLIKGFNTYAVPVLMYSFGVINYKNSDIKRIDVKTRKLLAMKKAHQQKADVDRIYLPISMGGRGLINLENLYKVHILKYRQYLEQKNDYLIESIAQHDQNRGKYSIYKEAEEIEKELRLTPGKDHTKLEIKNSIVKKQNDAWRNKNLHGQFPKKVLDLANVDKELTFKWLKKQPISPTLESSLFAIQDQAVLTRQHERDILKRSIDGKCRLCANKDETVQHLLAGCEKLAGTYFVKRHNNLVQYVFWCLAKKNQIEVNKLWWKEELKQPTLKENSKAKLIWEIPVQTDVTITHNRPDIIYIDKQSNHTYLIDISVPSDYNIGAKEIEKISKYHPLKVELSRLWNTTVTTIPIVVGATGTVAKSLKRYCDKLDANINIHILQKQAAIHSSTIISKVLGDTVFVTRSSQLHQSHTSQSNTQSTNAHHSSISQSMTQQSSDQHSSAGFPSTSEALAQETTNASQSSISQH

SEQ ID NO: 31590 - protein, 1423 aa, Boloria selene
MKRQLRNTRIGSLPGGDRRGTPGADAGRDSIRAVSDSLLSRRAEVGVPEHVTAEQRGGGATGDALQSREVTPTHSAGSSVKTTSNDINEDKKKKWSTEELEELIYCYFKAKSEGLGYIARLQQLFFNRNPNNPKIHRFNGNTLSNQARRIIKHNVLPRDTLDTIQKTIENQSQTTTENPDTTITQLSSTNQSKPSTSSNIKTQNTEIFYGDRRRRWTQQEEEELMFCYFKAKSEGTEYISKLEKLFKERNPNNDKIHRFNGNTLSNQARRILKQNLISQELLNQIKRNAENEAQQPHPSNTNMHTNTSLTVGSNNSVEETNEQDIPNIQSSNKSVSVMEQCPLTYDNDEEQNHLIVQFLQCLAETKEIPIEERDYLPKAKINKQFLQNLAIINNYLPTILASNCTLRDTNDIVYSAARILIVNNKQNPYSPSSTIKPHTDPPWKNRIKVKIERLRKELGQMVEISRGGNTRKMIKIRDKLYAKYNIQNEIEHKSREEILKQRIKALAGRIKRYEDINNRKQQNKMFTEDEHRLYRNLDNKKENIDVKLPSKHNIEEFWTNILSQPVEYNHQAKWILDIDQSNNNITTTSSEEISTEQIKHSLSRMLNWKAPGQDKVQNYYLKYFTKLHDHLAMIYTRVLKGDEPLEDWLTTGKVILIPKNEDTENPKNWRPIACLPSMYKLLTSILSDQLYTHCLANNIMAPEQRGCRRGARGCKDHLMLNKAILEDAHEAQKNLSMGWIDYQKAFDSISHEWLLRVLDLYRCPPVIKSFLERAMPKWKVIMTAKGSTDSYTTEPIYVRRGIFQGDSLSPLLFCLALNPISKILGKYQNKGYHLKDSVWINHLVYMDDLKVYANNKTNLKILLDSVEIFTADIGMSFGLDKCNILHITAGHRNHTDGNEHILLNGNTFKQLKLDQTYKYLGINESGKINHSDIRDQLTKEYFRRVKKITNSYLNARNLIKGINTYAVPVLMYSFGVINYKNSDIKRIDVKTRKLLAIKKAHQQKADVDRIYLPISMGGRGLINLENLYKVHILKYRQYLEQKNDYLIESIAQHDQNRGKYSIYKEAEEIEIELGLTPGKEHTKLEIKNSIIKKQNDAWRNKNLHGQFPKKVLDLANVDKELTFKWLKKQPISPTLESSLFAIQDQAVLTRQHERNILKRSIDGKCRLCAIKDETVQHLLAGCEKLAGTYFVKRHNNLVQYVFWCLAKKNQIEVNKLWWKEELKQPTLKENSKAKLIWEIPVQTDVTITHNRPDIIYIDKQSNHTYLIDISVPSDYNIGAKEIEKISKYHPLKVELSRLWNTTVTTIPIVVGATGAVAKSLKRYCDKLDANINIHILQKQAAIHSSTIISKVLGDTVFVTRSSQLHQSHTSQSNTQSTNAHHSSISQSMTQQSSDQHSSAGFPYTSEALAQETTNASQSSISQH

SEQ ID NO: 31591 - protein, 1464 aa, Boloria selene
MCISSLYFVCISMFLLWCTIKYIIIIIIIITVSYNASRNGPERSEGHYSVIHNNNLQSLPGGDRRGTPGADAGRDSIRAVSDSLLSRRAEVGVPEHVTAEQRGGGETGDALQSREVTPTHSAGSSVKTTSNNIIEDKKKKWSTEEMEELIYCYFKAKSEGLGYIARLQQLFFNRNPNNPKIHKFNGNTLSNQARRIIKQNVLPRDTLDTIQKTIGNQSQTTTENPDTTITQLPSTNQSKPSTSSYIKTQNTEIFYGDRRRRWTQQEEEELMFCYFKAKSEGTEYISKLEKLFKERNPNNDKIHRFNGNTLSNQARRILKQNLISQELLNRIKRNAENEAQQPHPSNTNMHTNTSLTVGSDNSVEETNEQDIPNIQSSNKSVSVMEQWPLTYDHYEEQNPLIVQFLQCLAETKEIPIEERDYLPKAKINKQFLQNLAIINSYLPTILASNCTLRDTNDIVYSAARILIVNNKQNPYSPSSTFKPHTDPPWKNRIKVKIERLRKELGQMVEISRGVNTRKMIKIKDKLYAKYNIQNEIEYKSREEILKQRIKALAGRIKRYEDINNRKQQNKLFTEDEHRLYRNLDNKKENIDVKLPSKHNIEKFWTNILSQPVEYNHQAKWILDIDQSNNNIITTSSEEISTEQIKHSLSKMLNWKAPGQDKIQNYYLKYFTKLHDHLAMIYTRVLKGDEPLEDWLTTGKVILIPKNEDTENPKNWRPIACLPSMYKLLTSILSDQLYTHCLANNIMAPEQRGCRRGARGCKDHLMLNKAILEDAHEAQKNLSMGWIDYQKAFDSISHEWLLRALDIYRCPPVIKSFLERAMPKWKVIMTAKGSTDSHTTEPIYVRRGIFQGDSLSPLLFCLALNPISKILGKYQNKGYHLKDSVWINHLVYMDDLKVYANNKTNLKILLDSVEIFTADIGMSFGLDKCNILHITAGHRNHTDGNEHILLNGNTFKQLKLDQTYKYLGINESGKINHSDIRDQLTKEYFRRVKKITNSYLNARNLIKGINTYAVPVLMYSFGVINYKNSDIKRIDVKTRKLLAMKKAHQQKADVDRIYLPISMGGRGLINLENLYKVHILKYRQYLEQKNDYLIESIAQHDQNRGKYSIYKEAEEIEKELRLTPGKDHTKLEIKNSIVKKQNDAWRNKNLHGQFPKKVLDLANVDKELTFKWLKKQPISPTLESSLFAIQDQAVLTRQHERDILKRSIDGKCRLCAIKDETVQHLLAGCEKLAGTYFVKRHNNLVQYVFWCLAKKNQIEVNKLWWKEELKQPTLKENSKAKLIWEIPVQTDVTITHNRPDIIYIDKQSNHTYLIDISVPSDYNIGAKEIEKISKYHPLKVELSRLWNTTVTTIPIVVGATGTVAKSLKRYCDKLDANINIHILQKQAAIHSSTIISKVLGDTVFVTRSSQLYQSHTSQSNTQSTNAYHSSISQSMTQHSSAGFPSTSEALAQETTKVSQSSISQH

SEQ ID NO: 31592 - protein, 1396 aa, Heliconius telesiphe
MANGALATFLTMKRQFKNLRIGSLPGGDRRGMSGAGAGHDSMRTASGSPLNRRAGVGETENVTADSEGNGVGTNETLPRRESPVEPSAGPFVGTTISSTTAGKQKWSQVELEELMYCYFKARGEGVGYIKKLESIYKERNPTNSKIYMNGSLLSNQARRIIKQSVLSKNTLDTIQKTIENESQQASTSVTPIIHNTRSRTTSTSSSLSVNQPAPINSRKESQGSINGDNSQCDRRSKWTELEKEELIFCYYMAKYEGTDYIRKLEKLFKQRNPNNPKIHKFNGNTLSNQARRILKQNLISQEQLNLIKQSAEIEMQQIQHKNTHTPTYTQTHTPTTLNNTIEEIIEEPTTLNNETREICNTPEGQVPQRVDYSENPLICQFLNILAETKEIAVEDREYLPKAKINKQYLENLAIINNFMPNLLPSACSLRDINDIIYSAAKTLILNNNQSPYTPNNIIKPHTDPPWKKRLKVKIERLRKELGQMIEISRGVNSRKMIKIKHKLHSKYNIQNDIDHKNREEMLKQRIKALAGRIKRYEEINSRKLQNKMFTEDEHRLYRSLSNKQENINIKLPSKDSTEEFWKNILSQPVSYNHNAKWISDIEQHNNTTINTNLFEEITTEQIKQAVGRMLNWKAPGQDKIQNYYLKYFSKMHDHLAILFTNILKGEEPLEDWLTTGKVILIPKNLETEEPKNWRPIACLPSMYKLLTSILADQLYNHCAANNIMAPEQRGCRRGARGCKDHLMVNKAILEDAHNSQKNLSMGWIDYQKAFDSISHEWLLKVLDIYKCPPVIKSFLERAMPKWKVVMTAKGSSNSFTTESIMVRRGIFQGDSLSPMLFCLALNPISTILGKYDKKGYHLKDSVWINHLIYMDDLKVYANNKTNLKILLNSVEIFTDDIGMSFGLDKCNILHITAGHRNYTEGDEHVLLNGYNFKQLKIDQTYKYLGINESGKINHNIIRDQLTKEYFRRVKNITNSYLNARNLLKGINTYAVPVLMYSFGVINYKNSDLKRIDVKTRKLLAIKKVHQQKADLERLYLPITSGGRGLINIENLYKAHILKYKLYLEQKSDYLIETIVQHDQKREKYSIYKDSLEIETELRLTLGNNHTQSEIKNSIIMKQNAAWRNKSLHGQFPKKVLDLAHIDRELSFKWLKNQSISPALESSIFAIQDQAVITRQHERDILKRSVDGKCRLCVSRDETVQHLLAGCEKLAGTYFVKRHNNLVQYIFWCLARKSKIEVNKLWWKEELKQPTVRENSIAKLMWEIPVQTDVTIVHNRPDLIYIDKTNNHTYLIDISVPSDYNIGAKELEKISKYHPLKIELSRLWNTTVTTIPIVVGATGVVTKSLQRYCDKLDARINIQILQKQAALFSSTIINKVLGDTVFVTQSSQTEQSSIADT

SEQ ID NO: 31593 - protein, 907 aa, Heliconius hierax
MIEISRGVNSKKMIKIKVKLYSKHNIQNDIEHKNREEILKQRIKALAGRIKRYEEINSRKQQNKMFTEDEHRLYRSLSNKQENISIKLPSKDSTEKFWKNILSQPVSHNHSATWISDIGQHNDTTINTDLFEEITTEQIKQAVGKMLNWKAPGQDKIQNYYLKYFSTMHDHLAILFTNILKGEEPLEDWLTTGKVILIPKNLDTEEPKNWRPIACLPSMYKLLTSILADQLYNHCAANNIMAPEQRGCRRGARGCKDHLMINKAILEDAHNNQKNLSMGWIDYQKAFDSISHEWLLQVLDIYKCPPAIKFFLERAMPKWKVVMTAKGSSNSFTTEPIQVRRGIFQGDSLSPMLFCLALNPISAILGKYDKKGYQMKDSVWINHLIYMDDLKVYANNKTNLKILLNSVEIFTADIGMSFGLDKCNILHITAGHRNYTEGDEHVLLNGNSFKQLKIDQTYKYLGINESGKINHSSIRDQITKEYFRRVKNITNSYLNARNLIKGINTYAVPVLLYSFGVINYKNSDLKRINVKTRKLLAIKKVHQQKADIERLYLPVTNGGRGLINIENLYKAHILKYKLYLEQKSDYLIETIVTHDQKREKYSIYKDSLEIEKELRLKPGNTHTQSEIKNCIIKKQNEAWRDKSLHGQFPKKVLDLAHIDKELTFKWLKKQSISPALESSIFAIQDQAVITRQHERDILKRNVDGKCRLCVSKDETVQHILAGCEKLAGTYFVKRHNNLVQYIFWCLARKSKIEVNELWWKEELKQPTVRENSIAKLMWEIPVQTDVTIVHNRPDLIYIDKTNNNTYLIDISVPSDYNIGAKELEKISKYHPLKIELSRLWNTTVKTIPIVVGATGVVTKSLQRYCDNLDAHINIHILQKQAALFSSTIISKVLGDTVFVASQTQQPS

SEQ ID NO: 31594 - protein, 1393 aa, Heliconius nattereri
MANGALATFLIMKRQFKNLRIGSLPGGDRRGMSGAGAGHDSMRTASGSPLNRRAGVGETENVTAESEGNGVGTNETLPRRESPVEHSAGPSVGTTISSTTAGKQKWSQAELEELMYCYYKARNEGGGYIRKLENIYKERNPTNSKSYMNGSLLSNQARRIIKQNVLSKNTLDTIQKTIENESQQASTPVTPIIHNTRSRTTSTSSTSSSNQPAQISIRKESQNSINVDKSQGDRRRKWTQPEEEELMFCYYMAKHEGTEYIRKLEKLFKERNPDNPKIHKFNGITLSNQARRILKQNLISQEQLNRIKQSAEIEMQLIQYNNIYTPINTQAYTSTTLNNIIEETIEEPTTLNNESRETFNPDNQPVPQTADYYENPIISQFLNILAETKEIAIEEREYLPKAKINKQYLQNLAIINNFLPDILPGACSLRDTNDIIYSAAKTLIINNNQSPYTPSNTTKPHTDPPWKKRVKVKIERLRKELGQMIEISRGVNSRKMIKTKIKLYSKHNIQNEIEHKNREEMLKQRIKALAGRIKRYEEINSRKQQNKMFTEDEHRLYRSLNNKQENIHIKLPSKDSTEEFWKNILSRPVSHNHNAKWISDIRQHNDTTINTNLFEEITTEHIKQAVGKMLNWKAPGQDKIQNYYLKYFSKMHDHLAMLFTNILKGEEPLEDWLTTGKVILIPKNLDTEEPKNWRPIACLPSMYKLLTSILADQLYNHCAANNIMAPEQRGCRRGARGCKDHLMINKAILEDAHKSQKNLSMGWIDYQKAFDSISHEWLLQVLDIYKCPPAIKFFLERAMPKWKVVMTAKGSSNSFTTEPIQVKRGIFQGDSLSPMLFCLALNPISAILGKYNKKGYHLKDSVWVNHLIYMDDLKVYANNKTNLKILLNSVEIFTADIGMSFGFEKCNILHITAGHRNYTEGDEHVLLNGNSFKQLKIDQTYKYLGINESGKINHGNIRDQLTKEYFRRVKSITNSYLNARNLIKAINTYAIPVLMYSFGVINYKSSDLKRIDVKTRKLLAMKKVHQQKADLERLYLPVTNGGRGLINTENLYKAHILKYKLYLDQKSDYLIEAIVAHDQKREKYSIYKDSLEIETELRLTSGNNHTKSEIKNCIVKKQNEAWRNKSLHGQFPKKVLDLANIDRELSFKWLKKQSISPALESSIFAIQDQAVITRQHERDILKRNVDGKCRLCVSRDETVQHLLAGCEKLAGTYFVKRHNNLVQYIFWCLARKSKMEVNKLWWKEELKQPTVRENSVAKLMWELPVQTDVTIVHNRPDLIYIDKKNNHTYLIDISVPSDYNIGAKELEKISKYHPLKVELSRLWNTAVTTIPIIIGATGVVSKSLQRYCDKLDTYINIHILQKQAALHSSTIINKVLGDTVFVTQPQQSSITDM

SEQ ID NO: 31595 - protein, 1142 aa, Heliconius melpomene
MAKQEGTEYIRKLEKLFKERNPDNPKIHKFNGNTLSNQARRILKQNLISQEQLNRIKQSAEIEMQLIQHNNIHTPIDTQTYTSTTLNNIIEETIEEPTTLNNESRETFNPDNQPVPQTADYYENPIISQFLNILAETKEIAIEEREYLPKAKINKQYLQNLAIINNFLPDLLPGACSLRDTNDIIYSAAKTLIINNNQSPYTPSNTTKPHTDPPWKKRVKVKIERLRKELGQMIEISRGVNSRKMIKIKIKLYSKYNIQNEIEHKNREEMLKQRIKALAGRIKRYEEINSRKQQNKMFTEDEHRLYRSLNNKQENINIKLPSKDSTEEFWKNILSQPVSHNHNAKWISDIRQHNDTTINTHLFEEITTEQIKQAVGKMLNWKAPGQDKIQNYYLKYFSKMHDHLAMLFTNILKGEEPLEDWLTTGKVILIPKNLDTEEPKNWRPIACLPSMYKLLTSILADQLYNHCAANNIMAPEQRGCRRGARGCKDHLMINKAILEDAHKSQKNLSMGWIDYQKAFDSISHEWLLQVLDIYKCPPAIKFFLERAMPKWKVVMTAKGSSNSFTTEPIQIKRGIFQGDSLSPMLFCLALNPISVILGKYDKKGYHLKDSVWVNHLIYMDDLKVYTNNKTNLKILLNSVEIFTADIGMSFGFDKCNILHITAGHRNYTEGDEHVLLNGNSFKQLKIDQTYKYLGINESGKINHSNIRDQLTKEYFRRVKSITNSYLNARNLIKGINTYAVPVLMYSFGVINYKNSDLKRIDVKTRKLLAIKKVHRQKADLERLYLPVTNGGRGLINTENLYKAHILKYKLYLDQKSDYLIEAIVTHDQKREKYSIYKDSLEIETELKLTSGNNHTKSEIKNCIIKKQNEAWRNKSLHGQFPKKVLDLANIDRELSFKWLKKQTVSPALESSIFAIQDQAVITRQHERDILKRNVDGKCRLCVNRDETVQHLLAGCEKLAGTYFVKRHNNLVQYIFWCLARKSKMEVNKLWWKEELKQPTVRENSVAKLMWELPVQTDLTIVHNRPDLIYIDKTNNHTYLIDISVPSDYNIGAKELEKISKYHPLKVELSRLWNTTVTTIPIIVGATGVVSKSLQRYCDKLDTYINIHILQKQAALHSSTIINKVLGDTVFVTQPQQSSIADT

SEQ ID NO: 31596 - protein, 1146 aa, Heliconius numata
MFCYYMAKHEGTEYIRKLEKLFKERNPDNPKIHKFNGNTLSNQARRILKQNLISQEQLNRIKQSAEIEMQLIQHNNIYTPINTQTYTSTTLNNIIEETIEEPTTLNNESRETFNPDNQPVPQTADYYENPIISQFLNILAETKEIAIEEREYLPKAKINKQYLQNLAIINNFLPDLLPGACSLRDTNDIIYSAAKTLIINNNQSPYTPNNTTKPHTDPPWKKRVKVKIERLRKELGQMIEISRGVNSRKMIKTKIKLYSKHNIQNEIEHKNREEMLKQRIKALAGRIKRYEEINSRKQQNKMFTEDEHRLYRSLNNKQENIHIKLPSKDSTEEFWKNILSQPVSHNHNAKWISDIRQHNDTTINTNLFEEITTEQIKQAVGKMLNWKAPGQDKIQNYYLKYFSKMHDHLAMLFTNILKGEEPLEDWLTTGKVILIPKNLDTEKPKNWRPIACLPSMYKLLTSILADQLYNHCAANNIMAPEQRGCRRGARGCKDHLMINKAILEDAQKSQKNLSMGWIDYQKAFHSISHEWLLQVLDIYKCPPVIKFFLERAMPKWKVVMTAKGSSNSFTTEPIQVKRGIFQGDSLSPMLFCLALNPISAILGKYNKKGYHLKDSVWVNHLIYMDDLKVYANNKTNLKILLNSVEIFTADIGMSFGFEKCNILHITAGHRNYTEGDEHVLLNGNSFKQLKIDQTYKYLGINESGKINHGNIRDQLTKEYFRRVKSITNSYLNARNLIKGINTYAVPVLMYSFGVINYKSSDLKRIDVKTRKLLAMKKVHQQKADLERLYLPVTNGGRGLINIENLYKAHILKYKLYLDQKSDYLIEAIVTHDQKREKYSIYKDSLEIETELRLTSGNNHTKSEIKNCIIKKQNEAWRNKSLHGQFPKKVLDLANIDRELSFKWLKKQSISPALESSIFAIQDQAVITRQHERDILKRNVDGKCRLCVSKDETVQHLLAGCEKLAGTYFIKRHNNLVQYIFWCLARKSKMEVNKLWWKEELKQPTVRENSVAKLMWELPVQTDVTIVHNRPDLIYIDKTNNNTYLIDISVPSDYNIGAKELEKISKYHPLKVELSRLWNTKVTIIPIIVGATGVVSKSLQRYCNKLDTYINIHILQKQAALHSSTIINKVLGDTVFVTQPQQIIADT

SEQ ID NO: 31597 - protein, 1394 aa, Heliconius numata
MANGALATFLIMKRQFKNSRIGSLPGGDRRGMSGAGAGHDSMRTASGSPLNRRAGVGETENVTAESGGNGVGTNETLPRRESPVEHSAGPSVGTTISSTTAGKQKWSQAELEELMYCYYKARSEGGGYIRKLENIYKERNPTNSKSYMNGSLLSNQARRIIKQNVLSKNTLDTIQKTIENESQQESTPVTPIIHNTRSRTTSTSSSSTSSSNQPAQISIRKEIQNSINVDKSQGDRRRKWTQPEEEELMFCYYMAKHEGTEYIRKLEKLFKERNPDNPKIHKFNGNTLSNQARRILKQNLISQEQLNRIKQSAEIEMQLIQHNNIYTPINTQTYTSTTLNNIIEETIEEPTTLNNESRETFNPDNQPVPQMADYYENPIISQFLNILAETKEIAIEEREYLPKAKINKQYLQNLAIINNFLPDLLPGACSLRDTNDIIYSAAKTLVINNNQSPYTPSNTTKPHTDPPWKKRVKVKIERLRKELGQMIEISRGVNSRKMIKTKIKLYSKYNIQNEIEHKNREEMLKQRIKALAGRIKRYEEINSRKQQNKMFTEDEHRLYRSLNNKQENIHIKLPSKDSTEEFWKNILSQPVSHNHNAEWISDIRQHNDTTINTNLFEEITTEQIKQAVGKMLNWKAPGQDKIQNYYLKYFSKMHDHLAMLFTNILKGEEPLEDWLTTGKVILIPKNLDTEEPKNWRPIACLPSMYKLLTSILADQLYNHCAANNIMAPEQRGCRRGARGCKDHLMINKAILEDAHKSQKNLSMGWIDYQKAFDSISHEWRLQVLDIYKCPPAIKFFLERAMPKWKVVMTAKGSSNSFTTEPIQVKRGIFQGDSLSPMLFCLALNPISAILGKYNKKGYHLKDSVWVNHLIYMDDLKVYANNKTNLKILLNSVEIFTADIGMSFGFEKCNILHITAGHRNYTAGDEHVLLNGNSFKQLKIDQTYKYLGINESGKINHGNIRDQLTKEYFRRVKSITNSYLNARNLIKGINTYAVPVLMYSFGVINYKSSDLKRIDVKTRKLLAMKKVHQQKADLERLYLPVTNGGRGLINTENLYKAHILKYKLYLDQKSDYLIEAIVTHDQKREKYSIYKDSLEIETELRLTSGNNHTKSEIKNCIIKKQNEAWRNKNLHGQFPKKVLDLANIDRELSLKWLKKQSISPALESSIFAIQDQAVITRQHERDILKRNVDGKCRLCVSKDETVQHLLAGCEKLAGTYFIKRHNNLVQYIFWCLARKSKMEVNKLWWKEELKQPTVRENSVAKLMWELPVQTDVTIVHNRPDLIYIDKTNNNTYLIDISVPSDYNIGAKELEKISKYHPLKVELSRLWNTKVTTIPIIVGATGVVSKSLQRYCNKLDTYINIHILQKQAALHSSTIINKVLGDTVFVTQPQQIIADT

SEQ ID NO: 31598 - protein, 1241 aa, Heliconius elevatus
MYCYYKARSEGGGYIRKLENIYKERNPTNSKSYMNGSLLSNQARRIIKQNVLSKNTLDTIQKTIENEAQQASTPVIPIIHNTRSRTTSTSSTSSSNQPAQISIRKESQNSINVDKSQGDRRRKWTQPEEEELMFCYYMAKHEGTEYIRKLEKLFKERNPDNPKIHKFNGNTLSNQARRILKQNLISQEQLNRIKQSAEIEMQLIQQNNIYTPINTQTYTSTTLNNIIEETIEEPTTLNNESRETFNPDNQPVPQPANYYENPIINQFLNILAETKEIAIEEREYLPKAKINKQYLQNLAIINNFLPDLLPGACSLRDTNDIIYSAAKTLIINNNQSPYTPSNTTKPHTDPPWKKRVKVKIERLRKELGQMIEISRGVNSRKMIKIKIKLYSKYNIQNEIEHKNREEMLKQRIKALAGRIKRYEEINSRKQQNKMFTEDEHRLYRSLNNKQENINIKLPSKDSTEEFWKNILSQPVSHNHNAKWISDIRQHNDTTINTHLFEEITTEQIKQAVGKMLNWKAPGQDKIQNYYLKYFSKMHDHLAMLFTNILKGEEPLEDWLTTGKVILIPKNLDTEEPKNWRPIACLPSMYKLLTSILADQLYNHCAANNIMAPEQRGCRRGARGCKDHLMINKAILEDAHKSQKNLSMGWIDYQKAFDSISHEWLLQVLDIYKCPPAIKFFLERAMPKWKVVMTAKGSSNSFTTEPIQIKRGIFQGDSLSPMLFCLALNPISVILGKYDKKGYHLKDSVWVNHLIYMDDLKVYANNKTNLKILLNSVEIFTADIGMSFGFDKCNILHITAGHRNYTEGDEHVLLNGNSFKQLKIDQTYKYLGINESGKINHSNIRDQLTKEYFRRVKSITNSYLNARNLIKGINTYAVPVLMYSFGVINYKNSDLKRIDVKTRKLLAIKKVHRQKADLERLYLPVTNGGRGLINTENLYKAHILKYKLYLDQKSDYLIEAIVTHDQKREKYSIYKDSLEIETELKLTSGNNHTKSEIKNCIIKKQNEAWRNKSLHGQFPKKVLDLANIDRELSFKWLKKQSISPALESSIFAIQDQAVITRQHERDILKRNVDGKCRLCVSKDETVQHLLAGCEKLAGTYFVKRHNNLVQYIFWCLARKSKMEVNKLWWKEELKQPTVRENSVAKLMWELPVQTDVTIVHNRPDLIYIDKTNNHTYLIDISVPSDYNIGAKELEKISKYHPLKVELSRLWNTTVTTIPIIVGATGVVSKSLQRYCDKLDTYI

SEQ ID NO: 31599 - protein, 1405 aa, Nymphalis urticae
MANRALVTQEGDMEGHLRDTRIESLPGGDRRGTSVAGVRRDRMLASDSRLAGWTGVGDRGVRERSSRTTTDEQSDTGDTLQSRDLSPTSSAGTSETTTDSQNEDARKKWSPVELEELMFCYFKARAGGPGYLKRLQTFFKERNPDNPKSIKFTGNGLSNQARRILKQHVLPKDTLDRIQKTAENIIQHTPNVVPLNTQNSDDLSAITPISTILTQSNNEPEQSRSLISQHSLNINSNEDRRRKWTQQEQEELMFCYFVAKLEGMAYISKLERIFKSRNPDNPKIHRFNGNTLSNQARRILKQNLISQELLNRIKQRADTEMQHSHRTNPNNQSNTVPASILDNIMETLEEDMVNVENRNENESPASQLLETSQIENENPIELQFLQILAEVKEIPIEERTYLPKAKINKQFLHNLAIINNYLPNLLESNCTLRDTNDLIYAAAKTLIVSNKQSPYLPKEVIKPYTDPPWKKRIKIKIERLRKELGQMVEISRGVDSRKMIKIKGKLYKKYNIQNKTEHKCIEETLKQKIKALAGRIKRYEDISNKKQQNKMFIENEHRLYKSLDSKKEHVDIKTPNKRCTEEFWRNILSEPVAYNHDAKWISEIEQVNSNLNTSTFEEITVEHIKKSVSKLLNWKAPGQDKIQNYYLKYLTNIHNQLALLFTKLLKNEEPLEDWLTTGKVILIPKNHDTEDPKNWRPIACLPGMYKLLTSILSDQLYTHCQVNNIMAPEQRGCRRGARGCKDHLMVNKAILENAHKEQKNLSMSRIDYSKASDSISHEWLLRILDIYKCPHLIKSFLERAMLKWKVIMTVKGSTESHTTEPIYIRRGIFQGDSLSPLLFGLALNPISTLLGKYQTKGYKLHDKVWINHLIYMDDIKVYANNRNSLKILLNSVEIFTTDIGMTFGLDKCNTLHLTAGHRNYTDGNEHVLLNGDTFMQLKLDQNYKYLGINESGKIIHSDIRDQLTKEYFRRIKKLTNSFLNGRNLIKGINTYAIPVLLYSFGVINYNRSHLKGIDIRTRKLLAIKKAHQQKADVDRLYLPLIKGGRGLINVEYLYKAHILKLKQYLEQKNDYLIEAIVQQDQRREKYSIFTEAEEIEKDLKLPNGKYTTTEIKKNIIKKQNESWRNKNLHGQFPKKVLDLANVDIELSFKWLKKRPISASLESSLFAIQDQAVLTRQHERDILKRSVDGKCRLCVSKDETVQHLLAGCEKLAGTYYVKRHNNLVQYIFWCLARKSKIEVNRLWWKEELKQPTVKENNIAKLMWEIPIQTDVTITHNRPDLIYIDKINNKTYLIDVSVPSDYNIGAKEIEKISKYHPLKVELSRLWKSTVTTIPIVVGATGVVTKNLKRYCDKLETHVNINILQTQASLHSTTIISKVLGDTIFVTSTQTSNSESKSLTSNSIQEPH

SEQ ID NO: 31600 - protein, 1394 aa, Nymphalis polychloros
MANEALVTQEGDMEGHLRNKRIGSLPGGDRRGTSVAGVRRDRMLASDSRLAGWTGVGDKGGGERSSRTTTDEQSDTGDTLQSRELSPASSAGTSETTTDSQFQDTRKKWSLVELEELMFCYFKARVGGPGYLKRLETFFKERNPGNPKSIKFTGNGLSNQARRIIKQQVLPKDTLDRIQKTAENVTQRTPNIVPSNTQNSDDLTTITPMSTLLTQSNNESKRSTSLVSQHPLNKNSNDDRRRKWSEQEQEELMFCYFLAKQEGTAYISKLERIFKRRNPDNPKIHRFNGNTLSNQARRILKQNLISQELLNRIKQRADNEIQHSHHTNSNVQSYAVSAQVLDNIMEETLEEDEVNVENGNGNVSPTNKFPETLQIENENPIELQFLQIFAEVKEIPIEERTYLPKAKINKQFLHNLAIINNYLPNLLASNCTLRDTNDLIYAAAKTLIMNNKQSPYLPSEVIKPHTDPPWKKRIKIKIERLRKEVGQMVEISRGVNSRKMIKIKDKLYTKYKIQNETEHKSTEETLKQKIKALAGRIKRYEDINNKKQQNKMFIENEHRLYKSLDSKKEHVDIKTPNKRCTEEFWSNILSQPVAYNHDAKWITDIEEDNSNLNTSTFEEITVEHIKTSVSKLHNWKAPGQDKIQNYYLKYLTNIHNQLALLFTKILKNEEPLEDWLTTAKVILIPKNHDTEDPKNWRPIACLPSMYKLLTSILSDQLYTHCQVNNIMAPEQRGCRRGARGCKDHLMINKVILENAHKGRKNLSMSWIDYSKAFDSISHEWLLRILDIYKCPHLIKSFLERAMLKWKVIMTVKGSTDSYTTEPIYIRRGIFQGDSLSPLLFCLALNPISTLLGKYETKGYKLQDKVWINHLIYMDDIKVYANNRNNLKILLNSVEIFTSDIGMSFGLDKCNTLHLTAGRRNYTDGNDHVLLNGDTFKQLKLDQNYKYLGIHESGKIIHSDIRDQLTKEYFRRIKKLTNSFLNGRNLMKGINTYAIPVLLYSFGVINYNNSHLKQIDIRTRKLLALKKAHHQKADVDRMYLPLVKGGRGLINVEYLYKAHILKLKQYLEQKNDYLIEAIVQQDKKREKYSIFTEAEEIGKELKLANGEYTNTEIKNNIIKKQNESWRNKNLHGQFPKKVLDLANVDTELTFKWLKKRPISASLESSLFAIQDQAVLTRQHERDILKRNVDGKCRLCVTKDETVQHLLAGCEKLAGTYYVKRHNNLVQYIFWCLARKSKIEVNRLWWKEELLQPTVKENSIAKLMWEIPIQTDVTITHNRPDLIYIDKINNKTYLIDVSVPSDYNIGAKEIEKISKYHPLKVELSRLWKTTVTTIPIVVGATGAVTKNLKRYCDKLDTHVNINILQTQASLHSSTIISKVLGDTIFVTNKQISNNEN

SEQ ID NO: 31601 - protein, 1389 aa, Vanessa cardui
MANGALVTREGDMEAHSRNTRIGSLPGGDRRGTSVAGVRRDRMRASDSRLAGWTGVGDRGVRGRSSRTTTDEQSDTDDTLQSREVSPVSSAGTSETTTESQYEDARKKWSLVELEELMFCYFKARAGGPGYLKRLQTLFKERNPDNPKVSKFTGNGLSNQARRIIKQNVLSKDKLETIQRNAENIAQLQINAVPSNAENSDIQSPITSISSLTTPTFNDLEQNSSGVSQTDLATNYNNDKRRKWTHQEQEELMFCYFIAKREGTAYISKLERTFKNRNPDNPKIHRFNGNTLSNQARRILKQNLISHELLNRIKQRADSQILHSHRTDSNTQPNAISAAVLDNIAEEIIEEDTVNVDNRNEQESPTGQFQIEDENPIILEFLQIFAEVKEIPIEERTYLPKAKINKQFIDNLAIINNYLPNILASNCTLRDMNDLIYAAAKTLIINNKQSPYLPKEVLKPHTDPPWKKRIKIKIERLRKELGQMVEISRGVSSRKMIKVKEKIYTKYKIQNETDHKSTEEILKQKIKALAGRIKRYDIINNKKQQNKIFVEDEHRLYRSLNTKQEHVDIKIPNKQCTEEFWSNILSKPITYNHEAEWITSIEKDNNNLNTSKFEEITVEHIKQSVGKLLNWKAPGQDKIQNYYLKYLTNIHGHLALLFTKLLKDEEPLEDWLTTGKVFLIPKNQDTEDPKNWRPIACLPSMYKLLTSILSEQLYTHCQVNNIMAPEQRGCRRGARGCKDHLMVNKAILEDAHKSQRNLSMSWIDYKKAFDSISHEWLLRVLDIYKCPPIIKYFLERAMLKWKVIMTAKGSTESYTTEPIHIRRGIFQGDSLSPLLFCLALNPISTLLGKYETKGYKLHDKIWINHLIYMDDIKVYANNRNNLKILLDSIEIFTADIGMTFGLDKCNTLHLTAGHRNYTDGNEHVLLNGDTFKQLEIDQNYKYLGINESGKIIHSDIRDQLTKEYFRRIKKITNSFLNGRNLIKGINTYAVPVLLYSFGVINYKNSDLKRIDTRTRKLLAIKNAHQQKADVDRLYLPLGKGGRGLINLENLYKAHILKYKQYLEQKNDYLIEAIVQQDQKREKYSIFKEAKNIEEELKLPSGRHTDLEIKKSIIQKQSESWRNKTLHGQFPKKVLDLANVDTEQTFRWLKKRPISASLESSLFAIQDQAVLTRQHERDVLKRSVDGKCRLCATKDETVQHLLAGCEKLAGTYYVRRHNNLVQYIYWCLARKNKIEVNKLWWKEELKQPFVKENSTAKLMWEIPIQTDVTITHNRPDLIYIDKTNNKTYLIDVAVPSDYNIGAKDIEKMSKYHPLKVELSRLWKTTVIMIPIVVGATGTVTKNLKRYCEKLETHVNIHILQTQASLHSSTIISKVLGDTVFVTHSQHANNT

SEQ ID NO: 31602 - protein, 907 aa, Nymphalis io
MVEALEEDMVDVESGGEKESPTGQLPETSQVEDEDPIELQFLKIFAEVKEIPIEERTYLPKAKIFKQFLHNLSIINNYLPNLLASSCTFRDTNDLIYAAAKTLIVNNKQSPYLLRELIKPYTDPPWKKRIKINIEHLRKELGQMVEISRGVNSRKMIKIKGKLYKKYNIQNETEHKCTEETLKQKIKALAGRIKRYEDINNKKQQNKMFIENEHKLYKSLDSKKERADIKIPNKSCTEEFWNNILSQPVAYNQDAKWISEIEQINSNLNMSTFEEITVEHIKKSVSKLIVKLNWKAPGHDKIQNYYLKYLTNIHNHLALLFTKLLKNEEPLEDWLTTGKVILIPKNNDTEDPKNWRPIACLPSMYKLFTSILSDQLYTHCQVNNIMAPEQKGCRRGCKDHLMVNKAILENAHKGQKNLSMSWIDYSKAFDSISHEWLLHVIDIYICPHLIKSFLERAMLKWKVIMTVRGSSESCTTEPIYIRRGIFQGDSLSPLLFCLALNPISTLLSKYETKGYKLQDKVWINHLIYMDDIKVYANNRNNLKILLNSVEIFTDDIGMTFGLDKCNTLHLIAGHRNYTDGNEYVLLNGDTFKQLKLDQNYKYLGVNESGKIIHSDVRDQLTKEYFRRIKKLTNSFLNGRNLIKGINTYAIPVLLYSFGVINYNISHLKRIDIRTRKLLAIKKAHHQKADVDRLYLPLIKGGRGLINVEYLYKAHILKLKQYLEQKNDYLIEAIVQQDQRREKYSIFTEAKEIEKDLKLPNGKYTITEIKKNIIKKQNESWRNKNLHGQFPKKVLDQGNVDTELTFKWLKKRPISALLESSLFAIQDQAVLTRQHERDILKRSVNGKCRLCVSKDETVQHLLTGCEKLAETYYVKRHNNLVQYIFWCLARKSKIEVNKLWWKEELKQL

SEQ ID NO: 31603 - protein, 957 aa, Limenitis camilla
MNEISSETSFEHIQLIIYCAAYAAVVFNGTNLTHLKSVRQGGERIPEWQKKLQSRIENLRVSIGRLTDYQNGNRSLSMQKKIELIKRKYEVHSRHENPNTDLSHYLDTLKQKLNALPSRLRRYKKTSLRKRQNKLFYNNEKSFYRSLKHNNIDTSNTSNLELSTGENFHKFWSHIWGNEVKHQNSKWIEDHILTLNEIPDMSYEKISLDLFKKVIARTHNWKGTGSDKIHNFWYKKFTTTHLILLKHINTFILNPHTLPTYLTEGITYMLPKTQSNSEDPANYRPITCLQTIYKIITSCISETIYKHLENNNIIAEEQKGCKKYSQGCKEQLTIDAVVMKQAFKNKIDIYTTYIDYKKAFDSVPHSWLIYILKHYKIHPTIVTFLKNAMCNWKTFIKLQFNEESYEEPIAIKRGIFQGDALSPLWFCLALNPLSYLLNNSRKGCNLKHEQTESHFTISHLMYMDDIKLFGKSIEDIQTLIDITQSFSQDICMQFGIDKCKILSVRKGQIINNSYILDNNQEINPVDPIAGYKYLGYQQSRQIHHKHTRLTLIDKFNERLHQILNTQLNSRNTIKAINSYAVPILTYSFGIIQWSSTNLKNLQRRINTTMTKYRKHHPRACIQRMLLPRIEGGRGIIDIQKLHNNQIKSLRTFFNDKSQHSLLHQLTVKIDEKYTPLNLNNTNFQPTETTIQDKITTWQQKSLHGRHRHDLVSQNVDKVASNTWLQRGELFPETEGFMLAIQDQVIETKNYRKHILKDPKFQNDNCRHCHGASETIQHITGACRSITQTDYKHRHNQIAAIIHKHLAVKCGFVKDKVAYYNYNPEIILDSTEYKLYWDRTIITDKTIHCNRPDITLHDKKNKIVYLIDIAIPNTHNLQSTYTEKIAKYTELAIEIKTQWRVETVKTIPIIISTTGVIPTTLHTSLKTLNIHPLTYILIQKAAILNTCRIVRKFLSITT

SEQ ID NO: 31604 - protein, 1201 aa, Rhagonycha fulva
MDTTNLSNDGTAIHSNDKSDEIKNLYNIPFEGGQCALCNRAFTRPKLLVAHYEIYHENSTLLFACDKCGKRFEKYHAGLCHRTKCRSTPATEDKPYQCTECTREFDTKCGLTTHKRRIHPALRDSEKRNLLQKTGSTKVWTNNETTILINEYIKTNGKNYAPGVAKILPNKTVKQIINRLQYLRQVAHPALINCKQKEETEFHYDAPDAATASPINISLQTCSIEMDKQINPEEMIILSNDREQFAHSPKPGPSEVCMIVPSTEMSSGDQHSSDNDVSTPKGYLNIYPKVELSSFNCELHQSKNADNKLSCLATSKFSSNAVLHPTQVAHTATLSQPNLITPTWRDILRNECSKQLQIIPCVKTLQEIMERRFPTQTEIDEIVEKFTKHLKDTKKQSKKESDIRRSKHKFCKRTQEKKSRYAKTQELFKRNPSKLAELVVNGNYHELIGAQAPKPPEDKIEEEYRNIWGRSQKSKKPNSRQTSDNKIPLIEIKAIKLKIKKLKKNGAPGTDGICKIHLNNKDVHEALYLIFNAITLSGKYPKIWRSNRTTLIPKMGKDANDIKNWRPITLSSVVAKIYSSCISTELEKHITLSRRQRGFVRGNGCFINAVLLDECIRTGKTSSLAAAQLDLNKAFDSIPHGSISTALREQEVPEVLVEVIDQMYTDVTTCFTNTNITVPIEQGVKQGDPLSSLLFNVVINKAIAKIQKMPGFNIMPNEQISILAFVDDVIVLANTEEQLQETLNILSEELDSIGLRISVNKSAAFGIKSGKKTWATSEVKVKVQNLELRSYAVDEQFDYLGATYTLAEGLSNKAQLQNIIKAANACKKLPLKPTQKTDLLMNFVLPKFYHRMTIDSPSPTTLSKIDTEIRGICKQILHLPHCTTDQLLYSRKRDGGMGFPRLQNLVLSNSLRALSSAEMDEDPLVRTIAEKADFGKRIRRTAEKHGVLFPATKLELNKLKMTLKKNEHLRWENQTSQGKGVTLFKNSPLANHWLLHPTTLRPGEYIDAVKMRTNTYGVREALKRAGGLNIPVQCRRCETKIETLGHVLGECIAGKSLRIKRHNDIVKTIAKSQTKRCTIYEEQMFETPAGLILKPDLVIKNGEKASIVDVTVRFEHDSSLVNASVEKIQKYNQLRETLKRQLNVHTVEVIPIVVGARGAIPRSTENALLKLSVTKKEILNIVLNTLRSSIYIGRAHMDYEN

SEQ ID NO: 31605 - protein, 1201 aa, Rhagonycha fulva
MDTTNLSNDGTAIHSNDKSDEIKNLYNIPFEGGQCALCNRAFTRPKLLVAHYEIYHENSTLLFACDKCGKRFEKYHAGLCHRTKCRSTPATEDKPYQCTECTREFDTKCGLTTHKRRIHPALRDSEKRNLLQKTGSTKVWTNNETTILINEYIKTNGKNYAPGVAKILPNKTVKQIRNRLQYLRQVAHPALINCKQKEETEFHYDAPDAATASPINISLQTCSIEMDKQINPEEMIILSNDREQFAHSPKPGPSEVCVIVPSTEMSSGDQHSSDNDVSTPKGYLNIYPKVELSSFNCELHQSKNADNKLSCLATSKFSSNAVLHPTQVAHTATLSQPNLITPTWRDILRNECSKQLQIIPCVKTLQEIMERRFPTQTEIDEIVEKFTKHLKDTKKQSKKESDIRRSKHKFCKRTQEKKSRYAKTQELFKRNPSKLAELVVNGNYHELIGAQAPKPPEDKIEEEYRNIWGRSQKSKKPNSRQTSDNKIPLIEIKAIKLKIKKLKKNGAPGTDGICKIHLNNKDVHEALYLIFNAITLSGKYPKIWRSNRTTLIPKMGKDANDIKNWRPITLSSVVAKIYSSCISTELEKHITLSRRQRGFVRGNGCFINAVLLDECIRTGKTSSLAAAQLDLNKAFDSIPHGSISTALREQEVPEVLVEVIDQMYTDVTTCFTNTNITVPIEQGVKQGDPLSSLLFNVVINKAIAKIQKMPGFNIMPNEQISILAFVDDVIVLANTEEQLQETLNILSEELDSIGLRISVNKSAAFGIKSGKKTWATSEVKVKVQNLELRSYAVDEQFDYLGATYTLAEGLSNKAQLQNIIKAANACKKLPLKPTQKTDLLMNFVLPKFYHRMTIDSPSPTTLSKIDTEIRGICKQILHLPHCTTDQLLYSRKRDGGMGFPRLQNLVLSNSLRALSSAEMDEDPLVRTIAEKADFGKRIRRTAEKHGVLFPATKLELNKLKMTLKKNEHLRWENQTSQGKGVTLFKNSPLANHWLLHPTTLRPGEYIDAVKMRTNTYGVREALKRAGGLNIPVQCRRCETKIETLGHVLGECIAGKSLRIKRHNDIVKTIAKSQTKRCTIYEEQMFETPAGLILKPDLVIKNGEKASIVDVTVRFEHDSSLVNASVEKIQKYNQLRETLKRQLNVHTVEVIPIVVGARGAIPRSTENALLKLSVTKKEILNIVLNTLRSSIYIGRAHMDYEN

SEQ ID NO: 31606 - protein, 1126 aa, Trachurus trachurus
MEEGPIRTDSTVTNGTAMANEKILRSCKCGWTKLTTLRGLRIHQGKKKCLQDDQTQPCTVKAGETRRARSQVEHHSTTEPPVVDGHIPSEPLDTNSPVNYQAAERAPATEERRKEKEPGRKNKIKWPKANETEVWRRLDEDLAAILNSLRGSAESRVNIFSDIIYDECLSRLGLIEKKEHKPKARSRREKEIFQLIKDRRALRKAWNKAEEREKEGLKALWEQIKSRLTSLRRAERIRKRRKRKESQRSKFLKDPFKMARSLLEEKKSGRLAMAKEELEDHVRKQMSDPEKHLPLGSPGHVPQPAAPVCEFEMAPPKLSEVSAIVKKARSSSAPGPNGIPYKLYKRCPQVLKELWKLMRVVWKQQCVPAEWRRAVATLIPKQQEASTIEQFRSIALLNVEGKIFFAVIAKRLTKYLLQNNYIDTSCQKAGVPGFSGCTEHASLIWDQIQSAKKEKRDLHVVWLDLENAYGSVPHQLINFALDFFHVPAGVKSIIESYYGELKICHTLQNYTTGWQQLDRGIAMGCSISPILFTAAFEVILIGARTMARGVRNSAGQRLPPLRCFMDDVTSLLQTAVCTSRLLKRIEELLSWARMKIKSAKSRSLSIRKGSRVDSVSFQVAGERIPVLAEQPIRSLGREYTAELKDRHMATAVKDQLKEGLRRIDQSYLPGKYKIWCYQFTLYHRIMWPLKMSEITSSTVTKLDATANNYIRKWLGLPRCLSETALFGTNALHLPVKSIALGYRLEKTRLVLELRQSSDQLVRNASVKIRTGKAWKAEDCVDSAISRLKHQELVGKTQQGRCGLGWGEPQKLWSRASLSERKRMVVTEVMRMEEDRLLVKSISQSQQGQWTKWEGILPRTMGWSDLWRIPQARLSFLIRATYDTLPSPANLARWFGSEENCSLCGRAQATLNHILCGCKTALAQGRFRWRHDQVLRKLAELTESKRVMANRQAQHQPQHQPPVRFIAAGQSSQNHPTQSKTSVLAPGSDWLMRADLDSQLKFPTDITITTLRPDMVMWSAAERKVLLIELTVPWEGAIQEAYERKKLRYADLVAECQQRGWRATTYPVEVGCRGFVGLSTKRFLKDIGFSETKARKAQKDLSEEAEKGSFWLWLRRRDKSWGTKSAT

SEQ ID NO: 31607 - protein, 1032 aa, Benthosema glaciale
MAILYYCWDTTSQQPRTEGRRKSLAGKTTSCGQRRKTHIWCKLDDDLALTLKNSLRGKVESKVNIFSEIIYDECLGRFGQKGKKKEHMPKAKSRREKEILQLMKERRALRKAWRKAEAHEKEGLQALWDDVKSRLTSLRRAERIRKRRKRKESQRSRFLKDPFKMARSLLEEKKSGTLVMAKEDLEEHLKRQMSDAGRHLPLGSPGHVPQPTAPTTEFELVPPKLSEVSDVVRKARSSSAPGPNGIPYKLYKRCPQVLEELWKLMRLVWKQQSVPVEWRRAVAILIPKEQDSSTIGQFRSIALLNVEGKIFFSVIAKRMTKFLLQNNYIDTSCQKAGVPGFSGCSEHATIIWDQIQFAKREKKDLHLVWLDLENAYGSVPHKLISFALDFFHVPVGVKNIIESYYADVKICHSLQSYTTVWQQLGRGIAMGCSISPILFTASFEIILIGARTMVKGVRNSAGLRLPALRCFMDDVTSLLQTAACTAQLLKRFEELLSWARMRIKSNKSRSLSIRKGRQMDSVSFQVAGERIPVLAEQPLRSLGREYTADLTDKHMAAAVTDQLKEGLKRIDQSYLPGKFKVWCYQFTLYQRVMWPLKMCEITTSTVTKLDAKANNYIRKWLGLPRCLSDAALFGRNALQLPLKNISTGYRLEKSRLVLELRQSSDHLVRNAGVKIRTGRAWKAEECVDDAISRLKHQELVGRTQQGRRGLGWGESQKMWSKASLKERKDLVVTEVTRMEEDRFFAKSIGQCQQGQWTKWEGFLPRSVKWSDLWKMPQARLSFLIRATYDTLPSPANLARWYGSEDNCGLCETGKGNLRHILCGCPTALAQGRYTWRHDQVLRKLAEHTESMRVQANEKSTSQQRQLVQFVTAGQAKKNCPKADRTAVLTQGKDWSMRADLDKQMRFPFEITITTLRPDIVLWSSIEKRVLLVELTVPWEQNIQEAYERKMARYAELVAECQEKGWKASTYPVEVGCRGFAGLSTNRFLRDIGFTAAKAKKVLKDLSEEAEKGSLWLWLRRKDRSWGNRDGTQ

SEQ ID NO: 31608 - protein, 1081 aa, Neogobius melanostomus
MKRQPNGPPRGGMQEGPTRTDNMVPNGTDKDMKILRSCSCGWQKQTTSRGLRIHQGRMKCPQENLGQPCTAQADKTSREQSLVEHHRAPEPNVVDEPATASTSNTTSSDNPQTMFPPDRGRKEQVPGRKTKILWPKASDTESWKSVDTDLELILKNTLKGGVESKIKLFSEIVYDECSRRFGQSERKEQVSKAMSRREREINQLVRERRCLRKAWRKAESSEKEGLKVLWGQIKNRLAALRRAERIRKRRKKKESQRTQFIKDPFRMARSLLEEKKSGTLVMGKHELEEHIRNQISDPEREVSLGTPGYVPQPPPPTTQFNISPPKLCEVSNVVTKARAGSAPGPNGIPYKLYKRCPRVRKQLWKLMRLVWKQQSIPTEWRRGVAILIPKEHRSSTIHQFRSISLMNVEGKMFFAVIAKRLTKFLLENNYIDTSCQKAGVPGFAGCVEHSSIIWDQIQSAKREKKDLHVVWLDLENAYGSVPHQVVKFAMDFFHMPMCIKNIIESYLVDLKICHAVQDYVTNWQRLERGIVMGCSISPILFTAAFEVILIGARAMSKGVRNSCGQRLPPLRCFMDDVTTLLQTAACTARVIKRLDELLSWARMRIKSSKSRSLSIRKGSRVDSISFQAGGGRIPVLAEQPLRSLGREYTADLTDKHMAATILAQLKDGLSRINQSLLPGKFKLWCYQFTLYQRLMWPLKMCEITATSVAKMDSMANSFIRKWLGLPRCLSNTALFGRNTLQLPLKSVLLGYKVEKARLALELRESSDQLVQNAGVTIRTGRKWKAEACVDHAISRLKHQEVVGRVQQGRQGIGWGETPKLWSEAPLKERKKMVVTEVTRMEEDTLLVKSISQGQQGQWTRWEGIMPKSIGWNDLWRMPQARLSFLIRATYDSLPTPSNLAKWFGGTDLCGLCGAAQGTLHHILSSCKTALSQGRFRWRHDQVLKKLAEITESRRVQSNKTSRQPIQKQIQFVPAGQQRKDQRTHHKQTILAPSSDWEMLADIGTQLKFPVAIATSSLRPDIVLWSQSRKHVFLVELTVPWEDAMQEAYERKKERYSDLAAECRANGWSTKSIRSKLAAAAL

SEQ ID NO: 31609 - protein, 1173 aa, Sinella curviseta
MSFSKSKVERFPSSNGGSTNNDANADGPSSNTPNDRHNNTGYFRSFQNLFSRGSASTANNNQNTGQKSENLTGVIANGEVNEAEVMASVKQPTLEEAAAAQMKQLDDDATDLGGEGDPVATEPSSKELPTFLSQNTPITEDVKQLDDANPKIKEAIYCSCRKPDDGHPMIKCNTCKEWFHGSCVNLSYSQTARLGRSKKTPWFCPGCLPKLPHTKRNPRPSTISTLPADDTIMTQDDSTTLSASSSIRLPCPLSPKRTFKTEDSLNRHLRKKHNMKTEDIDSMEAASTMSIQKKLVHCRTNVRTLRRIPKGARPTAADKLATIITDCLRTNANQSWENLLVFAYISFSIGGTRGKSITSKIKNNINDFKLQPESSPSKNHVTTLAERVMGKVKDYDIKGAVKILSSNDALASFNENTLRKLREKHPTASSDVHLPETTDDTTFSVNESLVLRAINSFPCGSSPGIDGLRPQFLKDLVSTSAGEAGARALTAITALCNFLLAGSLNKDMIPIFFGASLCALTKKDNGIRPIAVGLAFRRLVAKVACIKTRDKAHAYLSPHQVGVATRFGCESVVHTVRTYVNRPENTDKILLKIDFANAFNSIDRTCMLNQFQDIIPELLPLLIQSYAKPSTLFFGKDTIRSEVGCQQGDPCGPLAFSITIHPIVEAMTSEFNAWYLDDATLADKPEIVLKSFQKLVEMAEKVGLNINPTKCEIYFCSGLVDTDIIKRFNAVSPGITIASKETLEILGTPIFEEAYRNSFQSKYNKFKLLCSRLQDINAHVAYTLLKNCLYIPKMSYILRTSGLWKFPCLLKEMDDSLRECLQSIMNINLEEQQWSQAVLPTKVGGLGIRKLEDIALPAFLASTHGCLNLVSQITPNMDNEDKIYFVDEAMELWKEKYGDLIPPITHFQKNWDSVVVKAAVENNLKCCNDTDYARILALQQPESNSWLQTLPSPNIGTCLDDQTFRVCVALRLGCNIFKNHVCHCNMTVTEDGRHGLSCSQSKGRFSRHQELNHIIFRALTSIHISSSLEPIGLSRDDGKRPDGVTLVPWERGKRLLWDVTCTDTFADSYLAKTSKEAGAAAELACKRKHGKYSQIKAANYVFKGLAFETMGPWAEESKSFIGQIGTLLIKESGDIKAKHYLYQRISLAIQRGNAASILGTLPNSASMEEIFLL

SEQ ID NO: 31610 - protein, 855 aa, Danaus chrysippus
MDTLKQKLSLKANRLARYRKALNRKQDNKLYCTNEKAFYRSLNSTTSNNTNNEEQMPNKDLLKNYWAGIWEKRSDHNLQAKWIEEENQKWGDMEPMEFIELKLDDLTEVLKKTKNWRAAGIDQIHNFWYKKFTSLHDILTKTISDLINCRTPLPNFITTGLTYMLPKNQHTHDPSHYRPITCLSTIYKIITSCITNKIVSHLEAHNVMSEEQKGCRRNHRGCKEQLIIDSTILKHSNKFNRNLFVTYIDFKKAFDSVPHSWLVQILHTYKIHPNVIKFLEKAMSEWRTSIILTSKTSKICCEEIHIRNGIFQGDSLSPLWFCLALNPLSRILSESKFGYRLTRDTAVSHLMYMDDIKLFSKSMKEMKEMIRITAQFSKDINMNFGLDKCKTLIIKRGKLIEKECEIGEAINITGMIEGDLYKYLGILQAKDINHSRLKQDLTTEYIKRVNQLCKKQLYSRNLIKAINTFAIPVLTYSFGVIKWSHTDINNLEIKTRVILTKYNYHHPKSAIQRLTLKRQLGGRGVVDLKILWQNQIQNIQKFFYNKINTSQIHAATVEVDDNFTPLNLKNKKKEFKTIQEQINEKIKDWRRKELHGRHIHDLEQNFIDLDASNKWLQKGYLFPETEGFLIAIQDQVINTRNYKKYILKESIESDLCRKCHRMSENIQHITGACPTLVQTDYTHRHNQIVNFLHQKLAHKYNFIETPLKPYYQYLPDPVLENDEIKIYYDRAILTDKTIHYNRPDITLVNKLSKTAYLIDVSVPNTHNLLKTITEKINKYTELKEEVIRIWKLNKVYIVPIVLSTTGVIPKHLHQSLKILDLPPLAYITMQKAAILNTCRIVRKFLESDELTDCTD

SEQ ID NO: 31611 - protein, 1256 aa, Danaus chrysippus
MEQRSKRLCIGPLPGDRRGTPGANAGCYGMRSIGGGGLSRRVPPEQLSTAEHTLPVMSNYQNSAVSFNRPTEDVSQGASSSQPATTKAGKPRVRIKWDKETNLFIMRTYLYITKLETDKVMYPKRLFDKFKTQYPNWNVSQQRIADQRRVISRNKLITEDEIAQLKLEIAEQFRREADLNNRTDPSSHSPQSQSQPLTQTHNIVTSPTTCTVTQSDASTQTNLTSLVHNTEVDYTLSSEIPKQENIEELKNLLETALIEFQGIDPKTRPKLPRLKESKLLYDLINTFNTRILPTFFSLDSDLLHLHTLIYCSALVIITKLGYKIKTGNVEDTGIQKKNNYKPAWEYRLENDIKKLRADIGRLTQYIKGNRSKKIINKVEILFKKNKLHTIHEQENKKPEEYMDTLKQKLSLKANRLTRYRKALNRKQDNKLYCTNEKAFYRSLNSTTSNNTNNEEQMPNKDLLKNYWAGIWEKRSDHNLQAKWIEEENQKWGDMEPMEFIELKLDDLTEVLKKTKNWRAAGIDQIHNFWYKKFTSLHDILTKTISDLINCRTPLPNFITTGLIYMLPKNQHTHDPSHYRPITCLPTIYKIITSCITNKIVSHLEAHNVMSEEQKGCRRNHRGCKEQLIIDSTILKHSNKFNRNLFVTYIDFKKAFDSVPHSWLVQILHTYKIHPNAIKFLEKAMSEWRTSIILTSKTSKICCEEIHIRNGIFQGDSLSPLWFCLALNPLSRILSESKFGYRLTSDTAVSHLMYMDDIKLFSKSMKEMKEMIRITAQFSKDINMNFGLDKCKTLIIKRGKLIEKECEIGEAINITGMIEGDLYKYLGILQAKDINPSRLKQDLTTEYIKRVNQLCKKQLYSRNLIKAINTFAILVLTYSFGVIKWSHTDINNLEIKTRVILTKYNYHHPKSAIQRLTLKRQLGGRGVVDLKILWQNQIQNIKKFFYNKINTSQIHAATVEVDDNFTPLNLKNKKKEFKTIQEQINEKIKDWRRKELHGRHIHDLEQNFIDLDASNKWLQKGYLFPETEGFLIAIQDQVINTRNYKKYILKESIESDLCRKCHRMSENIQHITGACPTLVQTDYTHRHNQIVNFLHQNLANKYNFIETPLKPYYQYLPDPVLENDEIKIYYDRAILTDKTIHYNRPDITLVNKLSKTAYLIDVSVPNTHNLLKTITEKINKYTELKEEVIRIWKLNKVYIVPIVLSTTGVIPIHLHQSLKILDLPPLAYITMQKAAILNTCRIVRKFLESDELTDCTD

SEQ ID NO: 31612 - protein, 761 aa, Junonia evarete
MEFKEISLDDLTNVLKKTKNWKAAGIDQIHNFWYKKFTSLHKILSNIISDLINGKAPLPNFVTTGLTYMLPKSQNTHDPSQYRPITCLPTIYKIITACITNKIISHLETHNIISEEQKGCRRNHRGCKEQLIIDSTVLKHANTNNRNIYMTYIDFKKAFDSVPHSWLIQILHTYKIDPTIIRFLEAAMSNWKTTITLTTKTTKISCEEIRISNGIFQGDSLSPLWFCLALNPLSRLLANSKCGYQLTRGTAVSHLMYMDDIKLFSKSEKEMEKMIRITAQYSKDINMNFGLDKCKTLTIKKGKLIEKSYEIDEGLNINGMVGDELYKYLGIMQAKDINHTKLKKDLTTEYIKRVNLLCKKQLYSRNLIKALNTFAIPVLTYSFGIIKWSQTDINKLEIKTRTILTKYNYHHPKSAIERVTLKRHVGGRGLVDLKILWQNQIHNIRNFFYSKIHNSQIHAATVAVDDNFTPLNLKNKEKQFKTTQEQINEKISNWRKKELHGRHIHDLEQSHVDLEASNRWLIKGYLFPETEGFLISIQDQVIKTRNYKKYILKETIETDICRKCHRLPETIQHITGACPTLVQTDYTHRHNQIAHYIHQKLALKYKLINGNPKPYYQYTPNPVLESNEVKIYFDRGILTDKTIHYNRPDITIVNKSSKIAYLIDISVPNTHNLQKTITEKINKYTELKEEIIRLWNLNKVYIVPLVLSTTGVIPKHLHHSLKILDLPPLTYITMQKAAILNTYRIVRKFLVSENEPTDCTD

SEQ ID NO: 31613 - protein, 1259 aa, Vanessa atalanta
MEQHSERLRIGPLPGGRRGTPGASAGCYSMRSTGGGGLSRRVPPEQFSTADNSLPVISANQNSAVSFNRPTEDVSQGAASSQPATTKAGKPRVRMKWDKEVNLFIMRTYLYITKLETDKVMYPKRLFDKFKTQYPDWNVSQQRIADQRRVIIRNKLISEDEIAHLKSEIAEQLRREADLNNQTDTSLHSPHLQSQPLIQTHNIVTSPTTYNITQSDASTQTNLTSLVHDTEVQYTQSTTLENPQQENIEKLKNLLETALTKFEGTDPKTRPKLPRLKESKLLHDLIYTFNTHILPTFFSLDSDLLHLHTLIYCSALVIITKLGYKIKSGNKEDSSIQKKKSHKPAWEHRLENDIKKLRADIGRLTQYLKGNRSKKVVEKVEIIFKNTKLHTIHERENKKPEEYIDTLKQKLSLKSHRLARYRKALNRKQDNKLYCTNEKAFYRSLNSCTSNNTNNEEQIPNKDELKNYWAGIWEKRSDHNLQAKWIEEENQKWGYMEQMEFIELKLDDLTVVLKKTKNWKAAGIDQIHNFWYKKFTSLHDILTKIISDLINCRIPLPNFITTGLTYMLPKNQNTHDPSQYRPITCLPTIYKIITSCITNKIVSHLEAHNVMSEEQKGCRRNHRGCKEQLIIDSTILKHSNKFNRNLYVTYIDFKKAFDSVPHSWLVQILQTYKIHPNIIKFLKEAMSNWRTTITLTTKTSKICCDEIHIRNGIFQGDSLSPLWFCLALNPLSRILSDSKFGYQLTRDIAVSHLMYMDDIKLFSKSVKEMKEMIKITAQFSKDINMNFGLDKCKTLTIKKGKLIEKNYEISEEINISEMLEGDLYKYLGIFQAKDINHSKLKQDLTTEYIKRVNQLCKKHLYSRNLIKAINTFAIPVLTYSFGIIKWSQTDIKNLEIKTRVTLTKHNYHHPKSAIERLTLKRQLGGRGVVDLKILWQNQIHNIQKFFYNKANTSKIHAAIVEVDDNFTPLNLKNNNKEFKTIQEQINEKIKDWRRKELHGRHIHDLEQNFIDLDASNKWLQKGYLFPETEGFLIAIQDQVINTRNYKKYILKESIESDLCRKCHRMPENIQHITGACPTLVQTDYTHRHNQIVHYIHQKLAHKYNLTNTPLKPYYEYQPNPVLENEEIKIYYDRAILTDKKIHYNRPDITLVNKSSKIAYLIDVSVPNTHNLLKTITEKINKYTELKEEIIRIWNLNKVFIIPIVLSTTGVIPKHLHQSLKILDLPPLTYITMQKAAILNTCRIVRKFLESDNELTDCTD

SEQ ID NO: 31614 - protein, 1341 aa, Junonia genoveva
MFMYVRGTMSRSRQLPDPREIIYNDKLFILYKYFIFSLIIIIIIIIPQNPTLRPSRTPDHVGGGHAYIRNLCGKQGYGNPSNMEQHSQRLRIGPLPGGRRGTPGASAGCYSMRSTGGGGLSRRVPPEQLSTADNSLPVISASQNSAVSFNRPTEDVSQGAASSQPATTKAGKPRVRMKWDKEVNLFIMRTYLYITKLETDKVMYPKRLFDEFKAKYPDWNVSQQRIADQRRVIIRNKLISEDDIAQLKSEIAEQLSRESDLNNQTDISSHSPHLQSQPLIQTHNIVTSPTNYNITQSDASTQTNLTSLVHDTEVQYTQSTRFENPQQENTEELKNLLETAITKFQGTDPKTRPKLPRLKESKLLHDLIYTFNTHILPTFFSLDSDLVQLHTLIYCSALVIITKLGYKIKSGNIEDTSIQKKSNHKPAWEYRLENDVKKLRADIGRLTQYLKGNRSKKVVEKVEIIFKNTKLHTVHERENKKPEEYIDTLKQKLSLKSHRLARYRKALNRKQDNKLYCTNEKAFYRSLNSSTSNNTNNEEQIPNKDELKNYWAGIWEKRNDHNFQAKWIEEENQKWGNMEQMDFIELELDDLTEVLKKTKNWKAAGIDQIHNFWYKKFTSLHDILTKIISDLINCRTPLPNFITTGVTYMLPKSQNTHDPSQYRPITCLPTIYKIITSCITNKIVSHLEAHNVMSEEQKGCRRNHRGCKEQLIIDSTILKHSNKFNRNLYVTYIDFKKAFDSVPHSWLVQILQTYKIHPNIVKFLEEAMSNWRTTITLTTKTSKICCDEIHIRNGIFQGDSLSPLWFCLALNPLSRILSDSKFGYQLTRDTAVSHLMYMDDIKLFSKSVKEMKEMIKITAQFSKDINMNFGLDKCKTLTIKKGKLIEKNYEISEEINISGMLEGDLYKYLGILQAKDINHSKLKQDLTTEYIKRVNQLCKKQLYSRNLIKAINTFAIPVLTYSFGVIKWSQTDIKNLEIKTRVTLTKHNYHHPKSAIERLTLKRQVGGRGVVDLKILWQNQIHNIQNFFYNKAKTSKIHAATVEVDDNFTPLNLKNNNKEFKTIQEQINEKIKDWRRKELHGRHIHDLEQNFIDLDASNKWLQKGYLFPETEGFLIAIQDQVINTRNYKKYILKESIESDLCRKCHRMPENIQHITGACPTLVQTDYTHRHNQIVHYLHQKLAHKYNFTNTPLKPYYEYQPNPVLENEKIKIYYDRAILTDKTIHYNRPDITLVNKSSKTAYLIDVSVPNTHNLLKTITEKINKYTELKEEISRIWNLSKVFIVPIVLSTTGVIPKHLHQSLKILDLPPLTYITMQKAAILNTCRIVRKFLESDNELTDCTD

SEQ ID NO: 31615 - protein, 1256 aa, Vanessa tameamea
MEQHSERLRIGPLPGGRRGTPGASAGCYSMRSTGGGGLSRRVPPEQLSTADNSLPVISASQNSAVSFNRPTEDVSQGAASSQPATTKAGKPRVRMKWDKEVNLFIMRTYLYITKLETDKVMYPKRLFDKFKTQYPDWNVSQQRIADQRRVIIRNKLISENEIAHLKSEIAEQLRREADLNNQTDTSLHSTHLQSQPLIQTHNIVTSPTTYNITQSDASTQTNLTSLVHDTEVQYTQSTTLENPQQENIEELKNLLETALTKFQGTDPKTRPKLPRLKESKLLHDLIYTFNTHILPTCFSLDSDLLHLHTLIYCSALVIITKLGYKIKSGNIEDSSIQKKKSHKPAWEHRLENDIKKLRADIGRLTQYLKGNRSKKVVKKVEIIFKNTKVHTIHERENKKPEEYIDTLKQKLSLKSHRLARYRKALNRKQDNKLYSTNEKAFYRSLNSCTSNNTNNEEQIPNKDELKNYWAGIWEKRSDHNLQAKWIEEENQKWGYMEQMEFIELKLDDLTEVLKKTKNWKAAGIDQIHNFWYKKFTSLHDILTKIISDLINCRTPLPNFITTGLTYMLPKNQNTHDPSQYRPITCLPTIYKIITSCITNKIVSHLEAHNVISEEQKGCRRNHRGCKEQLIIDSTILKHSNKFNRNLYVTYIDFKKAFDSVPHSWLVQILQTYKIHPNIIKFLEEAMSNWRTTITLTTKTSKICCDEIHIRNGIFQGDSLSPLWFCLALNPLSRILSDSKIGYQLTRDVAVSHLMYMDDIKLFSKSVKEMKEMIKITAQFSKDINMNFGLDKCKTLTIKKGKLIEKNYEISEEINISEMLEGDLYKYLGILQAKDINHSKLKQDLTTEYIKRVNQLCKKHLYSRNLIRAINTFAIPVLTYSFGIIKWSQTDIKKLEIKTRVTLTKHNYHHPKSAIERLTLKRQLGGRGVVDLKILWQNQIHNIQNFFYNKANTSKIHAAIVEVDDNFTPLNLKNKNKEFKTIQEQINEKIKDWRRKELHGRHIHDLEQNFIDLDASNKWLQKGYLFPETEGFLIAIQDQVINTRNYKKYILKESIESDLCRKCHRMPENIQHITGACPTLVQTDYTHRHNQIVHYIHQKLAHKYNFTNTPLKPYYEYQPNPVLENEEIKIYYDRAILTDKTIHYNRPDITLVNKSSKIAYLIDVSVPNTHNLLKTITEKINKYTELKEEIIRIWNLNKVFIVPIVLSTTGVIPKHLHQSLKILDLPPLTYITMQKAAILNTCRIVRKFLESNNELAD

SEQ ID NO: 31616 - protein, 964 aa, Junonia neildi
MKFTILNNNNNNYYYYYNNCTALVITTRLGYKIKLGATEDISKENNYKPAWEHRLESDIRKLRADIGRLTQYIKGNRSKQIIEKVEIIFKNTKLHTTHEQENKRPEEYIDTLKQKLSLKAHRLARYKKALRRKIDNKLYCTNEKAFYRSLNNNITNNSQNENQLPSKDNLKNYWAGIWEKRSGHNLQAKWIEEENQKWDSTEKMEFKEISLDDLTNVLKKTKNWKAAGIDQIHNFWYKKFTSLHKILSNIISDLINGKAPLPNFVTAGLTYMLPKSQNTHDPSQYRPITCLPTIYKIITACITNKIISHLETHNIISEEQKGCRRNHRGCKEQLIIDSTVLKHANTNNRNIYITYIDFKKAFDSVPHSWLIQILHTYKIDPTIIRFLEAAMSNWKTTITLTTKTTKISCEEIRISNGIFQGDSLSPLWFCLALNPLSRLLANSKCGYQLTRGTAVSHLMYMDDIKLFSKSEKEMEKMIRITAQYSKDINMNFGLDKCKTLTIKKGKLIEKSYEIDEGLNINGMVGDELYKYLGIMQAKDINHTKLKKDLTTEYIKRVNLLCKKQLYSRNLIKALNTFAIPVLTYSFGIIKWSQTDINKLEIKTRTILTKYNYHHPKSAIERVTLKRHVGGRGLVDLKILWQNQIHNIRNFFYSKIHNSQIHAATVAVDDNFTPLNLKNKEKQFKTTQEQINEKISNWRKKELHGRHIHDLEQSHVDLEASNKWLIKGYLFPETEGFLISIQDQVIKTRNYKKYILKETIETDICRKCHRLPETIQHITGACPTLVQTDYTHRHNQIAHYIHQKLALKYKLINGNPKPYYQYTPNPVLESNEVKIYFDRGILTDKTIHYNRPDITIVNKSSKIAYLIDISVPNTHNLQKTITEKINKYTELKEEIIRLWNLNKVYIVPLVLSTTGVIPKHLHHSLKILDLPPLTYIIMQKAAILNTCRIVRKFLDSENELTDFTD

SEQ ID NO: 31617 - protein, 1259 aa, Vanessa cardui
MELHSERLRRGPLPGGRRGTPGASAGCYSMRSTGGGGLSRRVPPEQLSTADNSLPVISTIQNSAVSFNRPTEDVSLGATSSQPATTKAGKPRVRMKWDKEVNLFIMRTYLYITKLETDKVMYPKRLFDKFKTQYPDWNVSQQRIADQRRVIIRNKLISEDEIAHLKSEIAEQLRREADLNNQTDTSLHSPHLQSQPLIQTHNIVTTPTTSNITQSDASTQTNLTSLVHDTEVQYTQSITLENPQQENIEELKTLLETALTKFQGTDPKTRPKLPRLKESKLLHDLIYTFNTHILTTFFSLDSDLLHLHTVIYCSALVIITKLGYKIKSGNIEDSNIQKKKSHKPAWEHRLENDIKKLRADIGRLTQYLKGNRSKKVVKKVEVIFKNTKLHSIHERENKKPEEYIDTLKQKLSLKSHRLARYRKALNRKQDNKLYCTNEKAFYRSLNSCTSNNTNNEEQIPNKDELKNYWAGIWEKRSDHNLQAKWIEEENQKWGYMEQMEFIELKLDDLTEVLKKTKNWKAAGIDQIHNFWYKKFTSLHDILTKIISDLINCRTPLPNFITTGLTYMLPKNQNTHDPSQYRPITCLPTIYKIITSCITNKIVSHLETHNVMSEEQKGCRRNHRGCKEQLIIDSTILKHSNKFNRNLYVTYIDFKKAFDSVPHSWLVKILQTYKIHPNIIKFLKEAMTNWRTTITLTTKTSQICCDEIHIRNGIFQGDSLSPLWFCLALNPLSRILSDSKFGYQLTRDIAVSHLMYMDDIKLFSKSVKEMKEMIKITAQFSKDINMNFGLDKCKTLTIKKGKLIEKNYEISEEINISEMLEGDLYKYLGILQSKDINHSKLKQDLTTEYIKRVNQLCKKHLYSRNLIKAINTFAIPVLTYSFGIIKWSQTDIKNLEIKTRVTLTKHNYHHPKSAIERLTLKRQLGGRGVVDLKILWQNQIHNIRKFFYNKVNTSKIHAAIVEVDDNFTPLNLKNNNKEFTTIQEQINEKIKDWRRKELHGRHIHDLEQNFIDLDGSNKWLQKGYLFPETEGFLIAIQDQVINTRNYKKYILKELIESDLCRKCHRMPENIQHITGACPTLVQTDYTHRHNQIVHYIHQKLAHKYNFTNTPLKPYYEYQPNPVLENEEIKIYYDRAILTDKTIHYNRPDITFVNKSSKIAYLIDVSVPNTHNLLKTITEKINKYTELKEEIIRIWNLNKVFIVPIVLSTTGVIPKHLHQSLKILDLPPLTYITMQKAAILNTCRIVRKFLESDNELTDCTD

SEQ ID NO: 31618 - protein, 1257 aa, Vanessa atalanta
MEQHSERLRIGPLPGGRRGTPGASAGCYSMRSTGGGGLSRRVPPEQLSTADNSLPVISANQNSAVSFNRPTEDVLQGAASSQPATTKAGKPRVRMKWDKEVNLFIMRTYLYITKLETDKVMYPKRLFDKFKTQYPDWNVSQQRIADQRRVIIRNKLISEDEIAHLKSEIAEQLRREVDLNNQTDTSLHSPHLQSQPLIQTRNTTSPTTYNITQSDASTQTNLTSLVHDTEVQYTQSTTLENPQQENIEELKNLLETALTKFEGTDPKTRPKLPRLKESKLLHDLIYTFNTHILPTFFSLDSDLLHLHTLIYCSALVIITKLGYKIKSGNIDSSIQKKKSHKPAWEHRLENDIKKLRADIGRLTQYLKDNRSKKVVEKVEIIFKNTKLHTIHERENKKPEEYIDTLKQKLSLKSHRLARYRKALNRKQDNKLYCTNEKAFYRSLNSCTSNSTNNEEEIPNKDELKNYWAGIWEKRSDHNLQAKWIEEENQKWGYMEQMEFIELKLDDLTVVLKKTKNWKAAGIDQIHNFWYKKFTSLHDILTKIISDLINCRIPLPNFITTGLTYMLPKNQNTHDPSQYRPITCLPTIYKIITSCITNKIVSHLEAHNVMSEEQKGCRRNHRGCKEQLIIDSTILKHSNKFNRNLYVTYIDFKKAFDSVPHSWLVQILQTYKIHPNIIKFLKEAMSNWRTTITLTTKTSKISCDEIHIRNGIFQGDSLSPLWFCLALNPLSRILSDSKFGYQLTRDIAVSHLMYMDDIKLFSKSVKEMKEMIKITAQFSKDINMNFGLDKCKTLTIKKGKLIEKNYEISQEINISEMLEGDLYKYLGIFQAKDINHSKLKQDLTTEYIKRVNQLCKKHLYSRNLIKAINTFAIPVLTYSFGIIKWSQTDIKNLEIKTRVTLTKHNYHHPKSAIERLTLKRQLGGRGVVDLKILWQNQIHNIQNFFYNKANTSKIHAAIVEVDDNFTPLNLKNNNKEFKTIQEQINEKIKDWRRKELHGRHIHDLEQNFIDLDASNKWLQKGYLFPETEGFLIAIQDQVINTRNYKKYILKESIESDLCRKCHRMPENIQHITGACPTLVQTDYTHRHNQIVHYIHQKLAHKYNLTNTPLKPYYEYRPNPVLENEEIKIYYDRAILTDKKIHYNRPDITLVNKSSKIAYLIDVSVPNTHNLLKTITEKINKYTELKEEIIRIWNLNKVFIIPIVLSTTGVIPKHLHQSLKILDLPPLTYITMQKAAILNTCRIVRKFLESDNELTDCTD

SEQ ID NO: 31619 - protein, 1242 aa, Vanessa atalanta
MEQHSERLRIGPLPGGRRGTPGASAGCYSMRSTGGGGLSRRVPPEQLSTADNSLPVISANQNSAVSFNRPTEDVSQGAASSLANLFIMRTYLYITKLETDKVMYPKRLFDKFKTQYPDWNVSQQRIADQRRVIIRNKLISEDEIAHLKSEIAEQLRREVDLNNQTDTSLHSPHLQSQPLIQTHNTTSPTTYNITQSDASTQTNLTSLVHDTEVQYTQSTTLENPQQENIEELKNLLETALTKFEGTDPKTRPKLPRLKESKLLHDLIYTFNTHILPTFFSLDSDLLHLHTLIYCSALVIITKLGYKIKSGNIEDSSIQKKKSHKPAWEHRLENDLKKLRADIGRLTQYLKGNRSKKVVEKVEIIFKNTKLHTIHERENKKPEEYIDTLKQKLSLKSHRLARYRKALNRKQDNKLYCTNEKAFYRSLNSCTSNNTNNEEEIPNKDELKNYWAGIWEKRSDHNLHLILKWIEEENQKWGYMEQMEFIELKLDDLTVVLKKTKNWKAAGIDQIHNFWYKKFTSLHDILTKIISDLINCRIPLPNFITTGLTYMLPKNQNTHDPSQYRPITCLPTIYKIITSCITNKIVSHLEAHNVMSEEQKGCRRNHRGCKEQLIIDSTILKHSNKFNRNLYVTYIDFKKAFDSVPHSWLVQILQTYKIHPNIIKFLKEAMSNWRTTITLTTKTSKISCDEIHIRNGIFQGDSLSPLWFCLALNPLSRILSDSKFGYQLTRDITVSHLMYMDDIKLFSKSVKEMKEMIKITAQFSKDINMNFGLDKCKTLTIKKGKLIEKNYEISEEINISEMLEGDLYKYLGIFQAKDINHSKLKQDLTTEYIKRVNQLCKKHLYSRNLIKAINTFAIPVLTYSFGIIKWSQTDIKNLEIKTRVTLTKHNYHHPKSAIERLTLKRQLGGRGVVDLKILWQNQIHNIQNFFYNKANTSKIHAAIVEVDDNFTPLNLKNNNKEFKTIQEQINEKIKDWRRKELHGRHIHDLEQNFIDLDASNKWLQKGYLFPETEGFLIAIQDQVINTRNYKKYILKESIESDLCRKCHRMPENIQHITGACPTLVQTDYTHRHNQIVHYIHQKLAHKYNLTNTPLKPYYEYQPNPVSENEEIKIYYDRAILTDKKIHYNRPDITLVNKSSKIAYLIDVSVPNTHNLLKTITEKINKYTELKEEIIRIWNLNKVFIIPIVLSTTGVIPKHLHQSLKILDLPPLTYITMQKAAILNTCRIVRKFLESDNELTDCTD

SEQ ID NO: 31620 - protein, 1165 aa, Junonia coenia
MKWDKEVNLFIMRTYLYITKLETDKVMYPKRLFDEFKAKYSDWNISQQRIADQRRVIIRNKLISEDEIAQLKSEIAEQLSRESDLNNQTDISSHSPHLQSQPLIQTHNIVTSPTNYNITQSDASTQTNLTSLVHDTEVQYTQSTRFENPQQENTEELKNLLETAITKFQGTDPKTRPKLPRLKESKLLHDLIYTFNTHILPTFFSLDSDLVQLHTLIYCSALVIITKLGYKIKSGNIEDTSIQKKSNHKPAWEYRLENDVKKLRADIGRLTQYLKGNRSKKLVEKVEIIFKNTKLHTVHERENKKPEEYIDTLKQKLSLKSHRLARYRKALNRKQDNKLYCTNEKAFYRSLNSSISNNTNNEEQIPNKDELKNYWAGIWEKRNDHNLQAKWIEEENQKWGNMEQMDFIELELDDLTEVLKKTKNWKAAGIDQIHNFWYKKFTSLHDILTKIISDLINCRTPLPNFITTGVTYMLPKSQNTHDPSQYRPITCLPTIYKIITSCITNKIVSHLEAHNVMSEEQKGCRRNHRGCKEQLIIDSTILKHSNKFNRNLYVTYIDFKKAFDSVPHSWLVQILQTYKIHPNIVKFLKEAMSNWRTTITLTTKTSKICCDEIHIRNGIFQGDSLSPLWFCLALNPLSRILSDSKFGYQLTRDTAVSHLMYMDDIKLFSKSVKEMKEMIKITAQFSKDINMNFGLDKCKTLTIKKGKLIEKNYEISEEINISGMLEGDLYKYLGILQAKDINHSKLKQDLTTEYIKRVNQLCKKQLYSRNLIKAINTFAIPVLTYSFGVIKWSQTDIKNLEIKTRVTLTKHNYHHPKSAIERLTLKRQLGGRGVVDLKILWQNQIHNIQIFFNNKAKTSKIHAATVEVDDNFTPLNLKNNNKEFKTIQEQINEKIKDWRRKELHGRHIHDLEQNFIDLDASNKWLQKGYLFPETEGFLIAIQDQVINTRNYKKYILKESIESDLCRKCHRMPENIQHITGACPTLVQTDYTHRHNQIVHYLHQKLAHKYNFTNTPLKPYYEYQPNAVLENEKIKIYYDRAILTDKTIHYNRPDITLVNKSSKTAYLIDVSVPNTHNLLKTITEKINKYTELKEEIIRIWNLSKVFIVPIVLSTTGVIPKHLHQSLKILDLPPLTYITMQKAAILNTCRIVRKFLESDNELTDCTD

SEQ ID NO: 31621 - protein, 1019 aa, Junonia stemosa
MRSTGGGGLSRRVPPEQLSTAEHSLPEIVTSQNSDLNFNRPTEDVSQGAASSQPETTKAGKPRVRMKWDKEVNLFIMRTYLYITKLETDKVMYPKRLFDKFKIHYPDWSVTQQRIADQRRVIIRNKLLSEDEITQLKTEIAEQLRREDEATQTNALSFSSHLHEPLTHTHNIITTSTTSTTTQSDACTQTISTPVDSNTELEYTLTTRSEVSQEKNIKDLSNHLQIELTKFNGTDPKSRPKLPRLKGSKILYSLIHTFNTHILLKCFSLDSEVKKTKNWKAAGIDQIHNFWYKKFTSLHKILSNIISDLINGKAPLPNFVTTGLTYMLPKSQNTHDPSQYRPITCLPTIYKIITACITNKIISHLETHNIISEEQKGCRRNHRGCKEQLIIDSTVLKHANTNNRNIYITYIDFKKAFDSVPHSWLIQILHIYKIDPNIIRFLEAAMSNWKTTITLTTKTTKISCEEIRISNGIFQGDSLSPLWFCLALNPLSRLLANSKCGYQLTRGTAVSHLMYMDDIKLFSKSEKEMEKMLRITAQFSKDINMNFGLDKCKTLTIKKGKLIEKSYEIVEGLNINGMVGDELYKYLGIMQAKDINHTKLKKDLTTEYIKRVNLLCKKQLYSRNLIKALNTFAIPVLTYSFGIIKWSQTDINKLEIKTRTILTKYNYHHPKSAIERVTLKRHVGGRGLVDLKILWQNQIQNIRNFFYSKIHDSQIHAATVAVDDNFTPLNLKNKEKQFKTTQEQINEKISNWRKKELHGRHIHDLEQSHVDLEASNKWLIKGYLFPETEGFLISIQDQVIKTRNYKKYILKEAIETDICRKCHRLPETIQHITGACPTLVQTDYTHRHNQIAHYIHQKLALKYKLINGNPKPYYQYTPKPVLESNEVKIYFDRGILTDKTIHYNRPDITIVNKSSKIAYLIDISVPNTHNLQKTITEKINKYTELKEEIIRLWNLNKVYIVPLVLSTTGVIPKHLHHSLKILDLPPLTYITMQKAAILNTCRIVRKFLDSENEPTDCND

SEQ ID NO: 31622 - protein, 1259 aa, Junonia neildi
MEQHSQRLRIGPLPGGRRGTPGASAGCYSMRSTGGGGLSRRVPPEQLSTADNSLPVISASQNSAVSFNRPTEDVSQGAASSQPATTKAGKPRVRMKWDKEVNLFIMRTYLYITKLETDKVMYPKRLFDEFKAKYPDWNVSQQRIADQRRVIIRNKLISEDEIAQLKSEIAEQLSRESDLNNQTDISSHSPHLQSQPLIQTHNIVTSPTNYNITQSDASTQTNLTSLVHDTEVQYTQSTRFENPQQENTEELKNLLETAITKFQGTDPKTRPKLPRLKESKLLHDLIYTFNTHILPTFFSLDSDLVQLHTLIYCSALVIITKLGYKIKSGNIEDTSIQKKSNHKPAWEYRLENDVKKLRADIGRLTQYLKGNRSKKVVEKVEIIFKNTKLHTVHERENKKPEEYIDTLKQKLSLKSHRLARYRKALNRKQDNKLYCTNEKAFYRSLNSSTSNNTNNEEQIPNKDELKNYWAGIWEKRNDHNLQAKWIEEENQKWGNMEQMDFIELELDDLTEVLKKTKNWKAAGIDQIHNFWYKKFTSLHDILTKIISDLINCRTPLPNFITTGVTYMLPKSQNTHDPSQYRPITCLPTIYKIITSCITNKIVSHLEAHNVMSEEQKGCRRNHRGCKEQLIIDSTILKHSNKFNRNLYVTYIDFKKAFDSVPHSWLVQILQTYKIHPNIVKFLKEAMSNWRTTITLTTKTSKICCDEIHIRNGIFQGDSLSPLWFCLALNPLSRILSDSKFGYQLTRDTAVSHLMYMDDIKLFSKSVKEMKEMIKITAQFSKDINMNFGLDKCKTLTIKKGKLIEKNYEISEEINISGMLEGDLYKYLGILQAKDINHSKLKQDLTTEYIKRVNQLCKKQLYSRNLIKAINTFAIPVLTYSFGVIKWSQTDIKNLEIKTRVTLTKHNYHHPKSAIERLTLKRQVGGRGVVDLKILWQNQIHNIQNFFYNKAKTSKIHAATVEVDDNFTPLNLKNNNKEFKTIQEQINEKIKDWRRKELHGRHIHDLEQNFIDLDASNKWLQKGYLFPETEGFLIAIQDQVINTRNYKKYILKESIESDLCRKCHRMPENIQHITGACPTLVQTDYTHRHNQIVHYLHQKLAHKYNFTNTPLKPYYEYQPNPVLENEKIKIYYDRAILTDKTIHYNRPDITLVNKSSKTAYLIDVSVPNTHNLLKTITEKINKYTELKEEIIRIWNLSKVFIVPIVLSTTGVIPKHLHQSLKILDLPPLTYITMQKAAILNTCRIVRKFLESDNELTDCTD

SEQ ID NO: 31623 - protein, 1230 aa, Junonia neildi
MRSTGGGGLSRRVPPEQLSTADNSLPVISASQNSAVSFNRPTEDVSQGAASSQPATTKAGKPRVRMKWDKEVNLFIMRTYLYITKLETDKVMYPKRLFNEFKAKYPDWNVSQQRIADQRRVIIRNKLISEDEIAQLKSEIAEQLSRESDLNNQTDISSHSPHLQSQPLIQTHNIVTSPTNYNITQSDASTQTNLTSLVHDTEVQYTQSTRFENPQQENTEELKNLLETAITKFQGTDPKTRPKLPRLKESKLLHDLIYTFNTHILPTFFSLDSDLVQLHTLIYCSALVIITKLGYKIKSGNIEDTSIQKKSNHKPAWEYRLENDIKKLRADIGRLTQYLKGNRSKKVVEKVEIIFKNTKLHTVHERENKKPEEYIDTLKQKLSLKSHRLARYRKALNRKQDNKLYCTNEKAFYRSLNSSTSNNTNNEEQIPNKDELKNYWAGIWEKRNDHNLQAKWIEEENQKWGDMEQMDFIELELDDLTEVLKKTKNWKAAGIDQIHNFWYKKFTSLHDILTKIISDLINCRTPLPNFITTGVTYMLPKSQNTHDPSQYRPITCLPTIYKIITSCITNKIVSHLEAHNVMSEDQKGCRRNHRGCKEQLIIDSTILKHSNKFNRNLYVTYIDFKKAFDSVPHSWLVQILQTYKIHPNIVKFLKEAMSNWRTTITLTTKTSKICCDEIHIRNGIFQGDSLSPLWFCLALNPLSRILSDSKFGYQLTRDTAVSHLMYMDDIKLFSKSVKEMKEMIKITAQFSKDINMNFGLDKCKTLTIKKGKLIEKNYEISEEINISGMLEGDLYKYLGILQAKDINHSKLKQDLTTEYIKRVNQLCKKQLYSRNLIKAINTFAIPVLTYSFGVIKWSQTDIKNLEIKTRVTLTKHNYHHPKSAIERLTLKRQLGGRGVVDLKILWQNQIHNIQNFFYNKAKTSKIHAATVEVDDNFTPLNLKNNNKEFKTIQEQINEKIKDWRRKELHGRHIHDLEQNFIDLDASNKWLQKGYLFPETEGFLIAIQDQVINTRNYKKYILKESIESDLCRKCHRMPENIQHITGACPTLVQTDYTHRHNQIVHYLHQKLAHKYNFTNTPLKPYYEYQPNPVLENEKIKIYYDRAILTDKTIHYNRPDITLVNKSSKTAYLIDVSVPNTHNLLKTITEKINKYTELKEEIIRIWNLSKVFIVPIVLSTTGVIPKHLHQSLKILDLPPLTYITMQKAAILNTCRIVRKFLESDNELTDCTD

SEQ ID NO: 31624 - protein, 764 aa, Junonia vestina
MEQMDFIELELDNLTEVLKKTKNWKAAGIDQIHNFWYKKFTSLHDILTKIISDLINCRTPLPNFITTGLTYMLPKNQNTHDPSQYRPITCLPTIYKIITSCITNKIVSHLEAHNVMSEEQKGCRRNHRGCKEQLIIDSNILKHSNKFNRNLYVTYIDFKKAFDSVPHSWLVQILQTYKIHPNIIKFLKEAMSNWRTTITLTTKTSKICCDEIHIRNGIFQGDSLSPLWFCLALNPLSRILSESKFGYQLTRDTAVSHLMYMDDIKLFSKSVKEMKEMIKITAQFSKDINMNFGLDKCKTLTIKKGKLVEKNYEISEEINISGMLEGDLYKYLGILQAKDINHSKLKQDLTTEYIKRVNQLCKKQLYSRNLIKAINTFAIPVLTYSFGVIKWSQTDIKNLEIKTRVTLTKHNYHHPKSAIERLTLKRQLGGRGVVDLKILWQNQIHNIQNFFYNKAKTSKIHAATVEVDDNFTPLNLKNNNKEFKTIQEQINEKIKDWRRKELHGRHIHDLEQNFIDLDASNKWLQKGYLFPETEGFLIAIQDQVINTRNYKKYILKESIESDLCRKCHRMPENIQHITGACPTLVQTDYTHRHNQIVHYIHQKLAHKYKFTNTPLKPYYEYQPNPVLENEEIKIYYDRAILTDKTIHYNRPDITLVNKSSKTAYLIDVSVPNTHNLLKTITEKINKYTELKEEIIRIWNLNKVFIVPIVLSTTGVIPKHLHQSLKILDLPPLTYITMQKAAILNTCRIVRKFLESDNELTDCTD

SEQ ID NO: 31625 - protein, 1226 aa, Junonia zonalis
MRSTGGGGLSRRVPPEQLSTAEHSLPEIVTSQNSDLNFNRPTEDVSQGAASSQPETTKAGKPRVRMKWDKEVNLFIMRTYLYITKLETDKVMYPKRLFDKFKMHYPDWNVTQQRIADQRRVIIRNKLLSEDEITQLKTEIAEQLRREDEATQTNALSFSSHLQEPLTQTHNIITTSTTSTTTQSDACTQTISTPVDSNTELEYTLTTRSEVSQEENIKELSNLLQIELTKFNGTDPKSRPKLPRLKESKILYSLIHTFNTHILPKCFSLDSDLIHIHTLIYCTALVITTRLGYKIKLGATEDISKENNYKPAWEHRLESDIRKLRADIGRLTQYIKGNRSKQIIEKVEIIFKNTKLHTTHEQENKRPEEYIDTLKQKLSLKAHRLARYKKALRRKIDNKLYCTNEKAFYRSLNNTITNNSQNENQLPSKDNLKNYWAGIWEKRSGHNLQAKWIEEENQKWDSTEKMEFKEISLDDLTNVLKKTKNWKAAGIDQIHNFWYKKFTSLHKILSNIISDLINGKAPLPNFVTTGLTYMLPKSQNTHDPSQYRPITCLPTIYKIITACITNKIISHLETHNIISEEQKGCRRNHRGCKEQLIIDSTVLKHANTNNRNIYITYIDFKKAFDSVPHSWLIQILHTYKIDPTIIRFLEAAMSNWKTTITLTTKTTKISCEEIRISNGIFQGDSLSPLWFCLALNPLSRLLANSKCGYQLTRGTAVSHLMYMDDIKLFSKSEKEMEKMIRITAQYSKDINMNFGLDKCKTLTIKKGKLIEKSYEIDEGLNINGMVGDELYKYLGIMQAKDINHTKLKKDLTTEYIKRVNLLCKKQLYSRNLIKALNTFAIPVLTYSFGIIKWSQTDINKLEIKTRTILTKYNYHHPKSAIERVTLKRHVGGRGLVDLKILWQNQIHNIRNFFYSKIHNSQIHAATVAVDDNFTPLNLKNKEKQFKTTQEQINEKISNWRKKELHGRHIHDLEQSHVDLEASNKWLIKGYLFPETEGFLISIQDQVIKTRNYKKYILKETIETDICRKCHRLPETIQHITGACPTLVQTDYTHRHNQIAHYIHQKLALKYKLINGNPKPYYQYTPNPVLESNEVKIYFDRGILTDKTIHYNRPDITIVNKSSKIAYLIDISVPNTHNLQKTITEKINKYTELKEEIIRIWNLNKVYIVPLVLSTTGVIPKHLHHSLKILDLPPLTYITMQKAAILNTCRIVRKFLDSENEPTDCTD

SEQ ID NO: 31626 - protein, 1259 aa, Junonia pacoma
MEQHSERLRIGPLPGGRRGTPGASAGCYSMRSTGGGGLSRRVPPEQLSTADNSLPVISASQNSAVSFNRPTEDVSQGAASSQPATTKAGKPRVRMKWDKEVNLFIMRTYLYITKLETDKVMYPKRLFDEFKAKYPDWNVSQQRIADQRRVIIRNKLISEDEIVQLKSEIAEQLSRESDLNNQTDISSHSPHLQSQPLIQTHNIVTSPTNYNITQSDASTQTNLTSLVHDTEVQYTQSTRFENPQQENTEELKNLLETAITKFQGTDPKTRPKLPRLKESKLLHDLIYTFNTHILPTFFSLDSDLVQLHTLIYCSALVIITKLGYKIKSGNIEDTSIQKKSNHKPAWEYRLENDVKKLRADIGRLTQYLKGNRSKKVVEKVEIIFKNTKLHTVHERENKKPEEYIDTLKQKLSLKSHRLARYRKALNRKQDNKLYCTNEKAFYRSLNSSTSNNTNNEEQIPNKDELKNYWAGIWEKRNDHNLQAKWIEEENQKWGNMEQMDFIELELDDLTEVLKKTKNWKAAGIDQIHNFWYKKFTSLHDILTKIISDLINCRTPLPNFITTGVTYMLPKSQNTHDPSQYRPITCLPTIYKIITSCITNKIVSHLEAHNVMSEEQKGCRRNHRGCKEQLIIDSTILKHSNKFNRNLYVTYIDFKKAFDSVPHSWLVQILQTYKIHPNIVKFLEEAMSNWRTTITLTTKTSKICCDEIHIRNGIFQGDSLSPLWFCLALNPLSRILSDSKFGYQLTRDTAVSHLMYMDDIKLFSKSVKEMKEMIKITAQFSKDINMNFGLDKCKTLTIKKGKLIEKNYEISEEINISGMLEGDLYKYLGILQAKDINHSKLKQDLTTEYIKRVNQLCKKQLYSRNLIKAINTFAIPVLTYSFGVIKWSQTDIKNLEIKTRVTLTKHNYHHPKSAIERLTLKRQLGGRGVVDLKILWQNQIHNIQNFFYNKAKTSKIHAATVEVDDNFTPLNLKNNNKEFKTIQEQINEKIKDWRRKELHGRHIHDLEQNFIDLDASNKWLQKGYLFPETEGFLIAIQDQVINTRNYKKYILKESIESDLCRKCHRMPENIQHITGACPTLVQTDYTHRHNQIVHYLHQKLAHKYNFTNTPLKPYYEYQPNAVLENEKIKIYYDRAILTDKTIHYNRPDITLVNKSSKTAYLIDVSVPNTHNLLKTITEKINKYTELKEEIIRIWNLSKVFIVPIVLSTTGVIPKHLHQSLKILDLPPLTYITMQKAAILNTCRIVRKFLESDNELTDCTD

SEQ ID NO: 31627 - protein, 1259 aa, Junonia evarete
MEQHSQRLRIGPLPGGRRGTPGASAGCYSMRSTGGGGLSRRVPPEQLSTADNSLPVISASQNSAVSFNRPTEDVSQGAASSQPATTKAGKPRVRMKWDKEVNLFIMRTYLYITKLETDKVMYPKRLFDEFKAKYPDWNVSQQRIADQRRVIIRNKLISEDEIAQLKSEIAEQLSRESDLNNQTDISSHSPHLQSQPLIQTHNIVTSPTNYNITQSDASTQTNLTSLVHDTEVQYTQSTRFENPQQENTEELKNLLETAITKFQGTDPKTRPKLPRLKESKLLHDLIYTFNTHILPTFFSLDSDLVQLHTLIYCSALVIITKLGYKIKSGNIEDTSIQKKSNHKPAWEYRLENDVKKLRADIGRLTQYLKGNRSKKVVEKVEIIFKNTKLHTVHERENKKPEEYIDTLKQKLSLKSHRLARYRKALNRKQDNKLYCTNEKAFYRSLNSSTSNNTNNEEQIPNKDELKNYWAGIWEKRNDHNLQAKWIEEENQKWGNMEQMDFIELELDDLTEVLKKTKNWKAAGIDQIHNFWYKKFTSLHDILTKIISDLINCRTPLPNFITTGVTYMLPKSQNTHDPSQYRPITCLPTIYKIITSCITNKIVSHLEAHNVMSEEQKGCRRNHRGCKEQLIIDSTILKHSNKFNRNLYVTYIDFKKAFDSVPHSWLVQILQTYKIHPNIVKFLEEAMSNWRTTITLTTKTSKICCDEIHIRNGIFQGDSLSPLWFCLALNPLSRILSDSKFGYQLTRDTAVSHLMYMDDIKLFSKSVKEMKEMIKITAQFSKDINMNFGLDKCKTLTIKKGKLIEKNYEISEEINISGMLEGDLYKYLGILQAKDINHSKLKQDLTTEYIKRVNQLCKKQLYSRNLIKAINTFAIPVLTYSFGVIKWSQTDIKNLEIKTRVTLTKHNYHHPKSAIERLTLKRQLGGRGVVDLKILWQNQIHNIQNFFYNKAKTSKIHAATVEVDDNFTPLNLKNNNKEFKTIQEQINEKIKDWRRKELHGRHIHDLEQNFIDLDASNKWLQKGYLFPETEGFLIAIQDQVINTRNYKKYILKESIESDLCRKCHRMPENIQHITGACPTLVQTDYTHRHNQIVHYLHQKLAHKYNFTNTPLKPYYEYQPNPVLENEKIKIYYDRAILTDKTIHYNRPDITLVNKSSKTAYLIDVSVPNTHNLLKTITEKINKYTELKEEIIRIWNLSKVFIVPIVLSTTGVIPKHLHQSLKILDLPPLTYITMQKAAILNTCRIVRKFLESDNELTDCTD

SEQ ID NO: 31628 - protein, 1255 aa, Junonia neildi
MEQHSERLRIGPLPGGRRGTPGASAGCYSMRSTGGGGLSRRVPPEQLSTAEHSLPEIVTSQNSDLNFNRPTEDVSQGAASSQPETTKAGKPRVRMKWDKEVNLFIMRTYLYITKLETDKVMYPKRLFDKFKMHYPDWNVTQQRIADQRRVIIRNKLLSEDEITQLKTEIAEQLRREDEATQTNALSFSSHLHEPLTHTHNIITTSTTSTTTQSDACTQTISTPVDSNTELEYTLTTRSEVSQEENIKELSNLLQIELTKFNGTDPKSRPKLPRLKESKILYSLIHTFNTHILPKCFSLDSDLIHIHTLIYCTALVITTRLGYKIKLGATEDISKENNYKPAWEHRLESDIKKLRADIGRLTQYIKGNRSKQIIEKVEIIFKNTKLHTTHEQENKRPEEYIDTLKQKLSLKAHRLARYKKALRRKIDNKLYCTNEKAFYRSLNNNITNNSQNENQLPSKDNLKNYWAGIWEKRSGHNLQAKWIEEENQKWDSTEKMEFKEISLDDLTNVLKKTKNWKAAGIDQIHNFWYKKFTSLHKILSNIISDLINGKAPLPNFVTTGLTYMLPKSQNTHDPSQYRPITCLPTIYKIITACITNKIISHLETHNIISEEQKGCRRNHRGCKEQLIIDSTVLKHANTNNRNIYITYIDFKKAFDSVPHSWLIQILHTYKIDPTIIRFLEAAMSNWKTTITLTTKTTKISCEEIRISNGIFQGDSLSPLWFCLALNPLSRLLANSKCGYQLTRGTAVSHLMYMDDIKLFSKSEKEMEKMIRITAQYSKDINMNFGLDKCKTLTIKKGKLIEKSYEIDEGLNINGMVGDELYKYLGIMQAKDINHTKLKKDLTTEYIKRVNLLCKKQLYSRNLIKALNTFAIPVLTYSFGIIKWSQTDINKLEIKTRTILTKYNYHHPKSAIERVTLKRHVGGRGLVDLKILWQNQIHNIRNFFYSKIHNSQIHAATVAVDDNFTPLNLKNKEKQFKTTQEQINEKISNWRKKELHGRHIHDLEQSHVDLEASNKWLIKGYLFPETEGFLISIQDQVIKTRNYKKYILKEAIETDICRKCHRLPETIQHITGACPTLVQTDYTHRHNQIAHYIHQKLALKYKLINGNPKPYYQYTPNPVLESNEVKIYFDRGILTDKTIHYNRPDITIVNKSSKIAYLIDISVPNTHNLQKTITEKINKYTELKEEIIRIWNLNKVYIVPLVLSTTGVIPKHLHHSLKILDLPPLTYITMQKAAILNTCRIVRKFLDSENEPTDCTD

SEQ ID NO: 31629 - protein, 1259 aa, Junonia litoralis
MEQHSQRLRIGPLPGGRRGTPGASAGCYSMRSTGGGGLSRRVPPEQLSTADNSLPVISASQNSAVSFNRPTEDVSQGAASSQPATTKAGKPRVRMKWDKEVNLFIMRTYLYITKLETDKVMYPKRLFDEFKAKYPDWNVSQQRIADQRRVIIRNKLISEDEIAQLKSEIAEQLSRESDLNNQTDISSHSPHLQSQPLIQTHNIVTSPTNYNITQSDASTQTNLTSLVHDTEVQYTQSTRFENPQQENTEELKNLLETAITKFQGTDPKTRPKLPRLKESKLLHDLIYTFNTHILPTFFSLDSDLVQLHTLIYCSALVIITKLGYKIKSGNIEDTSIQKKSNHKPAWEYRLENDVKKLRADIGRLTQYLKGNRSKKVVEKVEIIFKNTKLHTVHERENKKPEEYIDTLKQKLSLKSHRLARYRKALNRKQDNKLYCTNEKAFYRSLNSSTSNNTNNEEQIPNKDELKNYWAGIWEKRNDHNLQAKWIEEENQKWGDMEQMDFIELELDDLTEVLKKTKNWKAAGIDQIHNFWYKKFTSLHDILTKIISDLINCRTPLPNFITTGVTYMLPKSQNTHDPSQYRPITCLPTIYKIITSCITNKIVSHLEAHNVMSEEQKGCRRNHRGCKEQLIIDSTILKHSNKFNRNLYVTYIDFKKAFDSVPHSWLVQILQTYKIHPNIVKFLEEAMSNWRTTITLTTKTSKICCDEIHIRNGIFQGDSLSPLWFCLALNPLSRILSDSKFGYQLTRDTAVSHLMYMDDIKLFSKSVKEMKEMIKITAQFSKDINMNFGLDKCKTLTIKKGKLIEKNYEISEEINISGMLEGDLYKYLGILQAKDINHSKLKQDLTTEYIKRVNQLCKKQLYSRNLIKAINTFAIPVLTYSFGVIKWSQTDIKNLEIKTRVTLTKHNYHHPKSAIERLTLKRQVGGRGVVDLKILWQNQIHNIQNFFYNKAKTSKIHAATVEVDDNFTPLNLKNNNKEFKTIQEQINEKIKDWRRKELHGRHIHDLEQNFIDLDASNKWLQKGYLFPETEGFLIAIQDQVINTRNYKKYILKESIESDLCRKCHRMPENIQHITGACPTLVQTDYTHRHNQIVHYLHQKLAHKYNFTNTPLKPYYEYQPNPVLENEKIKIYYDRAILTDKTIHYNRPDITLVNKSSKTAYLIDVSVPNTHNLLKTITEKINKYTELKEEIIRIWNLSKVFIVPIVLSTTGVIPKHLHQSLKILDLPPLTYITMQKAAILNTCRIVRKFLESDNELTDCTD

SEQ ID NO: 31630 - protein, 1226 aa, Junonia litoralis
MRSTGGGGLSRRVPPEQLSTAEHSLPEIVTSQNSDLNFNRPTEDVSQGAASSQPETTKAGKPRVRMKWDKEVNLFIMRTYLYITKLETDKVMYPKRLFDKFKIHYPDWNVTQQRIADQRRVIIRNKLLSEDEITQLKTEIAEQLRREDEATQTNALSFSSHLQEPLTHTHNIITTSTTSTTTQSDACTQTISTPVDSNTELEYTLTTRSEVSQEENIKELSNLLQIELTKFNGTDPKSRPKLPRLKESKILYSLIHTFNTHILPKCFSLDSDLIHIHTLIYCTALVITTRLGYKIKLGATEDISKENNYKPAWEHRLESDIKKLRADIGRLTQYIKGNRSKQIIEKVEIIFKNTKLHTTHEQENKRPEEYIDTLKQKLSLKAHRLARYKKALRRKIDNKLYCTNEKAFYRSLNNTITNNSQNENQLPSKDNLKNYWAGIWEKRSGHNLQAKWIEEENQKWDSTEKMEFKEISLDDLTNVLKKTKNWKAAGIDQIHNFWYKKFTSLHKILSNIISDLINGKAPLPNFVTTGLTYMLPKSQNTHDPSQYRPITCLPTIYKIITACITNKIISHLETHNIISEEQKGCRRNHRGCKEQLIIDSTVLKHANTNNRNIYITYIDFKKAFDSVPHSWLIQILHTYKIDPNIIRFLEAAMSNWKTTITLTTKTTKISCEEIRISNGIFQGDSLSPLWFCLALNPLSRLLANSKCGYQLTRGTAVSHLMYMDDIKLFSKSEKEMEKMIRITAQYSKDINMNFGLDKCKTLTIKKGKLIEKSYEIDEGLNINGMVGDELYKYLGIMQAKDINHTKLKKDLTTEYIKRVNLLCKKQLYSRNLIKALNTFAIPVLTYSFGIIKWSQTDINKLEIKTRTILTKYNYHHPKSAIERVTLKRHVGGRGLVDLKILWQNQIHNIRNFFYSKIHNSQIHAATVAVDDNFTPLNLKNKEKQFKTTQEQINEKISNWRKKELHGRHIHDLEQSHVDLEASNKWLIKGYLFPETEGFLISIQDQVIKTRNYKKYILKEAIETDICRKCHRLPETIQHITGACPTLVQTDYTHRHNQIAHYIHQKLALKYKLINGNPKPYYQYTPNPVLESNEVKIYFDRGILTDKTIHYNRPDITIVNKSSKIAYLIDISVPNTHNLQKTITEKINKYTELKEEIIRLWNLNKVYIVPLVLSTTGVIPKHLHHSLKILDLPPLTYITMQKAAILNTCRIVRKFLDSENEPTDCTD

SEQ ID NO: 31631 - protein, 764 aa, Junonia evarete
MEQMDFIELELDDLTEVLKKTKNWKAAGIDQIHNFWYKKFTSLHDILTKIISDLINCRTPLPNFITTGVTYMLPKSQNTHDPSQYRPITCLPTIYKIITSCITNKIVSHLEAHNVMSEEQKGCRRNHRGCKEQLIIDSTILKHSNKFNRNLYVTYIDFKKAFDSVPHSWLVQILQTYKIHPNIVKFLKEAMSNWKTTITLTTKTSKICCDEIHIRNGIFQGDSLSPLWFCLALNPLSRILSDSKFGYQLTRDTAVSHLMYMDDIKLFSKSVKEMKEMIKITAQFSKDINMNFGLDKCKTLTIKKGKLIEKNYEISEEINISGMLEGDLYKYLGILQAKDINHSKLKQDLTTEYIKRVNQLCKKQLYSRNLIKAINTFAIPVLTYSFGVIKWSQTDIKNLEIKTRVTLTKHNYHHPKSAIERLTLKRQLGGRGVVDLKILWQNQIHNIQNFFYNKAKTSKIHAATVEVDDNFTPLNLKNNNKEFKTIQEQINEKIKDWRRKELHGRHIHDLEQNFIDLDASNKWLQKGYLFPETEGFLIAIQDQVINTRNYKKYILKESIESDLCRKCHRMPENIQHITGACPTLVQTDYTHRHNQIVHYLHQKLAHKYNFTNTPLKPYYEYQPNPVLENEKIKIYYDRAILTDKTIHYNRPDITLVNKSSKTAYLIDVSVPNTHNLLKTITEKINKYTELKEEIIRIWNLSKVFIVPIVLSTTGVIPKHLHQSLKILDLPPLTYITMQKAAILNTCRIVRKFLESDNELTDCTD

SEQ ID NO: 31632 - protein, 1226 aa, Junonia genoveva
MRSTGGGGLSRRVPPEQLSTAEHSLPEIVTSQNSDLNFNRPTEDVSQGAASSQPETTKAGKPRVRMKWDKEVNLFIMRTYLYITKLETDKVMYPKRLFDKFKIHYPDWKVTQQRIADQRRVIIRNRLLSEDEITQLKTEIAEQLRREDEATQTNALSFSSHLHEPLTHTHDIITTSTTSTTTQSDACTQTISTPVDSNTELEYTLTTRSEVSQEENIKELSNLLQIELTKFNGTDPKSRPKLPRLKESKILYSLIHTFNTHILPKCFSLDSDLIHIHTLIYCTALVITTRLGYKIKLGATEDISKENNYKPAWEHRLESDIKKLRADIGRLTQYIKGNRSKQIIEKVEIIFKNTKLHTTHEQENKRPEEYIDTLKQKLSLKAHRLARYKKALRRKIDNKLYCTNEKAFYRSLNNNITNNSQNENQLPSKDNLKNYWAGIWEKRSGHNLQAKWIEEENQKWDSTEKMEFKEISLDDLTNVLKKTKNWKAAGIDQIHNFWYKKFTSLHKILSNIISDLINGKAPLPNFVTTGLTYMLPKSQNTHDPSQYRPITCLPTIYKIITACITNKIISHLETHNIISEEQKGCRRNHRGCKEQLIIDSTVLKHANTNNRNIYITYIDFKKAFDSVPHSWLIQILHTYKIDPTIIRFLEAAMSNWKTTITLTTKTTKISCEEIRISNGIFQGDSLSPLWFCLALNPLSRLLANSKCGYQLTRGTAVSHLMYMDDIKLFSKSEKEMEKMIRITAQYSKDINMNFGLDKCKTLTIKKGKLIEKSYEIDEGLNINGMVGDELYKYLGIMQAKDINHTKLKKDLTTEYIKRVNLLCKKQLYSRNLIKALNTFAIPVLTYSFGIIKWSQTDINKLEIKTRTILTKYNYHHPKSAIERVTLKRHVGGRGLVDLKILWQNQIHNIRNFFYSKIHNSQIHAATVAVDDNFTPLNLKNKEKQFKTTQEQINEKISNWRKKELHGRHIHDLEQSHVDLEASNRWLIKGYLFPETEGFLISIQDQVIKTRNYKKYILKEAIETDICRKCHRLPETIQHITGACPTLVQTDYTHRHNQIAHYIHQKLALKYKLINGNPKPYYQYTPNPVLESNEVKIYFDRGILTDKTIHYNRPDITIVNKSSKIAYLIDISVPNTHNLQKTITEKINKYTELKEEIIRIWNLNKVYIVPLVLSTTGVIPKHLHHSLKILDLPPLTYITMQKAAILNTCRIVRKFLDSENEPTDCTD

SEQ ID NO: 31633 - protein, 1259 aa, Vanessa atalanta
MEQHSERLRIGPLPGGRRGTPGASAGCYSMRSTGGGGLSRRVPPEQLSTADNSLPVISANQNSAVSFNRPTEDVSQGAASSQPATTKAGKPRVRMKWDKEVNLFIMRTYLYITKLETDKVMYPKRLFDKFKTQYPDWNVSQQRIADQRRVIIRNKLISEDEIAHLKSEIAEQLRREVDLNNQTDTSLHSPHLQSQPLIQTHNIVTSPTTYNITQSDASTQTNLTSLVHDTEVQYTQSTTLENPQQENIEELKNLLETALTKFEGTDPKTRPKLPRLKESKLLHDLIYTFNTHILPTFFSLDSDLLHLHTLIYCSALVIITKLGYKIKSGNIEDSSIQKKKSHKPAWEHRLENDIKKLRADIGRLTQYLKGNRSKKVVEKVEIIFKNTKLHTIHERENKKPEEYIDTLKQKLSLKSHRLARYRKALNRKQDNKLYCTNEKAFYRSLNSCTSNNTNNEEQIPNKDELKNYWAGIWEKRSDHNLQAKWIEEENQKWGYMEQMEFIELKLDDLTVVLKKTKNWKAAGIDQIHNFWYKKFTSLHDILTKIISDLINCRIPLPNFITTGLTYMLPKNQNTHDPSQYRPITCLPTIYKIITSCITNKIVSHLEAHNVMSEEQKGCRRNHRGCKEQLIIDSTILKHSNKFNRNLYVTYIDFKKAFDSVPHSWLVQILQTYKIHPNIIKFLKEAMSNWRTTITLTTKTSKICCDEIHIRNGIFQGDSLSPLWFCLALNPLSRILSDSKFVYQLTRDIAVSHLMYMDDIKLFSKSVKEMKEMIKITAQFSKDINMNFGLDKCKTLTIKKGKLIEKNYEISEEINISEMLEGDLYKYLGIFQAKDINHSKLKQDLTTEYIKRVNQLCKKHLYSRNLIKAINTFAIPVLTYSFGIIKWSQTDIKNLEIKTRVTLTKHNYHHPKSAIERLTLKRKLGGRGVVDLKILWQNQIHNIQNFFYNKANTSKIHAAIVEVDDNFTPLNLKNNNKEFKTIQEQINEKIKDWRRKELHGRHIHDLEQNFIDLDASNKWLQKGYLFPETEGFLIAIQDQVINTRNYKKYILKESIESDLCRKCHRMPENIQHITGACPTLAQTDYTHRHNQIVHYIHQKLAHKYNLTNTPLKPYYEYQPNPVLENEEIKIYYDRAILTDKKIHYNRPDITLVNKSSKIAYLIDVSVPNTHNLLKTITEKINKYTELKEEIIRIWNLNKVFIIPIVLSTTGVIPKHLHQSLKILDLPPLTYITMQKAAILNTCRIVRKFLESDNELTDCTD

SEQ ID NO: 31634 - protein, 1258 aa, Vanessa atalanta
MEQHSERLRIGPLPGGRRGTPGASAGCYSMRSTGGGGLSRRVPPEQLSTADNSLPVISANQNSAVSFNRPTEDVSQGAASSQPATTKAGKPRVRMKWDKEVNLFIMRTYLYITKLETDKVMYPKRLFDKFKTQYPDWNVSQQRIADQRRVIIRNKLISEDEIAHLKSKIAEQLRREVDLNNQTDTSLHSPHLQSQPLIQTHNTTSPTTYNITQSDASTQTNLTSLVHDTEVQYTQSTTLENPQQENIEELKNLLETALTKFEGTDPKTRPKLPRLKESKLLHDLIYTFNTHILPTFFSLDSDLLHLHTLIYCSALVIITKLGYKIKSGNIEDSSIQKKKSHKPAWEHRLENDIKKLRADIGRLTQYLKGNRSKKVVEKVEIIFKNTKLHTIHERENKKPEEYIDTLKQKLSLKSHRLARYRKALNRKQDNKLYCTNEKAFYRSLNSCTSNNTNNEEEIPNKDELKNYWAGIWEKRSDHNLQAKWIEEENQKWGYMEQMEFIELKLDDLTVVLKKTKNWKAAGIDQIHNFWYKKFTSLHDILTKIISDLINCRIPLPNFITTGLTYMLPKNQNTHDPSQYRPITCLPTIYKIITSCITNKIVSHLEAHNVMSDEQKGCRRNHRGCKEQLIIDSTILKHSNKFNRNLYVTYIDFKKAFDSVPHSWLVQILQTYKIHPNIIKFLKEAMSNWRTTITLTTKTSKISCDEIHIRNGIFQGDSLSPLWFCLALNPLSRILSDSKFGYQLTRDIAVSHLMYMDDIKLFSKSVKEMKEMIKITAQFSKDINMNFGLDKCKTLTIKKGKLIEKNYEISQEINISEMLEGDLYKYLGIFQAKDINHSKLKQDLTTEYIKRVNQLCKKHLYSRNLIKAINTFAIPVLTYSFGIIKWSQTDIKNLEIKTRVTLTKHNYHHPKSAIERLTLKRQLGGRGVVDLKILWQNQIHNIQNFFYNKANTSKIHAAIVEVDDNFTPLNLKNNNKEFKTIQEQINEKIKDWRRKELHGRHIHDLEQNFIDLDASNKWLQKGYLFPETEGFLIAIQDQVINTRNYKKYILKESIESDLCRKCHRMPENIQHITGACPTLVQTDYTHRHNQIVHYIHQKLAHKYNLTNTPLKPYYEYQPNPVLENEEIKIYYDRAILTDKKIHYNRPDITLVNKSSKIAYLIDVSVPNTHNLLKTITEKINKYTELKEEIIRIWNLNKVFIIPIVLSTTGVIPKHLHQSLKILDLPPLTYITMQKAAILNTCRIVRKFLESDNELTDCTD

SEQ ID NO: 31635 - protein, 1176 aa, Junonia evarete
MEQHSERLRIGPLPGGRRGTPGASAGCYSMRSTGGGGLSRRVPPEQLSTAEHSLPEIVTSQNSDLNFNTPTEDVSQGAASSQPETTKAGKPRVRMKWDKEVNLFIMRTYLYITKLETDKVMYPKRLFDKFKMHYPDWNVTQQRIADQRRVIIRNRLLSEDEITQLKTEIAEQLRREDEATQTNALSFSSHLHEPLTHTHDIITTSTTSTATQSDACTQTISTPVDSNTELEYTQTTRSEVSQEENIKELSNLLQIELTKFNGTDPKSRPKLPRLKESKILYSLIHTFNTHILPKCFSLDSDLIHIHTLIYCTALVITTRLGYKIKLGATEDISKENNYKPAWEHRLESDIKKLRADIGRLTQYIKGNRSKQIIEKVEIIFKNTKLHTTHEQENKRPEEYIDTLKQKLSLKAHRLARYKKARRRKIDNKLYCTNEKAFYRSLNNNITNNSQNENQLPSKDNLKNYWAGIWEKRSCHNLQAKWIEEENQKWDSTEKMEFKEISLDDLTNVLKKTKNWKAAGIDQIHNFWYKKFTSLHKILSNIISDLINGKAPLPNFVTTGLTYMLPKSQNTHDPSQYRPITCLPTIYKIITACITNKIISHLETHNIISEEQKGCRRNHRGCKEQLIIDSTVLKHANTNNRNIYITYIDFKKAFDSVPHSWLIQILHTYKIDPTIIRFLEAAMSNWKTTITLTTKTTKISCEEIRISNGIFQGDSLSPLWFCLALNPLSRLLANSKCGYQLTRGTAVSHLMYMDDIKLFSKSEKEMEKMIRITAQYSKDINMNFGLDKCKTLTIKKGKLIEKSYEIDEGLNINGMVGDELYKYLGIMQAKDINHTKLKKDLTTEYIKRVNLLCKKQLYSRNLIKALNTFAIPVLTYSFGIIKWSQTDINKLEIKTRTILTKYNYHHPKSAIERVTLKRHVGGRGLVDLKILWQNQIHNIRNFFYSKIHNSQIHAATVAVDDNFTPLNLKNKEKQFKTTQEQINEKISNWRKKELHGRHIHDLEQSHVDLEASNRWLIKGYLFPETEGFLISIQDQVIKTRNYKKYILKETIETDICRKCHRLPETIQHITGACPTLVQTDYTHRHNQIAHYIHQKLALKYKLINGNPKPYYQYTPNPVLESNEVKIYFDRGILTDKTIHYNRPDITIVNKSSKIAYLIDISVPNTHNLQKNNNRKDK

SEQ ID NO: 31636 - protein, 1259 aa, Vanessa atalanta
MEQHSERLRIGPLPGGRRGTPGASAGCYSMRSTGGGGLSRRVPPEQLSTADNSLPVISANQNSAVSFNRPTEDVSQGAASSQPATTKAGKPRVRMKWDKEVNLFIMRTYLYITKLETDKVMYPKRLFDKFKTQYPDWNVSQQRIADQRRVIIRNKLISEDEIAHLKSEIAEQLRREVDLNNQTDTSLHSPHLQSQPLIQTHNIVTSPTTYNITQSDASTQTNLTSLVHDTEVQYTQSTTLENPQQENIEELKNLLETALTKFEGTDPKTRPKLPRLKESKLLHDLIYTFNTHILPTFFSLDSDLLHLHTLIYCSALVIITKLGYKIKSGNIEDSSIQKKKSHKPAWEHRLENDIKKLRADIGRLTQYLKGNRSKKVVEKVEIIFKNTKLHTIHERENKKPEEYIDTLKQKLSLKSHRLARYRKALNRKQDNKLYCTNEKAFYRSLNSCTSNNTNNEEQIPNKDELKNYWAGIWEKKSDHNLQAKWIEEENQKWGYMEQMEFIELKLDDLTVVLKKTKNWKAAGIDQIHNFWYKKFTSLHDILTKIISDLINCRIPLPNFITTGLTYMLPKNQNTHDPSQYRPITCLPTIYKIITSCITNKIVSHLEAHNVMSEEQKGCRRNHRGCKEQLIIDSTILKHSNKFNRNLYVTYIDFKKAFDSVPHSWLVQILQTYKIHPNIIKFLKEAMSNWRTTITLTTKTSKICCDEIHIRNGIFQGDSLSPLWFCLALNPLSRILSDSKFGYQLTRDIAVSHLMYMDDIKLFSKSVKEMKEMIKITAQFSKDINMNFGLDKCKTLTIKKGKLIEKNYEISEEINISEMLEGDLYKYLGIFQAKDINHSKLKQDLTTEYIKRVNQLCKKHLYSRNLIKAINTFAIPVLTYSFGIIKWSQTDIKNLEIKTRVTLTKHNYHHPKSAIERLTLKRQLGGRGVVDLKILWQNQIHNIQKFFYNKANTSKIHAAIVEVDDNFTPLNLKNNNKEFKTIQEQINEKIKDWRRKELHGRHIHDLEQNFIDLDASNKWLQKGYLFPETEGFLIAIQDQVINTRNYKKYILKESIESDLCRKCHRMPENIQHITGACPTLVQTDYTHRHNQIVHYIHQKLAHKYNLTNTPLKPYYEYQPNPVLENEEIKIYYDRAILTDKKIHYNRPDITLVNKSSKIAYLIDVSVPNTHNLLKTITEKINKYTELKEEIIRIWNLNKVFIIPIVLSTTGVIPKHLQQSLKILDLPPLTYITMQKAAILNTCRIVRKFLESDNELTDCTD

SEQ ID NO: 31637 - protein, 1230 aa, Junonia grisea
MRSTGGGGLSRRVPPEQLSTADNSLPVISASQNSAVSFNRPTEDVSQGAASSQPATTKAGKPRVRMKWDKEVNLFIMRTYLYITKLETDKVMYPKRLFDEFKAKYPDWNVSQQRIADQRRVIIRNKLISEDEIAQLKSEIAEQLSRESDLNNQTDISSHSPHLQSQPLIQTHNIVTSPTNYNITQSDASTQTNLTSLVHDTEVQYTQSTRFENPQQENTEELKNLLETAITKFQGTDPKTRPKLPRLKESKLLHDLIYTFNTHILPTFFSLDSDLVQLHTLIYCSALVIITKLGYKIKSGNIEDTSIQKKSNHKPAWEYRLENDVKKLRADIGRLTQYLKGNRSKKVVEKVEIIFKNTKLHTVHERENKKPEEYIDTLKQKLSLKSHRLARYRKALNRKQDNKLYCTNEKAFYRSLNSSTSNNTNNEEQIPNKDELKNYWAGIWEKRNDHNLQAKWIEEENQKWGNMEQMDFIELELDDLTEVLKKTKNWKAAGIDQIHNFWYKKFTSLHDILTKIISDLINCRTPLPNFITTGVTYMLPKSQNTHDPSQYRPITCLPTIYKIITSCITNKIVSHLEAHNVMSEEQKGCRRNHRGCKEQLIIDSTILKHSNKFNRNLYVTYIDFKKAFDSVPHSWLVQILQTYKIHPNIVKFLEEAMSNWRTTITLTTKTSKICCDEIHIRNGIFQGDSLSPLWFCLALNPLSRILSDSKFGYQLTRDTAVSHLMYMDDIKLFSKSVKEMKEMIKITAQFSKDINMNFGLDKCKTLTIKKGKLIEKNYEISEEINISGMLEGDLYKYLGILQAKDINHSKLKQDLTTEYIKRVNQLCKKQLYSRNLIKAINTFAIPVLTYSFGVIKWSQTDIKNLEIKTRVTLTKHNYHHPKSAIERLTLKRQVGGRGVVDLKILWQNQIHNIQNFFYNKAKTSKIHAATVEVDDNFTPLNLKNNNKEFKTIQEQINEKIKDWRRKELHGRHIHDLEQNFIDLDASNKWLQKGYLFPETEGFLIAIQDQVINTRNYKKYILKESIESDLCRKCHRMPENIQHITGACPTLVQTDYTHRHNQIVHYLHQKLAHKYNFTNTPLKPYYEYQPNPVLENEKIKIYYDRAILTDKTIHYNRPDITLVNKSSKTAYLIDVSVPNTHNLLKTITEKINKYTELKEEIIRIWNLSKVFIVPIVLSTTGVIPKHLHQSLKILDLPPLTYITMQKAAILNTCRIVRKFLESDNELTDCTD

SEQ ID NO: 31638 - protein, 1165 aa, Vanessa atalanta
MKWDKEVNLFIMRTYLYITKLETDKVMYPKRLFDKFKTQYPDWNVSQQRIADQRRVIIRNKLISEDEIAHLKSEIAEQLRREADLNNQTDTSLHSPHLQSQPLIQTHNIVTSPTTYNITQSDASTQTNLTSLVHDTEVQYTQSTTLKNPQQENIEELKNLLETALTKFEGTDPKTRPKLPRLKESKLLHDLIYTFNTHILPTFFSLDSDLLHLHTLIYCSALVIITKLGYKIKSGNIEDSSIQKKKSHKPAWEHRLENDIKKLRADIGRLTQYLKGNRSKKVVEKVEIIFKNTKLHTIHERENKKPEEYIDTLKQKLSLKSHRLARYRKALNRKQDNKLYCTNEKAFYRSLNSCTSNNTNNEEQIPNKDELKNYWAGIWEKRSDHNLQAKWIEEENQKWGYMEQMEFIELKLDDLTVVLKKTKNWKAAGIDQIHNFWYKKFTSLHDILTKIISDLINCRIPLPNFITTGLTYMLPKNQNTHDPSQYRPITCLPTIYKIITSCITNKIVSHLEAHNVMSEEQKGCRRNHRGCKEQLIIDSTILKHSNKFNRNLYVTYIDFKKAFDSVPHSWLVQILQTYKIHPNIIKFLKEAMSNWRTTITLTTKTSKICCDEIHIRNGIFQGDSLSPLWFCLALNPLSRILSDSKFGYQLTRDIAVSHLMYMDDIKLFSKSVKEMKEMIKITAQFSKDINMNFGLDKCKTLTIKKGKLIEKNYEISEEINISEMLEGDLYKYLGIFQAKDINHSKLKQDLTTEYIKRVNQLCKKHLYSRNLIKAINTFAIPVLTYSFGIIKWSQTDIKNLEIKTRVTLTKHNYHHPKSAIERLTLKRQLGGRGVVDLKILWQNQIHNIQKFFYNKANTSKIHAAIVEVDDNFTPLNLKNNNKEFKTIQEQINEKIKDWRRKELHGRHIHDLEQNFIDLDASNKWLQKGYLFPETEGFLIAIQDQVINTRNYKKYILKESIESDLCRKCHRMPENIQHITGACPTLVQTDYTHRHNQIVHYIHQKLAHKYNLTNTPLKPYYEYQPNPVLENEEIKIYYDRAILTDKKIHYNRPDITLVNKSSKIAYLIDVSVPNTHNLLKTITEKINKYTELKEEIIRIWNLNKVFIIPIVLSTTGVIPKHLHQSLKILDLPPLTYITMQKAAILNTCRIVRKFLESDNELTDCTD

SEQ ID NO: 31639 - protein, 1159 aa, Dione vanillae
MEQHSERLRIRPLPGGRRGTPGASAGCYSIRSTGGGGLIRRVPPEQLSTADNSLPVITASQNSAVSFNRPTEDVSQEAASSQPATTKAGKPRVRMKWDKEVNLFIMRTYLYITKLETDKVMYPKRLFDKFKTKYPDWNVSQQRIADQRRVIIRNKLISEDEITQLKSEIAEQLKREADLNNQTDTSSHSLHLQSQPLIQTHNIVTSPTTYNITQSDASTQTNLTSLVHSTEVQYTQSTSFENPHQVNTEELKNLLETALTKFQGTDPKTRPKLPRLKENKLLHDLIYTFNTYILPTFFSLDSDLVHLHTLIYCSALVIITKLGYKIKSENIEDTSKQKKRNYKPAWEYRLENDIKKLRADIGRLTQYLKGNRSKKLVGKVEIIFKNTKLHTIHERENKKPEEYIDTLKQKLSLKSHRLARYRKALNRKQDNKLYCTNEKAFYRSLNCSTSNNTSNEEQIPNEDELKNYWAGIWEKRSDHNLQAKWIEEENQKWGKMEQMDFIELELDDLTIVLKKTKNWKAAGIDQVHNFWYKKFTSLHDILTKIISDLINCRTPLPNFITTGLTYMLPKNQNTHDPSQYRPITCLPTIYKIITSCITNKIVSHLEAHNVMSEEQKGCRRNHRGCKEQLIIDSNILKHSNKFKRNLYVTYIDFKKAFDSVPHSWLVQILQTYKIHPNIIKFLEEAMSNWRTTITLTTKTSKICCDEIHIRNGIFQGDSLSPLWFCLALNPLSRILSDSKFGYQLTRDTAVSHLMYMDDIKLFSKSVKEMKEMIKITAQFSKDINMNFGLDKCKTLTIKKGKSIEKNYEISEEINISGMLEGDLYKYLGILQAKDINHSKLKQDLTTEYIKRVNQLCKKQLYSRNLIKAINTFAIPVLTYSFGVIKWSQTDIKNLEIKTRVTLTKHNYHHPKSAIERLTLKRQLGGRGVVDLKILWQNQIHNIQNFFYNKAKTSKIHAATVEVDDNFTPLNLKNNNKEFKTIQEQINEKIKDWRRKELHGRHIHDLEQNFIDLDASNKWLHKGYLFPETEGFLIAIQDQVINTRNYKKYILKESIESDLCRKCHRMPENIQHITGACPTLVQTDYTHRHNQIVHYTHQKLAHKYNFTNTPLKPYYEYQPNPVLENDEIKIYYDRAILTDKTIHYNRPDITLVNKSSKTAY

SEQ ID NO: 31640 - protein, 1259 aa, Junonia zonalis
MEQHSERLRIGPLPGGRRGTPGASAGCYSMRSTGGGGLSRRVPPEQLSTADNSLPVISASQNSAVSFNRPTEDVSQGAASSQPATTKAGKPRVRMKWDKEVNLFIMRTYLYITKLETDKVMYPKRLFDEFKAKYPDWNVSQQRIADQRRVIIRNKLISEDEIAQLKSEIAEQLSRESDLNNQTDISSHSPHLQSQPLIQTHNIVTSPTNYNITQSDASTQTNLTSLVHDTEVQYTQSTRFENPQQENTEELKNLLETAITKFQGTDPKTRPKLPRLKESKLLHDLIYTFNTHILPTFFSLDSDLVQLHTLIYCSALVIITKLGYKIKSGNIEDTSIQKKSNHKPAWEYRLENDVKKLRADIGRLTQYLKGNRSKKVVEKVEIIFKNTKLHTVHERENKKPEEYIDTLKQKLSLKSHRLARYRKALNRKQDNKLYCTNEKAFYRSLNSSTSNNTNNEEQIPNKDELKNYWAGIWEKRNDHNLQAKWIEEENQKWGNMEQMDFIELELDDLTEVLKKTKNWKAAGIDQIHNFWYKKFTSLHDILTKIISDLINCRTPLPNFITTGVTYMLPKSQNTHDPSQYRPITCLPTIYKIITSCITNKIVSHLEAHNVMSEEQKGCRRNHRGCKEQLIIDSTILKHSNKFNRNLYVTYIDFKKAFDSVPHSWLVQILQTYKIHPNIVKFLEEAMSNWRTTITLTTKTSKICCDEIHIRNGIFQGDSLSPLWFCLALNPLSRILSDSKFGYQLTRDTAVSHLMYMDDIKLFSKSVKEMKEMIKITAQFSKDINMNFGLDKCKTLTIKKGKLIEKNYEISEEINISGMLEGDLYKYLGILQAKDINHSKLKQDLTTEYIKRVNQLCKKQLYSRNLIKAINTFAIPVLTYSFGVIKWSQTDIKNLEIKTRVTLTKHNYHHPKSAIERLTLKRQLGGRGVVDLKILWQNQIHNIQNFFYNKAKTSKIHAATVEVDDNFTPLNLKNNNKEFKTIQEQINEKIKDWRRKELHGRHIHDLEQNFIDLDASNKWLQKGYLFPETEGFLIAIQDQVINTRNYKKYILKESIESDLCRKCHRMPENIQHITGACPTLVQTDYTHRHNQIVHYLHQKLAHKYNFTNTPLKPYYEYQPNPVLENEKIKIYYDRAILTDKTIHYNRPDITLVNKSSKTAYLIDVSVPNTHNLLKTITEKINKYTELKEEIIRIWNLSKVFIVPIVLSTTGVIPKHLHQSLKILDLPPLTYITMQKAAILNTCRIVRKFLESDNELTDCTD

SEQ ID NO: 31641 - protein, 761 aa, Vanessa atalanta
MEQMEFIELKLDDLTVVLKKTKNWKAAGIDQIHNFWYKKFTSLHDILTKIISDLINCRIPLPNFITTGLTYMLPKNQNTHDPSQYRPITCLPTIYKIITSCITNKIVSHLEAHNVMSEEQKGCRRNHRGCKEQLIIDSTILKHSNKFNRNLYVTYIDFKKAFDSVPHSWLVQILQTYKIHPNIIKFLKEAMSNWRTTITLTTKTSKICCDEIHIRNGIFQGDSLSPLWFCLALNPLSRILSDSKFGYQLTRDIAVSHLMYMDDIKLFSKSVIKMIKITAQFSKDINMNFGLDKCKTLTIKKGKLIEKNYEISEEINISEMLEGDLYKYLGIFQAKDINHSKLKQDLTTEYIKRVNQLCKKHLYSRNLIKAINTFAIPVLNYSFGIIKWSQTDIKNLEIKTRVTLTKHNYHHPKSAIERLTLKRQLGGRGVVDLKILWQNQIHNIQNFFYNKANTSKIHAAIVEVDDNFTPLNLKNNNKEFKTIQEQINEKIKDWRRKELHGRHIHDLEQNFIDLDASNKWLQKGYLFPETEGFLIAIQDQVINTRNYKKYILKESIESDLCRKCHRMPENIQHITGACPTLVQTDYTHRHNQIVHYIHQKLAHKYNLTNTPLKPYYEYQPNPVLENEEIKIYHDRAILTDKKIHYNRPDITLVNKSSKIAYLSDVSVPNTHNLLKTITEKINKYTELKEEIIRIWNLNKVFIIPIVLSTTGVIPKHLHQSLKILDLPPLTYITMQKAAILNTCRIVRKFLESDNELTDCTD

SEQ ID NO: 31642 - protein, 1254 aa, Vanessa atalanta
MEQHSERLRIGPLPGGRRGTPGASAGCYSMRSTGGGGLSRRVPPEQLSTADNSLPVISANQNSAVSFNRPTEDVSQGAASSQPATTKAGKPRVRMKWDKEVNLFIMRTYLYITKLETDKVMYPKRLFDKFKTQYPDWNVSQQRIADQRRVIIRNKLISEDEIAHLKSEIAEQLRREVDLNNQTDTSLHSPHLQSQPLIQTHNIVTSPTTYNITQSDASTQTNLTSLVHDTEVQYTQSTTLENPQQENIEELKNLLETALTKFEGTDPKTRPKLPRLKESKLLHDLIYTFNTHILPTFFSLDSDLLHLHTLIYCSALVIITKLGYKIKSGNIEDSSIQKKKSHKPAWEHRLENDIKKLRADIGRLTQYLKGNRSKKVVEKVEIIFKNTKLHTIHERENKKPEEYIDTLKQKLSLKSHRLARYRKALNRKQDNKLYCTNEKAFYRSLNSCTSNNTNNEEQIPNKDELKNYWAGIWEKRSDHNLQAKWIEEENQKWGYMEQMEFIELKLDDLTVVLKKTKNWKAAGIDQIHNFWYKKFTSLHDILTKIISDLINCRIPLPNFITTGLTYMLPKNQNTHDPSQYRPITCLPTIYKIITSCITNKIVSHLEAHNVMSEEQKGCRRNHRGCKEQLIIDSTILKHSNKFNRNLYVTYIDFKKAFDSVPHSWLVQILQTYKIHPNIIKFLKEAMSNWRTTITLTTKTSKICCDEIHIRNGIFQGDSLSPLWFCLALNPLSRILSDSKFGYQLTRDIAVSHLMYMDDIKLFSKSEMIKITAQFSKDINMNFGLDKCKTLTIKKGKLIEKNYEISEEINISEMLEGDLYKYLGIFQAKDINHSKLKQDLTTEYIKRVNQLCKKHLYSRNLIKAINTFAIPVLTYSFGIIKWSQTDIKNLEIKTRVTLTKHNYHHPKSAIERLTLKRQLGGRGVVDLKILWQNQIHNIQKFFYNKANTSKIHAAIVEVDDNFTPLNLKNNNKEFKTIQEQINEKIKDWRRKELHGRHIHDLEQNFIDLDASNKWLQKGYLFPETEGFLIAIQDQVINTRNYKKYILKESIESDLCRKCHRMPENIQHITGACPTLVQTDYTHRHNQIVHYIHQKLAHKYNLTNTPLKPYYEYQPNPVLENEEIKIYYDRAILTDKKIHYNRPDITLVNKSSKIAYLSDVSVPNTHNLLKTITEKINKYTELKEEIIRIWNLNKVFIIPIVLSTTGVIPKHLQQSLKILDLPPLTYITMQKAAILNTCRIVRKFLESDNELTDCTD

SEQ ID NO: 31643 - protein, 1226 aa, Junonia stemosa
MRSTGGGGLSRRVPPEQLSTAEYSLPDIMASQNSAVNINRPTEDVSQGASSSQPVTTKAGKPRVRMKWDKEVNLFIMRTYLYITKLETDKVMYPKRLFDKFKTQYPEWNVSQQRIADQRRVIIRNKLLSEEEIAHLKREIAEQLEREEVLTQTKILPLSPHLETSLTQTQEIITTSTASTATQSDAFTQTIITPVDYDTEVENNLNINSEVSQQENITELTQLLQTELTKFNGTDPKSRPKLPRLKESKTLYNLIHIFNTHILPKCFSLDSDLIHVHTLIYCTALVITIKLGYKTKLGNIENTNKEKNHKPAWEHRLESDIKKLRADIGRLTQYIKGNRSKKLIEKVEIVFRNTKLHTTYEQENKRPEEYIDTLKQKLSLKVHRLARYKKALRRKTDNKLYCTNEKAFYRSLNNNITNNSPDEKQIPSKNELKNYWAEIWEQRSSHNIQAEWIAEENQKWDSTEMMEFKEINLDDLRNVLKKTKNWKAAGIDQIHNFWYKKLTSLHNILSNIITDLINGKTSLPTFVTTGLTYMLPKSQNTHDPSQYRPITCLPTIYKIITACITNKIVSHLEEHNIISEEQKGCRRNHRGCKEQLIIDSTVLKHANTHNRNLYITYIDFKKAFDSVPHSWLIQILHTYKTNPIIIRFLKDAMSSWKTTITLSTKTTKICCEEIRISNGIFQGDSLSPLWFCLALNPLSRILTESKFGYQLTRGTAVSHLMYMDDIKLFSKSEKEMEKMIRITAQFSKDINMNFGLDKCKTLTIRRGKLIEKSYEIDEEVNISGMVGDELYKYLGMLQGRDINHTKIKNNLTTEYIKRVNQLCKKQLYSRNLVKAINTFAIPVLTYSFGIIKWSQTDINNLEIKTRTILTKYKYHHPKSAIERVTIKRELGGRGIVDLNILWQNQIHNLKNFFYSKINNSKIHAATVAVDDNFTPLNLKSKEKQFKTTQEQLDEKVCTWRKKELHGRHIHDLEQNHIDLEASNKWLTKGYLFPETEGFLISIQDQVINTRNYKKYILKEPIETDLCRKCHRLPETIQHITGACPTLVHTDYTHRHNQIAHYIHQKLALKYKLINGNPKPYYQYLPNPVLESNEVKIYFDRGILTDKTIHYNRPDITIVNKSSKIAYLIDVSIPNTHNLQKTITEKITKYTELKEEIIRLWNLNKVYIVPLVLSTTGVIPKHLHHSLKILDLPPLTYITMQKAAILNTCRIVRKFLDSENEPTDCTD

SEQ ID NO: 31644 - protein, 883 aa, Graphium androcles
MRNVELIFKNTRLHTIHEHENNRPEEYLDTLKQKLSLKAHRLARYRKSLQRKLDNRLFCTNEKAFYRSLNNNTTYSYNQIEQIPCREQLRNYWAGIWEKPSNHNVEADWIQKENQKWSNIEQMKYEDIDLEDLTNVLLKLKNWKAPGIDQIHNFWYKKFSSLHEILSKIITDLISGKTPFPSFITNGVTYMLPKNENTYDPSQYRPITCLPTIYKIITSCIANKIASHLEAHHIISEEQKGCRRNHRGCKEQLIIDSTILKHANKHNRNLFITYIDYKKAFDSVPHSWLLQVLHTYKIHPSIRKFLEVAMINWKTTLTLSTETTKICCDVIQIKNGIFQGDSLSPLWFCLAINPLSSLLSEQKFGYMLTQNIPVSHLMYMDDIKLFSKSAKELKIMLSVTARFSKDINMHFGLDKCKTLTIKRGKLIDSSRDINEEYNIDAMSGDDLYKYLGIPQAKDINHSQLKHNIATEYIKRVNQLCNKRLYSRNLVKALNTFAVPVLTYSFGILKWSQTDIKNLEIKTRTSLTKHNYHHPKSAIERISVKRQIGGRGIIDLKILWQNQLQNIRNFFYSKISFSQIHAATVEVDDSFTPLNLKNKDIQFKNSREHFEEKLNTWRRKELHGRHLHDLEQNHIDLLASNKWLQQGYLFPETEGFLIAIQDQVINTKNYKKYILKESIESDLCRKCHRMSETIQHITGACPTLAHTDYTHRHNQIVHYIHQKLAQKYKLLGNDLKPYYQYTPFPVMENDKAKIYFDRAILTDKTIHCNRPDIILVNKTTNTAYLIDVTVPNTHNLLKSITEKINKYVELKEEIIRIWNLNKVYIVPLVLSTTGVIPKHLHNGLKLLDLPPDTYITMQKAAILNTCRIVRKFLESDSEITNCTT

SEQ ID NO: 31645 - protein, 1226 aa, Junonia zonalis
MRSTGGGGLSRRVPPEQLSTAEYSLPDIMASQNFAVNINRPTEDVSQGASSSQPVTTKAGKPRVRMKWDKEVNLFIMRTYLYITKLETDKVMYPKRLFDKFKTQYPEWNVSQQRIADQRRVIIRNKLLSEEEIAHLKSEIAEQLEREEVLTQTKILPLSPHLETSLTQTQEIITTSTASTATQSDAFTQTIITPVDYDTEVENNLNINSEVSQQENITELTQLLQTELTKFNGTDPKSRPKLPRLKESKTLYNLIHIFNTHILPKCFSLDSDLIHVHTLIYCTALVITIKLGYKTKLGNIENTNKEKNHKPAWEHRLESDIKKLRADIGRLTQYIKGNRSKKLIEKVEIIFKNTKLHTTHEQENKRPEEYIDTLKQKLSLKVHRLARYKKALRRKTDNKLYCTNEKAFYRSLNNNITNNSPDEKQIPSKNELKNYWAEIWEQRSSHNIQAEWIAEENQKWDSTEMMEFKEINLDDLRNVLKKTKNWKAAGIDQIHNFWYKKLTSLHNILSNIITDLINGKTSLPTFVTTGLTYMLPKSQNTHDPSQYRPITCLPTIYKIITACITNKIVSHLEEHNIISEEQKGCRRNHRGCKEQLIVDSTVLKHANTHNRNLYITYIDFKKAFDSVPHSWLIQILHTYKINPIIIRFLKDAMSSWKTTITLSTKTTKICCEEIRISNGIFQGDSLSPLWFCLALNPLSRILTESKFGYQLTRGTAVSHLMYMDDIKLFSKSEKEMEKMIRITAQFSKDINMNFGLDKCKTLTIKRGKLIEKSYEIDEEVNISGMVGDELYKYLGMLQGRDINHTKIKNNLTTEYIKRVNQLCKKQLYSRNLVKAINTFAIPVLTYSFGIIKWSQTDINNLEIKTRTILTKYKYHHPKSAIERVTIKRELGGRGIVDLNILWQNQIHNLKNFFYSKINNSKIHAATVAVDDNFTPLNLKSKEKQFKTTQEQLDEKVCTWRKKELHGRHIHDLEQNHIDLEASNKWLTKGYLFPETEGFLISIQDQVINTRNYKKYILKEPIETDLCRKCHRLPETIQHITGACPTLVHTDYTHRHNQIAHYIHQKLALKYKFINGNPKPYYQYLPNPVLESNEVKIYFDRGILTDKTIHYNRPDITIVNKSSKIAYLIDVSIPNTHNLQKTITEKITKYTELKEEIIRLWNLNKVYIVPLVLSTTGVIPKHLHHSLKILDLPPLTYITMQKAAILNTCRIVRKFLDSENEPTDCTD

SEQ ID NO: 31646 - protein, 1161 aa, Junonia litoralis
MKWDKEVNLFIMRTYLYITKLETDKVMYPKRLFDKFKTQYPEWNVSQQRIADQRRVIIRNKLLSEEEIAHLKREIAEQLEREEVLTQTKILPLSPHLETSLTQTQEIITTFTASTATQSDAFTQTIITPVDYDTEVENNLNINSEVSQQENITELTQLLQTELTKFNGTDPKSRPKLPRLKESKTLYNLIHIFNTHILPKCFSLDSDLIHVHTLIYCTALVITIKLGYKTKLGNIENTNKDKNHKPAWEHRLESDIKKLRADIGRLTQYIKGNRSKKLIEKVEIIFKNTKLHTTYEQENKRPEEYIDTLKQKLSLKVHRLARYKKALRRKTDNKLYCTNEKAFYRSLNNNITNNSPDEKQIPSKNELKNYWAEIWEQRSSHNIQAEWIAEENQKWDSTEMMEFKEINLDDLRNVLKKTKNWKAAGIDQIHNFWYKKLTSLHNILSNIITDLINGKTSLPTFVTTGLTYMLPKSQNTHDPSQYRPITCLPTIYKIITACITNKIVSHLEEHNIISEEQKGCRRNHRGCKEQLIIDSTVLKHANTHNRNLYITYIDFKKAFDSVPHSWLIQILHTYKINPIIIRFLKDAMSSWKTTITLSTKTTKICCEEIRISNGIFQGDSLSPLWFCLALNPLSRILTESKFGYQLTRGTAVSHLMYMDDIKLFSKSEKEMEKMIRITAQFSKDINMNFGLDKCKTLTIKRGKLIEKSYEIDEEVNISGMVGDELYKYLGMLQGRDINHTKIKNNLTTEYIKRVNQLCKKQLYSRNLVKAINTFAIPVLTYSFGIIKWSQTDINNLEIKTRTILTKYKYHHPKSAIERVTIKRELGGRGIVDLNILWQNQIHNLKNFFYSKINNSKIHAATVAVDDNFTPLNLKSKEKQFKTTQEQLDEKVCTWRKKELHGRHIHDLEQNHIDLEASNKWLTKGYLFPETEGFLISIQDQVINTRNYKKYILKEPIETDLCRKCHRLPETIQHITGACPTLVHTDYTHRHNQIAHYIHQKLALKYKLINGNPKPYYQYLPNPVLESNEVKIYFDRGILTDKTIHYNRPDITIVNKSSKIAYLIDVSIPNTHNLQKTITEKITKYTELKEEIIRLWNLNKVYIVPLVLSTTGVIPKHLHHSLKILDFPPLTYITMQKAAILNTCRIVRKFLDSENEPTDCTD

SEQ ID NO: 31647 - protein, 1255 aa, Junonia genoveva
MEQHSERLRIGPLPGGRRGTPGASAGCYSMRSTGGGGLSRRVPPEQLSTAEYSLPDIMASQNSAVNINRPTEDVSQGASSSQPVTTKAGRPRVRMKWDKEVNLFIMRTYLYITKLETDKVMYPKRLFDKFKTQYPEWNVSQQRIADQRRVIIRNKLLSEEEIAHLKREIAEQLEREEVLTQTKILPLSPHLETSLTQTHEIITTSTASTATQSDAFTQTIITPVDYDTEVENNLNINSEVSQQENITELTQLLQTELTKFNGTDPKSRPKLPRLKESKTLYNLIHIFNTHILPKCFSLDSDLIHVHTLIYCTALVITIKLGYKTKLGNIENTNKEKNHKPAWEHRLESDIKKLRADIGRLTQYIKGSRSKKLIEKVEIIFKNTKLHTTHEQENKRPEEYIDTLKQKLSLKVHRLARYKKALRRKTDNKLYCTNEKAFYRSLNNNITNNSPDEKQIPSKNELKNYWAEIWEQRSSHNIQAEWIAEENQKWDSTEMMEFKEINLDDLRNVLKKTKNWKAAGIDQIHNFWYKKLTSLHNILSNIITDLINGKTSLPTFVTTGLTYMLPKSQNTHDPSQYRPITCLPTIYKIITACITNKIVSHLEEHNIISEEQKGCRRNHRGCKEQLIVDSTVLKHANTHNRNLYITYIDFKKAFDSVPHSWLIQILHTYKINPIIIRFLKDAMSSWKTTITLSTKTTKICCEEIRISNGIFQGDSLSPLWFCLALNPLSRILTESKFGYQLTRGTAVSHLMYMDDIKLFSKSEKEMEKMIRITAQFSKDINMNFGLDKCKTLTIKRGKLIEKSYEIDEEVNISGMVGDELYKYLGMLQGRDINHTKIKNNLTTEYIKRVNQLCKKQLYSRNLVKAINTFAIPVLTYSFGIIKWSQTDINNLEIKTRTILTKYKYHHPKSAIERVTIKRELGGRGIVDLNILWQNQIHNLKNFFYSKINNSKIHAATVAVDDNFTPLNLKSKEKQFKTTQEQLDEKVCTWRKKELHGRHIHDLEQNHIDLEASNKWLTKGYLFPETEGFLISIQDQVINTRNYKKYILKEPIETDLCRKCHRLPETIQHITGACPTLVHTDYTHRHNQIAHYIHQKLALKYKFINGNPKPYYQYLPNPVLESNEVKIYFDRGILTDKTIHYNRPDITIVNKSSKIAYLIDVSIPNTHNLQKTITEKITKYTELKEEIIRLWNLNKVYIVPLVLSTTGVIPKHLHHSLKILDLPPLTYITMQKAAILNTCRIVRKFLDSENEPTDCTD

SEQ ID NO: 31648 - protein, 1259 aa, Vanessa cardui
MEQHSERLRRGPLPGGRRGTPGASAGCYSMRSTGGGGLSRRVPPEQLSTADNSLPVISTIQNSAVSFNRPTEDVSQGAASSQPATTKAGKPRVRMKWDKEVNLFIMRTYLYITKLETDKVMYPKRLFDKFKTQYPDWNVSQQRIADQRRVIIRNKLISEDEIAHLKSEIAEQLRREADLNNQTDTSLHSPHLQSQPLIQTHNIVTTPTTSNITQSDASTQTNLTSLVHDKEVQYTQSISLENPQQENIEELKNLLETALTKFQGTDPKTRPKLPRLKESKLLHDLIYTFNTHILPTFFSLDSDLLHLHTLIYCSALVIITKLGYKIKSGNIEDSNILKKKSYKPAWEHRLENDIKKLRADIGRLTQYLKGNRSKKVVKKVEVIFKNTKLHTIHERENKKPEEYIDTLKQKLSLKSHRLARYRKALNRKQDNKLYCTNEKAFYRSLNSCTSNNTNNEEQIPNKDELKNYWAGIWEKRSDHNLQAKWIEEENQKWGYMEQMEFIELKLDDLTEVLKKTKNWKAAGIDQIHNFWYKKFTSLHDILTKTISDLINCRTPLPNFITTGLTYMLPKNQNTHDPSQYRPITCLPTIYKIITSCITNKIVSHLEAHNVMSEEQKGCRRNHRGCKEQLIIDSTVLKHSNKFNRNLYVTYIDFKKAFDSVPHSWLVQILQTYKIHPNIIKFLKEAMSNWRTTITLTTKTSQIWCDEIHIRNGIFQGDSLSPLWFCLALNPLSRILSDSKFGYQLTRDIAVSHLMYMDDIKLFSKSVKEMKEIIKITAQFSKDINMNFGLDKCKTLTIKKGKLIEKNYEITEEINISEMLEGDLYKYLGILQAKDINHSKLKQDFTTEYIKRVNQLCKKHLYSRNLVKAINTFAIPVLTYSFGIIKWSQTDIKNLEIKTRVTLTKHNYHHPKSAIERLTLKRQLGGRGVVDLKILWQNQIHNIQKFFHNKANTSKIHAAIVEVDDNFTPLNLKNNNKEFKTIQEQINEKIKDWRRKELHGRHIHDLEQNFIDLDASNKWLQKGYLFPETEGFLIAIQDQVINTRNYKKYILKESIKSDLCRKCHRMPENIQHITGACPTLVQTDYTHRHNQIVHYIHQKLAHKYNFTNTPLKPYYEYQPNPVLENEKIKIYYDRAILTDKTIHYNRPDITLVNKSSKIAYLIDVSVPNTHNLLKTITEKINKYTELKEEIIRIWNLNKVFIVPIVLSTTGVIPKHLHQSLKILDLPPLTYITMQKAAILNTCRIVRKFLESDNELTDCTD

SEQ ID NO: 31649 - protein, 1259 aa, Vanessa atalanta
MEQHSERLRIGPLPGGRRGTPGASAGCYSMRSTGGGGLSRRVPPEQLSTADNSLPVISASQNSAVSFNRPTEDVSQGAASSQPATTKAGKPRVRMKWDKEVNLFIMRTYLYITKLETDKVMYPKRLFDKFKTQYPDWNVSQQRIADQRRVIIRNKLISEDEIAHLKSEIAEQLKREADLNNQTDTSLHSPHLQSQPLIQTHNIVTSPTTYNITQSDASTQTNLTSLVHDTEVQYTQSTTLENPQQENIEELKNLLETALTKFEGTDPKTRPKLPRLKESKLLHDLIYTFNTHILPTFFSLDSDLLHLHTLIYCSALVIITKLGYKIKSGNIEDSSIQKKKSHKPAWEHRLENDIKKLRADIGRLTQYLKGNRSKKVVEKVEIIFKNTKLHTIHERENKKPEEYIDTLKQKLSLKSHRLARYRKALNRKQDNKLYCTNEKAFYRSLNSCTSNNTNNEEQIPNKDELKNYWAGIWEKRSDHNLQAKWIEEENQKWGYMEQMEFIELKLDDLTVVLKKTKNWKAAGIDQIHNFWYKKFTSLHDILTKIISDLINCRIPLPNFITTGLTYMLPKNQNTHDPSQYRPITCLPTIYKIITSCITNKIVSHLEAHNVMSEEQKGCRRNHRGCKEQLIIDSTILKHSNKFNRNLYVTYIDFKKAFDSVPHSWLVQILQTYKIHPNIIKFLKEAMSNWRTTITLTTKTSKICCDEIHIRNGIFQGDSLSPLWFCLALNPLSRILSDSKFGYQLTRDIAVSHLMYMDDIKLFSKSVKEMKEMIKITAQFSKDINMNFGLDKCKTLTIKKGKLIEKNYEISEEINISEMLEGDLYKYLGIFQAKDINHSKLKQDLTTEYIKRVNQLCKKHLYSRNLIKAINTFAIPVLTYSFGIIKWSQTDIKNLEIKTRVTLTKHNYHHPKSAIERLTLKRQLGGRGVVDLKILWQNQIHNIQNFFYNKANTSKIHAAIVEVDDNFTPLNLKNNNKEFKTIQEQINEKIKDWRRKELHGRHIHDLEQNFIDLDASNKWLQKGYLFPETEGFLIAIQDQVINTRNYKKYILKESIESDLCRKCHRMPENIQHITGACPTLVQTDYTHRHNQIVHYIHQKLAHKYNLTNTPLKPYYEYQPNPVLENEEIKIYYDRAILTDKKIHYNRPDITLVNKSSKIAYLIDVSVPNTHNLLKTITEKINKYTELKEEIIRIWNLNKVFIIPIVLSTTGVIPKHLHQSLKILDLPPLTYITMQKAAILNTCRIVRKFLESDNELTDCTD

SEQ ID NO: 31650 - protein, 1259 aa, Junonia stemosa
MEQHSQRLRIGPLPGGRRGTPGASAGCYSMRSTGGGGLSRRVPPEQLSTADNSLPVISASQNSAVSFNRPTEDVSQGAASSQPATTKAGKPRVRMKWDKEVNLFIMRTYLYITKLETDKVMYPKRLFDEFKAKYPDWNVSQQRIADQRRVIIRNKLISEDEIAQLKSEIAEQLSRESDLNNQTDISSHSPHLQSQPLIQTHNIVTSPTNYNITQSDASTQTNLTSLVHDTEVQYTQSTRFENPQQENTEELKNLLETAITKFQGTDPKTRPKLPRLKESKLLHDLIYTFNTHILPTFFSLDSDLVQLHTLIYCSALVIITKLGYKIKSGNIEDTSIQKKSNHKPAWEYRLENDVKKLRADIGRLTQYLKGNRSKKLVEKVEIIFKNTKLHTVHERENKKPEEYIDTLKQKLSLKSHRLARYRKALNRKQDNKLYCTNEKAFYRSLNSSISNNTNNEEQIPNKDELKNYWAGIWEKRNDHNLQAKWIEEENQKWGNMEQMDFIELELDDLTEVLKKTKNWKAAGIDQIHNFWYKKFTSLHDILTKIISDLINCRTPLPNFITTGVTYMLPKSQNTHDPSQYRPITCLPTIYKIITSCITNKIVSHLEAHNVMSEEQKGCRRNHRGCKEQLIIDSTILKHSNKFNRNLYVTYIDFKKAFDSVPHSWLVQILQTYKIHPNIVKFLKEAMSNWRTTITLTTKTSKICCDEIHIRNGIFQGDSLSPLWFCLALNPLSRILSDSKFGYQLTRDTAVSHLMYMDDIKLFSKSVKEMKEMIKITAQFSKDINMNFGLDKCKTLTIKKGKLIEKNYEISEEINISGMLEGDLYKYLGILQAKDINHSKLKQDLTTEYIKRVNQLCKKQLYSRNLIKAINTFAIPVLTYSFGVIKWSQTDIKNLEIKTRVTLTKHNYHHPKSAIERLTLKRQLGGRGVVDLKILWQNQIHNIQNFFNNKAKTSKIHAATVEVDDNFTPLNLKNNNKEFKTIQEQINEKIKDWRRKELHGRHIHDLEQNFIDLDASNKWLQKGYLFPETEGFLIAIQDQVINTRNYKKYILKESIESDLCRKCHRMPENIQHITGACPTLVQTDYTHRHNQIVHYLHQKLAHKYNFTNTPLKPYYEYQPNAVLENEKIKIYYDRAILTDKTIHYNRPDITLVNKSSKTAYLIDVSVPNTHNLLKTITEKINKYTELKEEIIRIWNLSKVFIVPIVLSTTGVIPKHLHQSLKILDLPPLTYITMQKAAILNTCRIVRKFLESDNELTDCTD

SEQ ID NO: 31651 - protein, 1259 aa, Vanessa cardui
MEQHSERLRRGPLPGGRRGTPGASAGCYSMRSTGGGGLSRRVPPEQLSTAANSLPVISTIQNSAVSFNRPTEDVSQGAASSQPATTKAGKPRVRMKWDKEVNLFIMRTYLYITKLETDKVMYPKRLFDKFKTQYPDWNVSQQRIADQRRVIIRNKLISEDEIAHLKSEIAEQLRRKADLNNQTDTSLHSPHLQSQPLIQTHNIVTTPTTSNITQSDASTQTNLTSLVHDTEVQYTQSISLENPQQENIEELKNILETALTKFQGTDPKTRPKLPRLKESKLLHDLIYTFNTHILPTFFSLDSDLLHLHTLIYCSALVIITKLGYKIKPGNIEDSSIQKKKSYKPAWEHRLENDIKKLRADIGRLTQYLKGNRSKKVVKKVEVIFKNTKLHTIHERENKKPEEYIDTLKQKLSLKSHRLARYRKALNRKQDNKLYCTNEKAFYRSLNSCTSNNTNNEKQIPNKDELKNYWAGIWEKRSDHNLQAKWIEEENQKWGYMEQMEFIELKLDDLTEVLKKTKNWKAAGIDQIHNFWYKKFTSLHDILTKTISDLINCRTPLPNFITTGLTYMLPKNQNTHDPSLYRPITFLPTIYKIITSCITNKIVSHLEAHNVMSEEQKGCRRNHRGCKEQLIIDSTILKHSNKFNRNLYVTYIDFKKAFDSVPHSWLVQILQTYKIHPNIIKFLKEAMTNWRTTITLTTKTSQICCDEIHIRNGIFQGDSLSPLWFCLALNPLSRILSDSKFGYQLTRDIAVSHLMYMDDIKLFSKSVKEMKEMIKITAQFSKDINMNFGLDKCKTLTIKKGKLIEKNYEISEEINISEMLEGDLYKYLGILQSKDINHSKLKQDLTTEYIKRVNQLCKKHLYSRNLIKAINTFAIPVLTYSFGIIKWSQTDIKNLEIKTRVTLTKHNYHHPKSAIERLTLKRQFGGRGVVDLKILWQNQIHNIRNFFYNKVNTSKIHAAIVEVDDNFTPLNLKNNNKEFKTIQEQINEKIKDWRRKELHGRHIHDLEQNFIDLDASNKWLQKGYLFHETEGFLIAIQDQVINTRNYKKYILKESIESDLCRKCHRMSENIQHITGACPTLVQTDYTHRHNQIVHYIHQKLAHKYNFTNTPLKPYYEYQPNPVLENEKIKIYYDRAILTDKTIHYNRPDITLVNKSSKIAYLIDVSVPNTHNLLKTITEKINKYTELKEEIIRIWNLNKVFIVPIVLSTTGVIPKHLHQSLKILDLPPLTYITMQKAAILNTCRIVRKFLESDNELTDCTV

SEQ ID NO: 31652 - protein, 764 aa, Vanessa atalanta
MEQMEFIELKLDDLTVVLKKTKNWKAAGIDQIHNFWYKKFTSLHDILTKIISDLINCRIPLPNFITTGLTYMLPKNQNTHDPSQYRPITCLPTIYKIITSCITNKIVSHLEAHNVMSEEQKGCRRNHRGCKEQLIIDSTILKHSNKFNRNLYVTYIDFKKAFDSVPHSWLVQILQTYKIHPNIIKFLKEAMSNWRTTITLTTKTSKICCDEIHIRNGIFQGDSLSPLWFCLALNPLSRILSDSKFGYQLTRDIAVSHLMYMDDIKLFSKSVKEMKEMIKITAQFSKDINMNFGLDKCKTLTIKKKKLIEKNYEISEEINISEMLEGDLYKYLGIFQAKDINHSKLKQDLTTEYIKRVNQLCKKHLYSRNLIKAINTFAIPVLTYSFGIIKWSQTDIKNLEIKTRVTLTKHNYHHPKSAIERLTLKRQLGGRGVVDLKILWQNQIHNIQNFFYNKANTSKIHAAIVEVDDNFTPLNLKNNNKEFKTIQEQINEKIKDWRRKELHGRHIHDLEQNFIDLDASNKWLQKGYLFPETEGFLIAIQDQVINTRNYKKYILKESIESDLCRKCHRMPENIQHITGACPTLVQTDYTHRHNQIVHYIHQKLAHKYNLTNTPLKPYYEYQPNPVLENEEIKIYYDRAILTDKKIHYNRPDITLVNKSSKIAYLIDVSVPNTHNLLKTITEKINKYTELKEEIIRIWNLNKVFIIPIVLSTTGVIPKHLHQSLKILDLPPLTYITMQKAAILNTCRIVRKFLESDNELTDCTD

SEQ ID NO: 31653 - protein, 1259 aa, Vanessa cardui
MEQHSERLRIGPLPGGRRGTPGASAGCYSMRSTGGGGLSRRVPPEQLSTADNSLPVISASQNSAVSFNRPTEDVSQGAASSQPATTKAGKPRVRMKWDKEVNLFIMRTYLYITKLETDKVMYPKRLFDKFKTQYPDWNVSQQRIADQRRVIIRNKLISEDEIAHLKSEIAEQLRREADLNNQTDTSLHSPHLQSQPLIQTHNIVTSPKTYNITQSDASTQTNLTSLVHDTEVQYTQSTTLENPQQENIEELKNLFETALTKFQGTDPKTRPKLPRLKESKLLHDLIYTFNTHILPTFFSLDSDLLHLHTLIYCSALVIITKLGYKIKSGNIEDSSIQKKKSHKPAWEHRLENDIKKLRADIGRLTQYIKGNRSKKVVEKVEIIFKNTKLHTIHERENKKPEEYIDTLKQKLSLKSHRLARYRKALNRKQDNKLYCTNEKAFYRSLNSCTSNYTNKEEQIPNKDELKNYWAGIWEKRSNHNLQAKWIEEENQKWGYMENMEFIELKLDVLTEVLKKTKNWKAAGIDQIHNFWYKKFTSLHDILTKIISDLINCRTPLPNFITTGLTYMLPKTQNTHDPSQYRPITCLPTIYKIITSCITNKIVSHLEAHNVMSEEQKGCRRNHRGCKEQLIIDSTILKHSNKFNRNLYVTYIDFKKAFDSVPHSWLVKILQIYKIHPNIIKFLKEAMSNWRTTITLTTKTSKIWCDEIHIRNGIFQGDSLSPLWFCLALNPLSRILSDSEFGYQLTRDIAVSHLMYMDDIKLFSKSVKEMKEIIKITAQFSKDINMNFGLDKCKTLTIKKGKLIEKNYEISEEINISEMLEGDLYKYLGILQAKDINHSKLKQDFTTEYIKRVNQLCKKHLYSRNLVKAINTFAIPVLTYSFGIIKWSQTDIKNLEIKTRVTLTKHNYHHPKSAIERLTLKRQLGGRGVVDLKILWQNQIHNIQKFFHNKANTSKIHAAIVEVDDNFTPLNLKNNNKEFKTIQEQINEKIKDWRRKELHGRHIHDLEQNFIDLDASNKWLQKGYLFPETEGFLIAIQDQVINTRNYKKYILKESIKSDLCRKCHRMPENIQHITGACPTLVQTDYTHRHNQIVHYIHQKLAHKYNFTNTPLKPYYEYQPNPVLENEEIKIYYDRAILTDKTIHYNRPDITLVNKSSKIAYLIDVSVPNTHNLLKTITEKINKYTELKEEIIRIWNLNKVFIVPIVLSTTGVIPKHLHQSLKILDLPPLTYITMQKAAILNTCRIVRKFLESDNELTDCTD

SEQ ID NO: 31654 - protein, 1246 aa, Photinus pyralis
MDRKSTPHQRRASLSGARAPGSTEPGPSPSAIARSQHGVESSPDTRRTAPPPDVDKPHKCGKCGHACQTKSGLARHVKTCGTRRQDVCIYCGKAFPTYAAVRQHEHRAHPEHFNASMEKEAKPSEAVLMAKIAKVEATALRGVFNYKEAVATTGLSKHQIRHRREQPEYPAYLERAISERKRLSQTTFGFTPPSATKRSSISTMGPPTPTAPPDAPELVVCGPPAIPIPYAVPRLVPPAIPSTSTADDVPAPTPSDIDHQDVSSWADEPAPKGTKRRISSPPQQPPTTRPRLQESPPCGTPTSSAAAESLGTKRKRTTSTPTPPRESRLKPRTAAVSPPSAVEVPAPPTRSTTSPCIPSPAAPPPVGGDTNIDPAQDPPSRDPLPPRLREDASFLARLLLLKGGAEEATTKRLLHTALSGTIPELEDAIQGYMEDRFPVRQRKPPRVRIRPIPPPPPATSTIRRASEFAKAQDLYAKNRSLLASCILDGKPLSAEEVSPSMADVEKLYASIFARPSPPDEQPIQDYPEPSKGIYAPITTDDIEAAKRGWSNSAPGVDGITIPQVRRCPAKHLEALFNAVLYRRYTPASWRASRTVLIPKDGDRRNPENWRPITIGSALQRLLHRILAKRLTRAVSWNIHQRGFVHPEGLLANTLLLDQYIRSRRAQGKAFNVVSLDLRKAFDTVSRSSIERALRRHQVSAQLSEYIMSSLEDATTNIQVGGGVSGAIPMRTGVKQGDPLSPALFNLVIDELLTTLNESGTGGTVAPATRVAALAFADDLVLLEDRDLDMPRALHETETFLQARGMQINPKKCTSISTVRVRGTSVPRTKPVFTIAGQPIPSLGTINTFKYLGHRYSAAGTQKPNLFNLTSWLSNLERAPLKPHQKYGILRTYLVPRMVYGLQNPRTTAALLTEADRMIRRSTKKMLHLSSKTGNQLLHAGSRDGGLGVPELRRLIPWVLAKRFATLQRLNDPLTSAILESPGPARDLLERTEHLVKGPPDAFWREEVASRPFSAGLEEAAHDASSRSWINFPPTGWSGRDFVRAVQLRTSNLPTKGLPHIPEGERRCRGGCGRIESLSHVLQRCHVTHFDRIKRHDEVVKKVARHSRRNGWVVEVEPRVYPPDRQLYKPDLVIHMPNHNIVVADVQVCWEGTDRSLAESWEAKRVVYDNPRFREAAERRWPGERLRFLPLILGARGIWPRCNAETADTLRITPSVRASCVHSCLKWGSTLHRNFMAAVWKRRPEQS

SEQ ID NO: 31655 - protein, 1854 aa, Anelosimus studiosus
MDQEIINQDNYENENCFFRLHNKMMNTSSTSTSSSRNSSIINTRSQSKLVFKCPYCNKISASRRDTVKHLKNHEDYFSELNKYIKDNNYNADNIKVNARILKEIYPNAIMYSNIPDNDAVMTRSVEKHSSNVQVATASDANGTRADTEINKFIDDKQEFPPLPGTSEDLDNILIPSNYVSPPPGFAKILITPPRCNYAEKLKTPPKTEFKLTKLTPKNSREKLNSIIITPSKGNQEDSKDINDGNDGKIYTSTPIKGEKRDKYEYKGKNTGINDEQNNLNHEVKNDKNVKNDDNENEGKNTKTLIDKTECCKQSSESNMINEERPISNVKDDVNKDKNTNENENNINILFKPIDEFYNNVKCTICKIELNGKDNVMKHMEEHCFSPERKDLNNSNSSCELIIAEEEVQRCKFCEIACTDKAEKISHEEEHIRQMEEKNKINEKKDEPLLTFECDYEGCKHISTTRKGLNSHQTSAHKKDVVIQKSPIKTNSQIKKEENEKYLEDEENYRGYQPFRQPTNHNDQIIKEKISNFKISEKGECSNNKVIDNNKEDQGKIIDNTSEMFVNPIRRGNRIYLYFPMKDFICCTEEDCRTTYTAGTWYNNKRSLTRHLIRDHGFEKIDATNRCNYCKYTFRGKPSQHKCFNNKPFYIRSGARFAFKCDECGFSAPHIQGLRNHKAQHKINNNRYKEQYKESIKDINKDRIITNTNRKRSDEVIKPKFISKRIEKVYNDKIMKTNSIEEKINNPGEGKSSSLTPPCNNPKSRQNLPDKKQAKEKKKEDNDNNNEGFIIQHKSNKSVKRISNYNEDETPINNRFTVLDSLKENYNYCEEDNIVEDPDLLVLNIDEEERGFISEISIKKLPKSDNKEDDNNDNNPINECNTTKDTNIDPSSNDNFESTEEESPLMEFRETLMNILESEVCEEGWEEFLETCDEITTKIGKIVKLPNPKIWVNNTNNNNSNEENDAKKATRIQKLYRRNKRRAMREINNENKGFCNINKDKIIEYFNNSMKEKFHDSSVHENTIPAPEPVCLDDFTSIEVKRRLHKFNNSAPGEDRLTFQHLKSADPECYIFTRMLNICLKYKKVPESWKKSKTILIPKEDPKSQDLKDWRPITLSNTIYKLYTGCLCKRLMEWFTTHNILSSCQKGFMPHDGVFEHNFILQKYLRDARMFRKDLCIGSIDLANAFGSIPHSAILQALAANGAGGNFHDIIRDLYTNTSTKFVTTDGLSEDIEIKVGVKQGDPISGPLFNIAIDPILRILQGNQQIINEINQTKDIPETKDQDISPSADDFKSNKRIRKTAPETKPPRNEMYNALAFADDITIIAESKIDLQEKINAASQTIKQLNIDINISKCFTLHISGKHPVGTRNSVFKINNTEIKHLEEAEAKKFLGVPVGFRLLSPTNKIEDYQALSENIMKSNLAPWQKIDALKTFLYPATQFDMRNGIHAKGAWSNLDKIIRPGIKRILNIPNEACNNYIYGSTDYGMIGIPMTAVDSDIAIIDSAFKLLNSSDEMIYNEAWHDLYLHVSQRYNFEASTEDLCKFLSKDENEKDKGSTNKLTSIWAKARKASGRLNIKWVLIENYLHLKIEDFLIPPSNKNRVMKILRDSYKEDLSKDLIQNKPNQGKTFDAVADDKASTHFLRDGQYTRFCDWRFVHPARLNMLKLNATTRSKESRRPGFSNMCRRCHSQPETLPHVIHHCMRYSPIYTRRHNKIVKRIKDAAIKKHQILGENTQINGIQGLRPDLVISRNNKATIIDVTVVFENRRSRFEEVRQEKINKYIPIKKDLSKNHKHVDIIPIVVGGLGSWDKENDKLLTKICSRSYARTMKKLIVSDTIRYSRDIYQEHITGKRQQYE

SEQ ID NO: 31656 - protein, 1345 aa, Pandalus platyceros
MASYEAKNQSIAFMNQAIKEDVLPDRSLDQITGRRRHYQYRDLVASLVEKLREKKEISKDKNERKDRARLVKLKLRESFDSFESFELDSEEKENEQSIMSEGLLDSESSTGGDSSEVETVKVKPRLQSKVKENEPEKAKTKEFWNENELQRMAGIESKFKDEKKDKRTGVNQFILMNLEGKRSMESIKSKRKDPQYQELVKFYIKERVNIKTQEIGPKPAVVPKGGAVRRGGWTKDELDKMARYETEATNKGNMNLKINEELLPNKTNEAIKSRRKRVDYQEMLRKLERLIKKEKDKKLEIGPREVVKHSLETGLTSPCSRDELKSSIDDKEEKEGVSPQMKLDKSCRRKIKPQAPIKEDKKVKEKEKEFKESNKMRQIQTRSLRSNKDNDKSSCIDSKTENIIWNQGISASKYKILVNECLEKDCHVKLTRSAAAGSMMRRAESSDGCCRADVAAGPSVVEEPSVSGVSMAAAAEDACREGREEENGRKRDKSPNGEITNLAVQDTNEPLYEVNPPSPPSSPSESSDGGGTEPENDDGRNQRQDIDALKNELFADVVVRRPRGGPPPARVRHFNPVVERRRKYAATQKGWDKDRGKLIRNIFGGKDPLATPSFPDGTTEFWTELFSRPSPPSWSGAQAGGDIDILEDITSEELEWSLRKMNPATAPGPDGLRATDLKNINRAGLKNLYNILIQQGESSKLWAEGRTTLIPKVDTPLGPGDFRPITITSVVTRGLHKILAKRLADRLPPGVRQKGFQPEDGVSINVMLLREIINKAKGSSSNLYIAFIDFKKAFDSVGHPGLIDAAKRAGLSSNSADYLKDFYSKISTNVCGVRVEIKRGVMQGDPISPSLFNLTLDIALQRLPPEVGVRIEGVGDLVNYLAFADDIALVATTRAGLTLSIRALLEGAGELGLEPGINKCGTMGILGDKHRRTWFADDRPFLFRDAPLPVIQQGDFYKYLGTEAGIVVRESAGRLTEQLRLLLCKLQRAPLKPQQKLWALNVCLIPKIRFPTENGNPTKGQLKALDVQIRKFVRKALHLPGDTPIGGFHTSIREGGLGIHSFLSENGKHINNKIDRLRMSSDPAVKIVAERTPHLVQFEENEPGHWASKLHNSVDGCGLRDAGETPESSSWVGDGSRLLKGGTFVQAIKVRLGVVATPARGARGRDLTGTCDLGCNLQGTIHHISQTCPRVQPWRITRHNRTTKLVVDKLRARGYNVTEEPHIPTPQGLRKPDLMVWNESRSFVLDTQVVADSNICTPNEADMRKIEKYSTPAIKQYVHQRTGLDPEVGGITITWRGVMAKQTSQLLNRLGISSADRRLLCVRALQGTISIYANYTGMSGGGDVT

SEQ ID NO: 31657 - protein, 1861 aa, Araneus ventricosus
MANPQTLLETTSLLEHDIPSVTNSVILSPPREVLPPLSVRASPALVSVPQSPVLPTNSDCSILVTDILTSPSPICKRTRKQLLLRHTATIAVPHEQLSSDMPLDLSPRRPGCSMDSSHVSTSFLDGASVPPFAMPRVDDSCHQENLSLPAGTVSPVEQSPPSAGGLSSGLVASAGLSDPAISDHSDVPPPRELSPEEVLTLQCIKLEKVSQDSPPLEPPTLPPVAIAPASCSAFQAVSPGGDSPPRDDHSTPSKAETSGFQVIPLEKQLELTPSPSQPSGACVETSGTPVHQSEVLYYPDSLRCRYCELVLSSPRSFHDHVRENLHFEKSLDVTTDMFHCSVCKLAFDSVGALSSHVCPGLRPVRTPPKSSSDHMSCGAPVLSPPSPAQPIGQCNGPSPVSQRPPSSYDPANDYVCNTCGVAFPSEAHFLQHQCVELQSQDTPSIQCTKCDFRAPTVNLVEAHIFQVHSPVFSDSQKSQDRNTVRCLNCSKSFESVSAKDSHVCVPPSLQFLPPSEGPVRNCPTCNFVERGKPDLAEHIAKRHTCSLCQFVEHPDQRLSDHTKTAHSCLVCGFVETRSLSVSAHSKERHACKLCSFVEKKKSGLRFHMKTIHGQWAKSHNPVVRNLSNEFSVSASSDSRPTVPSLPSELYCLGCSAKFVQPSLFSEHSAKCSKYRAILDAAKPPRAPLPPIHKCSSCPFVGKDGPALASHVLAKHPPATPASGHSDSDNPDDPASPIRRSPVLGDIPAAPVAIPTASCRRGESLNIVFPIFGKIDCTENGCNRPFANDSWSSIKNSLKRHLEKDHDIRIRSSFFWCSICKLRIGRSPTSHGCLQGKPVLPPSTPFHWKCDTCPSSFPSEAGLRNHKRMHKLNEIREKGEQLVVAKPVFRGRRVPRLPDAVASSAADECVSDPAQVIAQQVDCPGLPTPPDTQANSEACLLDPFITDLKSICDQDPSDGAFTFLCVTYDQAIAEISSALLPPLRTSVSRNEPPKFDPLDAKEVQRLYKRNRPKAIREISGKSGERCSLPADQLEAYFTEAWDSQHVVSDFFPVDTSGRGFVLDAPFNAKEIINKLKSAENTSAGPDRLCYNDWKCIPRAAQFLQALFNACVHLRRVPPVWKKSTTILLPKKGDLSLPCNWRPIALSSTAYKLFTKCLAARLSTWCDQYSILSPCQKGFTPHDGILEHNFVLQQSLEQARLQRKEICIAWLDVTNAFGALPHSAIFEALTAAGTGEQFTDLIRDIYSDASTQILAGQSTTNPIGIKSGVKQGCPISGLLFNICVDPVIRSVQGNASGHRVLAFADDVCLLASSPAELQSMLDSVFAQFSALGLSLNAQKSHSFHFNGAPPAGTRNTVFTINSTSLHPIVEGDFHKFLGKPVGLNICPDYKTFKDLSQLAADVLGSSLAPWMVVDAMLSFVYPSFQFAMRTAQFKKEAWASLDKMIKESMKKILSLPSRASNEYLFGHRKMGCIGLPLCAEDSDIYRLDSQFKLLTSKDEQVAALALLNLKSTVALRLGIQSPSDQDLSEFMSGFHEDRYRTSTNRLSNVWTCARLASTRLQVAWEFLDGVPRLHFQDLTLKAGDRRKILHSLRNKFKSLRSIELINKPDQGKVMECVALAPASSHFLGTGDYTRFCDYRFVHSARLDVLPVNATKRWDKNANKACRDCEECDYETLPHVVNHCKGGGKFRPRQLRHNATVGRIKKALLPRCELLAENQVVGSDGLKPDLVFRKGRDIFIIDVACPFDNRPSALEDARKEKCDKYASLLPFYSSRGYNPVVVPIIVGALGSWDPKNDIFLSKHMSKSYLHKFRQLCVSETIKWSRDIYVQHITGKKQYEETGQDFEEQQPHGPQTYFEYINSQV

SEQ ID NO: 31658 - protein, 1861 aa, Araneus ventricosus
MANPQTLLETTSLLEHDIPSVTNSVILSPPREVLPPLSVRASPSFFSAPHSPVPPMNSDCSIIVSDILTSPSPICKRTRKQLLLRHTATIAAPHEQTSSEMPLDLSPRRPGCSLHPSNDFTPSPDGASVPPSGIPWADDTGHRVHSNMSSDTVAPVKHSPPSPSGLSSGLVSSAGPSDPAVPVRSFVPPLRELSPEEVLTLRSIKTEKVSQDPPPLEPPTLPPVAISSASSSAFQVDSVGGDSTPRDEHLTPSKVGTGGFQIIPLEKQLELTPSPSQPSGVCLETFGSPVQQSEVLYYPDSLRCRYCELVFSSPRSFHDHVRENLHFEKSLDVSSDMFHCSVCQLAFDSVGALSSHVCPGLRPVRSPPKSSSGHKSCCEPILSPPSPALPVDQCNGPSPVSQRPPSSYDPVNDYVCNTCGVAFPSEAHFLQHQCVDLQSQEPLSIQCTKCDFRAPTVNLVEAHIFQVHSPVFSDSQQSQDRNVIRCLNCSKSFESVSAKDSHVCVSPSLPLLPPSEEPVRNCPTCNFVERGKPDLVEHIAKRHTCTLCQFVEQPGQRLSDHTKTVHSCLVCGFVETRSLSVSAHSMERHACKICAFVEKKKSGLRFHMKTIHGQWAKSRNPVVRNLSNDLSVSASSDSLPTLPSLPSELYCLGCSAKFVQPSLFSEHSAKCDKYRAILDAAKPPRVPLPPIYKCSSCPFVGKDGPALASHVLAKHPPAAPASGHSDSDNPDDPASPIRRSPVLSDNSAAPVIIPTASCRRGDSLNIVFPIFGKIDCTENSCNRPFANDSWSSIKNSLKRHLKKDHGIRIRSSFFWCSVCKVRIGRSPTSHGCLQGRTVLPPSTPFQWKCGTCPSSFPSEAGLRNHKRMHKLNEIREKGEQLVVAKPVFRGRRVPRLPDAVASSAADECVSDPAQVIAQQVDCPGLPTPPDTQANSEACLLDPFISDLKSICDQDPSDGAFTFLCVTYDQAIAEISSALLPPLRPSVSRNEPPRFDPLDAKEVQRLYKRNRPKAIREISGKSGERCSLPADQLEAYFTEAWDSQHVVSNFFPIDTSGRGCVLDAPFNAKEIINKLKSAENTSAGPDRLCYNDWKCIPRAAQFLQALFNACVHLRRVPPVWKKSTTILLPKKGDLSLPCNWRPIALSSTAYKLFTKCLAARLSAWCDQYSILSPCQKGFTPHDGILEHNFVLQQSLEQARLQRKELCIAWLDVTNAFGALPHSAIFEALTAAGTGEQFTDIIRDIYSDSSTQILAGQSTTNPIGIKSGVKQGCPISGLLFNICVDPVIRSVQGNASGHRVLAFADDVCLLASSPAELQTMLDSVFAQFSALGLSLNAQKSHSFHFNGAPPAGTRNTIFTINSTSLHPIVEGDFHKFLGKPVGLNICPDYKTFKDLSQLAADVLGSSLAPWMIVDAMLSFVYPSFQFAMRTAQFKKEAWASLDKMIKESMKKILSLPSRASNEYIFGHRKMGCIGLPLCAEDSDIYRLDSQFKLLTSKDEQVAALALLNLKSTIALRLGIQSPSDQDLSEFMSGFHEDRYRTSTNRLSNVWTCARLASTRLQVAWEFLDGVPRLHFQDLTLKAGDRRKILHSLRNKFKSLRSIELINKPDQGKVMECVALAPVSSHFLGTGDYTRFCDYRFVHSARLDVLPVNATKRWDKNANKACRDCEECDYETLPHVVNHCKGGGKFRPRQLRHNATVGRIKKALLPRCELLAENQVVGSDGLKPDLVFRKGRDIFIIDVACPFDNRPSALEDARKEKCDKYASLLPFYSSRGYNPVVVPIIVGALGSWDPKNDSFLSKHMSKSYLHKFRQLCVSETIKWSRDIYVQHISGKKQYEENGQDFEEQQPQGPQTYFEYINSQV

SEQ ID NO: 31659 - protein, 1171 aa, Dermacentor silvarum
MDYILKYDTDIYICHICNVRVTSRNKLESHYSTHSVHLLWQCPHCLTKTFPSSKSMSSHVSRCKREHAARLPPPSPVLSIPHESPESPVNARLSSVPGAPTTDMQSCSTAVCPEEATVLNENFNETVQSLETQQVVQDDSIHASHSASSSRAPRPAAGRYVNLTRGQWTLAEMESVARAELSLGEVYSVVDVLATKFPHRSKEAIEKTRKLPKYIDILSTLKTTHTGIATQNILDGPTYSHCRWADSELIALAKRELAVGPHKRINEALHAVFGSRTISSISQVRRTTRYQDIFELLRSEVVVPPPAFPPFSGIVPPPPLELSAADVRLALSEIGIVNEAIVSSLVAGPTSIDDLRLIYKVFGVKQKQKSKDKSRESTQQKQQNRSQRKRARYVEHQRLYHLGPKVLADHLLIGDTNACSLSDLHKEFDPIFNTYSSPLSTPLESSISLEVDETLFTEGEIAVAIRLLSSKSAPGPDNISIPELLKVPPSVLTHIFNNWLAFGIVPLEMKQSRTVFIPKKFNPVGPGDYRPISVSPALFRLFSKLLLCRLSATNNFHKYQSGFAEDCSTSSNLLVLQALMRALKLQHRPFFAVSLDLRKAFDSVSHSAIFSSLEARKVPTRILNLIRHLYVNCTTTFTCGGISDNVRVPLRRGIKQGDPLSPFLFNCIIDPLLYMLNDLGVGVPLGAASMSAMAFADDLLLVSDTSEGLQLLVDETVRYLNNVDLHINPTKSQYFGWRPNHYTKGFDYSIPPIVISGNTLAPKARGEPIRYLGIDLYTNKHPTVDSKKAHSLLGLIAKASLKPFQKVNCIRQLVLPAFLYGAANSLEVASESCRLDALIRTWVKKTLHLPSGFPNIHIWLPSKRGGLGLIQLQRVAQIVQFKSLTRLLRMGDIFIDNLFDIILDKNHKRISELFGVPSGITSVKAVESALRRGTTKWWNDLKTRYTNKDLFAHHDQMSANTWLGYESKLLKDGDRVKALRLRTNLYPTKSLTNKQSKDPASRLCRRCGEKPETAFHILQECESVHLARTERHNFVATQVARLVREKNPEVNVREEPRLTTSDGTRLKPDLVVETPDRVMVVDVAVVWDANEGVLRQKTREKAAKYAVLSSCMSARSRFSSHGLVFGARSMLCKETVEVGELLGLSRADLAWLSASVLRGSLICLNRFRKRV

SEQ ID NO: 31660 - protein, 975 aa, Sacculina carcini
MRCRAAGMKISPNEPNQRPTDSQIHGHQQEGAPRIDAAHISCSSCRTVNSRKRLVTCNYCQRVYHLTCAGLTRAQADVLQTWHCRTCLDSTGFADAVGHFTETAAPPTDLADALATLRSEHLVAQHVPKRFRHQIALDLSSLINDALESRSVVAWWRLLSYAYTGPLARSKSSGSKVFGTSRSKKTDTNAVLGRRVRSKCADGDIKGALRLLSSDETMATPCDEAYAAMQLKHPPAPASEDLSTDVSLAQELSVTEDEMESALRSFNPSSSAGIDGIRPMHLRQLTGKGVAEAGRRFCSSLTKLMNCVLSGSLPDMVRDAFFCARLVTVKKKDGGLRPIAIGCTYRRLASKLVASRMTAAIAPKLRPVQLGVGTPLGCEAAVHAVRQFTELSTRATDVICKLDLKNAFNSVHRRAVFDAVSQRFPAALPILRQAYSQPSPLFLGTMRLWSCRGVQQGDPMGPLLFAIAVDPIAQSMQSPMNVWFLDDATIAGPIDVVTSDIHRATIALESIGLEVNMSKSEVTHLNTAGGLQSGINTIAEQLSEATDSFFRFARYTPLDKLTLLGAPIGKEAICPALDNISHITQLMTERCAHIGSHAAIFFLSKYSTVPRATYLMRSAPVHRVFSRLSHIDDVMRAALSDCCNVELNDDRWTQASLPLRLGGIGMRRLVDVALPAYVASIHATKVLVDEINRHLPGDRPATLGASLALYRESQNPDLEPDVVLTQKNLDVLASKRRFNSLLLKANQLDRARLLAAAAPHSGAWLSALPIESLGLLLPDDAVRTGVALRLGAPLMQPHRCRCGAMADRFGHHSLSCHSAPGRIPRHSALNDAIYRALSAAGITAILEPRGLDRGDGRRPDGMTIAPFRRGRMLLWDATCTNTFSGHLMECAVVAGAAAEAAEQRKRQRYAELCQRYDFVPLAIEISGAMGAELQNFTSQLGRRIRERTGDNRETSWLRQRIALAVVRGNTAAVVI

SEQ ID NO: 31661 - protein, 1065 aa, Sacculina carcini
MISSELLLYSLIFGEYSSDLRYLAITVRMSACTICRDPGPCQSEYGAVACRACNVFYQRHHLDDSALSTCSTGGGCILTPTVRSCAACRLMRCRAAGMKINPNEPNQRPTDSQIHGHQQESAPRIDAAHITCSSCRTVNSRKRLVTCNYCQRVYHLTCAGLTRAQADMLQTWHCRTCLDSTGFADAVGHFTETAAQPTDLADALATLRSEHLVAQHVPKRLRHQIALDLSSLINDALESRSVVAWWRLLSYAYKGPLARSKSSGSKVVGTSRSKKTDTNAVLGRRVRSKCADGDIKGALRLLSSDETMATPYDEVYAAMQLKHPPAPASEDLSTDVSLAPELSVTEDEMESALRSFNSSSSAGIDGIRPMHLRQLIGKGVAEAGRRFCSSLTELMNCVLSGSVPDMVRDALFCARLVTVKKKDGGLRPIAIGCTYRRLASKLVASRMRAAIAPKHRPVQLGVGTPLGCEAAVHAVRQFTELSTRATDVICKLDLKNSFNSVHRRVVFDADSQRFPAALPILRQAYSQPSPLFLGTMRLWSCRGVQQGDPMGPLLFALAVDPIAQSMQSPMNVWFLDDATIAGPIDVVTSDIHRAAIALENIGLEVNMSKSEVTHLNTAGGLQSGINTIAEQLSEATDSFFRFARYTPLDKLTLLGAPIGKEAICPALDNISHITQLMTERCAHIGSHVALYFLSKYSTVPRATYLMRSAPVHRVSSRLSHIDDVMRAALSDCCNVELNDDRWTQASLPFRLGGIGMRRLVDVALPAYVGSIHATKVLVDEINRHLPGDRPATLEASLALYRESQNPDLEPDVVLTHKNLDVLASKRRFNSLLLKANQLDRARLLAAAAPHSGAWLSALSIESLGLILPDDAVRTGVALRLGAPLMQPHRCRCGAMADRFGHHSLSCHSAPGRIPSHSALNDAIYRALSAAGITAILEPRGLDRGDGRRPDGMTIAPFRRGRMLLWDATCTNTFSGHLMECAVVAGAAAEAAEQRKRQRYAELCQRYDFVPLAIETSGVMGAELQNFTSQLGRRIRERTGDNRETSWLRQRIALAVVRGSTAAVVI

SEQ ID NO: 31662 - protein, 978 aa, Lasioglossum lativentre
MAREEALAAQRGVRFINQHLVTVVPGRTLDAIKGVRRGQAYRNLVAAAMQDVEAASLNSTGVVGASPSPPPRSPHRCSTPLTRTGPTSPGVPSPGEVSFLGLLCDDIPTAIRGLIPVAGNIVGWQSTSLVRLAQDSLAGLDVRERLSAWLGSVFPSFQPPPRPLTSTARTRRASGSGKKAQRRREYARIQRLFRSSMSRAAREILDGQGDTGATVPNVSAMTGHWGPYVGRPSCVVEQLQAPRRSPDLTHLWLPVSCEEVVAAKLPPQSAPGPDGISVPLWRAVPPSIKALLFNIVLHIGGFPASMLTSRTVFIAKKGDSQLPSDYRPISITSVAVRHLHKILAERLRVSRLIDLRQRCFDDGCSDNITALAAALHEARLRRRELHVASLDVAKAFDSVSHQAIARILDNVGVPGELVKYITRLYACSSTMFEVRGERSELYKIGRGVRQGDPLSPVLFCLVVDSIMEAIPPDVGFQLGGCRLSALAYADDILLFASSQWGMQKALDVVETRAGSYGLEFNGRKCSVLSLVPAGKIKKVKIITEPLFHLRGGAVIPQISTTAEWRYLGVDFRPSGPKKIKVDLSLYLERITRAPLKPQQRLMLLRVFLLPRLYHSLVLGRATLGKLRALDLQVRAAVRRWLRLPRDVPTAFVHAPVAGGGLGIPALSTSVPGLMRSRLLRLERSRLPVLQAVGDSLWVYKRLQWATKALTRESGTLSSKHLRDAWWTHRLHSSTDGYELRECDGSPLSSRWVGSGSLMVPGRDFVQYVHVRINALPTLVRTTRGVARRGQATGCRAGCLSTETAAHVIQGCFRTHGGRVLRHNAVCKTVAAGLRKIGWTVLEEPVFRTDEGRRKPDLVCAKDQRVRVIDAQVVSGVPPLDDSHKKKVRYYSTNPSLVEAISARCGVRKENIQFSSCTLSWRGIWSPSSADSLMGMGLTAGLLRGITTRVLQGSHTNWTRWNRMTSLGPPASRNREGVG

SEQ ID NO: 31663 - protein, 1033 aa, Andrena haemorrhoa
MRRPVCLMAREEALAVSHGVQFINQHLLTLVPGRSLEAIKGMRRKPAYQTLVAVAMQDIAAASSLGAGPSTASPASAAGHPSPSTPTDPVLLDPASPGVASPGTSLLGQLCADIHEAIRALIPTVLNICGWESNILSRIARDCSEGVDVRDRLLTWVEFVFPQVGQPPRPHRRRRAVRGGKKAKRRAEYARVQRRFRSNMSWAAREILDATGDEGELVPDVRAMANHWGPYVSQASKPVPAAPRPKRKPELAHLWYPVSCEEVASTSLPLNPAPGPDGVSVRLWRAVPPSVRALFFNVVLASGGFPPTMLSSRTVFVRKKAGADSPADYRPISITSVLVRHLHKILAARLRASGVIDPRQRCFDDGCGENVAALASSICEARTKLRELHIASLDVAKAYDSVSHHAIARILDDVGVPAQFTAYASSLYQSSSTMFEVRGERSGLYRIGRGVRQGDPLSPVLFCLVVDRVMEAIPADIGFQLGECRLNALAYAEDILLFAGSEWGMALSRVEEKAWEYGLLFNALKCRVLSLVPSGVVKKIKYITTPTFQLGGGGGGGASTGTAFIPQITSDVEWKYLGVDFSPTGPKKVKTELVLYLDRIKRAPLKPQQGLTLLRTFLLPRVYHALVLGRATLGKLRALDVQTRAAIRKWLRLPHHTPAGFFHAPVAGGGLGVPALSTTIPGLMRERLLNLGKSSSPQMRAIAESTWVTRRVQWATNALTRNNGVLSSKYLRGKWWTHRLHASADGFELREAPDSPLSTRWVDSDSRLIPGRDFVQYVHVRINALPTLVRTTRGEQRHAQTTRCRAGCLSTETAAHVIQGCFRTHGGRVLRHNAVCNTLAAGLRNIGWTVHQEPVFQTTEGRRKPDLVCVREAKVSVVDAQVVSGIPSLDDSHVRKVSYYAHNSSLVDGIASRYGVRKEDIKFSSCTISWRGIWSSSSADWLLGMGLTSRLLRGITTRVLQGSHTNWTRWNQMTSYGSPAFQSGQRRHRVKRKGRNKAFGVSRAPSLLCNSCLTGFVYMLFIYPVRGQRRKKK

SEQ ID NO: 31664 - protein, 1047 aa, Nysson spinosus
MAHQQPFSVASLIAATASPALFPCPNCDRAFRTKTGLGVHRRRAHPSIFNEEVDVRRTKRHWSPEELRLMAREEAIALQRGVRFINQHLEGLVPDRTLEAIKGARRGQAYRALVAAAIQDLEAASSTVDKAPAVEEVASSPPSSSFGPLYPDPLHGRSSTSRSTSRSTSLQGQLYPDFHSAIRSLIPAVRSLDGWDVNTLTQLALECIEGNFSREGIGTWLRGVFPPHNCAARPPLRPDAVPRNRKALRRLEYARVQRMFRSNMSWAAREILDATGNTSAAVPDVGTMSLHWGPFVTQASVPAPPEHPPPEKEELGFLWHPVSCEEVAATTLPLTSAPGPDGISVRQWRALPPPVKALYFNVVLATGGFPSSVLASRTVFVPKKTQSSDPADFRPISISSVVVRHLHKILANRLRASGLVDLRQRCFDDGCAENTSALASVIAESRSKLRELHVASLDVAKAFDSASHNTIVAVLRRLGVPHGLVEYIAHLYRDSSTAFEVRGERSELFRVGRGVRQGDPLSPMLFCLLIDDVLGTVPPDVGFEIEGCRLSALAYADDILLFSSTKWGLQQCLGLVEARAGKHGLRFNAEKCSVLSLVPSGKAKKIKIITTPTFHLGGGASIPQITSTAGWRYLGVCFAPAGPRRVKVDLALFLERVTRAPLKPQQRLKIMRCFLLPRLYHALVLGEATLGKLRALDLLTRAAVRRWLRLPKDTPTAFFHAPVATGGLGIPALSTTVPGLMRQRLLNLGQSRSPAIRAIATSAWVTRRLQWCTRALTRATGLLSSKYLREKWWTHRLHDSTDGYELRECPRSSLSTRWVDACSHQIPGRDYVQHVHVRINCLPTAVRTSRGMAGRGQAAKCRAGCQSMETAAHVIQGCFRTHGGRVLRHNAVCRTLASGLRNIGWDVVEEPILQTSEGRRKPDLVCTKGEQVRVIDAQVVSGVPSLDDTHERKARYYSQNPSLVEAITARWGARKENIKFSSCTLSWRGVWSSTSTDHLLGMGLARGLLGGITTRVLQGSHTNWTRWNQLTTSRGPPGSHTERQGVG

SEQ ID NO: 31665 - protein, 846 aa, Nysson spinosus
MQQETRVPRSLMLEQCPSIGVRLSPRPLSQPLQNIHLRKKRSWASCGILYLARKLLLPPCRLPPPPGQTASVSALPPPVKALYFNVVLATGGFPSSVLASRTVFVPKKTQSSAPADFRPISISSVVVRHLHKILANRLRASGLGDLRQRCFDDGCAENTSALASVIAESRSKPRELHVASLDVAKAFDSASHNTIVAVLRRLGVPHGLVEYIAHLYHNSSTAFEVRGERSEHFSVGRGVRQGDPLSPILFCLLIDDVLGTVPPDVGFEIEGCRLSALAYADDILLFSSTKWGLQQCLGLVEAGAEKHGLRFNAGKCSVLSLVPSGKAKKIKIVTTPTLHLGGGASIPQITSTAKWRYLGVCFAPTGPRRVKVDLALFLERVTRAPLKPQQRLKIMRCFLLPRLYHALVLGEATLGKLRALDLLTRAAARRWLRLPKDTPTAFFHAPVATGGLGIPALSTTVPGLMHQRLLNLGQSRSPAIRAIATSAWVTRRLQWCTRALTRATGLLSSKYLREKLWTQRLHDSTDGYELRECPRSSLSTRWVDACSHQIPGRDYVQHVHVRINCLPTAVRTSRGMAGRGQAAKCRPGCQSMETAAHVIQGCFRTHGGRVLRHNAVCRTLASGLRNIGWDVVEDPILQTSEGRRKPDLVCTKGEQVRVIDAQVVFGVPSLDDTHERKARYYSQNPSLVEAITARWGARKENIKFSSCTLSWWGLGSSTSTVHLMGMCLARGLLGGITTRVLQGATRVGPGGTSSPPPVVHLGPTQSCKGSGRFRAVDHPSGLPTPVTRGKLFKKKNNQMPRHSGGSNYDSLKGKTQPWAWGIVLSTRRSPTLEDVSSVALVRLASP

SEQ ID NO: 31666 - protein, 978 aa, Ceratina calcarata
MAREEAIAVRSGVRFVNQHLLNIVPGRTLEGIKGARRGAHYRALVAAAADDLSASSHSGNETSAEVSTPPSAAVVSSTPRTGHQSESLSPHESPVSSRLTCSLLGDSIYGAIRGLIPVVRNIRGWESNILSQLAQDCLSGVRVGERLTSWLVSVFPVQNVVFRPPPQRRHDLVHNSKKARRRREYARVQRLFRSDMSRAAHEILDATGDEDDPVPDVETMARHWGPYVSQSSKPDLSPVQDFTPKPELSFLWDPISCEEVITTSLPLNSAPGPDSVSVRQWRAVPASIKALVFNIVLASGGFPPTMLMSRTVFVPKKAGSACPADYRPISITSVLVRHLHKILAARLRMSGVIDLRQRCFDDGCAENIAALAAAIHESRTKLRELHIASLDIAKAYDSVSHHTMTRVLRSVGVPEGLVDYIARLYANSSTTFEVRGRKSELFNIGRGVRQGDPLSPLLFCLVADNIMAAIPTDIGFDLGECRLNALAYADDFLLFTSSKFGMQSALLNLEHRAGDHGLLLSATKCTVLSLVPSGKVKKIKVITTPTFQLANGSFITQISTVAEWRYLGIDFVVTGPKKVKTDLALYLDRITRAPLKPQQRLKLVRCFLLPRIYHTLVLGNATLGKLRALDLQTRAAVRRWLRLPKDVTTAFFHTPVASGGLGIPSLATTIPGIMRDRLLRLSRAQSPQMRAVSETPWVQSRLRWANRALTLNGATLYSKHLRDAWWALRLHSSVDGYELRECHESLLSSRWVDADCLAIPGRDYVQYVHVRINSLPTLVRTTRGVQRHGQAIGCRAGCRSSETAAHVIQGCFRTHGGRVLRHNAVARTVASGLRKIGWTVHEEPIFNTAVGKRKPDLVCVKDEIVSVVDVQVVSGVPPLDETHEKKVAYYAGNASLVESIGDRYGVRRENINFSSCTISWRGIWSSISAHRLGDMGLAAGLLRGITTRVLQGSHTNWTRWNQLTTRGHLDPFERQGVG

SEQ ID NO: 31667 - protein, 1141 aa, Nomada fabriciana
MTLLRGLFGSQSCGEVYSEPQHVPTPPPRGGTWAPACWWLTGLWLGEAGNCLVPVRRVASPADLVTAGPKETRKYNLRRGPRPAGPAAQSSPEVTTPHPVPQIVSPAAPPTSVPCPDCDRAFRTRIGLGVHRRVAHPVASNEEIELPAAKRRWGDEELRLMAREEALAVQGGVRFVNQHLVTLVPGRTLEAIKGVRRGQKYRTLLAAAMQDIEASALSISGQDTPEAVVAAPHSSLACASTPSSSRHGEPTIPISSPPASTSLLGHLVPDIPGAIRGLIPVVRNIRGWETNTISQLAQECLEGELVGDRITSWLTAVFPPHDRIGHRHAPRRPLRRRTGKKALRRREYARAQRIFRSNMSWAAREILDATGDMGNTVPGVQQMAEHWGPYMSQASEPAPHGTNTMPKPELAHLWYPVSCEEVTGATLSLKSAPGPDGVEVRQWRALPSSIRALLYNVVLLAGGFPPAMLTSRTVFVPKKGGSAEIPADYRPISIMSVVVRQLHKILSSRLRASGVIDLRQRCMDDGCAENISALAAVIYESRSKLRELHVASLDVAKAFDSVSHFAVERVLKNVGVPHEMVRYIARLYNNSSTMFEVRGERSMLYRVGRGVRQGDPLSMGLFCLVVDSILEGISPDVGFHLGGCRLNALAYADDILLFTASKWGMQASLRVVEERAREHGLEFNAHKCSVLSLVPAGKSKKIKINTHPTFQLGNGAFIPQISTTAEWRYLGVDFSASGPRKVKVELQLYLDRITRAPLKPQQRLKLLRCFLLPRIYHALVLANATLGKLRALDLLTRAAVRRWLRLPKDVPAAFLHAPVAGGGLGIPSLTTTIPGLMRQRLLSLGRSQSPAIRAVADSPWVVRRLQWALRALTRDDLLLSSKHLRDKWWSHRLHISADGYELRECARSPLSSRWVDADSLSIPGRDFVQHVHVRINALPTRIRTTRGARRHGQATQCRAGCRSTETAAHVIQGCFRTHGGRVLRHNAVCNTLASGLRNIGWATHMEPMFLTTEGRRKPDLVCVKGERASVIDVQIVSGVPQLDDSHERKVAYYANNLSLVEGMSARYGVDRERISFSSCTVSWRGIWSSRSADWLLGLGLTSGLLRGITTRVLQGSHTNWTRWNRMTSRGPPGSWERDGVG

SEQ ID NO: 31668 - protein, 976 aa, Megachile rotundata
MAREEAMAVRQGIRFINQHLMTVVPGRTLDAIKGVRRGQKYRDLVAAAMEDLNASSVGFGSPEPSSPPPPESPIAVSTPCNPARARSTPPGLSPSSISFLGHLGQDIKGAIMGLIPVVLNIRGWDTDNLSHIAQDCLEGIDVSEGVSSWLSSVFPPQAVGHLRPPRRPNARRLGRKARRRREYARTQQLFRSNMSWAAREILDATSRDNTVTPDVGRMAQHWGPFVRQPSKVVSPAPPTRPKPELAHLWYPVSCEEVAATTLPPQSAPGPDGIGVRQWRAVPPSVRALLYNIVLATGGFSPALLTSRTVFVPKKSGDPDSPGDYRPISVTSVVVRQLHKILANRLRASGLVDLRQRCFDDGCGENIAALAAVIHDSRSHLRELHVASLDIAKAFDSVSHQAIARVLTTLGVPCELVSYVTTMYARSSTMFEVRGQRSELFPVGRGVRQGDPLSPILFCLVVDSILRTVPPDVGYDLGGSRLNALAYADDFLLFAASVWGMQKTLGLVEQRAGEYGLTFNAQKCSVLSLVPSGKDKKMKVITTPLFHLGRQAFIPQITTTAEWRYLGVDFRSTGPKKSRIDLTTYLDRIGKAPLKPQQRLKLLRCFLLPRLYHVLVLGRTTLGALRALDVLTRAAVRKWLRLPKDTPMAFFHAPVASGGLGIPPLSTTVPGLMRERLLNLERSQSSQIRAIAELPWVARKLHWATRALTREEGVLTSKHLRDKWWTYRLYTSADGWELRDCIKSPLSTRWVDADSLGIPGRDYVQHVHVRINALPTLMRTSRGLRRHGQATQCRAGCQSTETAAHVIQGCYRTHGGRILRHNAVCRTLASGYRKIGWTVHEEPIFNTTVGRRKPDLVCVKAEEVNVIDAQVVSGSTPLDDSHERKLRYYADNASLVEGIAARYGVRKEKVSFSTCTISWRGVWSSKSADWLLGSGLTAGLLRGITTRVLQGSHTNWSRWSRMTSFDPPVPWDRRGIG

SEQ ID NO: 31669 - protein, 923 aa, Nomada fabriciana
MTLLTTPEAVVAAPHSSLACASTPSSSRHGEPTIPISSPPASTSLLGHLVPDIPGAIRGLIPVVRNIRGWETNTISQLAQECLEGELVGDRITSWLTAVFPPHDRIGHRHAPRRPLRRRTGKKALRRREYARAQRIFRSNMSWAAREILDATGDMGNTVPGVQQMAEHWGPYMSQASEPAPHGTNTMPKPELAHLWYPVSCEEVTGATLSLKSAPGPDGVEVRQWRALPSSIRALLYNVVLLAGGFPPAMLTSRTVFVPKKGGSAEIPADYRPISITSVVVRQLHKILSSRLRASGVIDLRQRCMDDGCAENISALAAVIYESRSKLRELHVASLDVAKAFDSVSHFAVERVLKNVGVPHEMVRYIARLYNNSSTMFEVRGERSMLYRVGRGVRQGDPLSMGLFCLVVDSILEGISPDVGFHLGGCRLNALAYADDILLFTASKWGMQASLRVVEERAREHGLEFNAHKCSVLSLVPAGKSKKIKINTHPTFQLGNGAFIPQISTTAEWRYLGVDFSASGPRKVKVELQLYLDRITRAPLKPQQRLKLLRCFLLPRIYHALVLANATLGKLRALDLLTRAAVRRWLRLPKDVPAAFLHAPVAGGGLGIPSLTTTIPGLMRQRLLSLGRSQSPAIRAVADSPWVVRRLQWALRALTRDDLLLSSKHLRDKWWSHRLHISADGYELRECARSPLSSRWVDADSLSIPGRDFVQHVHVRINALPTRIRTTRGARRHGQATQCRAGCRSTETAAHVIQGCFRTHGGRVLRHNAVCNTLASGLRNIGWATHMEPMFLTTEGRRKPDLVCVKGERASVIDVQIVSGVPQLDDSHERKVAYYANNLSLVEGMSARYGVDRERISFSSCTVSWRGIWSSRSADWLLGLGLTSGLLRGITTRVLQGSHTNWTRWNRMTSRGPPGSWERDGVG

SEQ ID NO: 31670 - protein, 981 aa, Nomada fabriciana
MAREEALAVQGGVRFVNQHLVTLVPGRTLEAIKGVRRGQKYRTLLAAAMQDIEASALSISGQDTPEAVVAAPHSSLACASTPSSSRHGEPTIPISSPPASTSLLGHLVPDIPGAIRGLIPVVRNIRGWETNTISQLAQECLEGELVGDRITSWLTAVFPPHDRIGHRHAPRRPLRRRTGKKALRRREYARAQRIFRSNMSWAAREILDATGDMGNTVPGVQQMAEHWGPYMSQASEPAPHGTNTMPKPELAHLWYPVSCEEVTGATLSLKSAPGPDGVEVRQWRALPSSIRALLYNVVLLAGGFPPAMLTSRTVFVPKKGGSAEIPADYRPISIMSVVVRQLHKILSSRLRASGVIDLRQRCMDDGCAENISALAAVIYESRSKLRELHVASLDVAKAFDSVSHFAVERVLKNVGVPHEMVRYIARLYNNSSTMFEVRGERSMLYRVGRGVRQGDPLSMGLFCLVVDSILEGISPDVGFHLGGCRLNALAYADDILLFTASKWGMQASLRVVEERAREHGLEFNAHKCSVLSLVPAGKSKKIKINTHPTFQLGNGAFIPQISTTAEWRYLGVDFSASGPRKVKVELQLYLDRITRAPLKPQQRLKLLRCFLLPRIYHALVLANATLGKLRALDLLTRAAVRRWLRLPKDVPAAFLHAPVAGGGLGIPSLTTTIPGLMRQRLLSLGRSQSPAIRAVADSPWVVRRLQWALRALTRDDLLLSSKHLRDKWWSHRLHISADGYELRECARSPLSSRWVDADSLSIPGRDFVQHVHVRINALPTRIRTTRGARRHGQATQCRAGCRSTETAAHVIQGCFRTHGGRVLRHNAVCNTLASGLRNIGWATHMEPMFLTTEGRRKPDLVCVKGERASVIDVQIVSGVPQLDDSHERKVAYYANNLSLVEGMSARYGVDRERISFSSCTVSWRGIWSSRSADWLLGLGLTSGLLRGITTRVLQGSHTNWTRWNRMTSRGPPGSWERDGVG

SEQ ID NO: 31671 - protein, 1147 aa, Nomada fabriciana
MTLLSHHLSKIGRFGSQSCGEVYSEPQHVPTPPPRGGTWAPACWWLTGLWLGEAGNCLVPVRRVASPADLVTAGPKETRKYNLRRGPRPAGPAAQSSPEVTTPHPVPQIVSPAAPPTSVPCPDCDRAFRTRIGLGVHRRVAHPVASNEEIELPAAKRRWGDEELRLMAREEALAVQGGVRFVNQHLVTLVPGRTLEAIKGVRRGQKYRTLLAAAMQDIEASALSISGQDTPEAVVAAPHSSLACASTPSSSRHGEPTIPISSPPASTSLLGHLVPDIPGAIRGLIPVVRNIRGWETNTISQLAQECLEGELVGDRITSWLTAVFPPHDRIGHRHAPRRPLRRRTGKKALRRREYARAQRIFRSNMSWAAREILDATGDMGNTVPGVQQMAEHWGPYMSQASEPAPHGTNTMPKPELAHLWYPVSCEEVTGATLSLKSAPGPDGVEVRQWRALPSSIRALLYNVVLLAGGFPPAMLTSRTVFVPKKGGSAEIPADYRPISITSVVVRQLHKILSSRLRASGVIDLRQRCMDDGCAENISALAAVIYESRSKLRELHVASLDVAKAFDSVSHFAVERVLKNVGVPHEMVRYIARLYNNSSTMFEVRGERSMLYRVGRGVRQGDPLSMGLFCLVVDSILEGISPDVGFHLGGCRLNALAYADDILLFTASKWGMQASLRVVEERAREHGLEFNAHKCSVLSLVPAGKSKKIKINTHPTFQLGNGAFIPQISTTAEWRYLGVDFSASGPRKVKVELQLYLDRITRAPLKPQQRLKLLRCFLLPRIYHAPVLANATLGKLRALDLLTRAAVRRWLRLPKDVPAAFLHAPVAGGGLGIPSLTTTIPGLMRQRLLSLGRSQSPAIRAVADSPWVVRRLQWALRALTRDDLLLSSKHLRDKWWSHRLHISADGYELRECARSPLSSRWVDADSLSIPGRDFVQHVHVRINALPTRIRTTRGARRHGQATQCRAGCRSTETAAHVIQGCFRTHGGRVLRHNAVCNTLASGLRNIGWATHMEPMFLTTEGRRKPDLVCVKGERASVIDVQIVSGVPQLDDSHERKVAYYANNLSLVEGMSARYGVDRERISFSSCTVSWRGIWSSRSADWLLGLGLTSGLLRGITTRVLQGSHTNWTRWNRMTSRGPPGSWERDGVG

SEQ ID NO: 31672 - protein, 990 aa, Nomada fabriciana
MTLLTMTLLLAREEALAVQGGVRFVNQHLVTLVPGRTLEAIKGVRRGQKYRTLLAAAMQDIEASALSISGQDTPEAVVAAPHSSLACASTPSSSRHGEPTIPISSPPASTSLLGHLVPDIPGAIRGLIPVVRNIRGWETNTISQLAQECLEGELVGDRITSWLTAVFPPHDRIGHRHAPRRPLRRRTGKKALRRREYARAQRIFRSNMSWAAREILDATGDMGNTVPGVQQMAEHWGPYMSQASEPAPHGTNTMPKPELAHLWYPVSCEEVTGATLSLKSAPGPDGVEVRQWRALPSSIRALLYNVVLLAGGFPPAMLTSRTVFVPKKGGSAEIPADYRPISITSVVVRQLHKILSSRLRASGVIDLRQRCMDDGCAENISALAAVIYESRSKLRELHVASLDVAKAFDSVSHFAVERVLKNVGVPHEMVRYIARLYNNSSTMFEVRGERSMLYRVGRGVRQGDPLSMGLFCLVVDSILEGISPDVGFHLGGCRLNALAYADDILLFTASKWGMQASLRVVEERAREHGLELNAHKCSVLSLVPAGKSKKIKINTHPTFQLGNGAFIPQISTTAEWRYLGVDFSASGPRKVKVELQLYLDRITRAPLKPQQRLKLLRCFLLPRIYHALVLANATLGKLRALDLLTRAAVRRWLRLPKDVPAAFLHAPVAGGGLGIPSLTTTIPGLMRQRLLSLGRSQSPAIRAVADSPWVVRRLQWALRALTRDDLLLSSKHLRDKWWSHRLHISADGYELRECARSPLSSRWVDADSLSIPGRDFVQHVHVRINALPTRIRTTRGARRHGQATQCRAGCRSTETAAHVIQGCFRTHGGRVLRHNAVCNTLASGLRNIGWATHMEPMFLTTEGRRKPDLVCVKGERASVIDVQIVSGVPQLDDSHERKVAYYANNLSLVEGMSARYGVDRERISFSSCTVSWRGIWSSRSADWLLGLGLTSGLLRGITTRVLQGSHTNWTRWNRMTSRGPPGSWERDGVG

SEQ ID NO: 31673 - protein, 981 aa, Nomada fabriciana
MAREEALAVQGGVRFVNQHLVTLVPGRTLEAIKGVRRGQKYRTLLAAAMQDIEASALSISGQDTPEAVVAAPHSSLACASTPSSSRHGEPTIPISSPPASTSLLGHLVPDIPGAIRGLIPVVRNIRGWETNTISQLAQECLEGELVGDRITSWLTAVFPPHDRIGHRHAPRRPLRRRTGKKALRRREYARAQRIFRSNMSWAAREILDATGDMGNTVPGVQQMAEHWGPYMSQASEPAPHGTNTMPKPELAHLWYPVSCEEVTGATLSLKSAPGPDGVEVRQWRALPSSIRALLYNVVLLAGGFPPAMLTSRTVFVPKKGGSAEIPADYRPISITSVVVRQLHKILSSRLRASGVIDLRQRCMDDGCAENISALAAVIYESRSKLRELHVASLDVAKAFDSVSHFAVERVLKNVGVPHEMVRYIARLYNNSSTMFEVRGERSMLYRVGRGVRQGDPLSMGLFCLVVDSILEGISPDVGFHLGGCRLNALAYADDILLFTASKWGMQASLRVVEERAREHGLEFNAHKCSVLSLVPAGKSKKIKINTHPTFQLGNGAFIPQISTTAEWRYLGVDFSASGPRKVKVELQLYLDRITRAPLKPQQRLKLLRCFLLPRIYHALVLANATLGKLRALDLLTRAAVRRWLRLPKDVPAAFLHAPVAGGGLGIPSLTTTIPGLMRQRLLSLGRSQSPAIRAVADSPWVVRRLQWALRALTRDDLLLSSKHLRDKWWSHRLHISADGYELRECARSPLSSRWVDADSLSIPGRDFVQHVHVRINALPTRIRTTRGARRHGQATQCRAGCRSTETAAHVIQGCFRTHGGRVLRHNAVCNTLASGLRNIGWATHMEPMFLTTEGRRKPDLVCVKGERASVIDVQIVSGVPQLDDSHERKVAYYANNLSLVEGMSARYGVDRERISFSSCTVSWRGIWSSRSADWLLGLGLTSGLLRGITTRVLQGSHTNWTRWNRMTSRGPPGSWERDGVG

SEQ ID NO: 31674 - protein, 970 aa, Dendrolimus punctatus
MDWSPQAASIVTPSTSKEPTASQDIIQCPHCSQPRFFKGHHGLKIHVGKKHKINNNSTIPTPNSNISLNPPAIEGHFWQLLSKLKKHNPILKRIPRGARISTCYTLSKLIKSVLAHNSVTSWEQLLIFPYLILHMNRNQNENTSLTQEIKNNCLMLDQNLETTCRSNLQCCSPSNGPRKNSANYHIVEKKLSDGDIRGAARLLFSSDAVAPNCDDTITALRDKHPPSPPDTVLPDPPNFESTLTVTMEDVRNAVGSFYRGSAGGLDSLTPQHLKDLTAGGCGEAGESLLRDLTALINFMLAGKVPNEIIGILYGANLCALKKKDGGIRPIAVGTVYRRLAAKCCCRKKAETLKTYFQPNQLGFGSRGGCEATVHALRSFLHHNGGDLVLKVDVKNAFNSIDRSALLAQIKDQIPDCYHFLWQCYNQNSKLIFQDSLLYSQTGCQQGDPLGPAIFSLAIHPIITRLKSKFNVWYLDDGTLGGEVNTVLEDLINLKTELKTIGLDINFNKCEIFINNADHKTEILSQIKLLTPEIRIINKSSLRLLGAPIFEESIPDFVEENIQNFRNSSDRLLKINTHMAFTIIRYCLFVPKFTYALRCSPLFKETSLLKMLDSIVKDTLTSILNLDMDDRTWLQGSLPVRLGGLGVRKISSIALPAFLSSVHSTSDLVLKILEKTQNVEISYLTDAKKAWSMACPNSDQPTALTSQRAWDEPICELARENLLQTCSSSTERARLLAVASWESGQWLQAHPSFNTGTVLDNSAFRLAASLRLGAPCCVPHRCQCGTMVDSYGHHGLSCLHSVGRRSRHASLNDIIRRALVSVGVPAILEPNGLVRDDGKRPDGMSLIPWKMGRPLVWDATCVDTLAASHLPVTKLGAGNAASTAEDLKRRKYGTLGRGYIFVPFGVETLGPWGPSAKGFFKEICKKLFDTTHDQKAGSFFAQRISIAIQRGNAASLLGTLPSGSDLLHSLY

SEQ ID NO: 31675 - protein, 992 aa, Dendrolimus kikuchii
MSSPSAGNGTTASQDDVQCPHCSQPRFFKGHRGLKIHCSKKHKIVYTNSAPVALQPNTSTPPNPQVNKEPLWKLLSKLKKNNPVLKRIPRGARISACHTISKLIQTVLAQNSVVSWEQLLMFPYLIFHINKDQDKKISLTQKIKNNCSILDNNSQIVCENNPQSCSPNRLRNNLAIFHIVENKLNDGDIRGAARLLFSTDAVAPNSADTLTALRDKHPPSSPETVLPAPPDSQSALVVTTEDVRNAVGSFQSGSAGGLDGLTPQHLKDLIGVGCGEARESLLRNLTALVNFMLSGKVVNEITDILYGANLCALKKKDGGIRPIAVGTVYRRLAAKCCCKKKAEDLKLYFQPNQLGFGSRGGCEAAVHALRTFLQHNGGDLVLKVDVKNAFNSVDRSALLSQIKDQIPDCYHFLWQCYSQNSKLIFQDNVIYSKTGCQQGDPLGPAIFSLAIHPIITRLKSKFNVWYLDDGTLGGEVDDVLEDFTILTKELKTIGLEINLSKCEYYISNTERKTEIISRLNTIAPGIKLVNNSSLHLLGAPIFDESIPNYVEENIKKFRESSDRLLQINTHMAYTIIRYCLFVPKFTYTLRCCQLWKQTSLLQTLDNIVRDTLISIINLEMDDRAWSQCSLPVKLGGLGVRKISSVALPAFLSSAYSTRDLVFKILQKTNFQFEIPYLTDARRVWSMACPNVNVPTVLTSQHAWDGPLCELTRDNLLQTCTSSAERARLLAVANWESGQWLQAHPSFYNNTLLDNTTFRLAASLRLGAPCCVPHHCQCGVMVDRFGHHGLSCLKSAGRRSRHASLNDIIRRALVSVGVPAILEPNGLVRDDGKRPDGMSLVPWKMGRPLVWDATCVDTLAPSHLPMTESGAGNAAASAEDVKRRKYGALGRGYIFVPFGVETLGPWGPSAKSFFKDICKKLFDTTRDQKAGSYFAQQISIAIQRGNAASLLGTLPVGNDLEKYFLDPHQERFPLAIFIEGGPKLGTVLHKDVL

SEQ ID NO: 31676 - protein, 970 aa, Dendrolimus kikuchii
MSSPSAGNGPTASQDDVQCPHCSQPRFFKGHRGLKIHCSKKHKIVYTNSAPVALQPNTSTPPNPQVNKEPLWKLLSKLKKNNPVLKRIPRGARISACHTISKLIQTVLAQNSVVSWEQLLMFPYLIFHINKDQDKKISLTQKIKNNCSILDNNSQIVCENNPQSCSPNRLRNNLAIFHIVENKLNDGDIRGAARLLFSTDAVAPNSADTLTALRDKHPPSSPETVLPAPPDSQSALVVTTEDVRNAVGSFQSGSAGGLDGLTPQHLKDLIGVGCGEARESLLRNLTALVNFMLSGKVVNEITDILYGANLCALKKKDGGIRPIAVGTVYRRLAAKCCCKKKAEDLKLYFQPNQLGFGSRGGCEAAVHALRTFLQHNGGDLVLKVDVKNAFNSVDRSALLSQIKDQIPDCYHFLWQCYSQNSKLIFQDNVIYSKTGCQQGDPLGPAIFSLAIHPIITRLKSKFNVWYLDDGTLGGEVDDVLEDFTILTKELKTIGLEINLSKCEYYISNTERKTEIISRLNTIAPGIKLVNNSSLHLLGAPIFDESIPNYVEENIKNFRESSDRLLQINTHMAYTIIRYCLFVPKFTYTLRCCQLWKQTSLLQTLDNIVRDTLISIINLEMDDRAWSQCSLPVKLGGLGVRKISSVALPAFLSSAYSTRDLVFKILQKTNFQFEIPYLTDARRVWSMACPNVNVPTVLTSQHAWDGPLCELTRDNLLQTCTSSAERARLLAVANWESGQWLQAHPSFYNNTLLDNTTFRLAASLRLGAPCCVPHHCQCGVMVDRFGHHGLSCLKSAGRRSRHASLNDIIRRALVSVGVPAILEPNGLVRDDGKRPDGMSLVPWKMGRPLVWDATCVDTLAPSHLPMTESGAGNAAASAEDVKRRKYGALGRGYIFVPFGVETLGPWGPSAKSFFKDICKKLFDTTRDQKAGSYFAQQISIAIQRGNAASLLGTLPVGNDRNDFSDDYTVYF

SEQ ID NO: 31677 - protein, 964 aa, Dendrolimus kikuchii
MSSPSAGNGPTASQDDVQCPHCSQPRFFKGHRGLKIHCSKKHKIVYTNSAPVALQPNTSTPPNPQVNKEPLWKLLSKLKKNNPVLKRIPRGARISACHTISKLIQTVLAQNSVVSWEQLLMFPYLIFHINKDQDKKISLTQKIKNNCSILDNNSQIVCENNPQSCSPNRLRNNLAIFHIVENKLNDGDIRGAARLLFSTDAVAPNSADTLTALRDKHPPSSPETVLPAPPDSQSALVVTTEDVRNAVGSFQSGSAGGLDGLTPQHLKDLIGVGCGEARESLLRNLTALVNFMLSGKVVNEITDILYGANLCALKKKDGGIRPIAVGTVYRRLAAKCCCKKKAEDLKLYFQPNQLGFGSRGGCEAAVHALRTFLQHNGGDLVLKVDVKNAFNSVDRSALLSQIKDQIPDCYHFLWQCYSQNSKLIFQDNVIYSKTGCQQGDPLGPAIFSLAIHPIITRLKSKFNVWYLDDGTLGGEVDDVLEDFTILTKELKTIGLEINLSKCEYYISNTERKTEIISRLNTIAPGIKLVNNSSLHLLGAPIFDESIPNYVEENIKNFRESSDRLLQINTHMAYTIIRYCLFVPKFTYTLRCCQLWKQTSLLQTLDNIVRDTLISIINLEMDDRAWSQCSLPVKLGGLGVRKISSVALPAFLSSAYSTRDLVFKILQKTNFQFEIPYLTDARRVWSMACPNVNVPTVLTSQHAWDGPLCELTRDNLLQTCTSSAERARLLAVANWESGQWLQAHPSFYNNTLLDNTTFRLAASLRLGAPCCVPHHCQCGVMVDRFGHHGLSCLKSAGRRSRHASLNDIIRRALVSVGVPAILEPNGLVRDDGKRPDGMSLVPWKMGRPLVWDATCVDTLAPSHLPMTESGAGNAAASAEDVKRRKYGALGRGYIFVPFGVETLGPWGPSAKSFFKDICKKLFDTTRDQKAGSYFAQQISIAIQRGNAASLLGTLPVGNDLLHNVF

SEQ ID NO: 31678 - protein, 964 aa, Dendrolimus kikuchii
MSSPSAGNGTTASQDDVQCPHCSQPRFFKGHRGLKIHCSKKHKIVYTNSAPVALQPNTSTPPNPQVNKEPLWKLLSKLKKNNPVLKRIPRGARISACHTISKLIQTVLAQNSVVSWEQLLMFPYLIFHINKDQDKKISLTQKIKNNCSILDNNSQIVCENNPQSCSPNRLRNNLAIFHIVENKLNDGDIRGAARLLFSTDAVAPNSADTLTALRDKHPPSSPETVLPAPPDSQSALVVTTEDVRNAVGSFQSGSAGGLDGLTPQHLKDLIGVGCGEARESLLRNLTALVNFMLSGKVVNEITDILYGANLCALKKKDGGIRPIAVGTVYRRLAAKCCCKKKAEDLKLYFQPNQLGFGSRGGCEAAVHALRTFLQHNGGDLVLKVDVKNAFNSVDRSALLSQIKDQIPDCYHFLWQCYSQNSKLIFQDNVIYSKTGCQQGDPLGPAIFSLAIHPIITRLKSKFNVWYLDDGTLGGEVDDVLEDFTILTKELKTIGLEINLSKCEYYISNTERKTEIISRLNTIAPGIKLVNNSSLHLLGAPIFDESIPNYVEENIKKFRESSDRLLQINTHMAYTIIRYCLFVPKFTYTLRCCQLWKQTSLLQTLDNIVRDTLISIINLEMDDRAWSQCSLPVKLGGLGVRKISSVALPAFLSSAYSTRDLVFKILQKTNFQFEIPYLTDARRVWSMACPNVNVPTVLTSQHAWDGPLCELTRDNLLQTCTSSAERARLLAVANWESGQWLQAHPSFYNNTLLDNTTFRLAASLRLGAPCCVPHHCQCGVMVDRFGHHGLSCLKSAGRRSRHASLNDIIRRALVSVGVPAILEPNGLVRDDGKRPDGMSLVPWKMGRPLVWDATCVDTLAPSHLPMTESGAGNAAASAEDVKRRKYGALGRGYIFVPFGVETLGPWGPSAKSFFKDICKKLFDTTRDQKAGSYFAQQISIAIQRGNAASLLGTLPVGNDLLHNVF

SEQ ID NO: 31679 - protein, 961 aa, Dendrolimus kikuchii
MSSPSAGNGTTASQDDVQCPHCSQPRFFKGHRGLKIHCSKKHKIVYTNSAPVALQPNTSTPPNPQVNKEPLWKLLSKLKKNNPVLKRIPRGARISACHTISKLIQTVLAQNSVVSWEQLLMFPYLIFHINKDQDKKISLTQKIKNNCSILDNNSQIVCENNPQSCSPNRLRNNLAIFHIVENKLNDGDIRGAARLLFSTDAVAPNSADTLTALRDKHPPSSPETVLPAPPDSQSALVVTTEDVRNAVGSFQSGSAGGLDGLTPQHLKDLIGVGCGEARESLLRNLTALVNFMLSGKVVNEITDILYGANLCALKKKDGGIRPIAVGTVYRRLAAKCCCKKKAEDLKLYFQPNQLGFGSRGGCEAAVHALRTFLQHNGGDLVLKVDVKNAFNSVDRSALLSQIKDQIPDCYHFLWQCYSQNSKLIFQDNVIYSKTGCQQGDPLGPAIFSLAIHPIITRLKSKFNVWYLDDGTLGGEVDDVLEDFTILTKELKTIGLEINLSKCEYYISNTERKTEIISRLNTIAPGIKLVNNSSLHLLGAPIFDESIPNYVEENIKKFRESSDRLLQINTHMAYTIIRYCLFVPKFTYTLRCCQLWKQTSLLQTLDNIVRDTLISIINLEMDDRAWSQCSLPVKLGGLGVRKISSVALPAFLSSAYSTRDLVFKILQKTNFQFEIPYLTDARRVWSMACPNVNVPTVLTSQHAWDGPLCELTRDNLLQTCTSSAERARLLAVANWESGQWLQAHPSFYNNTLLDNTTFRLAASLRLGAPCCVPHHCQCGVMVDRFGHHGLSCLKSAGRRSRHASLNDIIRRALVSVGVPAILEPNGLVRDDGKRPDGMSLVPWKMGRPLVWDATCVDTLAPSHLPMTESGAGNAAASAEDVKRRKYGALGRGYIFVPFGVETLGPWGPSAKSFFKDICKKLFDTTRDQKAGSYFAQQISIAIQRGNAASLLGTLPVGNDPLV

SEQ ID NO: 31680 - protein, 960 aa, Dendrolimus kikuchii
MSSPSAGNGTTASQDDVQCPHCSQPRFFKGHRGLKIHCSKKHKIVYTNSAPVALQPNTSTPPNPQVNKEPLWKLLSKLKKNNPVLKRIPRGARISACHTISKLIQTVLAQNSVVSWEQLLMFPYLIFHINKDQDKKISLTQKIKNNCSILDNNSQIVCENNPQSCSPNRLRNNLAIFHIVENKLNDGDIRGAARLLFSTDAVAPNSADTLTALRDKHPPSSPETVLPAPPDSQSALVVTTEDVRNAVGSFQSGSAGGLDGLTPQHLKDLIGVGCGEARESLLRNLTALVNFMLSGKVVNEITDILYGANLCALKKKDGGIRPIAVGTVYRRLAAKCCCKKKAEDLKLYFQPNQLGFGSRGGCEAAVHALRTFLQHNGGDLVLKVDVKNAFNSVDRSALLSQIKDQIPDCYHFLWQCYSQNSKLIFQDNVIYSKTGCQQGDPLGPAIFSLAIHPIITRLKSKFNVWYLDDGTLGGEVDDVLEDFTILTKELKTIGLEINLSKCEYYISNTERKTEIISRLNTIAPGIKLVNNSSLHLLGAPIFDESIPNYVEENIKKFRESSDRLLQINTHMAYTIIRYCLFVPKFTYTLRCCQLWKQTSLLQTLDNIVRDTLISIINLEMDDRAWSQCSLPVKLGGLGVRKISSVALPAFLSSAYSTRDLVFKILQKTNFQFEIPYLTDARRVWSMACPNVNVPTVLTSQHAWDGPLCELTRDNLLQTCTSSAERARLLAVANWESGQWLQAHPSFYNNTLLDNTTFRLAASLRLGAPCCVPHHCQCGVMVDRFGHHGLSCLKSAGRRSRHASLNDIIRRALVSVGVPAILEPNGLVRDDGKRPDGMSLVPWKMGRPLVWDATCVDTLAPSHLPMTESGAGNAAASAEDVKRRKYGALGRGYIFVPFGVETLGPWGPSAKSFFKDICKKLFDTTRDQKAGSYFAQQISIAIQRGNAASLLGTLPVGNDQA

SEQ ID NO: 31681 - protein, 964 aa, Dendrolimus kikuchii
MSSPSAGNGPTASQDDVQCPHCSQPRFFKGHRGLKIHCSKKHKIVYTNSAPVALQPNTSTPPNPQVNKEPLWKLLSKLKKNNPVLKRIPRGARISACHTISKLIQTVLAQNSVVSWEQLLMFPYLIFHINKDQDKKISLTQKIKNNCSILDNNSQIVCENNPQSCSPNRLRNNLAVFHIVENKLNDGDIRGAARLLFSTDAVAPNSADTLTALRDKHPPSSPETVLPAPPDSQSALVVTTEDVRNAVGSFQSGSAGGLDGLTPQHLKDLIGVGYGEARESLLRNLTALVNFMLSGKVVNEITDILYGANLCALKKKDGGIRPIAVGTVYRRLAAKCCCKKKAEDLKLYFQPNQLGFGSRGGCEAAVHALRTFLQHNGGDLVLKVDVKNAFNSVDRSALLSQIKDQIPDCYHFLWQCYSQNSKLIFQDNVIYSKTGCQQGDPLGPAIFSLAIHPIITRLKSKFNVWYLDDGTLGGEVDDVLEDFTILTKELKTIGLEINLSKCEYYISNTERKTEIISRLNTIAPGIKLVNNSSLHLLGAPIFDESIPNYVEENIKKFRESSDRLLQINTHMAYTIIRYCLFVPKFTYTLRCCQLWKQTSLLQTLDNIVRDTLISIINLEMDDRAWSQCSLPVKLGGLGVRKISSVALPAFLSSAYSTRDLVFKILQKTNFQFEIPYLTDARRVWSMACPNVNVPTVLTSQHAWDGPLCELTRDNLLQTCTSSAERARLLAVANWESGQWLQAHPSFYNNTLLDNTTFRLAASLRLGAPCCVPHHCQCGVMVDRFGHHGLSCLKSAGRRSRHASLNDIIRRALVSVGVPAILEPNGLVRDDGKRPDGMSLVPWKMGRPLVWDATCVDTLAPSHLPMTESGAGNAAASAEDVKRRKYGALGRGYIFVPFGVETLGPWGPSAKSFFKDICKKLFDTTRDQKAGSYFAQQISIAIQRGNAASLLGTLPVGNDLLHNVF

SEQ ID NO: 31682 - protein, 966 aa, Dendrolimus kikuchii
MSSPSAGNGTTASQDDVQCPHCSQPRFFKGHRGLKIHCSKKHKIVYTNSAPVALQPNTSTPPNPQVNKEPLWKLLSKLKKNNPVLKRIPRGARISACHTISKLIQTVLAQNSVVSWEQLLMFPYLIFHINKDQDKKISLTQKIKNNCSILDNNSQIVCENNPQSCSPNRLRNNLAIFHIVENKLNDGDIRGAARLLFSTDAVAPNSADTLTALRDKHPPSSPETVLPAPPDSQSALVVTTEDVRNAVGSFQSGSAGGLDGLTPQHLKDLIGVGCGEARESLLRNLTALVNFMLSGKVVNEITDILYGANLCALKKKDGGIRPIAVGTVYRRLAAKCCCKKKAEDLKLYFQPNQLGFGSRGGCEAAVHALRTFLQHNGGDLVLKVDVKNAFNSVDRSALLSQIKDQIPDCYHFLWQCYSQNSKLIFQDNVIYSKTGCQQGDPLGPAIFSLAIHPIITRLKSKFNVWYLDDGTLGGEVDDVLEDFTILTKELKTIGLEINLSKCEYYISNTERKTEIISRLNTIAPGIKLVNNSSLHLLGAPIFDESIPNYVEENIKKFRESSDRLLQINTHMAYTIIRYCLFVPKFTYTLRCCQLWKQTSLLQTLDNIVRDTLISIINLEMDDRAWSQCSLPVKLGGLGVRKISSVALPAFLSSAYSTRDLVFKILQKTNFQFEIPYLTDARRVWSMACPNVNVPTVLTSQHAWDGPLCELTRDNLLQTCTSSAERARLLAVANWESGQWLQAHPSFYNNTLLDNTTFRLAASLRLGAPCCVPHHCQCGVMVDRFGHHGLSCLKSAGRRSRHASLNDIIRRALVSVGVPAILEPNGLVRDDGKRPDGMSLVPWKMGRPLVWDATCVDTLAPSHLPMTESGAGNAAASAEDVKRRKYGALGRGYIFVPFGVETLGPWGPSAKSFFKDICKKLFDTTRDQKAGSYFAQQISIAIQRGNAASLLGTLPVGNDLLEVYLKT

SEQ ID NO: 31683 - protein, 971 aa, Dendrolimus kikuchii
MSSPSAGNGTTASQDDVQCPHCSQPRFFKGHRGLKIHCSKKHKIVYTNSAPVALQPNTSTPPNPQVNKEPLWKLLSKLKKNNPVLKRIPRGARISACHTISKLIQTVLAQNSVVSWEQLLMFPYLIFHINKDQDKKISLTQKIKNNCSILDNNSQIVCENNPQSCSPNRLRNNLAIFHIVENKLNDGDIRGAARLLFSTDAVAPNSADTLTALRDKHPPSSPETVLPAPPDSQSALVVTTEDVRNAVGSFQSGSAGGLDGLTPQHLKDLIGVGCGEARESLLRNLTALVNFMLSGKVVNEITDILYGANLCALKKKDGGIRPIAVGTVYRRLAAKCCCKKKAEDLKLYFQPNQLGFGSRGGCEAAVHALRTFLQHNGGDLVLKVDVKNAFNSVDRSALLSQIKDQIPDCYHFLWQCYSQNSKLIFQDNVIYSKTGCQQGDPLGPAIFSLAIHPIITRLKSKFNVWYLDDGTLGGEVDDVLEDFTILTKELKTIGLEINLSKCEYYISNTERKTEIISRLNTIAPGIKLVNNSSLHLLGAPIFDESIPNYVEENIKKFRESSDRLLQINTHMAYTIIRYCLFVPKFTYTLRCCQLWKQTSLLQTLDNIVRDTLISIINLEMDDRAWSQCSLPVKLGGLGVRKISSVALPAFLSSAYSTRDLVFKILQKTNFQFEIPYLTDARRVWSMACPNVNVPTVLTSQHAWDGPLCELTRDNLLQTCTSSAERARLLAVANWESGQWLQAHPSFYNNTLLDNTTFRLAASLRLGAPCCVPHHCQCGVMVDRFGHHGLSCLKSAGRRSRHASLNDIIRRALVSVGVPAILEPNGLVRDDGKRPDGMSLVPWKMGRPLVWDATCVDTLAPSHLPMTESGAGNAAASAEDVKRRKYGALGRGYIFVPFGVETLGPWGPSAKSFFKDICKKLFDTTRDQKAGSYFAQQISIAIQRGNAASLLGTLPVGNDRFNIYNCIFSKKY

SEQ ID NO: 31684 - protein, 970 aa, Dendrolimus kikuchii
MDWGPQAAQLASTSTTDRPTASQNDIIQCPHCLQPRFFKGNHGLKIHCDKKHRINSNNSATTINPSISQNSPVVEEHFWELLSKLKKQHPILKRIPRGARLTVCYTLSKLIRYVLTQNSVSSWEQLLIFPYFILHINRKQNENISLTQKIKNNCALLDQNSENINIPNRQSCSSNYSRKDSTIYHIVERKISDGNIRRAARLLFSTDAVAPNCNDTLTALHDKHPPSSPNTVLPDPPNLENSLTVTVEDVSNAIGSFQSGSAGGLDGLTPQHLKDLIGGGCGEAGESLLKDLMALINFMLAGKVINEVTGILYGVDLCALKKKDGGIRPIAVGMVYRRLAAKCCCKKKADSLKTYFQPNQLGFGSRGGCEAAVHALRSFLRHNGGDLVLKVDIKNAFNSVDRSALLSQVKDKIPDCYHFLWQCYSQNSKLIFQDNLLYSQTGCQQGDPLGPVIFSLAIHPIITRLKSKFNVWYLDDGTLGGEVNTVLDDLINLKSDLQSIGLEINFDKCEYYIHKTDSETEILSKIQSIAPKIKMVNMSSLRLLGAPIFDEALPGFVEENFQNFRNTSDRLFKINTHMAFTIIRYCLFVPKFTYALRCCQLFKETLLLNTLDSIVRDTLISIINLDMDDRTWSQCSLPIRLGGLGVRKISSVALPAFLSSVYSTSDLVLKILEKSNLHFEIPYLTDAKRAWTMACPNSNLPTVPTSQRAWDEPLCELTRENLLQTCSRSTERARLLAVATWESGQWLQAHPSFNTGTILDHSTFRLAASLRLGAPCCVSHRCQCGSMVDPYGHHGLACLHSVGRRSRHANLNDIIRRALVSVGVPAVLEPNGLVRDDGKRPDGMSLIPWKMGRPLVWDATCVDTLAPSHLPMTELEAGNAASKAEALKRRKYGTLGRGYIFVPFGVETLGPWGPSAKSFFKEICKKLFDATRDQKAGSYFAQQISIAIQRGNAASLLGTLPSSSDLLHSL

SEQ ID NO: 31685 - protein, 985 aa, Bradysia coprophila
MVMGDSSTASAQLSQILQRKHDEYIEQYPDDDRWPCAFCGQLCKTLAGCKGHITKSHQTISRGVIANDINLNDIEDRPSVPPAQNEFSSITQRLNELLASKRQNHDELDSILSDYVAELCKCEKRLSGPEHPSRKFYRLRKSNAFQRTDRTYGESSNPQRATQRDRDNRRAKFDREKTQWLYFNQRRKVVHNIIKDKNDKGCSIELAYIHREFSTRWETPNYKYRPPLNPVTPEEQRVLDDEFEINISVEDAAAQITKLDAQSSAGPDGVLPRWIKATKEDSSKIISKVMTYMLIFDHVPKAMQEARTVLFYKEKGDRMDPKNYRPITICSAIRRVIEKILDKKIRNYVPFSFFQRGFTNINGTLVNTAILNACLQKAKREKLDFSTVLLDVTQAFDKIGHKHCEMRIRARRAPSCLKSMSIGLMKGNFTRINTIKGKTDIIEFKCGAMQGAPHSPWIYNNSIDDEIEEFNEPSVKSTFGFQLHHDFENEVLQNFADDSDLCANSRNSAVTLTQTFIGLYDELGLEVNPEKSVCISIVKGELCSDDLIINSTTKISCISASERIKYLGTNFNDEIVIDETGMLQQLRKQVERLVSTPLLNPDQKFNIINEYIWPTIIFPFQQAPLSKLPITFLADIDKILKSAIKEILQIPNATPDAMIYSSKTFKGLGLIKARWEAYIQSYNASDYLQNCGVDVLSEIRDFKSEKSLCLDKLPISSALKETMSNDQRNAPPPIHLRCKKQSKLLRGDLQQLQFEAWCALPTKGRGVCQFAEYPAANKWISSKFGLSTSEWINSIKMTANVLPVRTNPGYSQGNSRCRHCDEFETLGHILGKCPRGELLRNNRHHTCRSLIASSLRDKGWKVDEEIYCVDVNGTSRRADIFAYNRATGKGFIIDPTVRMEGDSDQFTAVDDEKKLIYEPCVPHFRLKYNVSDIEVVGLYIGARGTISKSFVNFLKRFKIPLTVVETIVSSVLKISSLICKQHLYS

SEQ ID NO: 31686 - protein, 1047 aa, Tenebrio molitor
MLNPGPQAGAPASEGAARVGGEPPSFQCPHCDRVLTTASGRGLHVKRAHPAEANNAINIERVHAQWSLEETRLMARLEADAIRRGGERFMNQYLVPLVPRRTLDAVKGKRRTAVYRRLVQEILREPAMNLRAPSPEGGGAPNPDGGEPSRRDDEEITDLPPLNYTGEIRSALEDLVGGVDWTQTGYEGARLCDIACRALGGESVSEAILAWLRDVLPAKRGNPRPPARDLDGTRSATNKAKRRAEYARAQELFRRDPKAFAARIFSGNSQDASRPKGSPEFVRFWRRIFEGESPERDEHIGMAAGAHEEEGRRGLWSPISVEEVARTRVRRGTASGPDGIAVVDWNNVPPAIAALLFNIFMWIGQVSDSVSETHTVFLQKTGEPLTPADYRPISIGSVVIRHFHRLLASRLVAIPDLLSDFQRAFLSGVDGIADNLSVLDTILTEARRKCRSLHLASLDVSKAFDTVSHMAIVEACEGAGLPRPFVEYVRSLYGSATTLLELGRRSVRINVKRGVRQGDPLSPLLFNLVLDRALKRLLTDVGFRLGTSCITALAFADDVILCGTTSWGLQRNLEIFEEELRRSGLSLNPGKSKCVSLVASGREKKVKLVMTPTFRASGSWLSQVDGTTFWKYLGLQFRGCGMASCGSDDVAECLERLTRAPLKPQQRMHLLRVFLLPRFYHVWTFGRLNAGILRRLDIRVRNAIRTWLRLPHDVPVGYYHAPTNAGGLGIPQLSRFIPLLRLKRFERLAHSSVESVRECARTDRAVAKVRWCRERLADVVDRVADGTQSLREFWTRELYRSMDGRALRESVRETPSTQWLRCCTRAIPARDWLNYISVHINALPSRVRTSRGRRDGVDVTCRGGCLTAETPAHCIQVCHRTHGGRVFRHDAIAKALSVHLAQRGWSVRREVSYQTVVGVRRPDIVASRGREIAVVDVQVVAPYPSLDSAHRKKVAKYRDEDQLATCLVRGASVQPRRRAEEETQVRFASATISWRGVWSSESARSLRELGLTDRELAQYSTYALRDSWMNWVRFGASTSFRMGRGRP

SEQ ID NO: 31687 - protein, 920 aa, Tenebrio molitor
MNLRAPSPEGGGAPNPDGGEPSRRDDEEITDLPPLNYTGEIRSALEDLVGGVDWTQTGYEGARLCDIACRALGGENVSEAILAWLRDVLPAKRGNPRPPARDLDGTRSATNKAKRRAEYARAQELFRRDPKAFAARIFSGNSQDASRPKGSPEFVRFWRRIFEGESPERDEHIGMAAGAHEEEGRRGLWSPISVEEVARTRVRRGTASGPDGIAVVDWNNVPPAIAALLFNIFMWIGQVPDSLSETRTVFLQKTDEPQTPADYRPISIGSVVVRHFHRLLASRLVAIPDLLSDFQRAFLSGVDGIADNLSVLDTILTEARRKCRSLHLASLDVSKAFDTVSHMAIVEACEGAGLPRPFVEYVRSLYGSATTLLELGRRSVRINVKRGVRQGDPLSPLLFNLVLDRALKRLLTDVGFRLGTSCITALAFADDVILCGTTSWGLQRNLEIFEEELRRSGLSLNPGKSKCVSLVASGREKKVKLVMTPTFRASGSWLSQVDGTTFWKYLGLQFRGCGMAGCGSDDVAECLERLTRAPLKPQQRMHLLRVFLLPRFYHVWTFGRLNAGILRRLDIRVRNAIRTWLRLPHDVPVGYFHAPTNAGGLGIPQLSRFIPLLRLKRFERLAHSSVESVRECARTDTAVAKVRWCRERLADVVDRVADGTQSLREFWTRELYRSMDGRALRESVRETPSTQWLRCCTRVIPARDWLNYISVHINALPSRVRTSRGRRDGVDVTCRGGCLTAETPAHCIQVCHRTHGGRVLRHDAIAKALSVHLTQRGWSVRREVSYQTVVGVRRPDIVASRGREIAVVDVQVVAPNPSLDSAHRKKVAKYRDEAQLATCLVRGASVQPRRRAEEETQVRFASATISWRGVWSSESARSLRELGLTDRELAQYSTYALRGSWMNWVRFGASTSIRMGRGRP

SEQ ID NO: 31688 - protein, 1092 aa, Dermatophagoides pteronyssinus
MPYPGLKDISNDTRCYLCGQSFEKPFGLRVHIGRCHPEWNQKLIIERKYPSLMTSRPDIRGNGIPNIVPQSTTFSPNSINHLCNVNNNASTTSSCTTMSSTTTTSVILAGNNSIQISSSNNISNSPNAIVTALTATSSSSVPASSVTTAGNNIQIFSDNTQNSTSDNNTAVTDTSSTSTIASSVMMTVNNDNFDQANDGNSPTTDISQSSEVNNNEFSNHWCNKFDSVLSVKNDGLFDSTCNDFVKSLLNVASDLKGPKHPAQRYYQYRKNGLPSTRQAGYSSASNPLRARKAKSKRNKEKYQYEICQFEYYNRRRKVFQRLNKTDGNKACTASNADIEHHFKNKFESINPNILDNYITYRCDDTLEFFTVDDISLAAKKINLDTAPGCDKILMIYIRKLNCLPVILKIANVMLKWSYVPQIFREGRTILIHKSGDVSDVNNFRPITIFSVIRRIIERMIDAKVRQSLFINPNQRGFTSSPGVKINTAIVESLLTDAKVNKKDLTICFLDVSKAFDSVGHDHLMKVINSSSLNVHLKKLLHELITNNSTSINIKNQNTGTIHLKRGVAQGAPTSPLLFNLSINFIMNELTENIIQSSYGYFLGDWISAIAFADDLAIIGNNDQNAAALVEIAKSNFEKIGLSVNYSKSKTISLINGIINTSSVSSGSNFFDSIEKLKDNERIKYLGIDFNSQIVLDKSATLQKLYSRLNCLANSPYLHSDQKINLINKYIFPSVVFPIENAPLNQLSMDFLMDIDKAIRSAVKSIIQIPNDTPNEFFYADKNFRGLGLIRATWESFIQHINSCKLLDRARIPQVDITRNLKDEVVQCFEKIGLEAHNVDDFNLIDSKSIRNDLRTRAFEQWCRLPVKGAGVVLFKESPWTNQWLFNRKNLSLSQWTNAIKMSTNCVPVRSLPGRSMDGSSCRTQFCAKTETLSHILQACSKGESLRIIRHHQICDKIKDCLTSHGFEVYREVHCIDANGSNRRADIIAIDRNKNFGIILDPTIRFERDESQAMNVDIEKRDIYTPCLNFLGRHYQINNWVVQGLLFGARGSIPTFTVDVLKKIGIFNKEFITDLSLLIIQSSLKIVHNHLYG

SEQ ID NO: 31689 - protein, 1516 aa, Dolomedes plantarius
MYPLRPALSLPSLTPRPRLTENGTYSRAFLPPGITLSSEPIRPNAPLSMPVFTDGEFRVPLPPTPAVTTPTTVTTPSVGSSSCSTVTPAPLSYAAAVTNVRPHVPATPSPVASRTRSGVITKKISKTTASNPRGNKASALRVTSGNSRSPPSLAPPTLAPPVSPSSFLAPPALVQPTLAPPASKLPKLLPTPTPRLAIGASTGGFTSEVGSTTRMNKSNTSSPSGSSSSNVVGTDAEVSGSPRRANLGTGMVTPISAPLRGELVNSNSPVTPPSANSPSGDSVRTTESIPSSLEDFVLPEPRIYSPASSPGSSTMLSINLSEDSQSSLLIEGPTSPLGRASVDRARPGNQEPVGVVASPPSSAPGSSNSGSPIHLTSFPRDHTRVGNELHLVFPIVGALKCTEQGCNGTFVGQDWMTEKGSLRKHLQRSHNLCNLKDFRWCVICEQRIGRKITSHPCLSDMQIFNPYSNDHRFACIHCRFTCNSANGFLNHTRKHTRQNIARRQRDARDIINRNANNAGTSGSNNSDGNQSSPQSPVAASQGSPTQVSLTQGSDEPEDEVPSEEAQFDTGVDFTESNLDHEPNPDDPSPSDEYTARFRELLTAQGGIDWDAFQTLLGDYIEFARRHVKISSGEERVKFSGSQNAQDPRFIQKLYKRNRRRAVRMINNSEGERCKIEHSVLADYFCPPRPTPPPRDLYTHPSPATEAVGLHQFTPEEVWGKLKSCENSAPGPDRLTYNHWKGVDPEAKALSVIFNICLKLRRVPDAWRDSTTIMIPKGGTGDSPNDWRPIALGNTIVKLFTGCLGRRLTAWIETNAILCQAQKGFLPHDGAFENNFVLQSRFQKARSGRRDLCLMSLDISNAFGSVPHEAILFALQGSGAGDGFVEIIQDMYRDNTTAFLTDEGTSDSFCISSGVRQGCPLSGILFNLAIDPIIRAIDSLNNKINILAFADDILLFGDSPEELQEYVNKVTNTLEMLGLRLNPAKCASIHLKGKPVGCHPTVFRVKDTPVKCLKDGEEMKFLGKPVGFCLVPDPSCVEDLASPALNILSSFLAPWQRLDALKTFYYPSLHYAQRTRQFDKEIWKKVDKKIRPGIKKTLYLPNDACVDYLYGNAKKGCMGIPVTSEDSDIAMIDGAFKLLSSRDERVADLAWDELSQLVGARMGFDACPSHVDFGDYLSGKPYNSDNPISSIWTNARKASTRLGVKWHIHDDRSFSISIGTQVITKRREVFKLLRLVLRDRRCANLASYPHQGKTHALYAMSYASTHYHRAGDFIRFADWRFVHRARLGVLPLNAYRHRTSPEAQGCRRCSFASETLPHVINHCPGRLVLGQRRHNMVVARLMKAATGRNWTVMRANQTIAGSNLRPDLVLTRGDEALVIDVAVPFENGPDAFNVARRQKEEKYRALVETLKSRYKRVGFGAVVVGALGSWDKANDKLVSRLCSKKYANLLRKLCVSDVLRVSRDIYAEHLSGMRQAPSSTNDYTALRISLQVESARRQVTMSPENDVSDSGVHSDDI

SEQ ID NO: 31690 - protein, 1082 aa, Coccinella septempunctata
MRVHFISKDLEQRTDDSYRNSLTKIWNEIRPEKQLYTGLLANRVRWLLEREKFTLIELDAIRASCYPRGASTDHTIDYAQDTASNSPRARVSVGGLEGRFIRTYLMYAGMPPGNRPRIPKMRGSKSMLEKVKKIDEIMQRHINSSHTLQDITDYVYAGAITICSEMGIKIQVSDISKGTVLPPWKRRLERKINEIRKKIGILQAYLDAETPPPRLRKLTYRIAVKFKLKSRNEPFKQQLTILNDKLKQKIKILGNRIKRYNERVKRYKNNKLYHRNQQQFFRNLETEPVLQGKPPTKENMHAFWKGIWEEEKTYDNQAQWIREAEEESSKYHMEDVNISEDNISAVLKRTSNWSAPGVDKIHNYWWKYFTATHRHLADRFREALKDPTKIPEFLTLGTTIMLPKDKNTTDPSKYRPITCLPTLYKILTAVLTLYIWKHVNNNNILAREQNGVRGNTRGSKELLIIDYIITRQVKKKQRSISVAWVDYREAFDSVPHTWLIKVLKLYGISKPITDLLEYLMRSWRTNLVLNTKDGHYTTDTINIKTGILQGDTLSPLWFCLAMNFLSWLISRQQYGYIVDKIRNIKISHQMYIDDLKLYAANKEQLEKLLKIVASFTKTIGMQMNLDKCAVVHVRRGRIQEGECMLVTDDVKIPGLSAQEQYKYLGVQQALDIKTKEMKNIFREKYFSRLKKILQSKLSSKAMFTSINIWALPCVSYSFGVVGWTASELKDLDIKTRALLTRHGIHHPHASSNRLYLPRQEGGRGLQNVEIAHNKMVIKLRQYFRSKHSPFIQSVCREDDNFSPLNLGGEEDSRDVTLEQLTQKWHSKALHGRYPGNLQNSNIDKKESLTYLKAGYLFPETEGRLVAIQDQVIPTRAYMKNITGRNILTDKCRRCSQATESVQHVTSGCPMLAPTEYTERHNAMAKVYHQAIAARVSLISNIKKPFEYSPCSVLENCTYKLYWDVTIETDRPTPHNRPDLVLINKKEKQVIIMDVSVPADDNVTRAFSEKLSKYQELAFQMKNMHGLRSALIHPLIISTNGLVEKHLMEITHSLGLDKETISTAQKEVILGTTRIVRKFLTTC

SEQ ID NO: 31691 - protein, 912 aa, Zygaena filipendulae
MVLRFRAEVEEEALSADRTSSGVPAPADDERASAVQPASAASTSATTPADDLPAASAPVGPETSNLVAALLARAERRLGRMGRGRRAAQRTPVTLVQATEATRPMSTRARRRAEYARVQELYKKSRARAAAEIIDGSCRSVKHSIETLEAYWRPVIEKVSTAPGPSRASIRALERARGRAGVNLDYSRLCDPFTPEEVKEVRVDLQTAPGPDGIKAQEWRAVPSAMKAALYTEWFETGEIPEPLRQCRTVFIPKKDVPAGPGDYRPISIASIPLRHMHALLARRLSACSPPDERQRGFICADGTLENSAVLDAIMGDSRKKLRECHIAVLDFSKAFDTVSHTALIGLLRGKGLPGRFCDYVARLYSSASTVLTVGEESSAPVKVGRGVRQGDPLSPLLFNVAMDLVLASLPREVGYRLGAERVSALAYADDLVLVASTKLGMQEAIDCVDLTGEMVGLRLNHSKCSVLSMVPDAHRKKVHYLTSPAFRIGRRWVRQVDCVERWRYLGVDFKAAGCVSLELDIREALNTISRAPLKPQQRLEILRTHLLPRFVHGLVLGTITDDRLRVLDIHIRNVVRKWLRLPKGVPTAYFHAGVRYGGLAVPSFRTAIPDLILKRFGRLSESDWPAARAAAGTDRIRRKLQWAEKQFQRFSGESPSGQRSVAQYWCEALHTSVDGLELRESSRVSASTKWLRDRCGQYSGRDFVQCVHTHINALPSRIRNSRGRRVPGVELNCRAGCAVRETTAHTIQQCFRTHGGRIERHNCVVNAIASAMLADGWQLETEPHIRTSLGLRKPDLIAVKGGLGVVVDAQVVSGQRSLDEAHRVKRNKYGSHVELMQRVAGKLGLSEAQVIATSCTLSWRGVWSLHSYRELKRLLRLPDKVLEAIPGLVLRGSHMNWSRFNRLTACRSGSS

SEQ ID NO: 31692 - protein, 924 aa, Armadillidium nasatum
MAEALEFRCDLCGRGFASLKGLRVHQQRAHRPEYDQRLLDQRGEIKVRWSAEEVVLLAEKELDLEEQNIPFMNMALAPLFPSRTLEAIKGKRKQASYRVALDSLRERRQGAALNRPLDLDQRAEAEVNGAPVRRYGLRPRGNRLALANADDREGRVFQEDPHPPDHLLRPPVIEPGLQMDVAPQRVIRREVLDRDDGEFERLLTKMTSLGMVVAEPRQPPEDRPIQGDNDIGRLTRAQRKRKRYALVQNLYKRDKAETLKFIVDNQNYVERAFPNRDVRQQWRDYFMVNPRLGRVEDGGRMAEDQERELLDNLDAPITEEELEAAIKNTSPSTAKGLDGISLADIQAMRREDVLEVINGIFKWAPEYIYRGKITLIPKKNNPSQFGDFRPICIMPLIIRILHRVLSARLSVIRHNNFQAGFCAGKSTSENICLLRDLMSSAGPRKTSTYLALLDFQKAFDSVSHPTLMGLLYDMGISPAVVGYIQSVYISTRLTVGDGWFAQGRGVLQGDPLSPLLFNIAIDYVLKGLNGNIGVEFGGERIGALAYADDVVLLASSREGLNDSLNRFVQRAARIGLTLGIQKCITSGLRWLGKEKKIIGDVSPFEVQGERVPSLSWRGICKYLGAEFSLGGTTKWAGARMVEDLRKLSAAYLKPQQKMMLLRAYLLPKSYYALLHQKVSNGALRGIDRAIRAAVRKILHLPGDTPVPMFHHHPGDGGLGVPELEVVIPDLREKLRLRLLARGGVWEHVARGIQAPVSGRPRRTLVSEFCDGLGLGESRRQPGCHSWISDGSQLMSGSTYVEAIKVRLGVINTRERAVRGRPHILQDKLCDLGCPRIESLGHILQECPAVAGLRVARHNNINDALRAALVRKGYNTVTEPTIPTEAGIRRPDLVAWKGELAWVIDTTVSADGYGANMSESEVCIL

SEQ ID NO: 31693 - protein, 1044 aa, Armadillidium vulgare
MAEQLAHVCAHCDRRFASLRGLRVHQQRTHRLEYDQEIQDQRVDIKVRWSAEEVHLMASKELELEEQGVAFMNAALVPLFPARSLEAIKGKRRSAEYRRVLESLRAQQQRGAPIPQRELRPPEADNDLPIRPQNERVLRPRVKRPVLGDDGAERGLPNEAVVNVIEADDYQQVRQDVLLESDDDALERLLNKMTSLGMVVGEPRPPRGDVHNDNVDEAVLPRAARKRRQYAKQQSLYARDKAEALKFIVDKQNYVDRTTPSREIRCEWQEYFQVNPGLRRVQDAESMVDNQDIELFEGLDARITPNELEMAMKSTNPSTPRGLDGISLADLQAMSREDVLEVVNGIFSLAPQFIFRGRITLIPKKNRPTLFGDFRPICVMPLIVRILHRVLAARLSVVRNNRFQAGFTAGKSTSENIWLLKGVLSSAGPRKSSTYLALLDCQKAFDSVAHSALIGLLFDLGLPPRLVTYIKLVYSSTRLTLGDEWFQQGRGVLQGDPLSPLLFNILIDYVLRGLDPEIGVEFGGERVGAVAYADDLVLLASSRQGLNDSLNKFVRRAAKVGLTLGIRKCVTAGQKWLGKQKKVVGDMTPFLVGEEQVPVLSWGGLCRYLGVEFDLRGPKKWLGARMVEDLRKLSAACLKPQQKMMLLRAYLLPRCYYQLLHQKVSIGVLRSMDRAVRAAVRKVLHLPGDTSVPMFHHHPGDGGLGVPELESVVPRLRGDLRDRLVARGGIWGEVARGIHVPASGRVRRSLVTEFCDGLGLGESRRQPGCHSWITDGSRMMRGSIFVEAIKIRLAVSHTKERAVRGRPHLLQDKLCDLGCPRIESLGHILQECPVVARLRVQRHDSLNAVLRMALESRAFTVQLEPTIPTQAGIRRPDLVFWKGDQAWVVDTTVSADSHGTSMSLVFDRKCAYYNVPDIRYWVTERTGQERISFSAVVMNWRGDLAPRSLALLRMLGISRSIKLLEIRNMEGSAKMLRFFRAASGHWGIAHPLACCGRTGVGSFLVEDSRPPRTRPWCLMTICLTFKGIFYPCPLSCGVGRSSRC

SEQ ID NO: 31694 - protein, 1013 aa, Armadillidium vulgare
MAEAVNFGCDLCGRSFASLRGMRNHQQKAHRTEYDQRLLEQRGEIKTRWSAEEVFLLAEKELELEQQNVTFMNMALDPLFPSRTLEAIKGKRKQPSYRRVLEGLRARQAEPIQNQPEGDAPGRNPGVDERREQRYRLRPRPARPVRYDREIDDLEHGGEVLPMVAPEPDAAQPEVARQELNDLIMNVPRRMDEQPIERAPWEWPDQGENDYEMLLNKMTSLGMVIGEPRRPPQDRPFRQEMEERRVSRAQRKRRLYAKTQSMYTRDKAETLKFIVDRNNYVERAFPSMEIRNQWQEYFSVNPGLRRVGDGRQLAEGQDPELLRSLDTPITMIELEAALKNTSPSTARGLDGVSLADLRAMNREELLNVLNGMFRMVPERIYRGRITLLPKKNRPTEFGDFRPICVMPLVVRTLHKILAARLSVVKHVRFQAGFCANRSTSENVWLLKELIRSAGPRKTSTYLALLDFKKAFDSVSHQALMGLLYDAGIAPGLVGYIQNVYGWTKLTMGDEWFVQGRGVLQGDPLSPILFNITMDYVLGGLSSNIGVEYGGEKIGALAYADDVVLLASSREGLNDSLNRFVQRAARIGLTLGLRKCTTAGLRWLGREKKVVGDMTPFVIDGEQVPTLNWRGMCKYLGAEFTLSGPSKWVGARLVEDLRKLSAAFLKPQQKMMLLRAYLVPKWYYSLLHQKVSVGVLRAVDRAVRASIRRILHLPGDTPVPMFHCHLGEGGLGVPELEVIIPELREKLRLRLLARGGVWEHVARGIQVPVSTRPRRTLVTEFCDGAGLGESRRQPGCHSWIRDGTTMMKGSTFVDAIKIRLGVINTRERAVRGRPHILQDKLCDLGCPRIESLGHVLQECPAVAGLRIQRHNAINNVLKETLVGKGYRVLVEPTIPTDAGIRRPDLVAWKHQLAWVIDTTVCADGHGANLSAVFHLKCTYYNTPGIRAWVSATTGMESVNISALVMNWRGDLCPRSHTLLRDLNSISAIKTMEVRNMEGSVKILKFFRAASGRWW

SEQ ID NO: 31695 - protein, 1052 aa, Hormaphis cornu
MERPFVCGCGKSYASDQNRRDHQRRFCRLQPGEAMDGTGNVCQYCARRFETFAGLRQHIRLAHPAQYNAELNQEVEAKGHKYRWTEEEEDEMARFEVEYEGDVNMNDYLAVKIGRSREAVKKRRQRPRYIEVLEQLRSAQTSLHDEPSSASGSADSVESGDSDKPEDSDGSRVSDEPGATPPESPRSPSQSESEPESSEHISDDSVREYLLGLESNEHAEATDVRLIRSTGLDREEARRRLDSWTEKLCLDFGRSKKGARVEQSVRPGIGTGRRKRRVELYKDTQNMLKKNPRLLAQKIMNGEELHSSHERPDNDTIRDTLSSMFESASPPEDDGLQETVDAAHDLYQPITDEQIAEAVSRTGKTAPGPDGIDPKRLKAIPRHKLALLFNMMIYLEHVPTVLRMSRTILIPKRGDQLHNIDNWRPLTISSLLLRIVNKILADRVSRVPISEMQRGFTSIDGCFVNNLTVQTIIKSRRKRGKGYAIITLDLRRAFDTISHNSVERALRRKNIDPKTSAYIMNNLTSSSTTVQLEGKDICELSIQRGVKQGDPLSPVLFNLVIDELIEQLDDMRGIAVGDANVSVLGYADDLLLLAEDQSQGQRLLKCASEFFGRRSLQLNVAKCSALNVCTVPSKKKTFVKTTPSFRVGDNSIPPVTVAEVFKYLGLYFSYSGVTKCSVRELDVQLGRIAKAPLKPQQKLRVIKQYLIPSYIHTLQNPSVTAKVLKEADRLIRRTVKKVLHLPAHLINEAIYTPARRGGLGIFSMTKKIPVIILSRVDNVRLKSAAIDAILMEAKDWRKRIEKMLKAGYKTHKAIENTNATELDGSYHGHGLGQAKDDYSSSAFIDQPPQFWSGKEFIKALLLRFNCLPTKGLPYNPPAERRCRAGCQRVESLCHVLQKCPIGHTKRIARHNHVVRRVRDAAVRRGWDVLEEPHIRNARGVLQKPDLVCVRDGNVVVVDVGVSWETPRTLAETYECKKAIYNNEDFTSALVVRYPGKRIVVEPLIVGARGVWCRESSAALDALGANTNANKREIIHTVLRGGWSIHADHMRRV

SEQ ID NO: 31696 - protein, 1090 aa, Laodelphax striatellus
MTCYESSSPKWRGYMERLRRIWTSKHPGLPFSAQKLHDYVSYLRRNGYVAASVANVPEIQPPQENVAARRVEAIEGEVVEMPGTNLDISRRNKKIHHRISLKPQELAEMDHFLAERLPEDIGILALNDAVYELALTKVKPRPEKNQSVVKTSRRVAQLERKILLTREHASRLQSVMDFIRLGRPFTPRVKRIALKLKCQHHTLNMQLLLSIKQHCLDRIRALMLAKQTLVRRMKWISDNEMFHTSPSKLIKGLGPADDAESVTPTVESVERFWGSIYREVPFLKRETPALDAFDTFCRRLRDGAEMECHQVSQEEVRKVVRGLKNFASPGPDGINGYWWKHLPCTHRHLARIFTHFLKGYQPIPGWLVEGHTFLIPKKGDLSDPKNYRPITCLNVCYKIFTKIISDRILESIQPVWQQVYEQRGSKRGMAGCKESLLIDRCVTQDSAQYKRNLSMAWIDYRKAFDSTSHQLLVHLLECLPVSPDIVRCLKDLFPLWKTRFRLTVQRKMVSTSLVTYRRGVFQGDSLSPLLFCISLLPLSVALRQTKGYNCGPPGERVHKITHIFYMDDLKVYAASKTDLKLAIGVVQRYSKDVGMSFGLDKCAVLHLQRGRMTGEDEEMQLIDGSIMKAISAGETYRYLGIEQSQIQDAKNIKTALSSEYKRVVRLIWQTELSAKNKVAATNMLAIPILTYSFGVIRWNVNELQDLDRDTRKRMHMEKSLHPRSSVPRVYLPRHMGGRGLLGLVCLHDRVVLGLAWHVRESSDPLLQLVNTHEIAGVGAFLYKAAQNAAEHLSLDFEALGAIASSPRKAQIRVAEGKQLLQQHMDKPMHGVFYRHVEELGLSKELTFAFLRSAGLKSETEGFILACQDGVINTLAYRSRVLHLDVPDVSCRVCHRAPETLMHILASCSVHAAAGYIHRHNAALRVLYYHLRHSYGIDRSPVLPYAPGEIESVVENEECRIYWNYSFSTTRLLTATKPDIVLLDIVAKTIFVIEFSAPAEGNIAAKEEEKRTKYQDLLIELRRLNPGYSVRMVVLIIGVLGGIRPSLLSNLKTIPACEKAAISLAGGMQKAVILGSLRLLRMNDLLVSDPV

SEQ ID NO: 31697 - protein, 915 aa, Laodelphax striatellus
MDFIRLGRPFTPRVKRIALKLKCQHHTLNMQLLLSIKQHCLDRIRALMLAKQTLVRRMKWISDNEMFHTSPSKLIKGLGPADDAESVTPTVESVERFWGSIYREVPFLKRETPALDAFDTFCRRLRDGAVMECHQVSQEEVRKVVRGLKNFVSPGPDGINGYWWKHLPCTHRHLARIFTHFLKGYQPIPGWLVEGHTFLIPKKGDLSDPKNYRPITCLNVCYKIFTKIISDRILESIQPVWQQVYEQRGSKRGMAGCKESLLIDRCVTQDSAQYKRNLSMAWIDYRKAFDSTSHQLLVHILECLPVSPDIVRCLKDLFPLWKTRFRLTVQRKMVSTSLVTYRRGVFQGDSLSPLLFCISLLPLSVALRQTKGYNCGPPGERVHKITHIFYMDDLKVYAASKTDLKLAIGVVQRYSKDVGMSFGLDKCAVLHLQRGRMTGEDEEMQLIDGSIMKAISAGETYRYLGIEQSQIQDAKNIKTALSSEYKRVVRLIWQTELSAKNKVAATNMLAIPILTYSFGVIRWNVNELQDLDRDTRKRMHMEKSLHPRSSVPRVYLPRHMGGRGLLGLVCLHDRVVLGLAWHVRESSDPLLQLVNTHEVAGVGAFLYKAAQNAAEHLSLDFEALGAIASSPRKAQIRVAEGKQLLQQHMDKPMHGVFYRHVEELGLSKELTFAFLRSAGLKSETEGFILACQDGVINTLAYRSRVLHLDVPDVGCRVCHRAPETLMHILASCSVHAAAGYIHRHNAALRVLYYHLRHSYGIDRSPVLPYAPGEIESVVENEKCRIYWNYSFSTTRLLTATKPDIVLLDIVAKTIFVIEFSAPAEGNIAAKEEEKRTKYQDLLIELRRLNPGYSVRMVVLIIGVLGGIRPSLLSNLKTIPVCEKAAISLAGRMQKAVILGSLRLLRMNDLLVSDPV

SEQ ID NO: 31698 - protein, 1075 aa, Nilaparvata lugens
MARLQRSWLQKHPDLQFSAQKLRDYVSYLRKSGYTAVKPVVGNEEINELTPPGDQVEEQPRTGIIEPHLEADLGARRKNTNLKLNLKPQELAQLDQGLMERLPDNVDILTLNEAVYQIVLSRTRPKPKDGGFIFKARKRMEQLLKKITTARQQASRVQSVIDFLKAGRVFTPRIRRIAHKIRQQHHTLNVRVLLTIKQHCIDRIQALKIAQQSLKKRVRWVDDNATFSLNPSRLLEGQKPVEANNALPAVEEIEAFWGSIYEVRPLLNKETPALGAFADMCRSIRNEREDCAPVTEEEVRGVIRGLRNFASPGPDGISGYWWKHLPCTHRHLARIFTNYLCEHHPIPGWLVEGRTILLPKKGDLSNPGNYRPITCLNVCYKILTRIISDRILQHIQPVWQQCFEQRGSKRNMAGCKENLIADRCIMQDSVQYKRNLSMAWIDYRKAFDTTSHQLIVHLLQCLSVPPSIVRCLEDLFALWKTRFEVRSQQRMVSTRVVTYRRGVFQGDSLSPLLFCISLLPLSAALKKTKGYCCGTPGNRIHRVSHLFYMDDLKIYAASKSDLKLAVGVVQRYSNDIGMSFGLDKCAVTHLLKGRLQGLVQEMELIDGSIIRALRAGESYQYLGFDQNQAQDAVKIKMALCSEYKRRLRRLWSSELSGKNKVEATNMLAVPVLTYSFGVVKWNRNELQDLDRETRKRMHMERSLHPRSSVARIYLPRHEGGRGLLGLENLHNRVALQFACSIQRCSDPLMQLVHDHEVAGVGAFLYKAAQHAADTLGLDFRTDREEEHEPNQLRARIKTAESRLLLQQHKDKSLHGVFYRHVEEQGLSKPLTFAFLKSAALKSETEGFILACQDGVINTLSYRSRVMHMDVPDISCRVCHRAPETIMHILSSCSVHATAGYIHRHNAALRVLYYHLRHSYGIDKTPVLPYAPGEIESVVGNERCRIYWNYSFSTTRLLRATKPDVVLLDITSKTMYVIEFSAPAEGNIVTKEEEKQTKYHDLLMELRRLNPGYSVRMVVLIVGVLGGMRPSFLANLRTIPACERPAAVLAGQMQKAVILGSLRLLRANDLMVTDPV

SEQ ID NO: 31699 - protein, 936 aa, Nilaparvata lugens
MEQLLKKITTARQQASRVQSVIDFLKAGRIFTPRIRRIAHKIRQQHHTLNVRVLLTIKQHCIDRIQALKIAQQSLKKRVRWVDDNATFSLNPSRLLEGQKPVEANNALPAVEEIEAFWGSIYEVQPLLNKETPALGAFADMCRSIRNEREDCAPVTEEEVRGVIRGLRNFASPGPDGISGYWWKHLPCTHRHLARIFTNYLCEHHPIPGWLVEGRTILLPKKGDLSNPGNYRPITCLNVCYKILTRIISDRILQHIQPVWQQCFEQRGSKRNMAGCKENLIADRCIMQDSVQYKRNLSMAWIDYRKAFDTTSHQLIVHLLQCLSVPPSIVRCLEDLFALWKTRFEVRSQQRMVSTRVVTYRRGVFQGDSLSPLLFCISLLPLSAALKKTKGYCCGTPGNRIHRVSHLFYMDDLKIYAASKSDLKLAVGVVQRYSNDIGMSFGLDKCAVTHLLKGRLQGLVQEMELIDGSIIRALRAGESYQYLGFDQNQAQDTVKIKMALCSEYKRRLRRLWSSELSGKNKVEATNMLAVPVLTYSFGVVKWNRNELQDLDRETRKRMHMERSLHPRSSVARIYLPRHEGGRGLLGLENLHNRVALQFACSIQRCSDPLMQLVHDHEVAGVGAFLYKAAQHAADTLGLDFRTDREEEHEPNQLRARIKTAESRLLLQQHKDKSLHGVFYRHVEEQGLSKPLTFAFLKSAALKSETEGFILACQDGVINTLSYRSRVMHMDVPDISCRVCHRAPETIMHILSSCSVHATAGYIHRHNAALRVLYYHLRHSYGIDKTPVLPYAPGEIESVVGNERCRIYWNYSFSTTRLLRATKPDVVLLDITSKTMYVIEFSAPAEGNIVTKEEEKQTKYHDLLMELRRLNPGYSVRMVVLIVGVLGGMRPSFLANLRTIPACERPAAVLAGQMQKAVILGSLRLLRANDLMVTDPV

SEQ ID NO: 31700 - protein, 1074 aa, Laodelphax striatellus
MARLQRLWLNKHPELQFSAQKLRDYVSYLRKNGYTAVQPAVDNNERLPSQGDQGEDQAIQPRPEVIEPHQDANLSATRKNTNLRVNLKKQELAHFNQSLMERLPEDVDILTLNEAVYQVALSKAGHKPKDDAFISKAKRRIEQLQKKILKARQHASRVQSVIEFLKAGRVFTPRIKRIARQIRQQHHTLNERILLTIKQHCLDRIRALKSAQQSLDKRVKWVKDNTLFSLNPSRLLADPVEAQHVSPAIEEVEAFWRSIYEVEPPLRKETPVLNAFAELCRAAQNERGECAPVSEEEVRRVVKGLRNFASPGPDGISGYWWKHLPCTHSHLARIFTSFLCDHQPIPSWLVEGKTILLPKKGDLSSPGNYRPITCLNVCYKILTLIISDRIMQHIQPVWQQIYEQRGCKKGMAGCKENLIADRCIMQDAVQYKRNLSMTWIDYRKAFDSTSHQLIVHLLQCLAVPPDIVKCLQDLFPLWKTRFLITSQQRTVSTGLVTYRRGVFQGDSLSPLLFCISLLPLSAALKKTKGYCCGMPGNRIHKITHLFYMDDLKIYAATKSDLKLAIGVVQRYSMDIGMSFGLDKCAVTHLLKGRTQGLSEDMELVDGSIIRALNAGETYQYLGFEQNHVQDAEKIKQALRSRYKRILRRLWSTELSGKNKVNATNMLAVPVLTYSFGVVRWKRNELQELDRETRKRMHMERSLHPRSSVPRIYLPRYLGGRGLLGLENLHDRVALQFACSIKRCSDPLMQLVHDHEVAGVGAFLYKAAQRAAETLGLDFDTEREETVQTSRLRAQIKAAESKFLLQQHEDKVLHGLFYKHIEEQGLSKELTFSFLKSAALKSETEGFIIACQDGVINTLSYRSRVMKMSVPDISCRVCHRAPETLMHILSACSVHATAGYIHRHNAALRVLYYHLRHSYGIDKTPVLPYIPGEIESVVENEKCRIYWNYSFSTTRLLTATKPDVVLLDHTAKTMYVIEFSAPAECNIVVKEEDKRTKYQELLVELRRLNPGYSVKLIVLVIGVLGGMRPTLLANIKAIPACERSAISLLGQMQKAIILGSLRLLRANDLWMTDQA

SEQ ID NO: 31701 - protein, 977 aa, Nilaparvata lugens
MERLPDNVDILTLNKAVYQIVLSRTRPKPKDGGFIFKARKRMEQLLKKITTTRQQASRVQSVIDFLKAGRVFTPRIRRIAHKIRQQHHTLNVRVLLTIKQHCIDRIQALKIAQQSLKKRVRWVDDNATFSLNPSRLLEGQKPVEANNALPAVEEIEAFWGSIYEVQPLLNKETPALGAFADMCRSIRNEREDCAPVTEEEVRGVIRGLRNFASPGPDGISGYWWKHLPCTHRHLARIFTNYLCEHHPIPGWLVEGRTILLPKKGDLSNPGNYRPITCLNVCYKILTRIISDRILQHIQPVWQQCFEQGGSKRNMAGCKENLIADRCIMQDSVQYKRNLSMAWIDYRKAFDTTSHQLIVHLLQCLSVPPSIVRCLEDLFALWKTRFEVRSQQRMVSTKVVTYGRGVFQGDSLSPLLFCISLLPLSAALKKTKGYCCGTPGNRIHRVSHLFYMDDLKIYAASKSDLKLAVGVVQRYSNDIGMSFGLDKCAVTHLLKGRLQGLVQEMELIDGSIIRALRAGESYQYLGFDQNQAQDAVKIKMALCSEYERRLRRLWSSELSGKNKVEATNMLAVPVLTYSFGVVKWNRNELQDLDRETRKRMHMERSLHPRSSVARIYLPRHEGGRGLLGLENLHNRVALQFACSIQRCSDPLMQLVHDHEVAGVGAFLYKAARHAADTLGLDFRTDREEEHEPNQLRARIKTAESRLLLQQHKDKSLHGVFYRHVEEQGLSKPLTFAFLKSAALKSETEGFILACQDGVINTLSYRSRVMHMDVPDISCRVCHRAPETIMHILSSCSVHATAGCIHRHNAALRVLYYHLRHSYGIDKTPVLPYAPGEIESVVGNERCRIYWNYSFSTTRLLRATKPDVVLLDITSKTMYVIEFSAPAEGNIVTKEEEKQTKYHDLLMELRRLNPGYSVRMVVLIVGVLGGMRPSFLANLRTIPACERPAAVLAGRMQKAVILGSLRLLRANDLMVTDPV

SEQ ID NO: 31702 - protein, 997 aa, Nilaparvata lugens
MARLQRSWLQKHPDLQFSAQKLKDYVSYLRKSGYTAVKPVVGNEEINELTPPGDQVEEQPRTGIIEPHLEADLSARRKNTNLKLNLKPQELAQLDQGLMERLPDNVDILTLNEAVYQIVLSRTRPKPKDGGFIFKARKRMEQLLKKITTARQQASRVQSVIDFLKAGRVFTPRIRRIAHKIRQQHHTLNVRVLLTIKQHCIDRIQALKIAQQSLKKRVRGVDDNATFSLNPSRLLEGQKPVEANNALPAVEEIEAFWGSIYEVQPLLNKETPALGAFADMCRSIRNEREDCAPVTEEEVRGVIRGLRNFASPGPDGISGYWWKHLPCTHRHLARIFTNYLCEHHPIPGWLVEGRTILLPKKGDLSNPGNYRPITCLNVCYKILTRIISDRILQHIQPVWQQCFEQRGSKRNMAGCKENLIADRCIMQDSVQYKRNLSMAWIDYRKAFDTTSHQLIVHLLQCLSVPPSIVRCLEDLFALWKTRFEVRSQQRMVSTRVVTYRRGVFQGDSLSPLLFCISLLPLSAALKKTKGYCCGTPGNRIHKVSHLFYMDDLKIYAASKSDLQLAVGVVQRYSNDIGMSFGLDKCAVTHLLKGRLQGLVQEMELIDGSIIRALRAGESYQYLGFDQNQAQDAVKIKMALCSEYKRRLRRLWSSELSGKNKVEATNMLAVPVLTYSFGVVKWNRNELQDLDRETRKRMHMERSLHPRSSVARIYLPRHEGGRGLLGLENLHNRVALQFACSIQRCSDPLMQLVHDHEVAGVGAFLYKAAQHAADTLGLDFRTDREEEHEPNQLRARIKTAESRLLLQQHKDKSLHGVFYRHVEEQGLSKPLTFAFLKSAALKSETEGFILACQDGVINTLSYRSRVMHMDVPDISCRVCHRAPETIMHILSSCSVHATAGYIHRHNAALRVLYYHLRHSYGIDKTPVLPYAPGEIESVVGDERCRIYWNYSFSTTRLLRATKPDVVLLDITSKTMYVIEFSAPAEGNIVTKEEEKQTK

SEQ ID NO: 31703 - protein, 917 aa, Laodelphax striatellus
MRLEVQSVIEFLKAGSVYSKNKKLRQIRQQHHTLNERILLTIKQHCLDRIQALKSAQQSLDKRVKWVKDNTLFSLNPSRLLANPVEAEHVSPAIEEVEAFWRSIYEVEPPLRKETPALDAFAELCRAAQNERGECAPVSEEEVCRVVKGLRNFASPGPDGISGYWWKHLPCTHSHLARIFTTFLCDHQPIPSWLVEGKTILLPKKGDLSARKWPITCLNVCYKILTRIISDRIMQHIQPVWQKIYEQRGCKKGMAGCKENLIADRCIMQDAVQYKRNLSMTWIDYRKAFDSTSHQLIVHLLQCLAIPPDIVRCLQDLFPLWKTRFLITSQQRTVSTGLVTYRRGVFQGDSLSPLLFCISLLPLSAALKKTKGYCCGMPGNRIHKITHLFYMDDLKIYAATKSGLKLAIGVVQRYSMDIGMSFGLDKCAITHLLKGRTQGLSEDMELVDGSIIRALNAGETYQYLGFEQNHVQDAEKIKQALRSKYKRILRRLWSTELSGKNKVNATNMLAVPVLTYSFGVVRWKRNELQELDRETRKRMHMERSLHPRSSVPRIYLPRYLGGRGLLGLENLHDRVALQFACSIKRCSDPLMQLVHDHEVAGVGAFLYKAAQRAAETLGLDFDTEREEIVQTSRLRAQIKAAESKFLLQQHEDKVLHGLFYKHIEEQGLSKELTFSFLKSAALKSETEGFIIACQDGVINTLSYRSRVMKMSVPDISCRVCHRAPETLMHILSACSVHATAGYIHRHNAALRVLYYHLRHSYGIDKTPVLPYVPGEIESVVENEKCRIYWNYSFSTTRLLTATKPDVVLLDHTAKTMYVIEFSAPAECNIVVKEEDKRTKYQELLVELRRLNPGYSVKLIVLVIGVLGGMRPTLLSNIKAIPACERSAISLLGQMQKAVILGSLRLLRANDLWMTDQA

SEQ ID NO: 31704 - protein, 984 aa, Blattella germanica
MPLINNEDHSNNVTILSTSTANDNNGNSNSLITTNAITSQDQTKLCTLCGKQFKSLAIHVSKVHGEAYRKKLSHKYECPLENTKDTDTDSPSSNNPITVADVSSPATQQILQFEKALEECILSSDLNRFEEITVEITAYLSKAIASLPGPKHPATHYYNARKLRQTIHGTSYSNTKNPARLSKRKRKDNKQKYQYEVAQFHYFNQRRKVVRQIMKNHNNVQCQISIPIIFQHFNTLFNNENPFTPIESIHPVSTEEDIEITEDEIKAAMAKIKIDTSAGIDHVLVRTIKELKTSKLLCLLTNAMLKFKICPGILKTARTVLLFKGGDETKLSNWRPISIFSVICRIIEKVINRRLKSYIELSPHQRGFINVPGTHINTSIINGCLTRAKKEKRNCCIAFLDISKAYDNVGHEHVKRCLLRTNMPNNLRDLVLNLLQGNKIQIESGFQKTKPIQVQKGVAQGSPLSPGLFNLALDDTLKELADPNVREVFGFSLHPDLEKVSGLAFADNIALISKDEASLQTLINMTVFNLDAIGLKVNPKKCMLINIKNGFLEQGQILVGGQTLEFIKPGEIIKYLGVTFEDEIVLDKSTLIKNFENDLNSLTVSNLLTPDQKLNIVNQYIWSMLIYPLQCTPLDKIPSSFLQDIDKLLRSSIKEIIGLPSDCPTDMLYAARNVRGLGLIKVEWEASIQHFNIAWTLLNTNDDHLHCSRNLVKEQQQSLVQLDIPCNEQVLQKSSRWLRNQLRTRSYEAWCKLPHKGKGVEVFKQVPDSNSWLVNRKGFSTSEWTNAIKMSCNTTAVRTIPGRSKHTTKCRHPGCEHQETLGHVLGMCAKGELLRNTRHHKVRSYIATHLRKANWEVYEEVHCTSEDGSHRRADIVAIDRQAGRGLILDPTIRMEQDGEQAIHVNTEKETIYRPCIPHFSERYNLPVNAWAVKGLLFGSRGTAYQWTADILKGLGMSVINLKLCCSMILKDSIQILQNHLYNQT

SEQ ID NO: 31705 - protein, 984 aa, Blattella germanica
MPLINNEDHSNIVTILSTSTANDNNGNSNSLITTNAITSQDQTKLCTLCGKRFKSLAIHVSKAHGEAYRKKLSHKYECPLENTKDTDTDSPSSINPITVADVSSPATQQILQFEKALEECILSSDLNRFEEITVEITAYLSKAIASLPGPKHPATRYYNARKLRQTIHGTSYSNTKNPARLSKRKRKDNKQKYQYEVAQFHYFNQRRKVVRQIMKNHNNVQCQISIPIIFQHFNTLFNNENPFTPIESIHPMSTEEDIEITEDEIKAAMAKIKIDTSAGIDHVLVRTIKELKTSKLLCLLTNAMLKFEICPGILKTARTVLLFKGGDETKLSNWRPISIFSVIRRIIEKVIDRLLKSYIELSPHQRGFINVPGTHINTSIINGCLTRAKKEKRNCCIAFLDISKAYDNVGHEHVKRCLLRTNMPNNLRDLVLNLLQDNKIQIESGFQKTKPIQVQKGVAQGSPLSPGLFNLALDDTLKELADPNVREVFGFSLHPDLEKVSVLAFADDIALISKDEASLQTLINMTVFNLDAIGLKVNPKKCKLINIKNGFLEQGQILVGGQTLEFIKPGEIIKYLGVTFEDEIVLDKSTLIKNFENDLNSLTVSNLLTPDQKLNIVNQYIWSRLIYPLQCTPLDKIPPSFLQDIDKLLRSSIKEIIGLPSDCPTDMLYAARNVRGLGLIKAEWEASIQHFNIARTLLNTNDDHLHCSRNLVKEQQQSLVQLDIPCNEQVLQKSSRWLRNQLRTRSYEAWCKLPHKGKGVEVFKQVPDSNSWLVNRIGLSTSEWTNAIKMSCNTTAVRTIPGRSKHTTKCRHPGCEHQETLGHVLGMCAKGELLRNTRHHKVRSYIATHLRKANWEVYEEVHCTSEDGSHRRADILAIDRQAGRGLILDPTIRMEQDGEQAIRVNTEKETIYRPCIPHFSERYNLPVNAWAVKGLLFGSRGTAYQWTADILKGLGMSVINLKLCCSMILKDSIQILQNHLYNQT

SEQ ID NO: 31706 - protein, 947 aa, Solenopsis fugax
MAVEEASAPPDTRAINVYLYERLQERGRSIEAIKGVRRRPDYRAMVQEHRDRRLFGGVGDLLRSPPRAGDERDMHLRADGQPDRTAMDWLIARHEDIIPEVSGGIWIRAAMSHVRDGMEPDDCLEQWWALLFPDLVGASGARLVRGALTRPALSKRRARRREYRRMQELWRTNMAKAARKVLDGDCDDRPHLPLREQIDFWRGVLETGFNGAARGADSARAPPIPGIWSPITIGEVINIKLPRCSAPGLDGLTVRRWMSEVPAIIRAAILNIFMATGRVPSRFRDSRTVLIPKAGDPLDPSNYRPISVASVVLRHFHKILVARLRKCNIIDERQRAFISADGCAENTAALATILFDARTKLNQVHFIALDVRKAFDTVSHGAIYEVLARHGIPEGMISYLQVLYREAAVRLEVDKEFSDPIHPGRGVRQGDPLSPLLFSLVMNEVLQAIPEQVGYRLDGESVGVLAFADDLVLIGTTVGGAQLSLDRVTEALGRFGLGLAPDKCAAFSLVPAGKSKKMKILTEQTFRTGDCEIPQLNTARSIKYLGIRFGGAGPLETEIELAPLLDRVRRAPLKPQQRLEILKTFIIPRLTHGLVLGRVTHGTLRKVDRQIRAALRCWLVLPGDVPMAFFHAPVRFGGLGVVSLESAIPELTLKRLRNLQDSNYRVARLVVRSTWAQQRIKWCGMVKRKNEDWAKELYRTVDGFELREAGQVRASTDWLRDPMVHVPSSEWLRYIKVWVNALPTRIRTTRGPRRLREDVLCRAGCGVQETAAHVIQQCFRTHGGRVMRHDAVAATLAQDMQRLGYEVRREHVFRTSIGARKPDIVASKDGRACMLDVQIVSGARPLEESHTRKRDYYARNEELVRAVSNMFQVPTQKVEMVTATLTWRGVWSETSAMDLGAMGISRSLMRGITTRVISGSFRNFVRFNQTTMARGARYLRMSGWGPP

SEQ ID NO: 31707 - protein, 1046 aa, Morbakka virulenta
MSAMNNISITNNDVNGTGDYCEGPSSGRGRVEASQVVIQRNPRTNVRTKWSKEVNKVVIECFYRSRTFDGDGKPIRGYRQRLMKEWRERGVFEVTEQRLCDQARAIRTNKWLSDLELESIQRMISSTSDDGNNNMETVQEPQTRNDGLRVADVLSEENNDLGNMSVNFEGLEEEELVIITNLNEIMIQGRNTDGISFKKIDMKTLNRVTGKVNKVIDLIETSNITETNNLIKAAAVWVADELGLKKFKPGKKKDPWWKRRLEGDIKQLRKDISLLERVKKGVLGFQKEAKGKCLMEKYRVKKKGLTTVIEELKQRILAKSAKINRYNQRIDQYRLNRLFKVDQKKVYNELNGNAGGSNDTPNAEESKTFWSNIWSVKKEHNKEAEWLNELKEETAAVEQNNVVITAEKIKNQCRKIPNWKAPGQDGVQGFWIKRFDAMHERIATQLNDMLNGRKTIPPWMTYGRTVLCQKDPAKGNAVDNFRPITCLPIMWKLLTGIIADDMYKFMERENLLPEEQKGCRRKSKGTKDQLLIDKTILRDCKRRKTNLAMAWIDYRKAYDLVPHSWILECLNMLGIADNIRAFIEKSMEKWKLLLTSNGSNLCEVEVNRGIFQGDSLSPLIFVICMIPLSVLLRKLSASYEWGKKEFKLNHLLFMDDLKLFGKNDDQIDSLVNTVYFFSKDIGMEFGLKKCGVIIMKRGKLARFDGIHLPNGEVMRHVDENGYMYLGVLELDQIKEKEMKSKVITEYKRRLRLILKSSLNGRNKIQAINTWAVALLRYGAGIIAWKVDELRKIDRTTRKILTMYGAFHPKGDIDRLYVKRKEGGRGLISIENCVWSEENNLGLYIRESNEMLLKGVRKGGVIQTDNLMEKDEFKRSSHNEIKTKWHEKRMYGQFVREMPEEIDKKLSWQWITRGDIKVQTEATIFAAQEQALRTNYIKNRIDKTSESPLCRMCGERAETVQHIVCECSKMAQREYKRRHDNIAKLIHWMLGGKYGLDRKEKWYEHCPEGVVEDENVKLIWDINIKCDNLIEARRPDIILLQKKTIII

SEQ ID NO: 31708 - protein, 1049 aa, Solenopsis invicta
MLLWRSGSLGLPAPLALLAGPTKRNPPRIIISNPGPSGSRGPASGNSTPPSTSPVGPDEVHACEFPGCNRAFSSKTGKGVHQRRAHPDWYDARQNVVAKKARWTDEETRMLARREIELSRAGEKFINQALLTDFPDRSLESIKSRRRQNSYRAVLQEMLALGDVGEARTPEVTTPETDLLSGSTPLNIAYKEAIKEHVKSLPALSERTFQSRKLQSICDSLSTRSSSDVYDELALYLREVFPVDRRVKRNRAGNVNQDEVLSRKQKRRSDYARTQDLWRKNRFRCLRMILDDVSNVSIPPKEQMVPFWKTVMSGDSNSSPGDEAPSQSMDQLWAPITLSEVRRGLPANTTAAGPDGLSARLLRKVPHGIIIRILNIILWCGRAPTHLLESLTTLIPKKSNAHLPSDFRPITVSSVIIRTLHKILATRLASNVELDQRQRAFRPTDGCSDNVFLLDMLFRQKHKQHKPLFLASLDMAKAFDSVSHQTICETLKVKGVPLPMIDYIMDVYARSTTSLCCNSWTSEKIRPACGVKQGDPMSPVIFNMIIDRLLKILPDEIGARIDGITVNAAAFADDILLFASTPTGLQKLLDLSTDFLGKCGLQVNVAKCMTVALRNVPREKKTVVDKETVFRCGGRVLPALKRSDEWKYLGVPFTPEGRMKTDITTGLLASIDKLTKAPLKPQQRLFAMRTMILPGLFHQLELGNVTVSVLRKCDRITRQAVRTWLNLPTDTPNAYFHADIKDGGLGVVSLRWTAPLRRLSRLKKLPVAADPAGGSTGAFLRDELKRCQDRLNDGTAAVSTLEDLRRRWSALLYSKVDGCGLKESAKVPQQHVWIREGTRFLSGKDYLQSCKLRINALPTKSRTSRGRPGDRHCRAGCNTPETLNHILQQCHRTHSARIKRHDAVVHFVAKRLVANGYEVHLEPRINSTEGLRKPDIVAKLGTTAIIIDAQVVNDQISLDGAHTRKANFYKNIANEVKEKYRVESTLHTSITLSWRGVWSLRSAEDLLIRGVLLKKHLKVISSRVIIGGLGCFHLFNSSTKTRPGGLRNG

SEQ ID NO: 31709 - protein, 1138 aa, Bradysia odoriphaga
MGISSQGSEGCSGLNNLKDLIKRTKTEYQNIIPNFNKWPCPFCFNHSKTLVQCRLHIFREHPANCRADKDFLRDFKEIYEVSVPSENYVNEGEDSVDCDVVSSQLSCRECDFTTKSEKGLKIHWKKKHSSSYDQNESTNSSSVILENTPKDLKEFLKLIHENQKRGGTNKAVEELKIECSSGKSTNRAKCPFCDEDSTKTYQIPNGLKIHCRRMHKNENVEEFLNPLEMNHSDNFAFNLSRLKQSCQLVKRIPKGARTMVATQFSKSIDKCVKQNTFATWQELLTLPYKLLKLPTADKSKRKSNGTSIVRLIKDNCLRFSSETDAENELTDQRNRKEEYSKSRSKPNPNLAKVIESKLADFDIKGAVNIISSNDTVAPNDEETYIQLLSKHPSPTQELSFPSAPDNSIKSIQVDSVQVQNGIQSFPAGSSGGMDGLRPQHVKDLISYSSGEAGQKCLSSITELSNILLRGKLNSEICPFFYGANLCAFLKKDGGIRPIAVGCTFRRLAAKLGCFEVKDKLSAYLLPRQIGFGVKLGCEAAVHALRATVRKSRNSTRIVLKIDFKNAFNSINRDEMLKNVKEHVPELYNLLWQSYSTPSHLFFGDKIIPSHMGAQQGDPTGPLSFCLTIHPIITSLSSDFNIWYLDDGTLCDYPNIVLKDFEQVIEKARRIGLEVNPSKCEIFFCNGIIDEEVLSKFQKIAPGIRAIDADDLELLGSSILEEGFEKFIVKKLEKISLLISRLNDLQSHYALFLLKTCFTVPKLIYFLRTTPSWRIESIIDSVDIELKEALISILNIQLDENQWSQASLPVRFGGLGIRRLKDISLPAFLSSTYSVKELLSNLTDIQDCDSEIPHLDEGLLLWNELNDSVPIDQKKQKNWDEINMQRISRELVFNSEIEKFRFQSLQNKFSGAWLTATPNPNLGTLLNNETLRTCVGLRLGANICRPHSCDLCGTLVDSLGRHGLCCPKNKGKYSCHSVLNRTVQQSLSSINMSSRLEPQGMFRKDGKRADGATNIPWSKGRALVWDVTCVDTLAKSYLRVNNVPGQASENAAKKKHRLYEEIKRNYHFVAFAVETIGPWAEETIRLIKQIGKRLIEVSGEKRSRLYFIQRLSLAIQRGNYERVLGTLPKSDSLKEIFYI

SEQ ID NO: 31710 - protein, 1115 aa, Pissodes strobi
MRWSKEINVELIRAYLLATRNERDRTGYRDRLQEIWQEKFPNLQMEAQRLSDQARSVLRRKAISDAELDALKRETAIALNAAQPEQAEDLAEAADEQHTQNNNEAEQPLIQEESDPEGAERLKNALRASLLKYGGMEPTMRPPIAKLKYSPESRKAVNGMKIILRDFVQQCDTLEKIHELAYCAADAVVFLSGKAKKERTNINNGKTTPPWKERLERKINLIRKTIGKLDSYISNPTQHKKKLKKEIKNIAKEAKIKRNSPGYQQELKTYLDKQKQRVAVLGARIRRYNKRNRRFRDNRTFLEDPDRFYRSLDTSSAENKETSRPNPQDMLTYWENIWGRPENHQENAYWIQEEIGWNKRKPSMPKVQITEADVLRTVKNVANWKSPGPEKIQNYWWKHFTALHNAIARQFQSILESPELMPEFLMEGTTTMLPKTGDLNNPKNYRPITCLPTLYKTFTSILAQKIEKHLTENEILAAEQLGCKKRAQGAKELLIIDSVITNQARTKHRNLSVGWVDYKKAFDSVPHSWLARVLDVYKIDQAVAKLLQYMMRKWKTRLKVRRQQQEYLTQHLQIKRGIFQGDSLSPLWFCLALNPLSSLLNRSPYGYKLDGPRGQKVSHALYMDDLKCYGSNSEQLHNQMEIVANFSNTIKMEFGLDKCAVLHIKRGCPVAGETLRLMDGVEIGHLSAEETYKYLGFQQALNIKTKLMKDKIKAEFKRRIQLVLKTELNSKNTFTAINTWAMPVVEYIFGVLKWSDTDLQEIDRLARTTLTSYRSHHPRSSSARLYISRHSGGRGLSCLTARHLKQKEKLRKYFKNSNLPIHDVLVRSDKNLTPLNLAHDEEFPHSNHEEELIKEWLSKEIHGRFAAALRSDAVDKELSCTYLRQGWLNRETEGAISAVQDQVVATRYYIKNILRQSIPNDLCRVCSQKPETIQHITSACSVIAPKEYLNRHNDVAKIVHSNICYKNNFLVDIPPYYKYSPNPVIENHYIKIYWDTTIVTDRQIEHNKPDILYINKSEKWAFIIDFAVPAENNIQKAYVEKITKYQDLLHELKRIYSLEKIEVLPLIISTTGLVEKRLVKNLEKLGLGRDLVGVMQKPVILGTCHLVRRYLLHEG

SEQ ID NO: 31711 - protein, 980 aa, Pissodes strobi
MEPTMRPPIAKLKYSPESREAVNGMNIILRDFVQQCDTLEKIHELAYCAADAVVFLSGKAKKERTNINNGKTTPPWKERLERKINLIRKTIGKLDSYISNPTQHKKKLKKEIKNIAKEAKMKRNSPGYQQELKTYLDKQKQRVAVLGARIRRYNKRNRRFRDNRTFLEDPGRFYRYLDTSSAENKETSRPNPQDMLTYWENIWGRPENYQENAYWIQEEIGWNKRKPSMPKVQITEADVLRTVKNVANWKSPGPEKIQNYWWKHFTALHNAMARQFQSILESPELMPEFLMEGTTTMLPKTGDLNNPKNYRPITCLPTLYKTFTSILAQKIEKHLTENEILAAEQLGCKKRAQGAKELLIIDSVITNQARTKHRNLSVGWVDYRKAFDSVPHSWLARVLDVYKIDQAVAKLLQYMMRKWKTRLKVRSQQQEYLTQHLQIKRGIFQGDSLSPLWFCLALNPLSSLLNRSPYGYKLDGPRGQKVSHALYTDDLKCYGRNSEQLHNQMEIVANFSNTIKMEFGLDKCAVLHIKRGCPVAGETLRLMDGVEIGHLSAEETYKYLGFQQALNIKTKLMKDKIKAEFKRRIQLVLKTELNSKNTFTAINTWAMPVVEYTFGVLKWSDTDLQEIDRLARTTLTSYRSHHPRSSSARLYISRHSGGRGLSCLTARHLKQKEKLRKYFKNSNLPIHDALVRSDKNLTPLNLAHDEEFPHSNHEEELIKEWLSKEIHGRFAAALRSDAVDKELSCTYLRQGWLNRETEGAISAVQDQVVATRYYIKNILRQSIPNDLCRVCSQKPETIQHITSACSVIAPKEYLNRHNDVAKIVHSNICYKNNFLVDIPPYYKYSPNPIIENHYIKIYWDTTIVTDRQIEHNKPDILYINKSEKWAFIIDFAVPAENNIQKAYVEKITKYQDLLHELKRIYSLEKIEVLPLIISTTGLVEKRLVKNLEKLGLGRDLVGVMQKPVILGTCHLVRRYVLHEG

SEQ ID NO: 31712 - protein, 786 aa, Pissodes strobi
MLTYWENIWGRPENYQEDAYWIQEEIGWNKRKPSMPKVQITEADVLRTVKNVANWKSPGPEKIQNYWWKHFTALHNAIARQFQSILESPELMPEFLMEGTTTMLPKTGDLNNPKNYRPITCLPTLYKTFTSILAQKIEKHLTENEILAAEQLGCKKRAQGAKELLIIDSVITNQARTKHRNLSVGWVYYKKAFDSVPHSWLARVLDVYKIDQAVAKLLQYMMRKWKTRLKVRSQQQEYLTQHLQIKRGIFQGDSLSPLWFCLALNLLSSLLNRSPYGYKLDGPRGQKVSHALYMDDLKCYGSNSEQLHNQMEIVANFSNTIKMEFGLDKCAVLHIKRGCPVAGETLRLMDGVEIGHLSAEVTYKYLGFQQALNIKTKLMKDKIKAEFKRRIQLVLKTELNSKNTFTAINTWAMPVVEYTFGILKWSDTDLQEIDRLARTTLISYRSHHPRSSSARLYISRHSGGRGLSCLTARHLKQKEKLRKYFKNSNLPIHDALVRSDKNLTPLNLAHDEEFPHSNHEEELIKEWLSKEIHGRFAAALRSDAVDKELSCTYLRQGWLNRETEGAISAVQDQVVATRYYIKNILRQSIPNDLCRVCSQKPETIQHITSACSVIAPKEYLNRHNDVAKIVHSNICYKNNFLVDIPPYYKYSPNPIIENHYIKIYWDTTIVTDRQIEHNKPDILYINKSEKWAFIIDFAVPAENNIQKAYVEKITKYQDLLHELKRIYSLEKIEVLPLIISTTGLVEKRLVKNLEKLGLGRDLVGVMQKPMILGTCHLVRRYVLHEG

SEQ ID NO: 31713 - protein, 1053 aa, Pterostichus madidus
MTGVRCVGGSVLKDENGLKHHQRYRCKGANYVPVCPECGKGYLTAAGLQQHRRQVHPAAYNSSMEQEVSSRRRNKAWTQLETELMASHEVAFKGGKLQINNFLADKMGRSIDSIKSKRKQSVYKDLVARLKAERVDQEDEFGTPPSSPVNDRDVFHDSLSFLDDRSSMPDELSGNCSQRFDNVGIDDHMGEKAETAATRVVDPATPGPSGSKEQDPVRDYLCSLVFHSEIGEHASLLEQLLGGCPDALSALLNMLRSKPTKDPRPPRRTDCPVTSSNVNAANCAVPAPARARKAHKGSAAHNARAAAYKNTQDVFNRDKRKLVASLFSASPLGTPAIHPAIEEVEAAYSDIFGRESPRDAQPVTVVDYGSDSTYSPITIEEIKEVVSGLRPSAAGPDGLNVKQLRAMSPTALAILFNGILLTGVVPKQLKECRTTLIPKSGDLLLVQNWRPITIASLLLRMFNKIVARRLSLISLNLAQKGFRKIDGCLANTMLLHTLIKEHRAKASPYSVCTLDLKKAFDSVSIRMIEEQYADCSTTVTCAKSSTGPIPVRRGVKQGDPLSPILFNIIMDELLTQVDHNLGLQVGEVKIAVLAYADDLLVVGLDTLSVQRTLDGICAALVTKRVPFKKKLFCVTQPVLFVDGCPLRQITPDDQFKYLGKNFDFLGVERFTANKFETVMNNLAKSPLKPQQKYHLICTHIVPTALHDMQYPGITSATLSTCDLAIRKAVKAALHLPSSTPNAFFYADKKDGELGLLCLRERIPIVLMRRLEKLRLSDDLFASAAIACTQGQVVMQRLRRVMGSVNTPAHAASTQKLALEKSISSNGMHQCSAAQSNQWISYPPKYWSGRDYVRAVQLRANMLPVRGAPHNPKHLRKCRTNCGRVESVSHVLQGCKVTHWSRIERHNRIVKAISKVAAKRGYEVEMEPRVVGTDGALKKPDLILRKDDHIIVSDVAIKWEGPQPLSSEYNRKVNYYSSTAFITKVRSRYGAEKAITVAPFILGARGSWCTLNRTLEALLRIPQSDLNTMVTDTLKGGWSIHAAFYRRTWHMSAP

SEQ ID NO: 31714 - protein, 1082 aa, Pterostichus madidus
MTGVRCVCGSVLKDENGLKRHQKLRCRGANYVPVCPECGKGYLTAAGLQQHRRLAHPAAYNSSMEQEVSSRRRNKAWTQLETEMMASHEVAFKGTKLQINNFLADKMGRSIDSIKGRRKQLVYKDLVARLKAERVDQEDEFKTPPSSPSNDRDVFHDSLSFIDDRSSMPDELGGNCSQQFDSLGIDDHMGEKAETAATRVVDPATPGPSGSKEQDPVRDYLDSLVFHSEIGEYASLLGQLLGGCPDALSAILNMLRSRTTKDPRPPRRTNCPTTSSNVNAANCAVPAPARVKKGSAAHNARAAVYKNTQDVFNRDKRKLVASLFSGSPLETPAIHPAIEEVEAAYSDIFGRESPRDDQPVTVVDYGSDSSYSPITLEEIKEVVSGLRPSAAGPDGLNVRQLRAMSPVALAILFNGILLTGVVPKQLKECRTTLIPKSGDLLSVSNWRPITIASLLLRTFNKIVARRLSKLSLNLAQKGFRKIDGCLANTMLLHTLIKEHRAKASPYSICTLDLKKAFDSVSTSSIPRALRRVGVDARTIRMIEEQYANCSTIVTCAKSSTGPIPMRRGVKQGDPLSPVLFNIIMDELLTQVDHNLGLQVGEVKIAVLAYADDLLVVGPDILHVQKTLDGICAFLSERGLSVNPSKCTALVTKRVPSKKKLFCVTQPVLFVDGCPLRQITPDDQFKYLGKNFDFLGVERFTASKFETVMDNLAKCPLKPQQKYHLICTHIVPTALHDMQYPGITSATLSACDLAVRKAVKAALHLPSSTPNAFFYADRKDGGLGLLCLRERIPLILMRRLEKLRLSGDIFASAAVACAQGQTVIQRLRRVMGSINTPAHATSAQKLALEKSISGNGMHQCSAAQSNQWISYPPKYWSGRDYVRAVQLRANMLPVRGAPYNPKHLRKCRTNCGRVESVSHVLQGCKVTHWSRIERHNRIVKAISKVAAKRGYEVEMEPRVVGTDGALKKPDLILRKDDHIIVSDVAIKWEGPQLLSSEYNRKVAYYSKTAFITAVRSRYGAEKAITVAPFILGARGSWCTLNRTLEALLRIPQSDLNTMVTDTLKGGWSIHADFYRRTWRMSAP

SEQ ID NO: 31715 - protein, 1068 aa, Pterostichus madidus
MRTALSTTRDTGAKEQTTFLFVQNAVRVTLPRPVYNNTVDRPTPPLMEQEVSSRRRNKAWTQLETELMASHEVAFKGGKLQINNFLADKMGRSIDSIKSKRKQSVYKDLVARLKAERVDQEDEFGTPPSSPVNDRDVFHDSLSFLDDRSSMPDELSGNCSQRFDNVGMDDHMGEKAETAATRVVDPATPGPSGSKEQDPVRDYLCSLVFHSEIGEHAFLLGQLLGGCPDALSALLNMLRSKPTKDPRPPRRTDCPVTSSNVNAANCAVPAPARARKAHKGSAAHNARAAAYKNTQDVFNRDKRKLVASLFSGSPLGTPAIHPAIEEVEAAYSDIFGRESPRDDQPVTVVDYESDSTYSPITIEEIKEVVSGLRPSAAGPDGLNVKQLRAMSPIALAILFNGILLTGVVPKQLKECRTTLIPKSGDLLLVQNWRPITIASLLLRTFNKIVARRLSLISLNLAQKGFRKIDGCLANTMLLHTLIKEHRAKASPYSVCTLDLKKAFDSVSTSSIPRALRRVGVDARTIRMIEEQYADCSTTVTCAKSSTGPIPMRRGVKQGDPLSPILFNIIMDELLTQVDHNLGLQVGEVKIAVLAYADDLLVVGPDTLSVQRTLDGICAFLSERGLSVNPSKCTALVTKRVSSKKKLFCVTQPVLFVDGCPLRQITPDDQFKYLGKNFDFLGVERFTANKFETVMNILAKCPLKPQQKYHLICTHIVPTALHDMQYPGITSATLSACDLAIRKAVKAALHLPSSTPNAFFYADKKDGGLGLLCLRERIPIVLMRRLEKLRLSDDLFASAAIACTQGQVVMQRLRRVMGSVNTPAHAASTQKLALEKSISGNGMHQCSAAQSNQWISYPPKYWSGRDYVRAVQLRANMLPVRGAPHNPKHLRKCRTNCGRVESVSHVLQGCKVTHWSRIERHNRIVEAISKVAAKRGYEVEMEPRVVGTDGALKKPDLILRKDDHIIVSDVAIKWEGPQPLSSEYNRKVNYYSSTAFINKVRSRYGAEKAITVAPFILGARGSWCTLNRTLEALLRIPQSDLNTMVTDTLKGGWSIHADFYRKTWRMSAP

SEQ ID NO: 31716 - protein, 1043 aa, Pterostichus madidus
MRTALSTTRDTGAKEQTTFLFVQNAVRVTLPRPVYNNTVDRPTPPLMEQEVSSRRRNKAWTQLETELMASHEVAFKGGKLQINNFLADKMGRSIDSIKSKRKQSVYKDLVARLKAERVDQEDEFGTPPSSPVNDRDVFHDSLSFLDDRSSMPDELSGNCSQRFDNVGMDDHMGEKAETAATRVVDPATPGPSGSKEQDPVRDYLCSLVFHSEIGEHAFLLGQLLGGCPDALSALLNMLRSKPTKDPRPPRRTDCPVTSSNVNAANCAVPAPARARKAHKGSAAHNARAAAYKNTQDVFNRDKRKLVASLFSGSPLGTPAIHPAIEEVEAAYSDIFGRESPRDDQPVTVVDYESDSTYSPITIEEIKEVVSGLRPSAAGPDGLNVKQLRAMSPIALAILFNGILLTGVVPKQLKECRTTLIPKSGDLLLVQNWRPITIASLLLRTFNKIVARRLSLISLNLAQKGFRKIDGCLANTMLLHTLIKEHRAKASPYSVCTLDLKKAFDSVSTSSIPRALRRVGVDARTIRMIEEQYADCSTTVTCAKSSTGPIPMRRGVKQGDPLSPILFNIIMDELLTQVDHNLGLQVGEVKIAVLAYADDLLVVGPDTLSVQRTLDGICAFLSERGLSVNPSKCTALVTKRVSSKKKLFCVTQPVLFVDGCPLRQITPDDQFKYLGKNFDFLGVERFTANKFETVMNILAKCPLKPQQKYHLICTHIVPTALHDMQYPGITSATLSACDLAIRKVVKTALHLPSSTPNAFFYADKKDGGLGLLCLRERIPIVLMRRLEKLRLSDDLFASAAIACTQGQVVMQRLRRVMGSVNTPAHAASTQKLALEKSISGNGMHQCSAAQSNQWISYPPKYWSGRDYVRAVQLRANMLPVRGAPHNPKHLRKCRTNCGRVESVSHVLQGCKVTHWSRIERHNRIVKAISKVAAKRGYEVEMEPRVVGTDGALKKPDLILRKDDHIIVSDVAIKWEGPQPLSSEYNRKVNYYSSTAFINKVRSRYGAEKAITVAPFILGARGSWCTLNRTLEALLRIPQSDLNTI

SEQ ID NO: 31717 - protein, 1068 aa, Pterostichus madidus
MRTALSTTRDTGAKEQTTFLFVQNAVRVTLPRPVYNNTVDRPTPPLMEQEVSSRRRNKAWTQLETELMASHEVAFKGGKLQINNFLADKMGRSIDSIKSKRKQSVYKDLVARLKAERVDQEDEFGTPPSSPVNDRDVFHDSLSFLDDRSSMPDELSGNCSQRFDNVGMDDHMGEKAETAATRVVDPATPGPSGSKEQDPVRDYLCSLVFHSEIGEHAFLLGQLLGGCPDALSALLNMLRSKPTKDPRPPRRTDCPVTSSNVNAANCAVPAPARARKAHKGSAAHNARAAAYKNTQDVFNRDKRKLVASLFSGSPLGTPAIHPAIEEVEAAYSDIFGRESPRDDQPVTVVDYESDSTYSPITIEEIKEVVSGLRPSAAGPDGLNVKQLRAMSPIALAILFNGILLTGVVPKQLKECRTTLIPKSGDLLLVQNWRPITIASLLLRTFNKIVARRLSLISLNLAQKGFRKIDGCLANTMLLHTLIKEHRAKASPYSVCTLDLKKAFDSVSTSSIPRALRRVGVDARTIRMIEEQYADCSTTVTCAKSSTGPIPMRRGVKQGDPLSPILFNIIMDELLTQVDHNLGLQVGGVKIAVLAYADDLLVVGPDTLSVQRTLDGICAFLSERGLSVNPSKCTALVTKRVSSKKKLFCVTQPVLFVDGCPLRQITPDDQFKYLGKNFDFLGVERFTANKFETVMNILAKCPLKPQQKYHLICTHIVPTALHDMQYPGITSATLSACDLAIRKAVKAALHLPSSTPNAFFYADKKDGGLGLLCLRERIPIVLMRRLEKLRLSDDLFASAAIACTQGQVVMQRLRRVMGSVNTPAHAASTQKLALEKSISGNGMHQCSAAQSNQWISYPPKYWSGRDYVRAVQLRANMLPVRGAPHNPKHLRKCRTNCGRVESVSHVLQGCKVTHWSRIERHNRIVKAISKVAAKRGYEVEMEPRVVGTDGALKKPDLILRKDDHIIVSDVAIKWEGPQPLSSEYNRKVNYYSSTAFINKVRSRYGAEKAITVAPFILGARGSWCTLNRTLEALLRIPQSDLNTMVTDTLKGGWSIHADFYRKTWRMSAP

SEQ ID NO: 31718 - protein, 1173 aa, Pristionchus exspectatus
MGKQFPNSLTGHKTVRKGPKASVRRNKRTADRPGLPAQPGSKRRSDTLEPTSSNNPCSADVGRVTTEPKSFLERFETNLAQAKEKMWRKSLSRPGKHLGNHMEYLADANNAISVVCSQVEKRSTRTQLKELNSAVYAAGKTINEMIMEPIREKRRKSNLMVKQLESWIGERESELTLLKKHPQGGRLEQYAKKLATKHELQAKSPSGVLAELEDLVRVKRTTVERIVRKERTHAVRRKGANSILKPRPKPEETEQSIPVEKVKEFWEKIIGCPKEFYKTIEHEEWAEHVSKYLKARDGTQPFAEVDVVKTLKKVKLWKSPGPDGIHAYWWIKLDSARENLLKMIHKLHNRPKLLPPWFCSGRVVLIRKSLSEPASEPGNYRPITCLNTSYKIMTALMAQAIKARVKDFIPPEQLALAEATWGCVEAQATDQAVTMDARRRNKDLWMLWVDYSKAFDSVSHKAIRWTLKAMGVPEQMRFLLQCAMAQWRVRYESWKNGRIVRSTVCEVRSGLLQGDSLSPLLFCLSIAPVSHWLRNNVSTYKIGSLHRNEEPKDVSHIFYMDDLKVYTDSEASLANASNGIKCMSRAVGLELNPKKCAMRNHKRKRKGNSQEEPPTKLRVVVLAGGAERTTVATVTETDGTTRLTRVPDSEWLDLDKMGIPFLEGKQCYKYLGLEQIEGPSFVGALTRVRERALAKARRIFEDEDLTVGQKIEAYNGGVIPGIGYVVGLMTFGDGDLRTIRAECRLFDKDVRRLLVNSGMRHAGSSTYRLYAPREEGGLGIQRAEARVDEGIVAQWAYCSGNGNLDWVNRIAERYTDRRSYIRDFQDVCQRLNLGEIERIQPAIIKINGEEYWNYREASQKLRKMVQEAYRAQHIAQWELLKPASKVRRRTVLPVAAGNRTSISKDSFLWIEKAWLKAKTMRNALAIQEERVMTRGNVASGKSQTFRSRCRYGCNANETSAHVVTGCAHFRETIMIERHNKVAKVVYDALRKKYGLAQVMNPRDSDENEKVRIRWDTPIKVGEAKVGANKPDIYVEDLVANRIYIVEFTVCWYTNLLRREQWKLLKYSWNGQASWNDWEYRLDQVPKRPNLADALARERGKHVTVVPMVIGATGECTAGLRKGLRILGLADQSILLERMERAVVIETHRLLKAHLSFKGRKWRGRTQVRSKNRA

SEQ ID NO: 31719 - protein, 1037 aa, Pristionchus arcanus
MEPINEKRRKTRLRVKQLTSWIAERENVLHLLKSHPKGKRLVQYAKKLAKRNKLQATSPSGVAAELEDLIRVKRNIIEGVVRKEKTHAARRKGPASLLHPRPRSGDETIPVEEVRNYWSGHIGLKKTFYKTKGHDEWAEAVSRGGRQQATADPHPFIDVNIDETLKKVKLWKSPGPDGIQAYWWLKMESARSALLAQIHRLYARPQRIPGWFCSGRVVLIRKSYTEPETDPGNYRPITCLNTSYKIMTALIARAIKHKVKDFIPPEQLALAEATWGCVEAQAIDQAVVMDAKRRNKQLWMLWVDYSKAFDSVSHAAIRWVLKALGIPEQMRLLLKHAMEQWRVRYEGQNKGRPVRSSVLRVENGLLQGDSLSPLLFCLAIAPVSNWLRNHVDPYRVGSLHRNEEPKDVSHTYYMDDLKVYTDSENSLTRACNGIKLMSKAIGLELNPKKCAMRAHRKRKRRGESEQDEPPPSKIRVIVLGSAAQERTATVVARGGEIRIAEIPDSEWLDLEEMGIPFLEGAQTYKYLGLEQTEGPTFLGALTRVRERALGKAKLIFNDELLTVRQKIDAFNMGVIPVIGYVVGLMTFGDGELSTMRAECLLFDKDVRKELRVAGIRHGGSSTYRLYAPREEGGLGIKQAEVALDEGIAAQWAYCTGNGNLDWVNRIAENLDKKRRSYIRDFERVNERLNLGKIERAQPAIIKIDGTEYWNHREAAKKLRKMVQEAHRRINILEWEKLGPASRIRKAVLEPVKVSDRHQELSKDSFLWIAKGWLKNRTMRDALAIQEERALTRGNVASAKSLKYRKRCRYGCKVQESNAHVVSHCGHFRETIMVERHNDVAKVVYNALRRKYGLSGSGSPLDADENESVRIRWDTPVKVREASVISNKPDIYVEDLVNNRIFLIEFTVCWFTKLLKREKWKTLKYNWNGGAQWSDWEKRLDQVPKRPNLADALARERGMHVTVVPMAIGTMGECTAGLRNGLKALGLKDESVLLERMQRQVVIGTHRLLKAHLAFTSKQWSETNGGSSRNLSPSTSTG

SEQ ID NO: 31720 - protein, 1001 aa, Eurytoma adleriae
MNREVNSSRSSVNRTESGSSGSQSQEREMGYVCVLCGMSFATPQGLGQHRRHRHPSDHNNAINTARVKQAWTDEEIRSVATLEMTLGPCSNINATIAESHRNGRTLEAIKGLRKQARYKEVLATLRAGTAEPMAGTMGQQEFPTSNSPIDQNQRLKSWIVRELPNLPETTPGLELLREMASRALQDMNPMLALEYWINILIPVEEDRPSRRPTHDRQPALSRRKTKQAQYQRIQKLWRRNMSKAAKIVLDGDDEESTERVPLEKQEDFWRPLLQGEREEWTEPPTQQREEIENLCKPITITEVKRWRVPNGTAPGPDKITVGDWKEVPDLAKALVFNVLLLMESSPKVITDSRTVLIPKEKGTTDPGKFRPITIASVILRHFHKILAGRLTTTIPCNKAQRAFIEADGVAEHTITLASVIKDARSRRRQLHVAVLDVRKAFDTVRRSAIRRALVGKGVPTKMVNYIMDVYENSRTRLEVGPRKSDWIYTEQGVRQGDPLSPFTFEAVMDLALDNMLPHVGYTIGESHLSVLAFADDLVLLSETADGMQQQLLRVTQALNPLGLKLMPAKCAILSLQPSGREKKIKVVTEPLFTAEGQVVRQIGLLEEWKYLGVLFNSYGPIKRKVPVKEYLDRLSRAPLKAQQKIKVIRTFLLPRFTHMLVLGRTLHGELRRADKAVRASVRGWLRLPHDTPVGFFHARACEGGLGIISLESFIPELARNRIMRMRTSPMAAIRWATNSQWVIEKLKWCSHAKRNAASWKKSLYESTDGYEIRECHKSTASHSWVHDDYCRIPTNEWIKYLHVRINALPSSVRTSRGRRWSAEQTRCRAGCMRDETTAHIIQECPRTHGGRVKRHDAIVATVAKVLNQRGWEMVVEPRIHTNQGLRKPDLLATKDGRAVVLDAQVVSGTVDLNKRNKEKVEYYKSNTDLIVNIARRTKATGAIEVQGITLSWRGVWSPDSERALRNLGISKRELQGITTRTLLGSYLNFHTFSTATYRSVG

SEQ ID NO: 31721 - protein, 1010 aa, Eurytoma brunniventris
MNREVNSSWSSVNRTEPGSSGPQSQEREMGCICVLCGMSFTTPQGLGQHRRHRHPSEHNNAIDTGRVKKTWTDEEIRSVAALEMTLGPCSNINATIAESHRNGRTLEAVKGLRKQARYKEVLATLRSGTAERMAGTVVQQRIPTSNPPIDQNQRLKSWIVRELPNLPETTLGLELLREMASRALQDMNPMLALEYWINSLIPVEVDHPSRRPTNDRQPALSRRKTKQAQYQRIQKLWRRNMSKAAKIVLDGDDEESTERVPLERQEDFWRPLLQGEREERTEPPTQQREEIEDLCKPITITEVKRWRVPNGTAPGPDKITVGDWKEVPDLAKALVFNVLLLMESSPKVITDSRTVLIPKEKGTTDPGKFRPITIASVILRHFHKILAGRLTTTIPCNKAQRAFIEADGVAEHTITLASVIKDARSRRRQLHVAVLDVRKAFDTVRRSAIRRALVGKGVPTKMVNYIMGVYENSRTRLEVGPEKSDWIYTEQGVRQGDPLSPFTFEAVMDLALDNLLPHVGYTIGESHLSVLAFADDLVLLSETVDGMQQQLLRVTQALNPLGLKLMPAKCAILSLQPSGREKKIKVVTEPLFTAEGQVVHQIGLLDEWKYLGVLFNSYGPVKRKVPIKEYLDRLSRAPLKAQQKIKVIRTFLLPRFTHMLVLGRTLHGELRRADKAVRASVRGWLRLPHDTPVGFFHARACEGGLGIISLESFIPELAKNRIMRMRTSPMVAIKWATNSQWVMEKLKWCSHAKRNAASWKKSLYESTDGYEIRECHKSTASHSWVHDDYCRIPTNEWIKYLHVRINALPSSVRTSRGRRWSAEQTKCRAGCMRDETTAHIIQECPRTHGGRVKRHDAIVSTVAKVLNQKGWETVIEPRIHTNQGLRKPDLLATKDGRAVVLDAQVVSGTVDLNKRNKEKVEYYKSNTDLIVNIARRTKATGAIEVQGITLSWRGVWSPDSERALRNLGISKKELQGITTRTLLGSYLNFHTFSTATYRSVEHQTRQQQTR

SEQ ID NO: 31722 - protein, 952 aa, Ormyrus nitidulus
MPGKTPKQISDRRRVLEKEEEQVRQEQPQQDEPLQRIEEQPGSSSDEFEDAVDTREVEGESAVLSTDSWKTTLKSDALVDLNNIDREMPEKWRAWLDELRAGLAEENISKEKLDDLYRRIRKDIVNKDCDKPNGTSVAKKKAGPVRRGRNRANRGLPNRSERKRYFYARCQELFDNEPKKLADIVVSNDLSLVTKHKPPSREAVAELYGELWDKEGPTNVPIITREGSITTGEILTPISIQEVRVKIKSVKASSAAGTDGIKKVDLQKKGIPETLAMLFNLFMVNKHYPEEWRVNRTTLIPKVGKDTQDVKNWRPITIGSLLARLYSALLDRRIRAKVNQNVRQKGFTNENGCYNNIKLLGSVIQKGKSEGAIINVIDIAKAFDTLPHAAITPALKRKGVNEEVANYILSMYDNISTEIRTADGDHKLKIKRGVKQGDPLSPLLFNLAIEQVIEKLQENTAGVELAEGMNISCLAFADDMVLVGKNKAESIKQIKMVSKYLGSLGMKLSIGKCQTFQIQPIHKSWFVKNPNIEVDGEQVPFAPAEEIITYLGAKVSAWSGIAKDFELKLLEELLKRTRRLPLKPLQKLELLTMYILPKFTYGLICNTPSNAMLRKIDQTVREQIKEMLHISAKTNNAFIYAPRRKGGLGIVNQKDMVHLATLRAAVKGLQSEDQAVRRIFSTDEKLKEMQSHAEEVGLSWPTTEAEINKKKTELKDQYVKEWTKLKVQGQGVPEFSNPISNEWLWRRDLLKPSRVPDAIKLRTNTYPTRMCLKNQAIDKNTFDTRCRKCRKPFETLGHILGECIYTKSSRIRRHDEIKNLLSDRLGQKHAVLVEQTIDADNRRYRPDLVAITNEGEAWVLDITVRFEKGQYLRAAAEEKIKKYSAIKGRIKALTKASTVKIIPVVVGSRGAIPQKTYDTLTKLGIKKKDILTISLISLRSSIEIANKFVDYD

SEQ ID NO: 31723 - protein, 1179 aa, Ormyrus pomaceus
MMSRNLRSRRTRQGVSEPPAPAQEGEGAGLNASRSSDCNQQQVIEHNSRRRVQIRERLSLSNSDEEDKEEVINVPFEDPQACPICLHKGRRFIFIKPTELSKHLREEHVNTNTRIKWKCRSCAKAYDKLHPWSTHFPKCKGPAEAKEFVCSECGSSFETKIGLSQHERHNHPRMRNEKRANSANKTPRKGGAPRTVWSDVEIEQLKALNIRFAGQKEINKKIAEHLRGKTPKQISDKRRVLERESYADRESQLQENENLIIISEESSSSSEEYEDAVESIGTSAGDQGAGTSSSNWKTLIREETRKEIADLPRLPDQWQEWLQEAEPLLQEVLTNSEKLEEIYCKLKAKILVTGDSDPPRQRDKTGQRKKQRRKNRRNQTRGPNRSERKRYAYARCQELFDNEPKKLAEIVASNDFSLITKHQPPGREAVADLYGELWNQEGPTNTPITSIAEHTVPTEEVFTPIKIKEINAKIKAVKTSSAAGADGIRKADLQKKGIPEALALLYNLLLINEYYPRDWKINRTTLIPKAGKDRNDAKNWRPITIGSLLARIFSALLDKRIRGKVTQNARQKGFTNENGCYNNIKLLGATIQEGKINGVTINVIDIAKAFDTLPHAAIIPSLKRKGISQEVAEYILAMYKDISTNIKTADGDFKVQIRRGVKQGDPLSPLLFNLAIEQIIHELQENTSGIMLNGDNVSCLAFADDMVLIANNEEESVKQMAMVDRYLGKLGMKLATSKCQAFQIKPLHKSWYVKNPEIEMNGEQVPYAPPEQVITYLGAKISAWNGVIKDFELNRLEELLSRTRGLPLKPLQKLELLTVYILPKFTYGLICNTPSNNTLKKVDQTIREKVKEMLHISAKTNNAFVYAPKRKGGLGLVNQKDMVHLANLRGAIKGLQSEDETTRKVFATDEKQKEMRLHAKEVGLEWPVTEAEINKKKMELKEQYLREWAKLRVQGQGVRDFGNSVSNEWIWRKDLLKPSRIPDAIKLRTNTYPTRMCMKNLAPSKENFDTKCRKCGKPFETLGHILGECIYTKPSRIKRHDEVKRLISGRLGVKHQVLIEQTFSAGARRYRPDLVVITNEGEAWVLDVTVRFEKDQYLSKAADEKTHKYSAIKETVKRITKAKVVKILPIVIGSRGAVPQATYETLSKIGVKKADILTISLICLRSSIEIANKFVDYDK

SEQ ID NO: 31724 - protein, 927 aa, Melanerpes aurifrons
MTSGKLPILKNTYKQIIEGKIDSLKLLNEVAEDQYLYLFEKSIDQKAPKKSQRKPQQKKPQKEWMRKRARKRGEFLRFQRLFRLDRGKLANMILDEKDSVQCTIPLEEVSNTFRSRWESQNLFQGLGAFQSVGQADNSAFKEMITEKEILKNIRDMNKKSAPGPDGITLKALLKMDPNCEEIKELFNLWLLTGKIPDVIRGCRTILIPKSSAPERQNDINNWRPITIGSIILRLYSRILTARLAKACPINPRQRGFIQSSGCAENLKLLQLLIRDAKKQKKPLGVVFVDLAKAFDSVSHTHILAVLKQKGLDDHIIALIKDFYQNIHTRIKIREGESESIGIKTGVKQGDPMSPLLFNLCIDPLLCKLEECGEGFQHGNGKLTALAFADDLVLLSNSQSGMEKNIEILEAFCDLTGLKTQGEKCHGFFIQPTKDSYTINDCPPWLISGTPLNMIHPGQSEKYLGLQIDPWVGIVKPELQNKLEVWLNRIERAPLKPFQKLDMLKVYTVPRLIYLADQANVKATYLEEMDLTIRNRVKKWLHLPVCTCDGILYSSTKDGGLGLARLAGLIPSIQARRLHRLANSSDDTVKTIVKNNAIDRDFEKLWISAGGDKEKIPSIYNPQTIRVFEYGGREELSEWEKPAPKKIFPKPCNWRKNEFTKWTALMSQGIGTANFENDSTSNNWLVNYKNIPYRKLITALQLRANVYPTREFLARGRNQDQNTKCRHCQAENESAAHIIGYCPAVQEARISRHNYICTMLSEEAKRKDWLVYDEPQIRDRKLNLYKPDLVFVKENVAYVVDVTVRYEGNKTALKNAAEEKVRKYQHLRDEIIELTNADEVKFAGFPLGARGKWYEGNYKILQDLGLSNTRQTRVARRLASRALLSSVDIVHMFAGKGRKQTANPKDDTPGLRLPGHHMKVHTNPIRSV

SEQ ID NO: 31725 - protein, 1245 aa, Colaptes auratus
MGRQLRSLFATIGTQTTPKDWLDVATTDNTRPPDEEIRVCWTGIEFVNSMIAENNIAYNPIWNEKLMILPEAYEGPTSPAREKGIRDQSLERSRNEDVDCPETPSSMSQLSILTASPELENTADTCPGTPLVRMPDDNPACPCCTTRAGNLTRLIDHLKRAHGKRKITFQCSRCERTNENHHSISCHIPKCKGVQEPTQIEGFRCEECNNCFKTKIGLGQHKRLAHPALRNRERIEASRPKETSKRGAHKQVWSQEETEMLQTLSQEFEGRKNINKLIAEKLTTKTAKQISDKRRLLKETLVPEKEKTPERKSRLKKGRTEIPSSGEGELIAHYRKTIKEKISSGKLPILQNTFKQIIEGKKDSLKILNEVAQDKYLHLFEKAIEQKAPKQSHRKPQQRKSKKEWMKKRSKKRGEFLRFQRLFQLDRGKLANIILDEKDSAQCTIPLEEVSNTFRSRWESQNTFQGLGTFESVGRANNSAFKDLITEKEILKNIKELNKKSAPGPDGITLKSLLKMDPDCKEIRELYNLWLLSGKIPDVVRGCRTILIPKSSAPERQSDINNWRPITIGSIILRLYSRILTARLAKACPINPRQRGFIQSSGCAENLKLLQLIIRNAKKQKKPLGVVFVDLAKAFDSVSHTHIIEVLKQKGLDDHIIDLIKDFYHNIHTVIKTKEGETESIGIKTGVKQGDPMSPLLFNLCIDPLLCKLEECGEGFQHGKGKITALAFADDLVLLSSSQSGMEKNIEILEAFCDLTGLKTQGEKCHGFFVRPTKDSYTINDCPPWLVSGTPLNMIHPGQSEKYLGLKIDPWVGLVKPELQNNLEVWLNRIERAPLKPFQKLDILKVYTVPRLIYLADQANVKSTYLEKMDLTIRNRVKNWLHLPTCTCDGILYSSTKDGGLGLTRLAGSIPSIQARRLHRLANSSDDTVKTVVKENDIDKDYEKLWVSAGGDKDKIPSIYNPQTIMVAEYGGSEELSEWEKPAPKKIFPKPCNWRKNEFKKWTTLMSQGIGTAVFENDSTSNHWLVNYKNIPHRKLLTALQLRANVYPTREFLARGRKEDQNTKCRHCQADNESVAHIIGYCPAVQDARIRRHNYICKMISEEAKKKEWLVYEEPQIRDKDLNLYKPDLVFVKENVAYVVDVTVRYESNITKLKHAAEEKVRKYKHLREEIVELTNANEVKFAGFPLGARGKWYEGNYKILSDLGLSKSRQSRVARRLASRALLTSVDIVHMFAGKSRKVTTNPV

SEQ ID NO: 31726 - protein, 1245 aa, Dendrocopos noguchii
MGRQLRCLFTTIGTQTTPRDWLDVATRHDMRPPDEEIGVCLAGIEFVNSTIAWDDTAYNPVWNEKLILLPEVYDRPTFPSGGEDIRDQSHEWSREEDVGCHEASSPTSQLSIPTMSPEPGDVADAYPGTPLVKLPADNPACPCCAIRTGKLTSLVDHLKRAHGKRKINFQCSQCGRTNEKHHSISCHIPRCKGIQEPTQAEGFLCEECGTCFKTKIGLSQHKRLVHPALRNLERIEALRPKETSKRGAHKQIWSQEEIELLQKLNQEFEGRRNINKLIAEKLTTKTAKQISDKRRQLREIVVSEKKNTSESKSRLKQERTEIPSFDEGELTSHYRRTIGEKIALGDLPILQNRFEQIFKGEKDSLEILNEVAQDKYLYLFELAIERKVTKRNQSRPQQKKSKTEWMKKRARKRGEFLRFQRLFHLDRGKLANIILDEKDSAQCTIPLEEITNTFRSRWESQNMFQGLGAFHSVERADNSAFKEMITEKEILKNIKDMKKKSAPGPDGITLNFLLKTDPDCKKIKELFNLWLLIGKIPDVIRGCRTILIPKSSAPERQNDINNWRPITIGSIVLRLYSRILTARLVKACPINCRQRGFIQSAGCAENLKLLQLLIRNAKNQKKSLGVVFVDVAKAFDSVSHTHILAVLKQRGLDDHIIELIKNFYQNIYTVIRTKEGVTEPIGIKTGVKQGDPMSPLLFNLCIDPLLCKLEECGEGFQYEKGKITALAFADDLVLLSSSRLGMEKNIEILEAFCDLTGLRTQGEKCHGFFIQPTKDSYTINDCPPWLIGGTPLNMIHPGQSEKYLGLQIDPWVGIVKPDLPNKLEVWLDRIGRAPLKPFQKLDILKVYTVPRLIYLADQANVKSTYLEEMDLTIRNRVKNWLHLPLSTCDGILYSSNKDGGLGLTRLAGLIPSIQARRLHRLANSSDDTIKNVVKNNNIEKDYEKLWVSAGGDKEKIPSIYNPQTIMVIEYGGSEELSEWEKPAPKRIFPRPCNWRKNEFKKWTVLMSQGIGVANFENDSISNNWLVNYKNIPHRKLLTALQLRANVYPTREFLARGRRQECNTKCRHCEADNESAAHIIGYCPAVQDARISRHNFICRMLSEEARRKDWLVYDEPQIRDKELNLYKPDLVLVKENVAYVLDVTVRYESSLTTLKNAAEEKVRKYQHLKDEIMDLTNANVVNFVGFPLGARGKWYEGNFKILSDLGLSKSRQSRVARRLASRALLTSVDIVHMFAGMGRKGTEVLD

SEQ ID NO: 31727 - protein, 1257 aa, Androctonus mauritanicus
MQKAYRVSLSPDRRKRGGGKDTQNKMGPESSIARAPKPPQAIGANVINNDILKNSENVCKCGRSFSKPVGLKNHLRACTSTIGINEHTVNPDGSITCICGRTYPSRHRWLDHFNRTCTREPPKDGTPKGVQCRFCEQIWPTKSSVSNHERQKHPEEYNRAQEERVNKPSRVKRWSQDEKHTMALMEKGYTGSDVDSFLASKLGRSKSSVYSQRMSQPYKKLLASINFSENLILSLTPSDEIIESTVVNLSTESTDLPSPSSLENLSSLREISPARTIKSPSSSDEFGTPTGSIQTTDPQSDIFSTPPNDCEIRTPVPSKDKLIKSRSPSPQYISPVVVDAATQTVLVQPLRGRRHLTRRRIKPRRISEDINAITLVSSEIIPASATDPKEIPRPTEDPKETTREFAQPEFTDGDPFLAAVSEAESKTKCSFLKGSSQIMSTGNREQIEEYLDEVLDRLCPPRPVKSKTPKIQQDNSQLPKKRQRSSLFKKYQDLYRKNKKGLMEEILKGQSQDKSLPSESDIHKHFSDLFSNRPYVGGFQGPQKARKCDTFQPVTIDEIDAALKGTLSTAPGPDLTTIFDMRKIDASAWSIIFNIMLRCAITPKRFRGSRTVLLHKKNSRKDPRNWRPISVSSMISRLFHKILAERLRNALDLAEEQRGFATVDGTMINSILLETFMRDSRAKGQNYCVASIDIQAAFDSVHHESIVSSLRSMGIEDETITYIQEHYRHLSTTLTCDGQNMGEVNISVGVKQGDPLSPIIFNAIMDKLITALPKEIGGEIAGRKFAILAFADDLILLSNSTAAMQLQLDLLSKFLQSEGMKININKCYVLRCERIPRTNRQMAVMSKSLLKFDGQFLPTVGAIDSFKYLGRNIGAMGHLKPNNVKNLAQDLFSLQHAPLKSYQKMELLRTYLLPRYIYGFQNFKLEKQILCHADRLVRRFVRRNLHLHSAVENVLIHAAAKNGGLGIFSFAENIPRILLQRLERIIESPELEFLKSSETVGSVIAKISRLVTPPSRTQKSTFGKGLHQCGEDSASNNWMRYPPSFWTGYEYNAAHQLRTNSLPTRDQPGKPEHLRKCRAGCDVYESVSHILQGCSVTHHPRIRRHDTVAKSIADLGKERGFTVDTKPRIRDSTGELHEPDLIMVKENTAIVVDAQVPWESENLRLAALHKKAKYCKGPIHDVIRRRYNVSEIHHMPIIVGARGIWSRKANKEIEATLKIPVKLKRKIVTDVILWGISIYRQFGRSAWLNGPRFIRRK

SEQ ID NO: 31728 - protein, 1204 aa, Teleogryllus occipitalis
METRARKKASEKMPLPEERRGAPGAIAGGDSMRADGDQELSRRALVGLPEMRQPERSEPISNASPAEGAAQVIQPAPTQARLPTQRRKWPTAVNEEIMRIYYRITKIDTDVTGYRQKLFREFQQSFPEYSVTEQRVSDQYRVILRNKLIPETRLQTIKMEVGRELELDEVENLQPSESEIHPESHKNIPTTDNITTAEDERLVESLKMGMREAMFQFEGTNPTMRPVLPKINTSRRMARIIDIMNCEVLPEEIEMAHNLQYLHLVIYCAAVVVIKSLGIDCENLSGKKQRGRMMPPWERRLVRNIEMLRGDIARMMSYANGIRSPKLVKLADRIMNRSKTHTRRDEPNTTVQQCIDTLKQRLSVLTNRLSRYRTSRSRRKDNILFEKSEKNFYRNLGRKEEGNYKGLYPTREQVNDFWGKQLSDPVECDVRASWIGEEKKRCEHLTKMHYQEFTTEEVSEVIKNLLNWKAPGPDKIHNFWYKRLWCTHQRLAELINDVIQQPDKMPEFLTQGITYLISKDPQKQEDPTKYRPISCLPTMYKIITSCLSQRIYTHCRDNDIIAVQQKGCSKGSMGCKEQLIIDSVVCGQAYAKHRNLFMAYIDYKKAFDSVPHTWLIEILKIYEVDTKVVSFLEHVMSKWRTKIILSTPVDNIQTDTINVQRGIFQGDSLSPLWFVICMNPLSSLLNSTKCGFGIKLGARMMYRINHLLYMDDLKIYASTKSQLEQLLSIVESFSKSIKMEFGLEKCTLNIVKGKLQEGAFELENKQLIQAMSAEETYRYLGVRQARHIDQCKMKDELAEEFFRRTRKLLKTKLNGRNIIKAVNTYAVPVLNYSFGIIKWSKTDIENLQRKMRVLMTKARMHHPKSAVERITLPRNMGGRGLTDIGNQLCRQVKSMRMYFHSAANTSKLHKAICEADVYTPIELSRQDVADFSYNDGQKRDLWMAKALHGRHPHEMSQEHVDLKASNYWLISGQIFPETEGFMLAIQDQVIPTRNYLKRIVRDSNVQNELCRYGCPTVESIQHVTSGCTHLVGTEYKQRHDSVAKILHQALAQKCRLLTEDKVPYFKYQPMSVLENEEWRLYWDRTILTDQTVIHNRPDLVVINKCEKHVMLIDVSVPNTGNIQSKYTEKISKYANLVEPVEKQWNMKRVNIIPIIVSSTGVIPRSLIGGLKQLGLNEDLYKPMQKAVVISTTRIVRKFMGNNVL

SEQ ID NO: 31729 - protein, 1234 aa, Teleogryllus occipitalis
MVNSGSQSLSGYSCPGSRKKMRPLSMETRARKKASEKMPLPEERRGAPGAIAGGDSLRADGDQELSRRALVGIPEMRQPERSEPISNASPAEGAAQVLQPAPTQARLPTQRRKWPTAVNEEIMRIYYRITKIDTDVTGYRQKLFREFQQSFPEYSVTEQRVSDQYRVILRNKLIPETRLQTIKMEVGRELELDEVENLQPTESEIHPESHKNIPTTDNITTAEDERLVESLKMGMREAMFQFEGTNPTMRPVLPKINTSRRMARIIDIMNCEVLPEEIEMAHNLQYLHLVIYCAAVVVIKTLGIDCENLSGKKQRGRMMPPWERRLVRNIEILRGDIARMMSYANGIRSPKLVKLADRIVNRSKMHTRRDEPNTTVQQCIDTLKQRLSVLTNRLSRYRTSRSRRKDNILFEKSEKNFYRNLGRKEEGNYKGLYPTREQVNDFWSKQLSDPVECDVRASWIGEEKKRCEHLTKMHYQEFTTEEVSEVIKNLLNWKAPGPDKIHNFWYKRLWCTHQRLAELINDVIQQPDKMPEFLTQGITYLISKDPQKQEDPTKYRPISCLPTMYKIITSCLSQRIYTHCRDNNIIAVQQKGCSKGSMGCKEQLIIDSVVCGQAYAKHRNLFMAYIDYKKAFDSVPHTWLIEILKIYEVGTKVVSFLEHVMSKWRTKIMLSTPVDNIQTDTINVRRGIFQGDSLSPLWFVICMNPLSNLLNSTKCGFGIKLGARMMYRINHLLYMDDLKIYASTKSQLEQLLSIVESFSKSIKMEFGLEKCRTLNIVKGKLQEGAFELENKQLIQAMSAEETYRYLEVRQARHIDQCKMKDELAEEFFRRTRKLLKTKLNGRNIIKAINTYAVPVLNYSFGIIKWSKTDIENLQRKMRVLMTKARMHHPKSAVERITLPRNMGGRGLADIGNQLCRQVKSMRMYFHSAANTSKLHKAICEADVYTPIELSRQDVADFSCNDVQKRDLWMAKALHGRHPHEMSQEHVDLKASNYWLISGQIFPETEGFMLAIQDQVIPTRNYLKRIVRDSNVQNELCRYGCPTVESIQHVTSGCTHLVGTEYKQRHDSVAKILHQALAQKCSLLTEDKVPYFKYQPMSVLENEEWRLYWDRTILTDQTVIHNRPDLVVINKCEKHVMLIDVSVPNTGNIQSKYTQSKYTEKISKYANLIEPVEKQLNMKRVNIIPIIVSSTGVIPRSLIGGLKQLGLNEDLYKPMQKAVVISTRIVRKFMGNNVL

SEQ ID NO: 31730 - protein, 1125 aa, Teleogryllus occipitalis
MVNSGSQSLSGYSCPGSRNKMRPLSMETRARKKASEKMPLPEERRGAPGAIAGGDSMRADGDQELSRRALVGIPEMRQPERSEPISNASPAEGAAQVLQPVPTQARLPTQRRKWPTAVNEEIMRIYYRITKIDTDVTGYRQKLFREFQQSFPEYSVTEQRVSDQYRVILRNKLIPETRLQTIKMEVGRELELDEVENLQPSESEIHPESHKNIPTTDNITTAEDERLVESLKMGMREAMFQFEGTNPTMRPVLPKINTSRRMARIIDIMNCEVLPKEIEMAHNLQYLHLVIYCAAVVVIKSLGIDCENLSGKKQRGRMMPPWERRLVRNIEILRGDIARMMSYANGIRSPKLVKLADRIMNRSKTHTRRDEPNTTVQQCIDTLKQRLSVLTNRLSKYRTSRSRRKDNILFEKSEKNFYRNLGRKEEGNYKGLYPTREQVNDFWSKQLSDPVECDVRASWIGEEKKRCEHLTKMHYQEFTTEEVSEVIKNLLNWKAPGPDKIHNFWYKRLWCTHQRLAELINDVIQQPDKMPEFLTQGITYLISKDPQKQEDPTKYRPISCLPTMYKIITSCLSQRIYTHCRDNDIIAVQQKGCSKGSMGCKEQLIIDSVVCGQAYAKHRNLFMAYIDYKKAFDSVPHTWLIEILKIYEVDTKVVSFLEHVMSKWRTKIILSTPVDNIQTDTINVRRGIFQGDSLSPLWFVICMNPLSNLLNSTKCGFGIKLGARMMYRINHLLYMDDLKIYASTKSQLEQLLSIVESFSKSIKMEFGLEKCRTLNIVKGKLQEGAFELENKQLIQAMSAEETYRYLGVRQARHIDQCKMKDELAEEFFRRTRKLLKTKLNGRNIIKAVNTYAVPVLNYSFGIIKWSKTDIENLQRKMRVLMTKARMHHPKSAVERITLPRNMGGRGLTDIGNQLCRQVKSMRMYFHSAANTSKLHKAICEADVYTPIELSRQDVADFSCNDGQKRDLWMAKALHGRHPHEMSQEHVDLKASNYWLISGQIFPETEGFMLAIQDQVIPTRNYLKRIVRDSNVQNELCRYGCPTVESIQHVTSGCTHLVGTEYKQRHDSVAKILHQALAQKCLLTEDKVPYFKYQPMSVLENEEWRLYWDRTILTDQTVIHNRPIWL

SEQ ID NO: 31731 - protein, 1108 aa, Teleogryllus occipitalis
MRIYYRITKIDTDVTGYRQKLFREFQQSFPEYSVTEQRVSDQYRVILRNKLIPETRLQTIKMEVGRELELDEVENLQPSESEIHPESHKNIPTTDNITTAEDERLVESLKMGMREAMFQFEGTNPTMRPVLPKINTSRRMARIIDIMNCEVLPEEIEMAHNLQYLHLVIYCAAVVVIKSLGIDCENLSGKKQRGRMIPPWERRLVRNIEMLRGDIARMMSYANGIRSPKLVKLADRIMNRSKTHTRRDEPNTTVQQCIDTLKQRLSVLTNRLSRYRTSRSRRKDNILFEKSEKNFYRNLGRKEEGIYKGLYPTREQVNDFWGKQLSDPVECDVRASWIGEEKKRCEHLTKMHYQEFTTEEVSEVIKNLLNWKAPGPDKIHNFWYKRLRCTHQRLAEFINDVIQQPDKMPEFLTQGITYLISKDPQKQEDPTKYRPISCLPTMYKIITSCLSQRIYTHCRDNDIIAVQQKGCSKGSMVCKEQLIIDSVVCGQAYAKHRNLFMAYIDYKKAFDSVPHTWLIEILKIYEVDTKVVSFLEHVMSKWRTKIILSTPVDNIQTDTINVRRGIFQGDSLSPLWFVICMNPQSNLLNSTKCGFGIKLGARMMYRINHLLYMDDLKIYASTKSQLEQLLSIVESFSKSIKMEFGLEKCRTLNIVKGRLQEGAFELENKQLIQAMSAEETYRYLGVRQARHIDQCKMKDELAEEFFRRTRKLLKTKLNGRNIIKAVNTYAVPVLNYSFGIIKWSKTDIENLQRKMRVLMTKARMHHPKSAVERITLPRNMGGRGLTDIGNQLCRQVKSMRMYFHSATNTSKLHKAICEADVYTPIELSRQDVADFSCNDGQKRDLWMAKALHGRHPHEMSQEHVDLKASNYWLISGQIFPETEGFMLAIQDQVIPTRNYLKRIVRDSNVQNELCRYGCPTVESIQHVTSGCTHLVGTEYKQRHDSVAKILHQALAQKCRLLTEDKVPYFKYQPMSVLENEEWRLYWDRTILTDQTVIHNRPDLVVINKCEKQVMLIDVSVPNTGNIQSKYTEKISKYANLVEPVEKQWNMKRVNIIPIIVSSTGVIPRSLIGGLKQLGLNEDLYKPMQKAVVISTTRIVRKFMGNNVL

SEQ ID NO: 31732 - protein, 1230 aa, Teleogryllus occipitalis
MVNSGSQSLSGYSCPGSRNKMRPLSMETRARKKASEKMPLPEERRGAPGAIAGGDSMRADGDQELSRRALVGIPEMRQPERSEPISNASPAEGAAQVLQPVPTQARLPTQRRKWPTAVNEEIMRIYYRITKIDTDVTGYRQKLFREFQQSFPEYSVTEQRVSDQYRVILRNKLIPETRLQTIKMEVGRELELDEVENLQPSESEIHPESHKNIPTTDNITTAEDERLVESLKMGMREAMFQFEGTNPTMRPVLPKINTSRRMARIIDIMNCEVLPKEIEMAHNLQYLHLVIYCAAVVVIKSLGIDCENLSGKKQRGRMMPPWERRLVRNIEILRGDIARMMSYANGIRSPKLVKLADRIMNRSKTHTRRDEPNTTVQQCIDTLKQRLSVLTNRLSKYRTSRSRRKDNILFEKSEKNFYRNLGRKEEGNYKGLYPTREQVNDFWSKQLSDPVECDVRASWIGEEKKRCEHLTKMHYQEFTTEEVSEVIKNLLNWKAPGPDKIHNFWYKRLWCTHQRLAELINDVIQQPDKMPEFLTQGITYLISKDPQKQEDPTKYRPISCLPTMYKIITSCLSQRIYTHCRDNDIIAVQQKGCSKGSMGCKEQLIIDSVVCGQAYAKHRNLFMAYIDYKKAFDSVPHTWLIEILKIYEVDTKVVSFLEHVMSKWRTKIILSTPVDNIQTDTINVRRGIFQGDSLSPLWFVICMNPLSNLLNSTKCGFGIKLGARMMYRINHLLYMDDLKIYASTKSQLEQLLSIVESFSKSIKMEFGLEKCRTLNIVKGKLQEGAFELENKQLIQAMSAEETYRYLGVRQARHIDQCKMKDELAEEFFRRTRKLLKTKLNGRNIIKAINTYAVPVLNYSFGIIKWSKTDIENLQRKMRVLMTKARMHHPKSAVERITLPRNMGGRGLTDIGNQLCRQVKSMRMYFHSAANTSKLHKAICEADVYTPIELSRQDVADFSCNDGQKRDLWMAKALHGRHPHEMSQEHVDLKASNYWLISGQIFPETEGFMLAIQDQVIPTRNYLKRIVRDSNVQNELCRYGCPTVESIQHVTSGCTHLVGTEYKQRHDSVAKILHQALAQKCRLLTEDKVPYFKYQPMSVLENEEWRLYWDRTILTDQTVIHNRPDLVVINKCEKHVMLIDVSVPNTGNIQSKYTEKISKYANLVEPVEKQWNMKRVNIIPIIVSSTGVIPRSLIGGLKQLGLNEDLYKPMQKAVVISTTRIVRKFMGNNVL

SEQ ID NO: 31733 - protein, 1205 aa, Teleogryllus occipitalis
METRARKKASEKMPLPEERRGAPGAIAGGDSMRADGDQELSRRALVGLPEMRQPERSEPISNASPAEGAAQVIQPAPTQARLPTQRRKWPTAVNEEIMRIYYRITKIDADVTGYRQKLFREFQQSFPEYSVTEQRVSDQYRVILRNKLIPETRLQTIKMEVGRELELDEVENLQPSETEIHPESHKNIPTTDNITTAEDERLVESLKMGMREAMFQFEGTNPTMRPVLPKINTSRRMARIIDIMNCEVLPEEIEMAHNLQYLHLVIYCAAVVVIKSLGIDCENLSGKKQRGRMIPPWERRLVRNIEMLRGDIARMMSYANGIRSPKLVKLADRIMNRSKTHTRRDEHNTTVQQCIDTLKQRLSVLTNRLSRYRTSRSRRKDNILFEKSEKNFYRNLGRKEEGIYKGLYPTREQVNDFWGKQLSDPVECDVRASWIGEEKKRCEHLTKMHYQEFTTEEVSEVIKNLLNWKAPGPDKIHNFWYKRLWCTHQRLAELINDVIQQPDKMPEFLTQGITYLISKAPQKQEDPTKYRPISCLPTMYKIITSCLSQRIYTHCRDNDIIAVQQKGCSKGSMGCKEQLIIDSVVCGQAYAKHRNLFIAYIDYKKAFDSVPHTWLIEILKIYEVDTKVVSFLEHVMSKWRTKIILSTPVDNIQTDTINVRRGIFQGDSLSPLWFVICMNPLSNLLNSTKCGFGIKLGARMMYRINHLLYMDDLKIYASTKSQLEQLLSIVESFSKSIKMEFGLEKCRTLNIVKGKLQEGAFELENKQLIQAMSAEETYRYLGVRQARHIDQCKMKDELAEEFFRRTRKLLKTKLNGRNIIKAVNTYAVPVLNYSFGIIKWSKTDIENLQRNMRVLMTKARMHHPKSAVERITLPRNMGGRGLTDIGNQLCRQVKSMRMYFHSAANTSKLHKAICEADVYTPIELSRQDVADFSCNDGQKRDLWMAKALHGRHPHEMSQEHVDLKASNYWLISGQIFSETEGFMLAIQDQVIPTRNYLKRIVRDSNVQNELCRYGCPTVESIQHVTSGCTHLVGTEYKQRHDSVAKILHQALAQKCRLLTEDKVPYFKYQPMSVLENEEWRLYWDRTILTDQTVIHNRPDLVVINKCEKHVMLIDVSVPNTGNIQSKYTEKISKYANLVEPVEKQWNMKRVNIIPIIVSSTGVIPRSLIGGLKQLGLNEDLYKPMQKAVVISTTRIVRKYMGNNVL

SEQ ID NO: 31734 - protein, 1205 aa, Teleogryllus occipitalis
METRARKKASEKMPLPEERRGAPGAIAGGDSMRADGDQELSRRALVGIPEMRQPERSEPISNASPAEGAAQVIQPAPTQARLPTQRRKWPTAVNEEIMRIYYRITKIGTDVTEYRQKLFREFQQSFPEYSVTEQRVSDQYRVILRNKLIPETRLQTIKMEVGRELELDEVENLQPSESEIHPESHKNIPTTDNITTAEDERLVESLKMGMREAMFQFEGTNPTMRPVLPKINTSRRMARIIDIMNCEVLPEEIEMAHNLQYLHLVIYCAAVVVIKSLGIDCKNLSGKKQRGRMMPPWERRLVRNIEILRGDIARMMSYANGIRSPKLVKLADRIMNKSKTHTRRDEPNTTVQQCIDTLKQRLSVLTNRLSRYRTSRSRRKDNILFKKSEKNFYRNLGRKEEGNYKGLYPTREQVNDFWGKQLSDPVECDVRASWIGEEKKRCEHLTKMHYQEFTTAEVSEVIKNLLNWKAPGPDKIHNFWYKRLWCTHQRLAELINDVIQQPDKMPEFLTQGITYLISKDPQKQEDPTKYRPISCLPTMYKIITSCLSQRIYTHCRDNDIIAVQQKGCSKGSMGCKEQLIIDSVVCGQAYAKHRNLFMAYIDYKKAFDSVPHTWLIEILKIYGVDTKVVSFLEHVMSKWRTKIILSTPVDNIQTDTINVRRGIFQGDSLSPLWFVICMNPLSNLLNSTKCGFGIKLGARMMYRINHLLYMDDLKIYASTKSQLEQLLSIVESFSKSIKMEFGLEKCRTLNIVKGKLQEGAFELENKLLIQAMSAEETYRYLGVRQARHIDQCRMKDELAEEFFRRTRKLLKTKLNGRNIIKAINTYAVPVLNYSFGIIKWSKTDIENLQRKMRVLMTKARMHHPKSAVERITLPRNMGGRGLTDIGNQLCRQVKSMRMYFYSAANTSKLHKAICEADVYTPIELSRQDVADFSCNDGQKRDLWMAKALHGRHPHEMSQEHVDLKASNYWLISGQIFPETEGFMLAIQDQVIPTRNYLKRIARDSNVQNELCRYGCPTVESIQHVTSGCTHLVGTEYKQRHDSVAKILHQALAQKCRLLTEDKVPYFKYQPMSVLENEEWRLYWDRTILTDQTVIHNRPDLVVINKCEKHVMLIDVSVPNTGNIQSKYTEKISKYANLVEPVEKQWNMKRVNIIPIIVSSTGVIPRSLIGGLKQLGLNEDLYKPMQKAVVISTSRIVRKFMGNNVL

SEQ ID NO: 31735 - protein, 1108 aa, Teleogryllus occipitalis
MRIYYRITKIDTDVTGYRQKLFREFQQSFPEYSVTEQRVSEQYRVILRNKLIPETRLQTIKMEVGRELELDEVENLQPSESEIHPESHKNIPTTDNITTAEDERLVESLKMGMREAMFQFEGTNPTMRPVLPKINTSRRMARIIDIMNCEVLPEEIEMAHNLQYLHLVIYCAAVVVIKSLGIDCENLSGKKQRGRMMPPWERRLVRNIEILRGDIARMMSYANGIRSPKLVKLADRIMNRSKTHTRRDEPNTTVQQCIDTLKQRLSVLTNRLSRYRTSRSRRKDNILFEKSEKNFYRNLGRKEEGNYKGLYPTREQVNDFWGKQLSDPVECDVRASWIGEEKKRCEHLTKMHYQEFTTEEVSEVIKNLLNWKAPGPDKIHNFWYKRLWCTHQRLAELINDVIQQPDKMPEFLTQGITYLISKDPQKQEDPTKYRPISCLPTMYKIITSCLSQRIYTHCRDNDIIAVQQKGCSKGSMGCKEQLIIDSVVCGQAYAKHRNLFMAYIDYKKAFDSVPHTWLIEILKIYEVDTKVVSFLEHVMSKWRTKIILSTPVDNIQTDTINVRRGIFQGDSLSPLWFVICMNPLSNLLNSTKCGFGIKLGARMMYRINHLLYMDDLKIYASTKSQLEQLLSIVESFSKSIKMEFGLEKCRTLNIVKGKLQEGAFELENKQLIQAMSAEETYRYLGVRQARHIDQCKMKDELAEEFFRRTRKLLKTKLNGRNIIKAINTYAVPVLNYSFGIIKWSKTDIENLQRKMRVLMTKARMHHPKSAVERITLPRNMGGRGLTDIGNQLCRQVKSMRMYFHSAANTSKLHKAICEADVYTPIELSRQDVADFSCNDGQKRDLWRAKALHGRHPHEMSQEHVDLKASNYWLISGQIFPETEGFMLAIQDQVIPTRNYLKRIVRDSNVQNELCRYGCPTVESIQHVTSGCTHLVGTEYKQRHDSVAKILHQALAQKCSLLTEDKVPYFKYQPMSVLENEEWRLYWDRTILTDQTVIHNRPDLVVINKCEKHVMLIDVSVPNTGNIQSKYTEKISKYANLVEPVEKQWNMKRVNIIPIIVSSTGVIPRSLIGGLKQLGLNEDLYKPMQKAVVISTTRIVRKFMGNNVL

SEQ ID NO: 31736 - protein, 998 aa, Teleogryllus occipitalis
MGMREAMFQFEGTNPTMRPVLPKINTSRRMARIIDIMNCEVLPEEIEMAHNLQYLHLVIYCAAVVVIKSLGIDCENLSGKKQRGRMMPPWERRLVRNIEILRGDIARMMSYANGIRSPKLVKLADRIMNKSKTHTRRDEPNTTVQQCIDTLKQRLSVLTNRLSRYRTSRSRRKDNILFEKSEKNFYRNLGRKEEGNYKGLYPTREQVNDFWGKQLSDPVECDVRASWIGEEKKRCEHLTKMHYQEFTTEEVSEVIKNLLNWKAPGPDKIHNFWYKRLWCTHQRLAELINDVIQQPDKMPEFLTQGITYLISKDPQKQEDPTKYRPISCLPTMYKIITSCLSQRIYTHCRDNDIIAVQQKGCSKGSMGCKEQLIIDSVVCGQAYAKHRNLFMAYIDYKKAFDSVPHTWLIEILKIYEVDTKVVSFLEHVMSKWRTKIILSTPVDNIQTDTINVRRGIFQGDSLSPLWFVICMNPLSNLLNSTKCGFGIKLGARMMYRINHLLYMDDLKIYASTKSQLEQLLSIVESFSKSIKMEFGLEKCRTLNIVKGKLQEGAFELENKQLIQAMSAEETYRYLGVRQARHIDQCKMKDELAEEFFRRTRKLLKTKLNGRNIIKAINTYAVPVLNYSFGIIKWSKTDIENLQRKMRVLMTKARMHHPKSAVERITLPRNMGGRGLTDIGNQLCRQVKSMRMYFYSAANTSKLHKAICEADVYTPIELSRQDVADFSCNDGQKRDLWMAKALHGRHPHEMSQEHVDLKASNYWLISGQIFPETEGFMLAIQDQVIPTRNYLKRIVRDSNVQNELCRYGCPTVESIQHVTSGCTHLVGTEYKQRHDSVAKILHQALAQKCRLLTEDKVPYFKYQPMSVLENEEWRLYWDRTILTDQTVIHNRPDLVVINKCEKHVMLIDVSVPNTGNIQSKYTEKISKYANLVEPVEKQWNMKRVNIIPIIVSSTGVIPRSLIGGLKQLGLNEDLYKPMQKAVVISTSRIVRKFMGNNVL

SEQ ID NO: 31737 - protein, 919 aa, Teleogryllus occipitalis
MQNIATWSWRILIIIIRNIEMLRGDIARMMSYANGIRSPKLVKLADRIMNRSKTHTRRDEPNTTVQQCIDTLKQRLSVLTNRLSRYRTSRSRRKDNILFEKSEKNFYRNLGRKEEGNYKGLYPTREQVNDFWGKQLSDPVECDVRASWIGEEKKRCEHLTKMHYQEFTTEEVSEVIKNLLNWKAPGPDKIHNFWYKRLWCTHQRLAELINDVIQQPDKMPEFLTQGITYLISKDPQKQEDPTKYRPISCLPTMYKIITSCLSQRIYTHCRDNDIIAVQQKGCSKGSMGCKEQLIMDSVVCGQAYAKHRNLVMAYIDYKKAFDSVPHTWLIEILKIYEVDTKVVSFLEHVMSKWRTKIILSTPVDNIQTDTINVRRGIFQGDSLSPLWFVICMNPLSNLLNSTKCGFGIKLGARMMYRINHLLYMDDLKIYASTKSQLEQLLSIVESLSKSIKMEFGLEKCRTLNIVKGKLQEGAFELENKQLIQAMSAEETYRYLGVRQARHIDQCKMKDELAEEFFRRTRKLLKTKLNGRNIIKAVNTYAVPVLNYSFGIIKWSKTDIENLQRNMRVLMTKARMHHPKSAVERITLPRNMGGRGLTDIGNQLCRQVKSMRMYFHSAANTSKLHKAICEADVYTPIELSRQDVADFSCNDGQKRDLWMAKALHGRHPHEMSQEHVDLKASNYWLISGQIFPETEGFMLAIQDQVIPTRNYLKRIVRDSNVQNELCRYGCPTVESIQHVTSGCTHLVGTEYKQRHDSVAKILHQALAQKCRLLTEDKVPYFKYQPMSVLENEEWRLYWDRTILTDQTVIHNRPDLVVINKCEKHVMLIDVSVPNTGNIQSKYTEKISQYANLVEPVEKQWNMKRVNIIPIIVSSTGVIPRSLIGGLKQLGLNEDLYKPMQKAVVISTTRIVRKFMGNNVL

SEQ ID NO: 31738 - protein, 956 aa, Teleogryllus occipitalis
MIIEKNEIKNIVAKTIIIIIMIIIIIIIIIIIIIFLSGKKQRGRMMPPWERRLVRNIEILRGDIARMMSYANGIRSPKLVKLADRIMNRSKTHTRRDEPNTTVQQCIDTLKQRLSVLTNRLSRYRTSRSRRKDNILFEKSEKKFYRNLGRKEEGNYKGLYPTREQVNEFWGKQLSDPVECDVRASWIGEEKKRCEHLTKMHYQEFTTEEVSEVIKNLLNWKAPGPDKIHNFWYKRLWCTHQRLAELINDVIQQPDKMPEFLTQGITYLISKDPQKQEDPTKYRPISCLPTMYKIITSCLSQRIYTHCRDNDIIAVQQKGCSKGSMGCKEQLIIDSVVCGQAYAKHRNLFMAYIDYKKAFDSVPHTWLIEILKIYEVDTKVVSFLEHVMSKWRTKIILSTPVDNIQTDTINVRRGIFQGDSLSPLWFVICMNPLSNLLNSTKCGFGIKLGARMMYRINHLLYMDDLKIYASTKSQLEQLLSIVESFSKSIKMEFGLEKCRTLNIVKGKLQEGAFELENKQLIQAMSAEETYRYLGVRQARHIDQCKMKDELAEEFFRRTRKLLKTKLNGRNIIKAINTYAVPVLNYSFGIIKWSKTDIENLQRKMRVLMTKARMHHPKSAVERITLPRNMGGRGLTDIGNQLCRQVKSMRMYFHSAANTSKLHKAICEADVYTPIELSRQDVVDFSCNDGQKRDLWMAKALHGRHPHEMSQEHVDLKASNYWLISGQIFPETEGFMLAIQDQVIPTRNYLKRIVRDSNVQNELCRYGCPTVESIQHVTSGCTHLVGTEYKQRHDSVAKILHQALAQKCLLTEDKVPYFKYQPMSVLENEEWRLYWDRTILTDQTVIHNRPDLVVINKCEKHVMLIDVSVPNTGNIQSKYTEKISKYANLVEPVEKQWNMKRVNIIPIIVSSTGVIPRSLIGGLKQLGLNEDLYKPMQKAVVISTTRIVRKFMGNNVL

SEQ ID NO: 31739 - protein, 1198 aa, Teleogryllus occipitalis
MSSLGYHNNNNNNNNNNNNNNNNHNNNHNNNHNNNNHNNNHNNNNNNNNNNNNNNNNNNNNNNNKPLPEERRGAPGAIAGGDSMRADGDQELSRRALVGIPEMRQPERSEPISNASPAEGAAQVIQPAPTQARLPTQRRKWPTAVNEEIMRIYYRITKIDADVTGYRQKLFREFQQSFPEYSVTEQRVSDQYRVILRNKLIPETRLQTIKMEVGRELELDEVENLQPSETEIHPESHKNIPTTDNITTAEDERLVESLKMGMREAMFQFEGTNPTMRPVLPKINTSRRMARIIDIMNCEVLPEEIEMAHNLQYLHLVIYCAAVVVIKSLGIDCENLSGKKQRGRMMPPWERRLVRNIEILRGDIARMMSYANGIRSPKLVKLADRIMNRSKTHTRRDEPNTTVQQCIDTLKQRLSVLTNRLSRYRTSRSRRKDNILFEKSEKNFYRNLGRKEEGNYKGLYPTREQVNDFWGKQLSDPVECDVRASWIGEEKKRCEHLTKMHYQEFTTEEVSEVIKNLLNWKAPGPDKIHNFWYKRLWCTHQRLAELINDVIQQPDKMPEFLTQGITYLISKDPQKQEDPTKYRPISCLPTMYKIITSCLSQRIYTHCRDNDIIAVQQKGCSKGSMGCKEQLIIDSVVCGQAYAKHRNLFMAYIDYKKAFDSVPHTWLIEILKIYEVDTKVVSFLEHVMSKWRTKIILSTPVDNIQTDTINVRRGIFQGDSLSPLWFVICMNPLSNLLNSTKCGFGIKLGARMMYRINHLLYMDDLKIYASTKSQLEQLLSIVESFSKSIKMEFGLEKCRTLNIVKGKLQEGAFELENKQLIQAMSAEETYRYLGVRQARHIDQCKMKDELAEEFFRRTRKLLKTKLNGRNIMKAINTYAVPVLNYSFGIIKWSKTDIENLQRKMRVLMTKARMHHPKSAVERITLPRNMGGRGLTDIGNQLCRQVKSMRMYFHSAANTSKLHKAICEADVYTPIELSRQDVADFSCNDGQKRDLWMAKALHGRHPHEMSQEHVDLKASNYWLISGQIFPETEGFMLAIQDQVIPTRNYLKRIVRDSNVQNELCRYGCPTVESIQHVTSGCTHLVGTEYKQRHDSVAKILHQALAQKCRLLTEDKVPYFKYQPMSVLENEEWRLYWDRTILTDQTVIHNRPDLVVINKCEKHVMLIDVSVPNTGNIQSKYTEKSVNMQILLNPLRNSGI

SEQ ID NO: 31740 - protein, 758 aa, Teleogryllus occipitalis
MHYQEFTTEEVSEVIKNLLNWKAPGPDKIHNFWYKRLWCTHQRLAELINDVIQQPDKMPEFLTQGITYLISKDPQKQEDPTKYRPISCLPTMYKIITSCLSQRIYTHCRDNDIIAVQQKGCSKGSMGCKEQLIIDSVVCGQAYAKHRNLFMAYIDYKKAFDSVPHTWLIEILKIYEVDTKVVSFLEHVMSKWRTKIILSTPVDNIQTDTINVRRGIFQGDSLSPLWFVICMNPLSNLLNSTKCGFGIKLGARMMYRINHLLYMDDLKIYASTKSQLEQLLSIVESFSKSIKMEFGLEKCRTLNIVKGRLQEGAFELENKQLIQAMSAEETYRYLGVRQARHIDQCKMKDELAEEFFRRTRKLLKTKLNGRNIIKAINTYAVPVLNYSFGIIKWCKTDIENLQRKMRVLMTKARMHHPKSAVERITLPRNMGGRGLTDIGNQLCRQVKSMRMYFHSAANTSKLHKAICEADVYTPIEVSRQDVADFSCNDGQKRDLWMAKALHGRHPHEMSQEHVDLKASNYWLISGQIFSETEGFMLAIQDQVIPTRNYLKRIVRDSNVQNELCRYGCPTVESIQHVTSGCTHLVGTEYKQRHDSVAKILHQALAQKCRLLTEDKVPYFKYQPMSVLENEEWRLYWDRPILTDQTVIHNRPDLVVINKCEKHVMLIDVSVPNTGNIQSKYTEKISKYANLVEPVEKQWNMKRVNIIPIIVSSTGVIPRSLIGGLKQLGLNEDLYKPMQKAVVISTTRIVRKFMGNNVL

SEQ ID NO: 31741 - protein, 1204 aa, Teleogryllus occipitalis
METRARKKASEKMPLPEERRGAPGAIAGGDSMRADGDQELSRRALVGIPEMRQPERSEPISNASPAEGAAQVLQPAPTQARLPTQRRKWPTAVNEEIMRIYYRITKIDTDVTGYRQKLFREFQQSFPEYSVTEQRVSDQYRVILRNKLIPETRLQTIKMEVGRELELDEVENLQPSESEIHPESHKNIPTTDNITTAEDERLVESLKMGMREAMFQFEGTNPTMRPVLPKINTSRRMARIIDIMNCEVLPKEIEMAHNLQYLHLVIYCAAVVVIKSLGIDCENLSGKKQRGRMMPPWERRLVRNIEILRGDIDRMMSYANGIRSPKLVKLADRIMNRSKTHTRRDEPNTTVQQCIDTLKQRLSVLTNRLSKYRTSRSRRKDNILFEKSEKNFYRNLGRKEEGNYKGLYPTREQVNDFWSKQLSDPVECDVRASWIGEEKKRCEHLTKMHYQEFTTEEVSEVIKNLLNWKAPGPDKIHNFWYKRLWCTHQRLAELINDVIQQPDKMPEFLTQGITYLISKDPQKQEDPTKYRPISCLPTMYKIITSCLSQRIYTHCRDNDIIAVQQKGCSKGSMGCKEQLIIDSVVCGQAYAKHRNLFMAYIDYKKAFDSVPHTWLIEILKIYEVDTKVVSFLEHVMSKWRTKIILSTPVDNIQTDTINVRRGIFQGDSLSPLWFVICMNPLSNLLNSTKCGFGIKLGARMMYRINHLLYMDDLKIYASTKSQLEQLLSIVESFSKSIKMEFGLEKCRTLNIVKGKLQEGAFELENKQLIQAMSAEETYRYLGVRQARHIDQCKMKDELAEEFFRRTRKLLKTKLNGRNIIKAINTYAVPVLNYSFGIIKWSKTDIENLQRKMRVLMTKARMHHPKSAVERITLPRNMGGRGLTDIGNQLCRQVKSMRMYFHSAANTSKLHKAICEADVYTPIELSRQDVADFSCNDGQKRDLWMAKALHGRHPHEMSQEHVDLKASNYWLISGQIFPETEGFMLAIQDQVIPTRNYLKRIVRDSNVQNELCRYGCPTVESIQHVTSGCTHLVGTEYKQRHDSVAKILHQALAQKCLLTEDKVPYFKYQPMSVLENEEWRLYWDRTILTDQTVIHNRPDLVVINKCEKHVMLIDVSVPNTGNIQSKYTEKISKYANLVEPVEKQWNMKRVNIIPIIVSSTGVIPRSLIGGLKQLGLNEDLYKPMQKAVVISTTRIVRKFMGNNVL

SEQ ID NO: 31742 - protein, 1047 aa, Teleogryllus occipitalis
MEVGRELELDEVENLQPSESEIHPESHKNIPTTDNITTAEDERLVESLKMGMREAMFQFEGTNPTMRPVLPKINTSRRMARIIDIMNCEVLPEEIEMAHNLQYLHLVIYCAAVVVIKSLGIDCENLSGKKQRGQMMPPWERRLVRNIEILRGDIARMMSYANGIRSPKLVKLADRIMNRSKTHTRRDEPNTTVQQCIDTLKQRLSVLTNRLSRYRTSRSRRKDNILFEKSEKNFYRNLGRKEEGNYKGLYPTREQVNDFWGKQLSDPVECDVRTSWIGEEKKRCEHLIKMHYQEFTTEEVSEVIKNLLNWKAPGPDKIHNFWYKRLWCTHQRLAELINDVIQQPDKMPEFLTQGITYLISKDPQKQEDPTKYRPISCLPTMYKIITSCLSQRIYTHCRDNDIIAVQQKGCSKGSMGCKEQLIIDSVVCGQAYAKHRNLFMAYIDYKKAFDSVPHTWLIEILKIYEVDTKVVSFLEHVMSKWRTKIILSTPVDNIQTDTINVRRGIFQGDSLSPLWFVICMNPLSNLLNSTKCGFGIKLGARMMYRINHLLYMDDLKIYASTKSQLEQLLSIVESFSKSIKMEFGLEKCRTLNIVKGKLQEGAFELENKQSIQAMSAEETYRYLGVRQARHIDQCKMKDELAEEFFRRTRKLLKTKLNGRNIIKAINTYAVPVLNYSFGIIKWCKTDIENLQRKMRVLMTKARMHHPKSAVERITLPRNMGGRGLTDIGNQLCRQVKSMRMYFHSAANTSKLHKAICEADVYTSIELSRQDVADFSCNDGQKRDLWRAKALHGRHPHEMSQEHVDLKASNYWLISGQIFPETEGFMLAIQDQVIPTRNYLKRIVRDSNVQNELCRYGCPTVESIQHVTSGCAHLVGTEYKQRHDSVAKILHQALAQKCSLLTEDKVPYFKYQPMSVLENEEWRLYWDRTILTDQTVIHNRPDLVVINKCEKHVMLIDVSVPNTGNIQSKYTEKISKYANLVEPVEKQWNMKRVNIIPIIVSSTGVIPRSLIGGLKQLGLNEDLYKPMQKAVVISTTRVVRKFMGNNVL

SEQ ID NO: 31743 - protein, 1205 aa, Teleogryllus occipitalis
METRARKKASEKMPLPEERRGAPGAIAGGDSMRADGDQELSRRALVGIPEMRQPERSEPISNASPAEGAAQVIQPAPTQARLPTQRRKWPTAVNEEIMRIYYRITKIDADVTGYRQKLFREFQQSFPEYSVTEQRVSDQYRVILRNKLIPETRLQTIKMEVGRELELDEVENLQPSESEIHPESHKNIPTTDNITTAEDERLVESLKMGMREAMFQFEGTNPTMRPVLPKINTSRRMARIIDIMNCEVLPEEIEMAHNLQYLHLVIYCAAVVVIKSLGIDCENMSGKKQRGRMMPPWERRLVRNIEILRGDIARMMSYANGIRSPKLVKLADRIMNRSKTHTRRDEPNTTVQQCIDTLKQRLSVLTNRLSRYRTSRSRRKDNILFEKSEKNFYRNLGRKEEGNYKGLYPTREQVNDFWGKQLSDPVECDVRASWIGEEKKRCEHLTKMHYQEFTTEEVSEVIKNLLNWKAPGPDKIHNFWYKRLWCTHQRLAELINDVIQQPDKMPEFLTQGITYLISKDPQKQEDPTKYRPISCLPTMYKIITSCLSQRIYTHCRDNDIIAVQQKGCSKGSMGCKEQLIIDSVVCGQAYAKHRNLFMAYIDYKKAFDSVPHTWLIEILKIYEVDTKVVSFLEHVMSKWRTKIILSTPVDNIQTDTINVRRGIFQGDSLSPLWFVICMNPLSNLLNSTKCGFGIKLGARMMYRINHLLYMDDLKIYASTKSQLEQLLSIVESFSKSIKMEFGLEKCRTLNIVRGKLQEGAFELENKQLIQAMSAEETYRYLGVRQARHIDQCKMKDELAEEFFRRTRKLLKTKLNGRNIMKAINTYAVPVLNYSFGIIKWSKTDIENLQRKMRVLMTKARMHHPKSAVERITLPRNMGGRGLTDIGNQLCRQVKSMRMYFHSAANTSKLHKAICEADVYTPIELSRQDVADFSCNDGQKRDLWMAKALHGRHPHEMSQEHVDLKASNYWLISGQIFPETEGFMLAIQDQVIPTRNYLKRIVRDSNVQNELCRYGCPTVESIQHVTSGCTHLVGTEYKQRHDSVAKILHQALAQKCRLLTEDKVPYFKYQPMSVLENEEWRLYWDRTILTDQTVIHNRPDLVVINKCEKHVMLIDVSVPNTGNIQSKYTEKISKYANLVEPVEKQWNMKRVNIIPIIVSSTGVIPRSLIGGLKQLGLNEDLYKPMQKAVVISTTRIVRKFMGNNVL

SEQ ID NO: 31744 - protein, 1131 aa, Teleogryllus occipitalis
METRARKKASKKMPLPEERRGAPGAIAGGDSMRADGDQELSRRALVGIPEMRQPERSEPISNASPAEGAAQVIQPAPTQARLPTQRRKWPTAVNEEIMRIYYRITKIDTDVTGYRQKLFREFQQSFPEYSVTEQRVSDQYRVILRNKLIPETRLQTIKMEVGRELELDEVENLQPSESEIHPESHKNIPTTDNITTAEDERLVESLKMGMREAMFQFEGTNPTMRPVLPKINTSRRMARIIDIMNCEVLPEEIEMAHNLQYLHLVIYCAAVVVIKSLGIDCENLSGKKQRGRMMPPWERRLVRNIEILRGDIARMMSYANGIRSPKLVKLADRIMNRSKTHTRRDEPNTTVQQCIDTLKQRLSVLTNRLSRYRTSRSRRKDNILFEKSEKNFYRNLGRKEEGNYKGLYPTREQVNDFWGKQLSDPVECDVRASWIGEEKKRCEHLTKMHYQEFTTEEVSEVIKNLLNWKAPGPDKIHNFWYKRLWCTHQRLAELINDVIQQPDKMPEFLTQGITYLISKDPQKQEDPTKYRPISCLPTMYKIITSCLSQRIYTHCRDNDIIAVQQKGCSKGSMGCKEQLIIDSVVCGQAYAKHRNLFMAYIDYKKAFDSVPHTWLIEILKIYEVDTKVVSFLEHVMSKWRTKIILSTPVDNIQTDTINVRRGIFQGDSLSPLWFVICMNPLSNLLNSTKCGFGIKLGARMMYRINHLLYMDDLKIYASTKSQLEQLLSIVESFSKSIKMEFGLEKCRTLNIVKGKLQEGAFELENKQLIQAMSAEETYRYLGVRQARHIDQCKMKDELAEEFFRRTRKLLKTKLNGRNIIKAINTYAVPVLNYSFGIIKWSKTDIENLQRKMRVLMTKARMHHPKSAVERITLPRNMGGRGLTDIGNQLCRQVKSMRMYFHSAANTSKLHKAICEADVYTPIELSRQDVADFSCNDGQKRDLWMAKALHGRHPHEMSQEHVDLKASNYWLISGQIFPETEGFMLAIQDQVIPTRNYLKRIVRDSNVQNELCRYGCPTVESIQHVTSGCTHLVGTEYKQRHDSVAKILHQALAQKCLLTEDKVPYFKYQPMSVLENEEWRLYWDRTILTDQTVIHNRPDLVVINKCEKHVMLIDVSVPNTGNIQSKYTEKNQ

SEQ ID NO: 31745 - protein, 1047 aa, Teleogryllus occipitalis
MEVGRELELDEVENLQPSESEIHPESHKNIPTTDNITTAEDERLVESLKMGMTEAMFQFEGTNPTMRPVLPKINTSRRMARIIDIMNCEVLPEEIEMAHNLQYLHLVIYCAAVVVIKSLGIDCENLPGKKQRGRMMPPWERRLVRNIEMLRGDIARMMSYANGIRSPKLVKLADRIMNRSKTHTRRDEPNTTVQQCIDTLKQRLSVLTNRLSRYRTSRSRRKDNILFEKSEKNFYRNLGRKEEGNYKGLYPTREQVNDFWGKQLSDPVECDVRASWIGEEKKRCEHLTKMHYQEFTTEEVSEVIKNLLNWKAPGPDKIHNFWYKRLWCTHQRLAELINDVIQQPDKMPEFLTQGITYLISKDPQKQEDPTKYRPISCLPTMYKIITSCLSQRIYTHCRDNDIIAVQQKGCSKGSMGCKEQLIIDSVVCGQAYAKHRNLFMAYIDYKKAFDSVPHTWLIEILKIYEVDTKVVSFLEHVMSKWRTKIILSTPVDNIQTDTINVRRGIFQGDSLSPLWFVICMNPLSNLLNSTKCGFGIKLGARMMYRINHLLYMDDLKIYASTKSQLEQLLSIVESFSKSIKMEFGLEKCRTLNIVKGKLQEGAFELENKQLIQAMSAEETYRYLGVRQARHIDQCKMKDELAEEFFRRTRKLLKTKLNGRNIIKAVNTYAVPVLNYSFGIIKWSKTDIENLQRKMRVLMTKARMHHPKSAVERITLPRNMGGRGLTDIGNQLCRQVKSMRMYFHSEANTSKLHKAICEADVYTPIELSRQDVADFSCNDGQKRDLWMAKALHGRHPHEMSQEHVDLKASNYWLISGQIFPETEGFMLAIQDQVIPTRNYLKRIVRDSNVQNELCRYGCPTVESIQHVTSGCTHLVGTEYKQRHDSVAKILHQALAQKCRLLTEDKVPYFKYQPMSVLENEEWRLYWDRTILTDQTVIHNRPDLVVINKCEKHVMLIDVSVPNTGNIQSKYTEKISKYANLVEPVEKQWNMKRVNIIPIIVSSTGVIPRSLIGGLKQLGLNEDLYKPMQKAVVISTTRIVRKFMGNNVL

SEQ ID NO: 31746 - protein, 1204 aa, Teleogryllus occipitalis
METRARKKASEKMPLPEERRGAPGAIAGGDSMRADGDQELSRRALVGIPEMRQPERSEPISNASPAEGAAQVIQPAPTQARLPTQRRKWPTAVNEEIMRIYYRITKIDADVTGYRQKLFREFQQSFPEYSVTEQRVSDQYRVILRNKLIPETRLQTIKMEVGRELELDEVENLQPSESEIHPESHKNIPTTDNITTAEDERLVESLKMGMREAMFQFEGTNPTMRPVLPKINTSRRMARIIDIMNCEVLPEEIEMAHNLQYLHLVIYCAAVVVIKSLGIDCENLSGKKQRGRMMPPWERRLVRNIEILRGDIARMMSYANGIRSPKLVKLADRIMNRSKTHTRRDEPNTTVQQCIDTLKQRLSVLTNRLSRYRTSRSRRKDNILFEKSEKNFYRNLGRKEEGNYKGLYPTREQVNDFWGKQLSDPVECDVRASWIGEEKKRCEHLTKMHYQEFTTEEVSEVIKNLLNWKAPGPDKIHNFWYKRLWCTHQRLAELINDVIQQPDKMPEFLTQGITYLISKDPQKQEDPTKYRPISCLPTMYKIITSCLSQRIYTHCRDNDIIAVQQKGCSKGSMGCKEQLIIDSVVCGQAYAKHRNLFMAYIDYKKAFDSVPHTWLIEILKIYEVDIKVVSFLEHVMSKWRTKIILSTPVDNIQTDTINVRRGIFQGDSLSPLWFVICMNPQSNLLNSTKCGFGIKLGARMMYRINHLLYMDDLKIYASTKSQLEQLLSIVESFSKSIKMEFGLEKCRTVNIVKGKLQEGAFELENKQLIQAMSAEETYRYLGVRQARHIDQCKMKDELAEEFFRRNRKLLKTKLNGRNIMKAINTYAVPVLNYSFGIIKWSKTDIENLQRKMRVLMTKARMHHPKSAVERITLPRNMGGRGLTDIGNQPCRQVKSMRMYFHSAANTSKLHKAICEADVYTPIELSRQDVADFSCNDGQKRDLWMAKALHGRHPHEMSQEHVDLKASNYWLISGQIFPETEGFMLAIQDQVIPTRNYLKRIVRDSNVQNELCRYGCPTVESIQHVTSGCTQLVGTEYKQRHDSVAKILHQALAQKCLLTEDKVPYFKYQPMSVLENEEWRLYWDRTILTDQTVIHNRPDLVVINKCEKHVMLIDVSVPNTGNIQSKYTENISKYANLVEPVEKQWNMKRVNIIPIIVSSTGVIPRSLIGGLKQLGLNEDLYKPMQKAVVISTSRILRKFMGNNVL

SEQ ID NO: 31747 - protein, 1162 aa, Teleogryllus occipitalis
MAITHTDMERRLRSHKASEKEPLPGERRGTSGAGAGRDSMRATGGRTLNRRAPTGSPEQTTAKSQRSKQQSVASPADSVLPEQLLATTKAGKVRQRMKWTNNLNEYIMRVYYRATRFETEMIGYRQSLHAEFRERFPHIGVTDQRLVDQKRAILKNNLIPKVRLEQIKQEVEAEISSSSNGCPLTQTVTDSHEVPNSTQLDEANQDPSTPGAKEDNISNVIDIYQELFLKYSGLDPTLRPRIPKLNSNRNNRLVQIIQYINEHVLPCQIKEDTLTDIHAIVYCAAATVAVKYGFKLKDQSEGEKGKSIKKNTKPPWQQRLENQIQYLRQEIDRVTQYLNQPNNKKLAKKIKNTLAKIRKHESRKHKNQEHNTIDPNLIAEHLDELKQKLAAKSQRLRRYKEATKRKQQNSVFHHSEKVFYQQLRQNCNLQQENNGAPDQQNLEQYWSNIWSESSHHNSEAHWIKDEINNVQNIDPMLYQEITVKDVSIAIAKTHNWKAPGPEHIHNFWYKQFTTLHHKLAQCFTQVMNSPEDMPLFLTKGITYMKPKSRDTQNPSQYRPITCLPTMYKILTSCITSKIQDYIEDREIMTEQQKGCSRLHKGCKEQLLTDMVILQQAHKNHRNLHLAYIDYKKAFDSVPHSWLIEVLRIYKINETIINFLEHIMTHWRTTLSLRQQELTISTKEIRIKRGIFQGDSLSPLLFCLALNPLSTQLISTHYDFQIRKNKKTIHTITHLMYMDDIKLYSSTDRQLQYLLEITRTFSEDIHMNFGIGKCRTLHVDKTGKLQKIDSTLSDQTTIQAMGDEEIYKYLGFDQAAITDKAIKQSLTKLYKSRITALLKTKLTGNNMIKAINTFAVPVYTYSLGIIPWSDTDLEDIQRLTRTILTKFRHPNSAIERVTLPRNEGGRGLIDPKNLCYKQIHLLRNFNYEKHATSELHAAIVQADTKLTPLNLNNKQLDISLRVTDNNCKIDMWSRKELHGRHAKDLKQPHVDSKASNTWLKYGNLFGETEGFMVAIHDQVINTKSYRKHIFKQTIDDKCRKCHTTVESIQHITSGCKLMADTDYTYRHNQVANIIHQKLAAKSNLQEMTCPYYKYVPDTVLENSNYKLYYDREIITDKTIHHNRPDITFVDKQQKIGFLIDITVPQTANLQTAHAEKIVYRTST

SEQ ID NO: 31748 - protein, 1234 aa, Teleogryllus occipitalis
MAITHTDMERRLRSHKASEKEPLPRERRGTSGAGAGRDSMRVTGGRTLNRRAPTGSPEQTAAKFQRSNQKSVASPADSVLPEQLLATTKAGKVRQRMKWTNNLNEYIMRVYYRAPRLETDMIGYRQSLHAEFRERFPHIGVTDQRLVDQKRAILKNNLIPKVRLEQIKQEVAAEISSSSNGCPLTQTVTDSHEVPNSTQLDEANQDPSTPGAKEDNISDVIDIYQELFLKYSGLDPTLRPRIPKLNSNRNNRLVQIIQYINEHVLPCQIKEEDTLTDIHAIVYCAAATVAVKSGFKLKDQSESEKGKSIKKNTKPPWQQRLENQIQYLRQEIGRVTQYLNQPNNKKLAKKIKKTLAKIRKHESRKHKNQEHNIIDPNLIAEHLDELKQKLAAKSKRLGRYKEATKRKQQNSVFHHNEKVFYQQLRQNCNFQQENNGAPDQQNLEQYWSNIWSESSHHNSEAHWIKDEINNVQNIDPMLYQEITVKDVSTAIAKTHNWKAPGPEHIHNFWYKHFTTLHHKLAQCFTHVINSPEDMPLFLTKGITYMKPKSRDTQNPSQYRPITCLPTMYKILTSCITSKIQDYIEDREIMTEQQKGCSRLHKGCKEQLLTDMVILQQAHKNHRNLHLAYIDYKKAFDSVPHSWLIEVLRIYKINETIIKFLEHIMTHWRTTLSLRQQELTISTKEVRIKRGIFQGDSLSPLLFCLALNPLSTQLNSTHYGFQIRKNKKTIHTISHLMYMDDIKLYSSTDRQLQYLLEITRTFSEDIHMSFGIDKCRTLHVDKTGKLQKIDSTLSDQTTIQAMGDEEIYKYLGFDQAAITDNKAIKQSLTKLYKSRITALLKTKLTGNNMIKAINTFAVPVYTYSFGIIPWSDTDLEDIQRLTRTILTKFRHHYPNSAIERVTLPRSEGGRGLIDLKNLCYRQIHSLRNFYYEKQATSELHAAIVEADTKLTPLNLNNKQLDISSRVTDNNCKIDMWSRKELHGRHAKDLKQPHVDSKASNTWLKYGNLFGETEGFMVAIQDQVINTKSYRKHILKQTIDDQCRKCHTTVESIQHITSGCKLMAHTDYTYRHNQVANIIHQKLAAKSNLQEMTCPYYKYVPDTVLENSNFKLYYDREIITDKTIHHNRPDITFVDKQQKIGFLIDITVPQTANLQTAHAEKITKYTELAAEVKALWHLQKVHIVPLVISCTGVIPNNIHKNLELIQIPKYTYKIMQKSIILNTCRIVRKFLNCDET

SEQ ID NO: 31749 - protein, 1234 aa, Teleogryllus occipitalis
MAITHTDMERRLRSHKASEKEPLPGERRGTSGAGAGRDSMRATGGRTLNRRAPTGSPEQTTAKFQRSNQQSVASPADSVLPEQLLATTKAGKVRQRMKWTNNLNEYIMRVYYRATRLETDMIGYRQSLHAEFRERFPHIGVTDQRLVDQKRAILKNNLIPKVRLEQIKQEVAAEISSSSNGCPLTQTVTDSHEVPNSTQLDEANQDPSTPGAKEDNISDVIDIYQELFLKYSGLDPTLRPRIPKLNSNRNNRLVQIIQYINEHVLPCQIKEEDTLTDIHAIVYCAAATVAVKSGFKLKDQSESEKGKSIKKNTKPPWQQRLENQIQYLRQEIGRVTQYLNQPNNKKLAKKIKKTLAKIRKHESRKHKNQEHNIIDPNLIAEHLDELKQKLAAKSQRLRRYKEATKRKQQNSVFHHNEKVFYQQLRQNCNFQQENNGAPDQQNLEQYWSNIWSESSHHNSEAHWIKDEINNVQNIDPMLYQEITVKDVSTAIAKTHNWKAPGPEHIHNFWYKHFTTLHHKLAQCFTHVINSPEDMPLFLTKGITYMKPKSRDTQNPSQYRPITCLPTMYKILTSCITSKIQDYIEDREIMTEQQKGCSRLHKGCKEQLLTDMVILQQAHKNHRNLHLAYIDYKKAFDSVPHSWLIEVLRIYKINETIIKFLKHIMTHWRTTLSLRQQELTISTKEIRIKRGIFQGDSLSPLLFCLALNPLSTQLNSTHYGFQIRKNKKTIHTISHLMYMDDIKLYSSTDRQLQYLLEITRTFSEDIHMSFGIDKCRTLHVDKTGKLQKIDSTLSDQTTIQAMGDEEIYKYLGFDQAAITDNKAIKQSLTKLYKSRITAVLKTKLTGNNMIKAINTFAVPVYTYSFGIIPWSDTDLEDIQRLTRTILTKFRHHHPNSAIERVTLPRSEGGRGLIDLKNLCYRQIHSLRNFYYEKQATSELHAAIVEADTKLTPLNFNNKQLDISSRVTDNNCKIDMWSRKELHGRHAKDLKQPHVDSKASNTWLKYGNLFGETEGFMVAIQDQVINTKSYRKHILKQTIDDKCRKCHTTVESIQHITSGCKLMAHTDYTYRHNQVANIIHQKLAAKSNLQEMTCPYYKYVPDTVLENSNFKLYYDREIITDKTIHHNRPDITFVDKQQKIGFLIDITVPQTANLQTAHAEKITKYTELAAEVKALWHLQKVHIVPLVISCTGVIPNNIHKNLELIQIPKYTYKSMQKSIILNTCRIVRKFLNCDET

SEQ ID NO: 31750 - protein, 1105 aa, Teleogryllus occipitalis
MAITHTDMERRLRSHKASEKEPLPGERRGTSGAGAGRDSMRATGGRTLNRRAPTGSPEQTTAKSQRSNQQSVASPADSVLPEQLLATTKAGKVRQRMKWTNNLNEYIMRVYYRATRLETDMIGYRQSLHAEFRERFPHIGVTDQRLVDQKRAILKNNLIPKVRLEQIKQEVAAEISSSSNGCPLTQTVTDSHEVPNSTQLDEANQDPSTPGAKEDNISDVIDIYQELFLKYSGLDPTLRPRIPKLNSNRNNRLVQIIQYINEHVLPCQIKEEDTLTDIHAIVYCAAATVAVKSGFKLKDQSESEKGKSIKKNTKPPWQQRLENQIQYLRQEIGRVTQYLNQPNNKKLAKKIKKTLAKIRKHESRKHKNQEHNIIDPNLIAEHLDELKQKLAAKSQRLRRYKEATKRKQQNSVFHHNEKVFYQQLRQNCNFQQENNGAPDQQNLEQYWSNIWSESSHHNSEAHWIKDEINNVQNIDPMLYQEITVKDVSTAIAKTHNWKAPGPEHIHNFWYKHFTTLHHKLAQCFTQVINSPEDMPLFLTKGITYMKPKSRDTQNPSQYRPITCLPTMYKILTSCITSKIQDYIEDREIMTEQQKGCSRLHKGCKEQLLTDMVILQQAHKNHRNLHLAYIDYKKAFDSVPHSWLIEVLRIYKINETIINFLEHIMTHWRTTLSLRQQELTISTKEIRIKRGIFQGDSLSPLLFCLALNPLSTQLNSTHYGFQIRKNKKTIHTISHLMYMDDIKLYSSTDRQLQYLLEITRTFSEDIHMSFGIDKCRTLHVDKTGKLQKIDSTLSDQTTIQAMGDEEIYKYLGFDQAAITDNKAIKQSLTKLYKSRITALLKTKLTGNNMIKAINTFAVPVYTYSFGIIPWSDTDLEDIQRLTRTILTKFRHHHPNSAIERVTLPRSEGGRGLIDLKNLCYKQIHSLRNFYYEKQATSELHAAIVQADTKLTPLNLNNKQLDISSRVTDNNCKIDMWSRKELHGRHANDLKQPHVDSKASNTWLKYGNLFGETEGFMVAIQDQVINTKSYRKHILKQTIDDKCRKCHTTVESIQHITSGCKLMAHTDYTYRHNQVANIIYQKLAAKSNLQEMTCPYFKYVPDTVLEN

SEQ ID NO: 31751 - protein, 1195 aa, Teleogryllus occipitalis
MRATGGRTLNRRAPTRSPEQTTAKSQRSNQQSVASPADSVLPEQLLATTKAGKVRQRMKWTNNLNEYIMRVYYRATRLETDMIGYRQSLHAEFRERFPHIGVTDQRLVDQKRAILKNNLIPKVRLEQIKQEVAAEISSSSNGCPLTQTVRDSHEVPNSTQLDEANQDPSTPGAKEDNISDVIDIYQELFLKYSGLDPTLRPRIPKLNSNRNNRLVQIIQYINEHVLPCQIKEEDTLTDIHAIVYCAAATVAVKSGFKLKDQSESEKGKSIKKNTKPPWQQRLENQIQYLRQEIGRVTQYLNQPNNKKLAKKIKKTLAKIRKHESRKHKNQEHNIIDPNLIAEHLDELKQKLAAKSQRLRRYKEATKRKQQNSVFHHNEKVFYQQLRQNCNFQQENNGAPDQQNLEQYWSNIWSESSHHNSEAHWIKDEINNVQNIDPMLYQEITVKDVSTAIAKTHNWKAPGPEHIHNFWYKHFTTLHHKLAQCFTHVINSPEDMPLFLTKGITYMKPKSRDTQNPSQYRPITCLPTMYKILTSCITSKIQDYIEDREIMTEQQKGCSRLHKGCKEQLLTDMVILQQAHKNHRNLHLAYIDYKKAFDSVPHSWLIEVLRIYKINETIIKFLEHIMTHWRTTLSLRQQELTISTKEVRIKRGIFQGDSLSPLLFCLALNPLSTQLNSTHYGFQIRKNKKTIHTISHLMYMDDIKLYSSTDRQLQYLLEITRTFSEDIHMSFGIDKCRTLHVDKTGKLQKIDSTLSDQTTIQAMGDEEIYKYLGFDQAAITDNKAIKQSLTKLYKSRITALLKTKLTGNNMIKAINTFAVPVYTYSFGIIPWSDTDLEDIQRLTRTILTKFRHHHPNSAIERVTLPRSEGGRGLIDLKNLCYRQIHSLRNFYYEKQATSELHAAIVEADTKLTPLNLNNKQLDISSRVTDNNCKIDMWSRKELHGRHAKDLKQPHVDSKASNTWLKYGNLFGETEGFMVAIQDQVINTKSYRKHILKQTIDDQCRKCHTTVESIQHITSGCKLMAHTDYTYRHNQVANIIHQKLAAKSNLQEMTCPYYKYVPDTVLENSNFKLYYDREIITDKTIHHNRPDITFVDKQQKIGFLIDITVPQTANLQTAHAEKITKYTELAAEVKALWHLQKVHIVPLVISCTGVIPNNIHKNLELIQIPKYTYKIMQKSIILNTCRIVRKFLNCDET

SEQ ID NO: 31752 - protein, 1234 aa, Teleogryllus occipitalis
MAITHTDMERRLRSHKASEKEPLPGERRGTSGAGAGRDSMRATGGRTLNRRAPTGSPEQTTAKSQRSNQQSVASPADSVLPEQLLATTKAGKVRQRMKWTNNLNEYIMRVYYRATRFETEMIGYRQSLHAEFRERFPHIGVTDQRLVDQKRAILKNNLIPKVRLEQIKQEVAAEISSSSNGCPLTQTVTDSHEVPNSTQLDEANQDPSTPGAKEDNISDVIDIYQELFLKYSGLDPTLRPRIPKLNSNRNNRLVQIIQYINEHVLPCQIKEEDTLTDIHAIVYCAAATVAVKSGFKLKDQSESEKGKSIKKNTKPPWQQRLENQIQYLRQKIGRVTQYLNQPNNKKLAKKIKKTLAKIRKHESRKHKNQEHHTIDPNLIAEHVDELKQKLAAKSQRLRRYKEATKRKQQNSVFHHNEKVFYQQLRQNCNFQQENNGAPDQQNLEQYWSNIWSESSHHNSEAHWIKDEINNVQNIDPMLYQEITVKDVSTAIAKTHNWKAPGPEHIHNFWYKQFTTLHHKLAQCFTQVINSPEDMPLFLTKGITYMKPKSRDTQNPSQYRPITCLPTMYKILTSCITSKIQDYIEDREIMTEQQKGCSRLHKGCKEQLLTDMVILQQAHKNHRNLHLAYIDYKKAFDSVPHSWLIEVLRIYKINETIINFLEHIMTHWRTTLSLRQQELTISTKEIRIKRGIFQGDSLSPLLFCLALNPLPTQLNSTHYGFQIRKNKKTIHTISHLMYMDDIKLYSSTDRQLQYLLEITRTFSEDIHMSFGIDKCRTLHVDKTGKLQKIDSTLSDQTTIQAMGDEEIYKYLGFDQAAITDNKAIKQSLTKLYKSRITALLKTKLTGNNMIKAINTFAVPVYTYSFGIIPWSDTDLEDIQRLTRTILTKFRHHHPNSAIERVTLPRNEGGRGLIDLKNLCYRQIHSLRNFYYEKQATSELHAAIVEADTKLTPLNLNNKQLDISSRVTDNNCKIDMWSRKELHGRHAKDLKQPHVDSKASNTWLKYGNLFGETEGFMVAIQDQVINTKSYRKHILKQTIDDKCRKCHTTVESIQHITSGCKLMAHTDYTYRHNQVANIIHQKLAAKSNLQEMTCPYYKYVPDTVLENSNFKLYYDREIITDKTIHHNRPDITFVDKQQKIGFLIDITVPQTANLQTAHAEKITKYTELAAEVKALWHLQKVHIVPLVISCTGVIPNNIHKNLELIQIPKYTYKIMQKSIILNTCRIVRKFLNCDET

SEQ ID NO: 31753 - protein, 1180 aa, Gerris buenoi
MAITHSEMERRLRSRKASEKEPLPGERRGTSGAGAGRDSMRATGGRTLNRRAPTGSPEQTTAESQRSNPQSVASPADSVLLEQLLATTKAGKVRQRMKWTSNLNEYIMRVYYRATRLETEMTGYRQSLHAEFREKFPHIVVTEQRLVDQKRAILTNNLIPKVRLEQIKQEVAEEISSSNNGCPLTQTIADSHVVPNSTQLDEADQDPSTAGAKEDNLSDIIDIYQELFLKYSGLDPTLRPRIPKLNINRKDRLTQIIQYINEHVLPFQIKEEDTLTDIHAIVYCAAATVAVKAGFKLKDQSESQKRPSNKNYTKPPWQQRLENQIQYLRREIGRVTQYLNQPNNKKLAKKIKKTLAKIRKHGNQEHELRKHKDQGDKIVDPNLIAEHLDELKQKLAAKSRRLRRYKETTERKLQNSMFRQNEKVFYQQLRPNCNFQRENNGAPDQQNLEQYWSDIWSETHHHNSEAHWIKEEINNVQTLEPMLYQEITVKDVSTAIAKTHNWKAPGPEHVQNFWYKQFTSLHHKLAQCFTQVINSPEDMPLFLTKGITYMKPKSRDTQNPSQYRPITCLPTMYKILTSCITSKIQDYIEDREIMTEQQKGCRRLHKGCKEQLLTDMVILQQAHKNHRNLHMAYIDYKKAFDSVPHSWLIEVLRIYKINETIINFLEQIMTHWRTTLSLRQQDFTITTKDIRIKRGIFQGDSLSPLLFCLALNPLSTQLNSTHYGFKIRKNKKTIHTISHLMYMDDIKLYSSTDRQLQYLLEITRTFSEDIHMSFGIDKCKTLHVDKTGKLQKIDNSLSDQMTIQAMNDEEMYKYLGFDQAAITDNKAIKQSLTKLYKSRITALLKTKLTGKNMIKAINTFAVPVYTYSFGIIPWSDTDLEDIQRLTRTILTKFRHHHPNSAIERVTLPRNEGGRGLIDLKNLCYKQINSLRNFYYEKQATSELHAAIVQADTKLTPLDLNNKQLDISSQFADNNHKIDMWSRKELHGRHANDLKQPHVDKKASNAWLKYGDLFGETEGFMVAIQDQVINTKSYRKHILKQAIDDKCRKCHTTVESIQHITSGCKLMAHTDYTYRHNQVANIIHQKLAAKSKLQETTCPYYKYVPDSVLESSNYKLYYDREIITDKTIHHNRPDITFVDKRQKIGYLIDITIPQTANLQTAHAEKITKYTELAAEVKALWH

SEQ ID NO: 31754 - protein, 1218 aa, Teleogryllus occipitalis
MAITHTDMERRLRSHKASEKEPLPGERRGTSGAGAGRDSMRATGGRTLNRRAPTGSPEQTTAKFQRSNQQSVASPADSVLPEQLLATTKAGKVRQRMKWTNNLNEYIMRVYYRATRLETDMIGYRQSLHAEFRERFPHIGVTDQRLVDQKRAILKNNLIPKVRLEQIKQEVAAEISSSSNGCPLTQTVTDSHEVPNSTQLDEANQDPSTPGAKEDNISDVIDIYQELFLKYSGLDPTLRPRIPKLNSNRNNRLVQIIQYINEHVLPCQIKEEDTLTDIHAIVYCAAATVAVKSGFKLKDQSESEKGKSIKKNTKPPWQQRLENQIQYLRQEIGRVTQYLNQPNNKKLAKKIKKTLAKIRKHESRKHKNQEHNIIDPNLIAEHLDELKQKLAAKSQRLRRYKEATKRKQQNSVFHHNEKVFYQQLRQNCNFQQENNGAPDQQNLEQYWSNIWSESSHHNSETHWIKDEINNVQNIDPMLYQEITVKDVSTAIAKTHNWKAPGPEHIHNFWYKHFTTLHHKLAQCFTHVINSPEDMPLFLTKGITYMKPKSRDTQNPSQYRPITCLPTMYKILTSCITSKIQDYIEDREIMTEQQKGCSRLHKGCKEQLLTDMVILQQAHKNHRNLHLAYIDYKKAFDSVPHSWLIEVLRIYKINETIIKFLEHIMTHWRTTLSLRQQELTISIKEVRIKRGIFQGDSLSPLLFCLALNPLSTQLNSTHYGFQIRKNKKTIHTISHLMYMDDIKLYSSTDRQLQYLLEITRTFSEDIHMSFGIDKCRTLHVDKTGKLQKIDSTLSDQTTIQAMGDEEIYKYLGFDQAAITDNKAIKQSLTKLYKSRITALLKTKLTGNNMIKAINTFAVPVYTYSFGIIPWSDTDLEDIQRLTRTILTKFRHHHPNSAIERVTLPRSEGGRGLIDLKNLCYRQIHSLRNFYYEKQATSELHAAIVEADTKLTPLNLNNKQLDISSRVTDNKCKIDMWSRKELHGRHAKDLKQPHVDSKASNTWLKYGNLFGETEGFMVAIQDQVINTKSYRKHILKQTIDDKCRKCHTTVESIQHITSGCKLMAHTDYTYRHNQVANIIHQKLAAKSNLQEMTCPYYKYVPDTVLENSNFKLYYDREIITDKTIHHNRPDITFVDKQQKIGFLIDITVPQTANLQTAHAEKITKYTELAAEVKALWHLQKVHIVPLVISCTGVIPNNIHKNLELIQIPKYTYKIMQNRSS

SEQ ID NO: 31755 - protein, 754 aa, Teleogryllus occipitalis
MLYQEITVKDVSTAIAKTHNWKAPGPEHIHNFWYKHFTTLHHKLAQCFTHVINSSEDMPLFLTKGITYMKSKSRDTQNPSQYRPITCLPTMYKILTSCITSKIQAYIEDREIMTEKQKGCSLLHKGCKEQLLTAMVILQQAHKNHRNLHLAYIDYKKAFDSVPHSWLIEVLRIYKINETIIKFLEHILTHWRTTLSLRQQELTISTKEIRIKRGIFQGDSLSPLLFCLALNPLSTQLNSTHYGFQIRKNKKTIHTISHLMYMDDIKLYSSTDRQLQYLLEITRTISEDIHMSFGIDKCRTLHVDKTGKLQKIDSTLSDQTTIQAMGDEEIYKYLAAITDNKAIKQSLTKLYKSRIIALPKTRLTGNNVIKAINTFAVPVYTYSFEIIPWSDTDLEDTQRLTRTILTKFRHHHPNSAIERVTLPRNEGGRGLIDLKNLFYRQIHSLRNFYYEKQATSELHAAIVEADTKLTPLNLNNKQLDISSRVTDNNCKIDMWSRKELQGRHAKDLKQPHVDSKASNTWLKYGNLFGETEGFMVAIQDQVINTKGYRKHILKQTIDDKCRKCHTTVESIQHITSGCKLMAHTDYTYRHNQVANIIHQKLAAKSNLQEMTCPYYKYVPDTVLENSNFKLYYDKEIITDKTIHHNRPDITFVDKQQKIGFLIDITVPQTANLQTAHAEKITKYTELAAEVKALWHLQKVHIVPLVISCTGVIPNNIHKNLELIQIPKYSYKIMQKSIILNTCRIVRKFLNCDET

SEQ ID NO: 31756 - protein, 1406 aa, Sarota myrtea
MERQNSNIRIGPLPGGERRGTSGADAGRDSMQTVSGSLLNRRARVGGPEDITADQRGGEGTDDVLQSRVSPLEYSAGTSEATTANSISDDRRRKWSNEEMEELMFCYFKAQHQGPGYIGRLERLFTERNPNNPKIHKFNGNTLSNQARRILKQNIISQEVLNRIKITAEGLQLESIENTEPINEHITPIIQPDTAQSTHENTQTYTTQNTQQHYTPPQLENISQDVIVDENQDPLILDFLQILAETKELQITDRCILPKAKINQRFLENLHILNRYLPNILITHHSLRDINNIIYAAAKTLVVNNNQEPYMPSNTFKLKSDPPWKKRIQTKIEKFRKELGQLIEIGRGINTRRMINVRDKLYRKYTIQNLGDHKNTEEILKQKIKALAGRIKRYESMNKRKEQNKLFKENEHRFYRTLGNNSFDKEIKLPDKHKVEEFWSSILSNPSQYNNEAKWINEVELSSGEVNMADVEEISEEQVKNAIRKLLNWKSPGIDKIQNYYIKYLTSIHGYLASLYTKIVRNQETLEDWFTTGQVILIPKNEHTEDPKNWRPVACLPTMYKLLTSVLANILYDHCHENHIMAIEQRGCRRGARGCKDHLMVNKAILEDAHRSQKNLSMAWIDYRKAFDSVSHEWLLKVLDIYKCPPTIKIFLELVMPSWRVIMTARGNQNSLTTEPISIRRGIFQGDSLSPLLFCLALNPLSFILKKYELKGYKLKDSFWINHLVYMDDLKVYANSRHNLGVLLDSVEVFTNDIGMSFGLDKCNIIHISSGYRSNVIGNSNHILLEGGTIKQLAIGDTYKYLGVHETGKIEHGTVRDQIAKEYFNRIRKLLNSHLSSRHLIKGINTYAIPVLLYSFGVINFKRSDLKKIDTKTRKLLAMKKAQQQKAEVERLYLPVSQGGRGLLNVENLYKGQIIKYKQYLRAESDDLIKAIVQHDVNKDKYSIVHEAQVIENQLHLNQGNCHTDKEIKEAIIKNCKQTWRNKQLHGQFPKKVLDLTNIDTELSFGWIKKQLISPSLESSIFAIQDQSVMTHQFRRDILKEQTDGKCRLCTCKDETTQHIISGCEKLAGTYYVKRHNNLVQYINWCLAKKHKMEVSDLWWKETLIQPQVKENESAKIMWEMPVQTDVTVTHNRPDLIYTDKINNKTYLIDVTVPSDYNIGAKEIEKLSKYHLLKTEITRLWNTQTTVIPVVIGATGIVAKNIKRYIDQLAAFIDITILQKQAAIHSSTIISKVLGDTVFVNSPQNQDTADLVHNSAEVYNTNTQISNTLSTPIASTLTNTRMRRQMRTDTQITQQSFNTQSTQETLTTQTIQQSPITFHSTDTQTSTDTHISLDTGPTCQSSVIPHSSDTTTLTSTRTTRRRRTETSITQQTFDTQTTQQSSHSTDTHTTNNKRIARRRRRNDTQS

SEQ ID NO: 31757 - protein, 1299 aa, Laothoe populi
MMANGALATPSKMERQLNDTRIGSLPGGDRRGTSGADAGRDSIRTVSGSQLNRRARVGGPEGTTADQRGGEGTDDALQNRASPTHSVGSSASTTDNFINDDRRRKWSTEEMKELMFCFFKAKSGGPGYIGRLHDLFTERNPNNPKIQKFNGNTLSNQARRIIKQNVLSKELLNLIQNQAEGVSSETNTEQYNTTLNTIEHNMQNTQQDYHITAEQAETIEQLTENITVNEDQNPLILNFLQILAETKETAISDRQLLPKAKINKRFLENLRTLNTYLPNLLITNESLREINDIIYATAKTLILNNNQMPYLPKDTIKAKTDPPWKKRIQTKIEKLRKELGQLIEIGRGISTGRMMRIKDSLYKKYNIQNENDHQNNIEIIKQKIKALASRIKRYEDINIRKEQNRLFNENEHRLYRSLGSNNNRNIQLPSKERVEEFWSSILSNPIGYNSEAKWIKEVEISSSEINTMNVEEISEEQVKLAIRKLLNWKSPGIDKIQNYYIKYLTSTHSSIATLFTKIVSGTENLEEWFTTGQVILIPKNETTDDPKNWRPIACLSTMYKLLTSVLTNILYNHCQENNILAPEQRGCRRGARGCKDHLMVNKAILEDAHQSQKNLSMAWIDYQKAFDSVSHEWILRILDVYKCPPMIKSFLQLAMPTWRLIMTARGSQNSITTDPIYIRRGIFQGDSLSPLLFCLAINPLSCVLNKYQTKGYKLKDSIAINHLLYMDDLKLYTNNKQNLKTLLDSVEIFTSDIGMRFGLDKCNTVHISSGHRNNTTGDGNHILLSGDTIRQLAIGDKYKYLGIHESGKIEHSIIREHITKEYFKRIKKLLNTHLNSRYLIKGINTYATPVLLYTFGIINYKNIDLKKIDIKTRKMLAIKKAHQQKAEVQRLYLPITEGGRGLLNIEYTYKTHIIKYKQYLKAESDYLIKAIVQHDINRDKYSIIKEAQDLEREIHLGQGNTHTDKEIKGAIVKNSNEVWRNKNLHGQFPKKVLDQANVDKELSFKWIKNQQISPSIESSIFAIQDQAIMTRQHQRDILKEPVDGKCRLCACRDETAQHIISGCEKLAGTYYVKRHNNLVQYVYWCLAKKHKMDVSNLWWKETLIQPQIKENDTAKILWEMPVQTDITVTHNRPDLIYIDKNNNKTYLIDVSVPSDYNIGPKEIEKLSKYHLLKTEVSRLWKTQTTVIPIVIGATGVVAKSLKKYIDKLDTNINISILQKQAAIQSSVILSKVLGDTVFVNNTQNQHTQNSQHSSDTQQSSNTPNSTSTTNNTNSPITQTNTGRRRRNVRTYSQQITDID

SEQ ID NO: 31758 - protein, 1400 aa, Apodemia walkeri
MKRLLSSTSIGPLPGGDRRGTSGADAGRDSMQTVSGSLLNRRARAGGPENITADQRGGGVTGDALQGEVLPFECSAGSSVATTNNVSDDRRRKWSNEEMEELMFCYFKAQAQGPGYIGRLERLFSDRNPNNPKIHKFNGNTLSNQARRILKQNIISQELLNRIKRTAEGFELEPTQNTEQIEEHTTSVTQQNTSQITQDNTYTNNVQCIHQYTQQHYTTTQADYIDNLTQNITVDEDQDPLILDFLRILAVTKEEPIEDRCFLPKAKINRRFLENLHALNRFLPNILVTNNSLQDINNVIYATAKTLIINNNQTPYTPKNTFKLKSDPPWKKRIQTKIGKFRKELGQLIEIGRGVNTPRMVKVKDKLYRQHNIQNENDHRNVEEILKQKIKALAGRIRRYEDISSKKEQNNLFSENEHRFYRNLRNNSNRKEIKLPDKEKVEEFWSSILSNPSSYNSNAKWIKEVEMASNEISTTTTEEITEEQIKCAITKLLNWKSPGIDKIQNYYLKYLTSLHGHLALLFTKIVTGREILEDWFTTGQVILIPKNEHTEDPKNWRPIACLPTIYKLLTSVLANMLYDHCNENDIMAIEQRGCRRGVRGCKDHLMVNKAILEDAHQSQKNLSMAWVDYKKAFDSVSHEWLIKILDIYKCPPMIKQFLELVMPSWRVIITARGTQNSLTTEPISIRRGIFQGDSLSPLLFCLALNPLSFVLNKYEMKGYKLKNSFWINHLLYMDDLKIYANSRDNLKVLLDSVEVFTSDIRMRFGLEKCNVIHISSGYRSNIIGQGNHILLDGEIINQLHVGDTYKYLGVHESGKIEHSVIKDQVIKEYFNRLKLLLNSYLNSRNLIKGINTFAIPVLMYSFGVINYKSNDLKKIDTKTRKLLAMNKAHQQKAEVERLYLPVTQGGRGLLNVENMYNTQILKYKQYLRAESDDLIKAISVHDIHRLKYSIINESQAIENNLHLAQGNIHTDREIKEAIVKRSNETWRNKQLHGQFPTKILDQANIDMELSFMWIKKQKISPSIESSIFAIQDQAVMTRQHRRDILKEPVDGKCRLCANKDETAQHIISGCEKLAGTYYVKRHNNLVQYIYWCLAKKHNIETSKLWWKEILVQPQVKENESTKILWEMPVHTDVTVTHNRPDLIYIDKINNKTYLIDVTVPSDYNIGPKEIEKLSKYHLLKTEVSRLWNTQTTVIPIVVGATGIVAKNIKKYTDQLGAFIDISILQKQAAIHSSTILSKVLGDTVFVNNPQVHGTSAILSHCTETQDAQQTQTTQNSQEHSSTIHNTQTLDTQSTQLPPSTQQSSITSYSPGTANISSNTQKGRRRRTRILITQNSPATQRTHESSNASHSLSDTRKKRSRRTKTQTNQSSPDTPITQESSTTTHSYDTHSTYNIRRRKRK

SEQ ID NO: 31759 - protein, 1328 aa, Laothoe populi
MPLTSLTPRPAKTSRPREGWNIIAKGKYIMMANGALATPSKMERQLNDTRIGSLPGGDRRGTSGADAGRDSIRTVSGSQLNRRARVGGPEGTTADQRGGEGTDDALQNRASPTHSVGSSASTTDNFINDDRRRKWSTEEIKELMFCFFKAKSGGPGYIGRLHDLFTERNPNNPKIQKFNGNTLSNQARRIIKQNVLSKELLNLIQNQAEGVSSETNTEQYNTTLNTIEHNMQNTQQDYHITAEQAETIEQLTENITVNEDQNPLILNFLQILAETKETAISDRQLLPKAKINKRFLENLRTLNTYLPNLLITNESLREINDIIYATAKTLILNNNQMPYLPKDTIKTKTDPPWKKRIQTKIEKLRKELGQLIEIGRGISTCRMMRIKDSLYRKYNIQNENDHQNNIEIIKQKIKALASRIKRYEDINIKKEQNRLFNENEHRLYRSLGSNNNRNIQLPSKERVEEFWSSILSNPIGYNSEAKWIKEVEISSSEINTMNVEEISEEQVKLAVRKLLNWKSPGIDKIQNYYIKYLTSTHSSIATLFTKIVSGTENLEEWFTTGQVILIPKNETTDDPKNWRPIACLSTMYKLLTSVLTNILYNHCQENNILAPEQRGCRRGARGCKDHLMVNKAILEDAHQSQKNLSMAWIDYQKAFDSVSHEWILRILDVYKCPPMIKSFLQLAMPTWRLIMTARGSQNSITTDPIYIRRGIFQGDSLSPLLFCLAINPLSCVLNKYQTKGYKLKDSIAINHLLYMDDLKLYTNNKQNLKTLLDSVEIFTSDIGMRFGLDKCNTVHISSGHRNNATGDGNHILLSGDTIRQLAIGDKYKYLGIHESGKIEHSIIREHITKEYFKRIKKLLNTHLNSRYLIKGINTYATPVLLYTFGIINYKNIDLKKIDIKTRKMLAIKKAHQQKAEVQRLYLPITEGGRGLLNIEYTYKTHIIKYKQYLKAESDYLIKAIVQHDINRDKYSIIKEAQDLEREIHLGQGNTHTDKEIKGAIVKNSNEVWRNKNLHGQFPKKVLDQANVDKELSFKWIKNQQISPSIESSIFAIQDQAIMTRQHQRDILKEPVDGKCRLCACRDETAQHIISGCEKLAGTYYVKRHNNLVQYVYWCLAKKHKMDVSNLWWKETLIQPQIKENDTAKILWEMPVQTDITVTHNRPDLIYIDKNNNKTYLIDVSVPSDYNIGPKEIEKLSKYHLLKTEVSRLWKTQTTVIPIVIGATGVVAKSLKKYIDKLDTNINISILQKQAAIQSSVILSKVLGDTVFVNNTQNQHTQNSQHSSDTQQSSNTPNSTSTTNNTNSPITQTNTGRRRRNVRTYSQQITDID

SEQ ID NO: 31760 - protein, 1303 aa, Apodemia murphyi
MEELMFCYFKAQAQGPGYIGRLERLFSDRNPNNPKIHKFNGNTLSNQARRILKQNIISQELLNRIKRKAEGFEVEPTQNIEQIEEHTTSTTQQNTSQSTQDNTYMNNAQSTHQNIQQHYTTTQVDYIDNLTQNITVDEDQDPLILDFLRILAVTKEEPIEDRCFLPKAKINRRFLENLHTLNRFLPNILVTNNSLRDINNVIYAAAKTLIINNNQKPYTPKNTFKLKSDPPWKKRIQTKIGKFRKELGQFIEIGRGVNTPRMLKVKEKLYRQHNIQNENDHKNVEEILKQKIKALAGRIRRYEDMSSKKEQNNLFSENEHRFYRNLGNNRNNKEIKLPDKEKVEEFWSSILSNPSSYNSNAKWIKEVEMASNEIITTTTEEITEEQIKCAIIKLLNWKSPGIDKIQNYYLKYLTSLHGHLALLFTKIVTRRETLEDWFTTGQVILVPKNEHTEEPKNWRPIACLPTIYKLLTSVLANMLYDHCNENKIMAIEQRGCRRGARGCKDHLMVNKAILEDAHQSQKNLSMAWVDYKKAFDSVSHEWLIKILDIYKCPPMIKQFLELVMPSWRVIMTARGTQNSLTTEPILIRRGIFQGDSLSPLLFCLALNPLSFVLNKYEMKGYKLKNSFWVNHLLYMDDLKIYANSRDNLKVLLDSVEVFTSDIRMTFGLEKCNVIHISSGYRSNIIGQGNHILLDGEIINQLHVGDTYKYLGVHESGKIEHSVIKDQVIKEYFNRVKLLLNSYLNSRNLIKGINTFAIPVLMYSFGVINYKSNDLKKIDTKTRKLFAMNKAHQQKAEVERLYLPVTQGGRGLLNIENMYNTQILKYKQYLRAESDDLIKAISAHDIHRLKYSIINESRAIENNLHLAQGNTHTDREIKEAIVKRSNETWRNKQLHGQFPTKILDQANIDTELSFMWIKKQKISPSIESSIFAIQDQAVMTRQHRRDILKEPVDGKCRLCANKDETAQHIISGCEKLAGTYYVKRHNNLVQYIYWCLAKKHNIETSNLWWKEILVQPQAKENESTKILWEMPVQTDVTVTHNRPDLIYIDKINNKTYLIDVTVPSDYNIGPKEIEKLSKYHLLKTEVSRLWNTQTTVIPIVVGATGIVAKNIKKYTDRLGAFIDISILQKQAAIHSSTILSKVLGDTVFVNNPQVHETSAILSPNTETQDTQQTQITQDSQEHSSTIHNTQTLDTLPTQQSLSTQISSITSYSQGISNMSSNTQIGRRRRTKTVVTQNSPDTQSSHESSNASHLLSDTRMKRSRRTKTQTNKSSSDTPTTQQSSTTTHSSDTHSSYNIRKRRKRK

SEQ ID NO: 31761 - protein, 1307 aa, Apodemia chisosensis
MKRQQNSLRFGPLPGGERRGTSGADAGRDSMQTVSGSLLNRRARAGGPENITADQRGGGVTGDALQSEASPFECSAGSSATTITNSISDDRRRKWSNEEMEELMFCFFKAQSQGPGYIGRLERLFTDRNPDNPKIHKFNGNTLSNQARRILKQNVISKELLNRIKKTAEGLEIELTENTEQIEEQITPVTQQNTSQRTQENTHTNNAQYTHQNIQQHFTTTQVDSIEYLIQNITVDEDQDPLILDFLQILAETKEIPIEHRCPLPKAKINRRFLENLHTLNRFLPNILVTNNSIRDINNVIYATAKTLIINNNQSPYTPNNTFKLKSDPPWKKRIQTRIEKFRKELGQLIEVGRGVNTPRMVKIKDKLYRQHNIQNENDHKNVEETLKQKIKALAGRIKRYEDMNSKKEQNNLFSENEHRFYRNLGNKSYNKEVKLPDKKKVEEFWSSILSNPSSYNSEAKWIEEVETSSNEISPTAIEEISEQQIKCAIRKLLNWKSPGIDKIQNYYLKYLTSLHGHLASLFTKIVTRKETLEDWFTTGQVILIPKKEHTEDPKNWRPIACLPTMYKLLTSVLANILYDHCNENDIMAIEQRGCRRGARGCKDHLMVNKTILEDAHQSQKNLSMAWVDYQKAFDSVSHEWLIKVLDIYKCPPMIKQFLELVMLSWRVIMTARGTQNSLTTEPISIKCGIFQGDSLSPLLFCLALNPLSFVLNKYKMKGYKVKNSFWINHLLYMDDLKIYANSRHNLKVLLDSVEVFTGDIRMKFGLDKCNVIHISSGYRSNVIGQGNHILLDGEIINQLHVGNTYKYLGVHESGKIEHSVIKDQVIKEYFNRIKKLLNSHLNSRNLIKGINTFAIPVLVYSFGVINYKNNDLKKIDTKTRKLLAMYKAHQQKAEVERLYLPVTQGGRGLLNVENMYNTQIIKYKQYLRAESDDLIKAIADHDIHRLKYSIINESQTIENTLNLAQENIHTDREIKEAILKKSNKTWRNKQLHGQFPTKVLDKANIDTELSFVWIKKQKVSPRIKSSIFAIQDQAVMTLQHRRDILKEPTGGKCRLCSNKDETAQHIISGCEKLAGTYYVKRHNNLVQYMYWCLAKKHKIKVSNLWWKEILVQPQVKENETTKIIWEMPIQTDVTVTHNRPDLVYIDKINNKTYLIDVTVPSDYNIGPKEIEKLSKYHLLKTEVSRLWNTQTTVIPIVIGAVIVHGAIRCFHRHQYSTKTSSYTLINYTQQSTWRYRICKQHTKSRYVNYINTQHRHTRHTTKSNYTAIVSHTYHTRAIRHTINSAVGKRTTVINLALFTRHVQYII

SEQ ID NO: 31762 - protein, 1299 aa, Laothoe populi
MMANGALATPSKMERQLNDTRIGSLPGGDRRGTSGADAGRDSIRTVSGSQLNRRARVGGPEGTTADQRDGEGTDDALQNRASPTHSVGSSASTTDNFINDDRRRKWSTEEMKELMFCFFKAKSGGPGYIGRLHDLFTERNPNNPKIQKFNGNTLSNQARRIIKQNVLSKELLNLIQNEAEGIPSETNTSQFNTTLNTIEHNMQNTQQDYHITAEQAETIEQLTENITVNEDQNPLILNFLQILAETKETAISERQLLPKAKINKRFLENLRTLNTYLPNLLITNESLREINDIIYATAKTLILNNNQMPYLPKDTIKAKTDPPWKKRIQTKIEKLRKELGQLIEIGRGISTGRMMRIKDSLYRKYNIQNENDHQNNIEIIKQKIKALASRIKRYEDINIKKEQNRLFNENEHRLYRSLGSNNNRNIQLPSKERVEEFWSSILSNPIGYNSEAKWIKEVEISSSEINTMNVEEISEEQVKLAIRKLLNWKTPGIDKIQNYYIKYLTSTHSSIATLFTKIVSGTENLEEWFTTGQVILIPKNETTDDPKNWRPIACLSTMYKLLTSVLTNILYNHCQENNILAPEQRGCRRGARGCKDHLMVNKAILEDAHQSQKNLSMAWIDYQKAFDSVSHEWVLRILDVYKCPPMIKSFLQLAMPTWRLIMTARGSQNSITTDPIYIRRGIFQGDSLSPLLFCLAINPLSCVLNKYQTKGYKLKDSIAINHLLYMDDLKLYTNNKQNLKTLLDSVEIFTSDIGMRFGLDKCNTVHISSGHRNNATGDGNHILLSGDTIRQLAIGDKYKYLGIHESGKIEHSIIREHITKEYFKRIKKLLNTHLNSRYLIKGINTYATPVLLYTFGIINYKNIDLKKIDIKTRKMLAIKKAHQQKAEVQRLYLPITEGGRGLLNIEYTYKTHIIKYKQYLKAESDYLIKAIVQHDINRDKYSIIKEAQDLEREIHLGQGNTHTDKEIKGAIVKNSNEVWRNKNLHGQFPKKVLDQANVDKELSFKWIKNQQISPSIESSIFAIQDQAIMTRQHQRDILKEPVDGKCRLCACRDETAQHIISGCEKLAGTYYVKRHNNLVQYVYWCLAKKHKMDVSNLWWKETLIQPQIRENDTAKILWEMPVQTDITVTHNRPDIIYIDKNNNKTYLIDVSVPSDYNIGPKEIEKLSKYHLLKTEVSRLWKTQTTVIPIVIGATGVVAKSLKKYIDKLDTNINISILQKQAAIQSSVILSKVLGDTVFVNNTQNQHTQNSQHSSDTQQSSNTPNSTSTTNNTNSPITQTNTGRRRRNVRTYSQQITDID

SEQ ID NO: 31763 - protein, 1281 aa, Emesis cereus
MEELMFCYFKAQSQGPGYIRRLERLFADRNPDNPKIHKFNGNTLSTQARRVLKQNIISQELLNRIKRTAEGLELALIENTEPIEEQIAPVTQQNTQEDTVTNTAYLHQHIQHHSTTQIENLDRLTQSINVDENQDPLILDFLQILAETKEIPVENRCLLPKAKINRRFLENLHTLNRFLPNILVTNNSLRDVNNIIYSTAKTLIINNNQSPFTPKNTFKLRTDPPWKKRIQTKIEKFRKELGQLIEVGRGVNTPRMVKIKDKLYRFHNIKNDIDHKNVEEILKQKIKALAGRIRRYEDINSKKEQNNLFSENEHRFYRNLGNNSYSKEVKLPNKEKIEEFWSSILSNPSVYNSEAKWIKEVEAVSNEINTTNIEEISEENIKYAIRKLLNWKTPGIDKIQNYYLKYLTCLHGHLASLFTKIVTHKETLEDWFTTGQVILIPKNEHTEDPKNWRPIACLPTMYKLLTSVLANILYDHCRENDIMAIEQRGCRRGARNCKDHLMVNKAILEDAHQSQKNLSMAWVDYQKAFDSVSHEWLIKVLSIYKCPPMIKQFLELVMPSWRVIMTARGTQNSLTTEPILIKRGIFQGDSLSPLLFCLALNPLSFVLNKYELKGYKLKDSFWINHLLYMDDLKVYANSRHNLKVLLDSVEIFTGDIGMKFGLDKCNVLHLSSGYRSNVIGQGNHILLDGMMINQLEVGHTYKYLGVHESGKIEHGVIKDQVIKEYFNRIKKLLNSHLNSRNLIKGINTFAIPVLLYSFGIINYKNNDLKKVDVKTRKLLAIKKAHQQKAEVERLYLPITLGGRGLLNVENMYKTHIIKYKQYLRGESDDLIKAIVIHDIHRLKYSIIKESQTIENHLNLAQGNIHTDREIKEAILKISNETWRNKQLHGQFPKKVIDQANIDTELSFMWIKKQKISPRIESSVFSIQDQAVMTKQHRRDILKEPTDGKCRLCASKDETTQHIISGCEKLAGTYYVKRHNNLVQYIYWCLAKKHKIEVSNFWWKETLIQPQVKENESAKILWEIPVQTDVTVTHNRPDLIYIDKTNNKTFLIDITVPSDYNIGAKEIEKLSKYHLLKTEISRLWNTQTTIIPIVIGATGIVAKNIKKYIDQLGTYIDISILQKQAAIHSSTILSKVLGDTVFVNRTQTHDTPTILIHNTETRDTQCTQTTQESSIVQITQESTATQLSEQSPASQITQQSSLTPYSPGSCNISSNTQTRGRQRTRPLTTQQSPRTQTTQESSNASHSSSDIRTPSNTQITQQSSNNTNPLRTHIIRKKIKRK

SEQ ID NO: 31764 - protein, 1299 aa, Laothoe populi
MMANGALATPSKMERQLNDTRIGSLPGGDRRGTSGADAGRDSIRTVSGSQLNRRARVGGPEGTTADQRGGEGTDDALQNRASPTHSVGSSASTTDNFINDDRRRKWSTEEMKELMFCFFKAKSGGPGYIGRLHDLFTERNPNNPKIQKFNGNTLSNQARRIIKQNVLSKELLNLIQNQAEGVSSETNTEQYNTTLNTIEHNMQNTQQDYHITAEQAETIEQLTENITVNEDQNPLILNFLQILAETKETAISDRQLLPKAKINKRFLENLRTLNTYLPNLLITNESLREINDIIYATAKTLILNNNQMPYLPKDTIKAKTDPPWKKRIQTKIEKLRKELGQLIEIGRGISTGRMMRIKDSLYKKYNIQNENDHQNNIEIIKQKIKALASRIKRYEDINIRKEQNRLFNENEHRLYRSLGSNNNRNIQLPSKERVEEFWSSILSNPIGYNSEAKWIKEVEISSSEINTMNVEEISEEQVKLAIRKLLNWKSPGIDKIQNYYIKYLTSTHSSIATLFTKIVSGTENLEEWFTTGQVILIPKNETTDDPKNWRPIACLSTMYKLLTSVLTNILYNHCQENNIMAPEQRGCRRGARGCKDHLMVNKAILEDAHQSQKNLSMAWIDYQKAFDSVSHEWILRILDVYKCPPMIKSFLQLAMPTWRLIMTARGSQNSITTDPIYIRRGIFQGDSLSPLLFCLAINPLSCVLNKYQTKGYKLKDSIAINHLLYMDDLKLYTNNKQNLKTLLDSVEIFTSDIGMRFGLDKCNTVHISSGHRNNTTGDGNHILLSGDTIRQLAIGDKYKYLGIHESGKIEHSIIREHITKEYFKRIKKLLNTHLNSRYLIKGINTYATPVLLYTFGIINYKNIDLKKIDIKTRKILAIKKAHQQKAEVQRLYLPITEGGRGLLNIEYTYKTHIIKYKQYLKAESDYLIKAIVQHDINRDKYSIIKEAQDLEREIHLGQGFTHTDKEIKGAIVKNSNEVWRNKNLHGQFPKKVLDQANVDKELSFKWIKNQQISPSIESSIFAIQDQAIMTRQHQRDILKEPVDGKCRLCACRDETAQHVISGCEKLAGTYYVKRHNNLVQYVYWCLAKKHKMDVSNLWWKETLIQPQIKENDTAKILWEMPVQTDITVTHNRPDIIYIDKNNNKTYLIDVSVPSDYNIGPKEIEKLSKYHLLKTEVSRLWKTQTTVIPIVIGATGIVAKSLKKYIDKLDTNINISILQKQAAMQSSVILSKVLGDTVFVNNTQNQHTQNSQHSSDTQQSSNTPNSTSTTNNTNSPITQTNTGRRRRNVRTYSQQITDID

SEQ ID NO: 31765 - protein, 1390 aa, Apodemia duryi
MTNGAIVTFLNMKSRNCNDSQGPLPEGDRRGTSGAGAGRDSMQTVSGSQLSRRARAGGPENITADLRDGGITGDVLQSEASPFECSAGSSGATTTHNASNDKRRKWSNKEMEELMFCYFKAQSQGIGYIGRLERLFSDRNPDNPKIQKFNGNTLANQARRILKQNIISQELLNRIKRTAEGLELESTENSERIEEITTPDIRQNTSQDIQENIYTNSMQHIHQNIQQQYTTTQVENVNQLIPNITVDEDQDPLILDFLRILAETKEVPVADRCFLPKAKINRRFLENLHTLDRFLPNILVTNNSLRDINNVVYATAKTLIIKNNQSPYTPKSTFKLKFDPPWKKRIQIKIEKFRKELGQLIEVVRGVKTPRMRKIKDKLYRQYNIQNENDHKNVEEILRQKIKALAGRIRRYEDMSSKKEQNKLFNENEHRFYKHLGNKRYNKEIKLPDKEKVEDFWSSILSHPSVYNKEAKWVKELEMTYKETSTTAMEEISEEQVKCAIRKLLNWKSPGIDKIQNYYLKYLTSLHRHLASLFTKIVTRKETLEDWFTTGQVILIPKSEHTEDPKNWRPIACLPTMYKLLTTVLANTLYDHCNKNDIIATEQRGCRRGARGCKDHLMVNKAILEDAHQSQKNLSMAWVDYQKAFDSVSHEWLIKVLDIYKCPPMIKQFLKLVMPSWKVIMTARGTQNSLTTEPISIKCGIFQGDSLSPLLFCLALNPLSFVLNKYETKGYKLKNDIWINHLLYMDDLKVYANSRHNLKVLLDSVEIFTNDINMRFGLDKCKVIHINSGYRSTVIGQGNHILLDGEIIKQLHVGNTYKYLGVHESGKIEHSVIKEQVIKEYFNRVKKLLKSHLNSRNLIKGINTYAIPVLMYSFGVINYKNNDLKKIDTKTRKLLAMNKAHQQKAEVERLYLPITQGGRGLLNVENMYSTQIVKYKQYLKAESDDLLKAIADHDRHRLKHSIINESQAIERNLHLAHGNIHTDREITEAIVKRSNETWRNKPLHGQFPKKILDQACIDRELSFVWIKKQKLSPSIESSIFAIQDQAVMTRQHRRDILKEPIDGKCRLCSNKDETAQHLISGCEKLAGTYYIKRHNNLVQYIYWCLAKKHKIEVSDLWWKEILTQPQVKENESTKILWEMPVQTDVTVQHNRPDLIYIDKINKKTYLIDVTVPSDYNVGPKEIEKLSKYHLLKTEVSRLWNTQATVIPIVIGATGIVAKNIKKYTDQLGAFIDISILQKQAAIHSSTILSKVLGDTVFVNSTQDPDTLTILTHSTETQGTQRTRTTQESPVTYTTQESSDTQQSLSTQQPLITPYSLNTCNITPTRAGALITQQSPYTQNRQESSSASHSLPETQINQSSSDTQITQQSSITTHSSDTHTSYNTRKRRKRK

SEQ ID NO: 31766 - protein, 1299 aa, Laothoe populi
MMANGALATPSKMERQLNDTRIGSLPGGDRRGTSGADAGRDSIRTVSGSQLNRRARVGGPEGTTADQRGGEGTDDALQNRASPTHSVGSSASTTDNFINDDRRRKWSTEEMKELMFCFFKAKSGGPGYIGRLHDLFTERNPNNPKIQKFNGNTLSNQARRIIKQNVLSKELLNLIQNQAEGVSSETNTEQYNTTLNTIEHNMQNTQQDYHITAEQAETIEQLTENITVNEDQNPLILNFLQILAETKETAISDRQLLPKAKINKRFLENLRTLNTYLPNLLITNESLREINDIIYATAKTLILNNNQMPYLPKDTIKAKTDPPWKKRIQTKIEKLRKELGQLIEIGRGISTGRMMRIKDSLYKKYNIQNENDHQNNIEIIKQKIKALASRIKRYEDINIRKEQNRLFNENEHRLYRSLGSNNNRNIQLPSKERVEEFWSSILSNPIGYNSEAKWIKEVEISSSEINTMNVEEISEEQVKLAIRKLLNWKSPGIDKIQNYYIKYLTSTHSSIATLFTKIVSGTENLEEWFTTGQVILIPKNETTDDPKNWRPIACLSTMYKLLTSVLTNILYNHCQENNILAPEQRGCRRGARGCKDHLMVNKAILEDAHQSQKNLSMAWIDYQKAFDSVSHEWILRILDVYKCPPMIKSFLQLAMPTWRLIMTARGSQNSITTDPIYIRRGIFQGDSLSPLLFCLAINPLSCVLNKYQTKGYKLKDSIAINHLLYMDDLKLYTNNKQNLKTLLDSVEIFTSDIGMRFGLDKCNTVHISSGHRNNTTGDGNHILLSGDTIRQLAIGDKYKYLGIHESGKIEHSIIREHITKEYFKRIKKLLNTHLNSRYLIKGINTYATPVLLYTFGIINYKNIDLKKIDIKTRKMLAIKKAHQQKAEVQRLYLPITEGGRGLLNIEYTYKTHIIKYKQYLKAESDYLIKAIVQHDINRDKYSIIKEAQDLEREIHLGQGNTHTDKEIKGAIVKNSNEVWRNKNLHGQFPKKVLDQANVDKELSFKWIKNQQISPSIESSIFAIQDQAIMTRQHQRDILKEPVDGKCRLCACRDETAQHIISGCEKLAGTYYVKRHNNLVQYVYWCLAKKHKMDVSNLWWKETLIQPQIKENDTAKILWEMPVQTDITVTHNRPDLIYIDKNNNKTYLIDVSVPSDYNIGPKEIEKLSKYHLLKTEVSRLWKTQTTVIPIVIGATGVVAKSLKKYIDKLDTNINISILQKQAAMQSSVILSKVLGDTVFVNNSQNQHTQNSQHSSDTQQSSNTPNSTSTTNNTNSPITQTNTGRRRRNVRTYSQQITDID

SEQ ID NO: 31767 - protein, 1328 aa, Laothoe populi
MPLTSLTPRPAKTSRPREGWNIIAKGKYIMMANGALATPSKMERQLNDTRIGSLPGGDRRGTSGADAGRDSIRTVSGSQLNRRARVGGPEGTTADQRGGEGTDDALQNRASPTHSVGSSASTTDNFINDDRRRKWSTEEMKELMFCFFKAKSGGPGYIGRLHDLFTERNPNNPKIQKFNGNTLSNQARRIIKQNVLSKELLNLIQNQAEGVSSETNTEQYNTTLNTIEHNMQNTQQDYHITAEQAETIEQLTENITVNEDQNPLILNFLQILAETKETAISDRQLLPKAKINKRFLENLRTLNTYLPNLLITNESLREINDIIYATAKTLILNNNQMPYLPKDTIKAKTDPPWKKRIQTKIEKLRKELGQLIEIGRGISTGRMMRIKDSLYKKYNIQNENDHQNNIEIIKQKIKALASRIKRYEDINIRKEQNRLFNENEHRLYRSLGSNNNRNIQLPSKERVEEFWSSILSNPIGYNSEAKWIKEVEISSSEINTMNVEEISEEQVKLAIRKLLNWKSPGIDKIQNYYIKYLTSTHSSIATLFTKIVSGTENLEEWFTTGQVILIPKNETTDDPKNWRPIACLSTMYKLLTSVLTNILYNHCQENNILAPEQRGCRRGARGCKDHLMVNKAILEDAHQSQKNLSMAWIDYQKAFDSVSHEWILRILDVYKCPPMIKSFLQLAMPTWRLIMTARGSQNSITTDPIYIRRGIFQGDSLSPLLFCLAINPLSCVLNKYQTKGYKLKDSIAINHLLYMDDLKLYTNNKQNLKTLLDSVEIFTSDIGMRFGLDKCNTVHISSGHRNNTTGDGNHILLSGDTIRQLAIGDKYKYLGIHESGKIEHSIIREHITKEYFKRIKKLLNTHLNSRYLIKGINTYATPVLLYTFGIINYKNIDLKKIDIKTRKMLAIKKAHQQKAEVQRLYLPITEGGRGLLNIEYTYKTHIIKYKQYLKAESDYLIKAIVQHDINRDKYSIIKEAQDLEREIHLGQGNTHTDKEIKGAIVKNSNEVWRNKNLHGQFPKKVLDQANVDKELSFKWIKNQQISPSIESSIFAIQDQAIMTRQHQRDILKEPVDGKCRLCACRDETAQHIISGCEKLAGTYYVKRHNNLVQYVYWCLAKKHKMDVSNLWWKETLIQPQIKENDTAKILWEMPVQTDITVTHNRPDLIYIDKNNNKTYLIDVSVPSDYNIGPKEIEKLSKYHLLKTEVSRLWKTQTTVIPIVIGATGVVAKSLKKYIDKLDTNINISILQKQAAMQSSVILSKVLGDTVFVNNSQNQHTQNSQHSSDTQQSSNTPNSTSTTNNTNSPITQTNTGRRRRNVRTYSQQITDID

SEQ ID NO: 31768 - protein, 1308 aa, Euproctis similis
MESENNVSSIGPLPGGDRRGTSGAGAGRSSHTNRQRLSAEQAGESRGTRSYYSRTTGREGADDALQGRASPAHSVGSSASTTNYANDDRRRKWSTEEMEELMYCYYKARSAGPGYIRTLYTLFKDRNPNNPKVNRFDGNKLSNQARRIIKQNVISQELLNRIQQTAEGTSPSLNENIPNEVQVPNIDYIVDTDTPQFDTHQEQYTPDADLINELTSNIQVHEDQDPLILNFLQTLAETKETPVTNRLFLPKAKINKQFLRNLKTINDFLPNILVTNNNLLDINNIIYATAKTLILNNKQTPFKPKNTINPKSNPPWKKRIQIKIEKFRKELGQLIEIKRGIGTRRMIKIKEKLYAKYNICSENDHDNTSETLKQKIKALAARIKRYEDMNNRKNQNKLFSENEHKLYRSLGNNIDREIKLPTKERLQEFWTSALSNSTQYNTDAKWIKELESSVNTVETIDTVEITLEHIKTATKKLLNWKTPGIDQIQNYYLKYLTSIHTHLAKLFTNIVLGNENLEEWFTTGQVILIPKNNNNEDPKNWRPIACLCNIYKLLTSVLADVLYKHCQENHIIAIEQRGCRRGARGCKDHLMVNKAILEDAHQSQKNLSMAWIDYQKAFDTVSHQWLLRVLDIYKCPPMIKRFLQLSMPSWRVVMTARGSKEIVTTEPIYIRRGIFQGDSLSPLLFCLAVNPVSFILSKYELKGYKLKDSFWINHLLYMDDLKIYANTKNNLKVLLDSVETFTNDIGMSFGLDKCNVAHISAGHRNTATGEGHILLSGETFKQLAIGDRYKYLGIHESGKIEHSIIRDQVTKEYFKRVRKLLQTHLSARNIIKGINTYAIPVLLYSFGIINYKNNDLKKIDTKTRKLLAIKKAHQQKAEVERLYIPVADGGRGLINVEYIYKSQIVKYKQYLDTESDHLIKAIARHDIHRDKYSIKNDAKEIEREIQLPHNRQHTDTDIKNAIVKKQNSSWRLKQLHGQFPTKVLDQANIDTELSFKWLKKQHVSPGIESAVFAIQDQAVMTRQHQRDILKVPVDGKCRICQIKDETAQHIISGCEKLAGNYYVKRHNNLVQYVYWCLARKHNIEVSPLWWKENMIQPQVKENESAKILWEMPIQTDITVTHNRPDLIYVDKANNKTFLIDITVPSDYNIGAKEIEKLSKYHLLKTEVSRLWNTQTTIIPIVVGATGIVAKSLTRYIEKLETPIDISILQKQAAIHTTTILSKVLGDTVFVQNTDTLQQHTPTAPLINPPTDPQQNASTQRPHITTHTQDSISDTINTTQETERGRGRGRGRGRGRGRGRGRGRGRRTP

SEQ ID NO: 31769 - protein, 1300 aa, Euproctis similis
MESVNNVSSIGPLPGGDRRGTSGAGAGRSSHTNRQRLSAEQAGESRGTRSYYSRTTGREGADDALQGRASPAHSVGSSASTTNYANDDRRRKWSTEEMEELMFCYYKARSAGPGYIRTLFTLFKDRNPNNPKVNRFDGNKLSNQARRIIKQNVISQELLNRIQQTAEGTSPSLNENIPNEVQVPNIDYIVATDTPQFDTHQEQYTPDADLINELTSNIQVHEDQDPLILNFLQTLAETKETPVTNRLFLPKAKINKQFLRNLKTINDFLPNILVTNNNLLDINNIIYATAKTLILNNKQTPFKPKNTINPKSNPPWKKRIQIKIEKFRKELGQLIEIKRGIGTRRMIKIKEKLYAKYNICSENDHDNTSETLKQKIKALAARIKRYEDMNNRKNQNKLFSENEHKLYRSLGNNSDREIKLPTKERLEEFWTSVLSNSTQYNTDAKWIKELESSVNTVETIDTVEITLEHIKTATKKLLNWKTPGIDQIQNYYLKYLTSIHTHLAKLFTNIVLGNENLEEWFTTGQVILIPKNNNNEDPKNWRPIACLCSIYKLLTSVLADVLYKHCQENHIIAIEQRGCRRGARGCKDHLMVNKAILEDAHQSQKNLSMAWIDYQKAFDTVSHQWLLRVLDIYKCPPMIKRFLQLSMPSWRVVMTARGSKEIVTTEPIYIRRGIFQGDSLSPLLFCLAVNPVSFILSKYELKGYKLKDSFWINHLLYMDDLKIYANTKNNLKVLLDSVETFTNDIGMSFGLDKCNVAHISAGHRNTATGEGHILLSGETFKQLAIGDRYKYLGIHESGKIEHSIIRDQITKEYFKRVRKLLQTHLSARNIIKGINTYAIPVLLYSFGIINYKNNDLKKIDTKTRKLLAIKKAHQQKAEVERLYIPVADGGRGLINVEYIYKSQIVKYKQYLDTESDDLIKAIARHDIHRDKYSIKNDAKEIEREIQLPHNRQHTDTDIKNAIVKKQNSSWRLKQLHGQFPTKVLDQANIDTELSFKWLKKQHVSPGIESAVFAIQDQAVMTRQHQRDILKVPVDGKCRICQIKDETAQHIISGCEKLAGNYYVKRHNNLVQYVYWCLARKHNIEVSPLWWKENMIQPQVKENESAKILWEMPIQTDITVTHNRPDLIYVDKANNKTFLIDITVPSDYNIGAKEIEKLSKYHLLKTEVSRLWNTQTTIIPIVVGATGIVAKSLTRYIEKLETPIDISILQKQAAIHTTTILSKVLGDTVFVQNTDTLQQHTPTAPLINPPTDPQQNASTQRPHITTHTQDSISDTINTTQETERGRGRGRGRGRGRGRRTP

SEQ ID NO: 31770 - protein, 1295 aa, Euproctis similis
MESVNNVSSIGPLPGGDRRGTSGAGAGRSSHTNRQRLSAEQAGESRGTRSYYSRTTGREGADDALQGRASPAHSVGSSASTTNYANDDRRRKWSTEEMEELMFCYYKARSAGPGYIRTLFTLFKDRNPNNPKVNRFDGNKLSNQARRIIKQNVISQELLNRIQQTAEGTSPSLNENIPNEVQVPNIDYIVATDTPQFDTHQEQYTPDADLINELTSNIQVHEDQDPLILNFLQTLAETKETPVTNRLFLPKAKINKQFLRNLKTINDFLPNILVTNNNLLDINNIIYATAKTLILNNKQTPFKPKNTINPKSNPPWKKRIQIKIEKFRKELGQLIEIKRGIGTRRMIKIKEKLYAKYNICSENDHDNTSETLKQKIKALAARIKRYEDMNNRKNQNKLFSENEHKLYRSLGNNSDREIKLPTKERLEEFWTSVLSNSTQYNTDAKWIKELESSVNTVETIDTVEITLEHIKTATKKLLNWKTPGIDQIQNYYLKYLTSIHKHLAKLFTNIVLGNENLEEWFTTGQVILIPKNNNNEDPKNWRPIACLCSIYKLLTSVLADVLYKHCQENHIIAIEQRGCRRGARGCKDHLIVNKAILEDAHQSQKNLSMAWIDYQKAFDTVSHQWLLRVLDIYKCPPMIKRFLQLSMPSWRVVMTARGSKEIVTTEPIYIRRGIFQGDSLSPLLFCLAVNPVSFILSKYELKGYKLKDSFWINHLLYMDDLKIYANTKNNLKVLLDSVETFTNDIGMSFGLDKCNVAHISAGHRNTATGEGHILLSGETFKQLAIGDRYKYLGIHESGKIEHSIIRDQITKEYFKRVRKLLQTHLSARNIIKGINTYAIPVLLYSFGIINYKNNDLKKIDTKTRKLLAIKKAHQQKAEVERLYIPVADGGRGLINVEYIYKSQIVKYKQYLDTESDDLIKAIARHDIHRDKYSIKNDAKEIEREIQLPHNRQHTDTDIKNAIVKKQNSSWRLKQLHGQFPTKVLDQANIDTELSFKWLKKQHVSPGIESAVFAIQDQAVMTRQHQRDILKVPVDGKCRICQIKDETAQHIISGCEKLAGNYYVKRHNNLVQYVYWCLARKHNIEVSPLWWKENMIQPQVKENESAKILWEMPIQTDITVTHNRPDLIYVDKANNKTFLIDITVPSDYNIGAKEIEKLSKYHLLKTEVSRLWNTQTTIIPIVVGATGVVAKSITKYIEKLEAPIDISILQKQAAIHTTTILSKVLGDTVFVQNINTIQHHTPTVPLINPPTDPQLNANTQRSNSHTIIATQEPERSRGRGRGRGRGRGRGRGSRIP

SEQ ID NO: 31771 - protein, 1299 aa, Euproctis similis
MESVNNVSSIGPLPGGDRRGTSGAGAGRSSHTNRQRLSAEQAGESRGTRSYYSRTTGREGAEDALQGRASPTHSVGSSASTTNYANDDRRRKWSTEEMEELMYCYYKARSAGPGYIRTLFTLFKDRNPNNPKVNRFDGNKLSNQARRIIKQNVISQELLNRIQQTAEGTSPSLNENIPNEVQVPNIDYIVDTDTPQFDTHQEQYTPDADLINELTSNIQVHEDQDPLILNFLQTLAETKETPVTNRLFLPKAKINKQFLRNLKTINDFLPNILVTNNNLLDINNIIYATAKTLILNNKQTPFKPKNTINPKSNPPWKKRIQIKIEKFRKELGQLIEIKRGIGTRRMIKIKEKLYAKYNICSENDHDNTSETLKQKIKALAARIKRYEDMNNRKNQNKLFSENEHKLYRSLGNNSDREIKLPTKERLEEFWTSVLSNSTQYNADAKWIKELESSVNTVETIDTVEITLEHIKTATKKLLNWKTPGIDQIQNYYLKYLTSIHTHLAKLFTNIVLGNENLEEWFTTGQVILIPKNNNNEDPKNWRPIACLCSIYKLLTSVLADVLYKHCQVNHIIAIEQRGCRRGARGCKDHLMVNKAILEDAHQSQKNLSMAWIDYQKAFDTVSHQWLLRVLDIYKCPPMIKRFLQLSMPSWRVVMTARGSKEIVTTEPIYIRRGIFQGDSLSPLLFCLAVNPVSFILSKYELKGYKLKDSFWINHLLYMDDLKIYANTKNNLKVLLDSVETFTNDIGMSFGLDKCNVAHISAGHRNTATGEGHILLSGETFKQLAIGDRYKYLGIHESGKIEHYIIRDQITKEYFKRVRKLLQTHLSARNIIKGINTYAIPVLLYSFGIINYKNSDLKKIDTKTRKLLAIKKAHQQKAEVERLYIPVADGGRGLINVEYIYKSQIVKYKQYLDTESDDLIKAIVRHDIHRDKYSIKNDSKEIEREIQLPHNRQHTDTDIKNAIVKKQNSSWRLKQLHGQFPTKVLDQANIDTELSFKWLKKQHVSPGIESAVFAIQDQAVMTRQHQRDILKLPVDGKCRICQIKDETAQHIISGCEKLAGNYYVKRHNNLVQYVYWCLARKHNIEVSPLWWKENMIQPQVKENESAKILWEMPIQTDITVTHNRPDLIYVDKANNKTFLIDITVPSDYNIGAKEIEKLSKYHLLKTEVSRLWNTHTTIIPIVVGATGVVAKSLTRYIEKLETPIDISILQKQAAIHTTTILSKVLGDTVFVQNTDTLQHTPTAPLINPPTDPQQNASTQRSNITTHTPDSNSQTINATQELGRSRGRGRRRGRGRGRGTS

SEQ ID NO: 31772 - protein, 1199 aa, Euproctis similis
MYCYYKARSAGPGYIRTLFTLFKDRNPNNPKVNRFDGNKLSNLARRIIKQNVISQELLNRIQQTAEGTSPSLNDNIPNEVQVPNIDYIVDTDTPQFDTHQEQYTPDADLINELTSNIQVHEDQDPLILNFLQTLAETKETPVTNRLFLPKAKINNQFLRNLKTINDFLPNILVTNNNLLDINNIIYATAKTLILNNKQTPFKPKNTINPKSNPPWKKRIQIKIEKFRKELGQLIEIKRGIGTRRMIKIKEKLYAKYNICSENDHDNTSETLKQKIKALAARIKRYEDMNNRKNQNKLFSENEHKLYRSLGNNIDREIKLPTKERLEEFWTSVLSNSTQYNTDAKWIKELESSVNTVETIDTVEITLEHIKTATKKLLNWKTPGIDEIQNYYLKYLTSIHTHLAKLFTNIVLGNENLEEWFTTGQVILIPKNNNNEDPKNWRPIACLCSMYKLLTSVLADVLYKHCQENHIIAIEQRGCRRGARGCKDHLMVNKAILEDAHQSQKNLSMAWIDYQKAFDTVSHQWLLRVLDIYKCPPMIKRFLQLSMPSWRVVMTARGSKEIVTTEPIYIRRGIFQGDSLSPLLFCLAVNPVSFILSKYELKGYKLKDSFWINHLLYMDDLKIYANTKNNLKVLLDSVETFTNDIGMSFGLDKCNVAHISAGHRNTATGEGHILLSGETFKQLAIGDRYKYLGIHESGKIEHSIIRDQITKEYFKRVRKLLQTHLSARNIIKGINTYAIPVLLYSFGIINYKNNDLKKIDTKTRKLLAIKKAHQQKAEVERLYIPVADGGRGLINVEYIYKSQIVKYKQYLDTESDDLNKAIVRHDIHRDKYSIKNDAKEIEREIQLPHNRQHTDTDIKNAIVKKQNSSWRCKQLHGQFPTKVLDQANIDTELSFKWLKKQHVSPGIESAVFAIQDQAVMTRQHQRDILKLPVDGKCRICQIKDETAQHIISGCEKLAGNYYVKRHNNLVQYVYWCLARKHNIEVSPLWWKENMIQPQVKENEFAKILWEMPIQTDITVTHNRPDLIYVDKANNKTFLIDITVPSDYNIGAKEIEKLSKYHLLKTEVSRLWNTQITIIPIVVGATGVVANSLSRYIEKLETSIDISILQKQAAIHTTTILSKVLGDTVFVPNTDTLQQHTPTVPLINPPTDPQQNASTQRSNITTHTPDSNSQTINATQELGRSRGRGRRRGRGRGRGTS

SEQ ID NO: 31773 - protein, 1304 aa, Euproctis similis
MESVNNVSSIGPLPGGDRRGTSGAGAGRSSHTNRQRLSAEQAGESRGTRSYYSRTTGREGADDALQGRASPTHSVGSSASTTNYANDDRRRKWSTEEMEELMYCYYKARSAGPGYIRTLFTLFKDRNPNNPKVNRFDGNKLSNQARRIIKQNVISQELLNRIQQTAEGTSPSLNENIPNEVQVPNIDYIVDTDTPQFDTHQEQYTPDADLINELTSNIQVHEDQDPLILNFLQTLAETKETPVTNRLFLPKAKINKQFLRNLKTINDFLPNILVTNNNLLDINNIIYATAKTLILNNKQTPFKPKNTINPKSNPPWKKRIQIKIEKFRKELGQLIEIKRGIGTRRMIKIKEKLYAKYNICSENDHDNTSETLKQKIKALAARIKRYEDMNNRKNQNKLFSENEHKLYRSLGNNSDKEIKLPTKQRLEEFWMSVLSNSTQYNTDAKWIKELESSVNTVETIDTVEITLEHIKTATKKLLNWKTPGIDQIQNYYLKYLTSIHTHLAKLFTNIVLGNENLEEWFTTGQVILIPKNNNNEDPKNWRPIACLCSIYKLLTSVLADVLYKHCQVNHIVAIEQRGCRRGARGCKDHLMVNKAILEDAHQSQKNLSMAWIDYQKAFDTVSHQWLLRVLDIYKCPPMIKRFLQLSMPSWRVVMTARGSQEIVTTEPIYIRRGIFQGDSLSPLLFCLAVNPVSFILNKYELKGYKLKDSFWINHLLYMDDLKIYANTKNNLKVLLDSVETFTNDIGMSFGLDKCNVAHISAGHRNTATGEGHILLSGETFKQLAIGDRYKYLGIHESGKIEHAIIRDQITKEYFKRVRKLLQTHLSARNIIKGINTYAIPVLLYSFGIINYKINDIKKIDTKTRKLLAIKKAHQQKAEVERLYIPVSDGGRGLINVEYIYKSQIVKYKQYLDTEFDDLIRAIVKHDIHRDKYSIQKDAKEIEREIQLPHNRQHTDTDIKNAILKIQHSSWRLKQLHGQFPTKVLDQANINTELSFKWLKKQQVSPGIESAVFAIQDQAVMTRQHQRDILKLPVDGKCRICQIKDETAQHIISGCEKLAGNYCVKRHNNLVQYVYWCLARKHNVEVSPLWWKENMIQPQVKETESAKILWEMPVQTDITVTNNRPDLIYVDKVNNKTFLIDITVPSDYNIGAKEIEKLSKYHLLKTEVSRLWNTETTIIPIVVGATGVVAKSITKYIEKLEVPIDISILQKQAAIHTTTILSKVLGDTVFVQNIDTLQHHIPTVPLINPPTDPQLNANTQRSNITTHTQDSISDTINTTQETERGRGRGRGRGRGRGRGRGRRTP

SEQ ID NO: 31774 - protein, 954 aa, Euproctis similis
MIKIKEKLYAKYNICSENDHDNTSETLKQKIKALAARIKRYEDMNNRKNQNKLFSENEHKLYRSLGNNSDREIKLPTKERLEEFWTSVLSNSTQYNADAKWIKELESSVNTVETIDTVEITLEHIKTATKKLLNWKTPGIDQIQNYYLKYLTSIHTHLAKLFTNIVLGNENLEEWFTTGQVILIPKNNNNEDPKNWRPIACLCSIYKLLTSVLADVLYKHCQVNHIIAIEQRGCRRGARGCKDHLMVNKAILEDAHQSQKNLSMAWIDYQKAFDTVSHQWLLRVLDIYKCPPMIKRFLQLSMPSWRVVMTARGSKEIVTTEPIYIRRGIFQGDSLSPLLFCLAVNPVSFILSKYELKGYKLKDSFWINHLLYMDDLKIYANTKNNLKVLLDSVETFTNDIGMSFGLDKCNVAHISAGHRNTATGEGHILLSGETFKQLAIGDRYKYLGIHESGKIEHYIIRDQITKEYFKRVRKLLQTHLSARNIIKGINTYAIPVLLYSFGIINYKNSDLKKIDTKTRKLLAIKKAHQQKAEVERLYIPVADGGRGLINVEYIYKSQIVKYKQYLDTESDDLIKAIVRHDIHRDKYSIKNDSKEIEREIQLPHNRQHTDTDIKNAIVKKQNSSWRLKQLHGQFPTKVLDQANIDTELSFKWLKKQHVSPGIESAVFAIQDQAVMTRQHQRDILKLPVDGKCRICQIKDETAQHIISGCEKLAGNYYVKRHNNLVQYVYWCLARKHNIEVSPLWWKENMIQPQVKENESAKILWEMPIQTDITVTHNRPDLIYVDKANNKTFLIDITVPSDYNIGAKEIEKLSKYHLLKTEVSRLWNTHTTIIPIVVGATGVVAKSLTRYIEKLETPIDISILQKQAAIHTTTILSKVLGDTVFVQNTDTLQHTPTAPLINPPTDPQQNASTQRSNITTHTPDSNSQTINATQELGRSRGRGRRRGRGRGRGTS

SEQ ID NO: 31775 - protein, 1285 aa, Euproctis similis
MESVNNVSSIGPLPGGDRRGTSGAGAGRSSHTNRQRLSAEQAGESRGTRSYYSRTTGREGAEDALQGRASPTHSVGSSASTTNYANDDRRRKWSTEEMEELMYCYYKARSAGPGYIRTLFTLFKDRNPNNPKVNRFDGNKLSNQARRIIKQNVISQELLNRIQQTAEGTSPSLNENIPNEVQVPNIDYIVDTDTPQFDTHQEQYTPDADLINELTSNIQVHEDQDPLILNFLQTLAETKETPVTNRLFLPKAKINKQFLRNLKTINDFLPNILVTNNNLLDINNIIYATAKTLILNNKQTPFKPKNTINPKSNPPWKKRIQIKIEKFRKELGQLIEIKRGIGTRRMIKIKEKLYAKYNICSENDHDNTSETLKQKIKALAARIKRYEDMNNRKNQNKLFSENEHKLYRSLGNNSDREIKLPTKERLEEFWTSVLSNSTQYNADAKWIKELESSVNTVETIDTVEITLEHIKTATKKLLNWKTPGIDQIQNYYLKYLTSIHTHLAKLFTNIVLGNENLEEWFTTGQVILIPKNNNNEDPKNWRPIACLCSIYKLLTSVLADVLYKHCQVNHIIAIEQRGCRRGARGCKDHLMVNKAILEDAHQSQKNLSMAWIDYQKAFDTVSHQWLLRVLDIYKCPPMIKRFLQLSMPSWRVVMTARGSKEIVTTEPIYIRRGIFQGDSLSPLLFCLAVNPVSFILSKYELKGYKLKDSFWINHLLYMDDLKIYANTKNNLKVLLDSVETFTNDIGMSFGLDKCNVAHISAGHRNTATGEGHILLSGETFKQLAIGDRYKYLGIHESGKIEHYIIRDQITKEYFKRVRKLLQTHLSARNIIKGINTYAIPVLLYSFGIINYKNSDLKKIDTKTRKLLAIKKAHQQKAEVERLYIPVADGGRGLINVEYIYKSQIVKYKQYLDTESDDLIKAIVRHDIHRDKYSIKNDSKEIEREIQLPHNRQHTDTDIKNAIVKKQNSSWRLKQLHGQFPTKVLDQANIDTELSFKWLKKQHVSPGIESAVFAIQDQAVMTRQHQRDILKLPVDGKCRICQIKDETAQHIISGCEKLAGNYYVKRHNNLVQYVYWCLARKHNIEVSPLWWKENMIQPQVKENESAKILWEMPIQTDITVTHNRPDLIYVDKANNKTFLIDITVPSDYNIGAKEIEKLSKYHLLKTEVSRLWNTHTTIIPIVVGATGVVAKSLTRYIEKLETPIDISILQKQAAIHTTTILSKVLGDTVFVQNTDTLQHTPTAPLINPPTDPQQNASTQRSNITTHTPDSNSQTINATQELGRSLY

SEQ ID NO: 31776 - protein, 1300 aa, Euproctis similis
MESENNVSSIGPLPGGDRRGTSGAGAGRSSHTNRQRLSAEQAGESRGTRSYYSRTTGREGADDALQGRASPAHSVGSSASTTNYANDDRRRKWSTEEMEELMYCYYKARSAGPGYIRTLYTLFKDRNPNNPKVNRFDGNKLSNQARRIIKQNVISQELLNRIQQTAEGTSPSLNENIPNEVQVPNIDYIVDTDTPQFDTHQEQYTPDADLINELTSNIQVHEDQDPLILNFLQTLAETKETPVTNRLFLPKAKINKQFLRNLKTINDFLPNILVTNNNLLDINNIIYATAKTLILNNKQTPFKPKNTINPKSNPPWKKRIQIKIEKFRKELGQLIEIKRGIGTRRMIKIKEKLYAKYNICSENDHDNTSETLKQKIKALAARIKRYEDMNNRKNQNKLFSENEHKLYRSLGNNIDREIKLPTKERLQEFWTSALSNSTQYNTDAKWIKELESSVNTVETIDTVEITLEHIKTATKKLLNWKTPGIDQIQNYYLKYLTSIHTHLAKLFTNIVLGNENLEEWFTTGQVILIPKNNNNEDPKNWRPIACLCNIYKLLTSVLADVLYKHCQENHIIAIEQRGCRRGARGCKDHLMVNKAILEDAHQSQKNLSMAWIDYQKAFDTVSHQWLLRVLDIYKCPPMIKRFLQLSMPSWRVVMTARGSKEIVTTEPIYIRRGIFQGDSLSPLLFCLAVNPVSFILSKYELKGYKLKDSFWINHLLYMDDLKIYANTKNNLKVLLDSVETFTNDIGMSFGLDKCNVAHISAGHRNTATGEGHILLSGETFKQLAIGDRYKYLGIHESGKIEHSIIRDQITKEYFKRVRKLLQTHLSARNIIKGINTYAIPVLLYSFGIINYKNNDLKKIDTKTRKLLAIKKAHQQKAEVERLYIPVADGGRGLINVEYIYKSQIVKYKQYLDTESDDLIKAIARHDIHRDKYSIKNDAKEIEREIQLPHNRQHTDTDIKNAIVKKQNSSWRLKQLHGQFPTKVLDQANIDTELSFKWLKKQHVSPGIESAVFAIQDQAVMTRQHQRDILKVPVDGKCRICQIKDETAQHIISGCEKLAGNYYVKRHNNLVQYVYWCLARKHNIEVSPLWWKENMIQPQVKENESAKILWEMPIQTDITVTHNRPDLIYVDKANNKTFLIDITVPSDYNIGAKEIEKLSKYHLLKTEVSRLWNTQTTIIPIVVGATGIVAKSLTRYIEKLETPIDISILQKQAAIHTTTILSKVLGDTVFVQNTDTLQQHTPTAPLINPPTDPQQNASTQRPHITTHTQDSNSHTIIATQELGRSRGRGRRRGRGRGRGTP

SEQ ID NO: 31777 - protein, 1299 aa, Euproctis similis
MESENNVSSIGPLPGGDRRGTSGAGAGRSSHTNRQRLSAEQAGESRGTRSYYSRTTGREGADDALQGRASPAHSVGSSASTTNYANDDRRRKWSTEEMEELMYCYYKARSAGPGYIRTLYTLFKDRNPNNPKVNRFDGNKLSNQARRIIKQNVISQELLNRIQQTAEGTSPSLNENIPNEVQVPNIDYIVDTDTPQFDTHQEQYTPDADLINELTSNIQVHEDQDPLILNFLQTLAETKETPVTNRLFLPKAKINKQFLRNLKTINDFLPNILVTNNNLLDINNIIYATAKTLILNNKQTPFKPKNTINPKSNPPWKKRIQIKIEKFRKELGQLIEIKRGIGTRRMIKIKEKLYAKYNICSENDHDNTSETLKQKIKALAARIKRYEDMNNRKNQNKLFSENEHKLYRSLGNNSDREIKLPTKERLEEFWTSVLSNSTQYNADAKWIKELESSVNTVETIDTVEITLEHIKTATKKLLNWKTPGIDQIQNYYLKYLTSIHTHLAKLFTNIVLGNENLEEWFTTGQVILIPKNNNNEDPKNWRPIACLCSIYKLLTSVLADVLYKHCQVNHIIAIEQRGCRRGARGCKDHLMVNKAILEDAHQSQKNLSMAWIDYQKAFDTVSHQWLLRVLDIYKCPPMIKRFLQLSMPSWRVVMTARGSKEIVTTEPIYIRRGIFQGDSLSPLLFCLAVNPVSFILSKYELKGYKLKDSFWINHLLYMDDLKIYANTKNNLKVLLDSVETFTNDIGMSFGLDKCNVAHISAGHRNTATGEGHILLSGETFKQLAIGDRYKYLGIHESGKIEHYIIRDQITKEYFKRVRKLLQTHLSARNIIKGINTYAIPVLLYSFGIINYKNSDLKKIDTKTRKLLAIKKAHQQKAEVERLYIPVADGGRGLINVEYIYKSQIVKYKQYLDTESDDLIKAIVRHDIHRDKYSIKNDSKEIEREIQLPHNRQHTDTDIKNAIVKKQNSSWRLKQLHGQFPTKVLDQANIDTELSFKWLKKQHVSPGIESAVFAIQDQAVMTRQHQRDILKLPVDGKCRICQIKDETAQHIISGCEKPAGNYYVKRHNNLVQYVYWCLARKHNIEVSPLWWKENMIQPQVKENESAKILWEMPIQTDITVTHNRPDLIYVDKANNKTFLIDITVPSDYNIGAKEIEKLSKYHLLKTEVSRLWNTHTTIIPIVVGATGVVAKSLTRYIEKLETPIDISILQKQAAIHTTTILSKVLGDTVFVQNTDTLQHTPTAPLINPPTDPQQNASTQRSNITTHTPDSNSQTINATQELGRSRGRGRRRGRGRGRGTS

SEQ ID NO: 31778 - protein, 1299 aa, Euproctis similis
MESENNVSSIGPLPGGDRRGTSGAGAGRSSHTNRQRLSAEQAGESRGTRSYYSRTTGREGADDALQGRASPAHSVGSSASTTNYANDDRRRKWSTEEMEELMYCYYKARSAGPGYIRTLYTLFKDRNPNNPKVNRFDGNKLSNQARRIIKQNVISQELLNRIQQTAEGTSPSLNENIPNEVQVPNIDYIVDTDTPQFDTHQEQYTPDADLINELTSNIQVHEDQDPLILNFLQTLAETKETPVTNRLFLPKAKINKQFLRNLKTINDFLPNILVTNNNLLDINNIIYATAKTLILNNKQTPFKPKNTINPKSNPPWKKRIQIKIEKFRKELGQLIEIKRGIGTRRMIKIKEKLYAKYNICSENDHDNTSETLKQKIKALAARIKRYEDMNNRKNQNKLFSENEHKLYRSLGNNSDREIKLPTKERLEEFWTSVLSNSTQYNADAKWIKELESSVNTVETIDTVEITLEHIKTATKKLLNWKTPGIDQIQNYYLKYLTSIHTHLAKLFTNIVLGNENLEEWFTTGQVILIPKNNNNEDPKNWRPIACLCSIYKLLTSVLADVLYKHCQVNHIIAIEQRGCRRGARGCKDHLMVNKAILEDAHQSQKNLSMAWIDYQKAFDTVSHQWLLRVLDIYKCPPMIKRFLQLSMPSWRVVMTARGSKEIVTTEPIYIRRGIFQGDSLSPLLFCLAVNPVSFILSKYELKGYKLKDSFWINHLLYMDDLKIYANTKNNLKVLLDSVETFTNDIGMSFGLDKCNVAHISAGHRNTATGEGHILLSGETFKQLAIGDRYKYLGIHESGKIEHYIIRDQITKEYFKRVRKLLQTHLSARNIIKGINTYAIPVLLYSFGIINYKNSDLKKIDTKTRKLLAIKKAHQQKAEVERLYIPVADGGRGLINVEYIYKSQIVKYKQYLDTESDDLIKAIVRHDIHRDKYSIKNDSKEIEREIQLPHNRQHTDTDIKNAIVKKQNSSWRLKQLHGQFPTKVLDQANIDTELSFKWLKKQHVSPGIESAVFAIQDQAVMTRQHQRDILKLPVDGKCRICQIKDETAQHIISGCEKLAGNYYVKRHNNLVQYVYWCLARKHNIEVSPLWWKENMIQPQVKENESAKILWEMPIQTDITVTHNRPDLIYVDKANNKTFLIDITVPSDYNIGAKEIEKLSKYHLLKTEVSRLWNTHTTIIPIVVGATGVVAKSLTRYIEKLETPIDISILQKQAAIHTTTILSKVLGDTVFVQNTDTLQHTPTAPLINPPTDPQQNASTQRSNITTHTPDSNSQTINATQELGRSRGRGRRRGRGRGRGTS

SEQ ID NO: 31779 - protein, 990 aa, Dendrolimus kikuchii
MPKNTIKPKSDPVWKKRIQNKIEKLRKELGQLKEIKRGINTRRMINIKEKIYTKYNINNENDHNNVAETIKQKIKALAARIKRYEDINKKKEQNRLFIENEHRLYRSLGSNNSVDIKVPSKEAVEQFWTSILSNPIQYNPDARWIREVENSTNTINNTDVEDITEDQIKNAVKKLHNWKTPGIDKIQNYYLKYLTCTHTYLALLFTNIVVGHETLEEWFTTGQVILIPKNNNTEDPKNWRPIACLSNIYKLLTSVLADVLYNHCHTNNIIAIEQRGCRRGARGCKDHLMVNKAILEDAHQSQKNLSMAWIDYQKAFDTVSHDWILKVLDIYKCPSIIKRFLRLSMPSWRVIMTARGSREVITTDPIYIKRGIFQGDSLSPLLFCLVVNPISHILNKYELKGYKLKDSFWINHLLYMDDLKVYANNKRNLKVLLDSVEIFTSDIGMAFGLDKCNVIHITAGRRSNTVGEGHILLNGETFKQLEIGDSYKYLGIHESGKIEHSMIREQISKQYFKRIKKLLQTHLNSRNIIKGINTYAIPILLYSFGIINYKNSDLKKIDTKTRKLLAIKKVHQQKAEIERLYLPVAQGGRGLLNIESMYKTQIIKYKQYLNTEFDDLIKIIRKHDTQKEKYSIMKEAQDIQTELSLPDNNQHIDSEIKHAITKKRNLSWRAKPLHGQFPRKVLDQTNIDSELSFKWTQKQHVSPSTVSSIYAIQDQAVNTKQHQRDILKAPVDGKCRLCVTKDESAQHIISGCEKLAGTYYVNRHNNLVQYIYWCLARKHNIDVSPLWWHENMVQPQIKENNQAKILWEMPVQTDITVRHNRPDLIYIDKTNNKTFLIDITVPSDYNIGGKEIEKLSKYHLLKTEVSRLWNTQATVVPIVVGATGIVAKSINKYIEKLDALIDITILQKQAALHTTNILRKVLGDTVFVNNADTLNSTTQNTTQQPEHTSQSPHTLDRSDIHTLATQTHTVRGRTRGRRRRDTHTDTIQNQ

SEQ ID NO: 31780 - protein, 849 aa, Euproctis similis
MIKIKEKLYAKYNICSENDHDNTSETLKQKIKALAARIKRYEDMNNRKNQNRLFSENEHKLYRSLGNNSDREIKLPTKERLEEFWTSVLSNSTQYNADAKWIKELESSVNTVETIDTVEITLEHIKTATKKLLNWKTPGIDQIQNYYLKYLTSIHTHLAKLFTNIVLGNENLEEWFTTGQVILIPKNNNNEDPKNWRPIACLCSIYKLLTSVLADVLYKHCQENHIIAIEQRGCRRGARGCKDHLMVNKAILEDAHQSQKKLSMAWIDYQKAFDTVSHQWLLRVLDIYKCPPMIKRFLQLSMPSWRVVMTARGSQEIVTTEPIYIRRGIFQGDSLSPLLFCLAVNPVSFILSKYELKGYKLKDSFWINHLLYMDDLKIYANTKNNLKVLLDSVETFTNDIGMSFGLDKCNVAHISAGHRNTATGEGHILLSGETFKQLAIGDRYKYLGIHESGKIEHSIIRDQITKDYFKRVRKLLQTHLSARNIIKGINTYAIPVLLYSFGIINYKNSDLKKIDTKTRKLLAIKKAHQQKAEVERLYIPVADGGRGLINVEYIYKSQIVKYKQYLDTESDDLIKAIVRHDIHRDKYSIKNDAKEIEREIQLPHNRQHTDTDIKNAIVKKQNSSWRLKQLHGQFPTKVLDQANIDTELSFKWLKKQHVSPGIESAVFAIQDQAVMTRQHQRDILKLPVDGKCRICQIKDETAQHIISGCEKLAGNYYVKRHNNLVQYVYWCLARKHNIEVSPLWWKENMIQPQVKENESAKILWEMPIQTDITVTHNRPDLIYVDKANNKTFLIDITVPSDYNIGAKEIEKLSKYHLLKTEVSRLWNTQTTIIPIVVGATGVVAKSLSI

SEQ ID NO: 31781 - protein, 1295 aa, Euproctis similis
MESVNNVSSIGPLPGGDRRGTSGAGAGRSSHTNRQRLSAEQAGESRGTRSYYSRTTGREGADDALQGRASPAHSVGSSASTTNYANDDRRRKWSTEEMEELMFCYYKARSAGPGYIRTLFTLFKDRNPNNPKVNRFDGNKLSNQARRIIKQNVISQELLNRIQQTAEGTSPSLNENIPNEVQVPNIDYIVATDTPQFDTHQEQYTPDADLINELTSNIQVHEDQDPLILNFLQTLAETKETPVTNRLFLPKAKINKQFLRNLKTINDFLPNILVTNNNLLDINNIIYATAKTLILNNKQTPFKPKNTINPKSNPPWKKRIQIKIEKFRKELGQLIEIKRGIGTRRMIKIKEKLYAKYNICSENDHDNTSETLKQKIKALAARIKRYEDMNNRKNQNKLFSENEHKLYRSLGNNSDREIKLPTKERLEEFWTSVLSNSTQYNTDAKWIKELESSVNTVETIDTVEITLEHIKTATKKLLNWKTPGIDQIQNYYLKYLTSIHTHLAKLFTNIVLGNENLEEWFTTGQVILIPKNNNNEDPKNWRPIACLCSIYKLLTSVLADVLYKHCQENHIIAIEQRGCRRGARGCKDHLMVNKAILEDAHQSQKNLSMAWIDYQKAFDTVSHQWLLRVLDIYKCPPMIKRFLQLSMPSWRVVMTARGSKEIVTTEPIYIRRGIFQGDSLSPLLFCLAVNPVSFILSKYELKGYKLKDSFWINHLLYMDDLKIYANTKNNLKVLLDSVETFTNDIGMSFGLDKCNVAHISAGHRNTATGEGHILLSGETFKQLAIGDRYKYLGIHESGKIEHSIIRDQITKEYFKRVRKLLQTHLSARNIIKGINTYAIPVLLYSFGIINYKNNDLKKIDTKTRKLLAIKKAHQQKAEVERLYIPVADGGRGLINVEYIYKSQIVKYKQYLDTESDDLIKAIARHDIHRDKYSIKNDAKEIEREIQLPHNRQHTDTDIKNAIVKKQNSSWRLKQLHGQFPTKVLDQANIDTELSFKWLKKQHVSPGIESAVFAIQDQAVMTRQHQRDILKVPVDGKCRICQIKDETAQHIISGCEKLAGNYYVKRHNNLVQYVYWCLARKHNIEVSPLWWKENMIQPQVKENESAKILWEMPIQTDITVTHNRPDLIYVDKANNKTFLIDITVPSDYNIGAKEIEKLSKYHLLKTEVSRLWNTQTTIIPIVVGATGVVAKSITKYIEKLEAPIDISILQKQAAIHTTTILSKVLGDTVFVQNINTIQHHTPTVPLINPPTDPQLNANTQRSNSHTIIATQEPERSRGRGRGRGRGRGRGRGSRIP

SEQ ID NO: 31782 - protein, 1300 aa, Euproctis similis
MESVNNVSSIGPLPGGDRRGTSGAGAGRSSHTNRQRLSAEQAGESRGTRSYYSRTTGREGAEDALQGRASPTHSVGSSASTTNYANDDRRRKWSTEEMEELMYCYYKARSAGPGYIRTLFTLFKDRNPNNPKVNRFDGNKLSNQARRIIKQNVISQELLNRIQQTAEGTSPSLNENIPNEVQVPNIDYIVDTDTPQFDTHQEQYTPDADLINELTSNIQVHEDQDPLILNFLQTLAETKETPVTNRLFLPKAKINKQFLRNLKTINDFLPNILVTNNNLLDINNIIYATAKTLILNNKQTPFKPKNTINPKSNPPWKKRIQIKIEKFRKELGQLIEIKRGIGTRRMIKIKEKLYAKYNICSENDHDNTSETLKQKIKALAARIKRYEDMNNRKNQNKLFSENEHKLYRSLGNNSDREIKLPTKERLEEFWTSVLSNSTQYNADAKWIKELESSVNTVETIDTVEITLEHIKTATKKLLNWKTPGIDQIQNYYLKYLTSIHTHLAKLFTNIVLGNENLEEWFTTGQVILIPKNNNNEDPKNWRPIACLCSIYKLLTSVLADVLYKHCQENHIIAIEQRGCRRGARGCKDHLMVNKAILEDAHQSQKNLSMAWIDYQKAFDTVSHQWLLRVLDIYKCPPMIKRFLQLSMPSWRVVMTARGSKEIVTTEPIYIRRGIFQGDSLSPLLFCLAVNPVSFILSKYELKGYKLKDSFWINHLLYMDDLKIYANTKNNLKVLLDSVETFTNDIGMSFGLDKCNVAHISAGHRNTATGEGHILLSGETFKQLATGDRYKYLGIHESGKIEHSIIRDQITKEYFKRVRKLLQTHLSARNIIKGINTYAIPVLLYSFGIINYKNNDLKKIDTKTRKLLAIKKAHQQKAEVERLYIPVADGGRGLINVEYIYKSQIVKYKQYLDTESDDLIKAIVRHDIHRDKYSIKNDAKEIEREIQLPHNRQHADTDIKNAIVKKQNSSWRLKQLHGQFPTKVLDQANIDTELSFKWLKKQHVSPGIESAVFAIQDQAVMTRQHQRDILKLPVDGKCRICQIKDETAQHIISGCEKLAGNYYVKRHNNLVQYVYWCLARKHNIEVSPLWWKENMIQPQVKENESAKILWEMPIQTDITVTHNRPDLIYVDKANNKTFLIDITVPSDYNIGAKEIEKLSKYHLLKTEVSRLWNTQTTIIPIVVGATGVVAKSLSRYIEKLETPIDISILQKQAAIHTTTILSKVLGDTVFVQNTDTLQQHTPTAPLINPPTDPQQNTSTQRSNITTHTPDSNSQTINATQELGRSRGRGRRRGRGRGRGTS

SEQ ID NO: 31783 - protein, 1198 aa, Euproctis similis
MEELMFCYYKARSAGPGYIRTLFTLFKDRNPNNPKVNRFDGNKLSNQARRIIKQNVISQELLNRIQQTAEGTSPSLNENIPNEVQVPNIDYIVATDTPQFDTHQEQYTPDADLINELTSNIQVHEDQDPLILNFLQTLAETKETPVTNRLFLPKAKINKQFLRNLKTINDFLPNILVTNNNLLDINNIIYATAKTLILNNKQTPFKPKNTINPKSNPPWKKRIQIKIEKFRKELGQLIEIKRGIGTRRMIKIKEKLYAKYNICSENDHDNTSETLKQKIKALAARIKRYEDMNNRKNQNKLFSENEHKLYRSLGNNSDREIKLPTKERLEEFWTSVLSNSTQYNTDAKWIKELESSVNTVETIDTVEITLEHIKTATKKLLNWKTPGIDQIQNYYLKYLTSIHTHLAKLFTNIVLGNENLEEWFTTGQVILIPKNNNNEDPKNWRPIACLCSIYKLLTSVLADVLYNHCQENHIIAIEQRGCRRGARGCKDHLMVNKAILEDAHQSQKNLSMAWIDYQKAFDTVSHQWLLRVLDIYKCPPMIKRFLQLSMPSWRVVMTARGSKEIVTTEPIYIRRGIFQGDSLSPLLFCLAVNPVSFILSKYELKGYKLKDSFWINHLLYMDDLKIYANTKNNLKVLLDSVETFTNDIGMSFGLDKCNVAHISAGHRNTATGEGHILLSGETFKQLAIGDRYKYLGIHESGKIEHSIIRDQITKEYFKRVRKLLQTHLSARNIIKGINTYAIPVLLYSFGIINYKNNDLKKIDTKTRKLLAIKKAHQQKAEVERLYIPVADGGRGLINVEYIYKSQIVKYKQYLDTESDDLIKAIARHDIHRDKYSIKNDAKEIEREIQLPHNRQHTDTDIKNAIVKKQNSSWRLKQLHGQFPTKVLDQANIDTELSFKWLKKQHVSPGIESAVFAIQDQAVMTRQHQRDILKVPVDGKCRICQIKDETAQHIISGCEKLAGNYYVKRHNNLVQYVYWCLARKHNIEVSPLWWKENMIQPQVKENESAKILWEMPIQTDITVTHNRPDLIYVDKANNKTFLIDITVPSDYNIGAKEIEKLSKYHLLKTEVSRLWNTQTTIIPIVVGATGVVAKSITKYIEKLEAPIDISILQKQAAIHTTTILSKVLGDTVFVQNINTIQHHTPTVPLINPPTDPQLNANTQRSNSHTIIATQEPERSRGRGRGRGRGRGRGRGSRIP

SEQ ID NO: 31784 - protein, 1300 aa, Euproctis similis
MESVNNVSSIGPLPGGDRRGTSGAGAGRSSHTNRQRLSAEQAGESRGTQSYYSRTTGREGADDALQGRASPAHSVGSSASTTNNANDDRRRKWSTEEMEELMFCYYKARSAGPGYIRTLFTLFKDRNPNNPKVNRFDGNKLSNQARRIIKQNVISQELLNRIQQTAEGTSPSLNENIPNEVQVPNIDYIVETDTPQFDTHQEQYTPDADLINELTSNIQVHEDQDPLILNFLQTLAETKETPVTNRLFLPKAKINKQFLRNLKTINDFLPNILVTNNNLLDINNIIYATAKTLILNNKQTPFKPKNTINPKSNPPWKKRIQIKLEKFRKELGQLIEIKRGIGTRRMIKIKEKLYAKYNICSENDHDNTSETLKQKIKALAARIKRYEDMNNRKNQNKLFSENEHKLYRSLGNNSDREIKLPTKERLEEFWTSVLSNSTQYNTDAKWIKELESSVNTVETIDTVEITLEHIKTATKKLLNWKTPGIDQIQNYYLKYLTSIHTHLAKLFTNIVLGNENLEEWFTTGQVILIPKNNNNEDPKNWRPIACLCSIYKLLTSVLADVLYKHCQENHIIAIEQRGCRRGARGCKDHLMVNKAILEDARQSQKNLSMAWIDYQKAFDTVSHQWLLRVLDIYKCPPMIKRFLQLSMPSWRVVMTARGSKEIVTTEPIYIRRGIFQGDSLSPLLFCLAVNPVSFILSKYELKGYKLKDSFWINHLLYMDDLKIYANTKNNLKVLLDSVETFTNDIGMSFGLDKCNVAHISAGHRNTATGEGHILLSGESFKQLAIGDRYKYLGIHESGKIEHAIIRDQITKEYFKRVKKLLQTHLSARNIIKGINTYAIPVLLYSFGIINYKNSDLKKIDTKTRKLLAIKKAHQQKAELERLYIPVADGGRGLINVEYIYKSQIVKYKQYLDTQSDDLIKAIVRHDIHRDKYSIKNDAKEIEREIQLPHNRQHTDTDIKNAIVKKQNSSWRLKQLHGQFPTKVLDQANIDTELSFKWLKKQHVSPGIESAVFAIQDQAVMTRQHQRDILKLPVDGKCRICQIKDETAQHIISGCEKLAGNYYVKRHNNLVQYVYWCLARKHNIEVSPLWWKENMIQPQVKENESAKILWEMPIQTDITVTHNRPDLIYVDKANNKTFLIDITVPSDYNIGAKEIEKLSKYHLLKTEVSRLWNTQTTIIPIVVGATGVVAKSLTRYIEKLETPIDISILQKQAAIHTTTILSKVLGDTVFVQNTDTLQQHTPTAPLINPPTDPQQNTSTQRSNITTHTPDSNSQTIIATQELGRSGGRGRRRGRGRGRGTS

SEQ ID NO: 31785 - protein, 1308 aa, Euproctis similis
MESENNVSSIGPLPGGDRRGTSGAGAGRSSHTNRQRLSAEQAGESRGTRSYYSRTTGREGADDALQGRASPAHSVGSSASTTNYANDDRRRKWSTEEMEELMYCYYKARSAGPGYIRTLYTLFKDRNPNNPKVNRFDGNKLSNQARRIIKQNVISQELLNRIQQTAEGTSPSLNENIPNEVQVPNIDYIVDTDTPQFDTHQEQYTPDADLINELTSNIQVHEDQDPLILNFLQTLAETKETPVTNRLFLPKAKINKQFLRNLKTINDFLPNILVTNNNLLDINNIIYATAKTLILNNKQTPFKPKNTINPKSNPPWKKRIQIKIEKFRKELGQLIEIKRGIGTRRMIKIKEKLYAKYNICSENDHDNTSETLKQKIKALAARIKRYEDMNNRKNQNKLFSENEHKLYRSLGNNIDREIKLPTKERLQEFWTSALSNSTQYNTDAKWIKELESSVNTVETIDTVEITLEHIKTATKKLLNWKTPGIDQIQNYYLKYLTSIHTHLAKLFTNIVLGNENLEEWFTTGQVILIPKNNNNEDPKNWRPIACLCNIYKLLTSVLADVLYKHCQDNHIIAIEQRGCRRGARGCKDHLMVNKAILEDAHQSQKNLSMAWIDYQKAFDTVSHQWLLRVLDIYKCPPMIKRFLQLSMPSWRVVMTARGSKEIVTTEPIYIRRGIFQGDSLSPLLFCLAVNPVSFILSKYELKGYKLKDSFWINHLLYMDDLKIYANNKNNLKVLLDSVETFTNDIGMSFGLDKCNVAHISAGHRNTATGEGHILLSGETFKQLAIGDRYKYLGIHESGKIEHSIIRDQVTKEYFKRVRKLLQTHLSARNIIKGINTYAIPVLLYSFGIINYKNNDLKKIDTKTRKLLAIKKAHQQKAEVERLYIPVADGGRGLINVEYIYKSQIVKYKQYLDTESDHLIKAIARHDIHRDKYSIKNDAKEIEREIQLPHNRQHTDTDIKNAIVKKQNSSWRLKQLHGQFPTKVLDQANIDTELSFKWLKKQHVSPGIESAVFAIQDQAVMTRQHQRDILKVPVDGKCRICQIKDETAQHIISGCEKLAGNYYVKRHNNLVQYVYWCLARKHNIEVSPLWWKENMIQPQVKENESAKILWEMPIQTDITVTHNRPDLIYVDKANNKTFLIDITVPSDYNIGAKEIEKLSKYHLLKTEVSRLWNTQTTIIPIVVGATGIVAKSLTRYIEKLETPIDISILQKQAAIHTTTILSKVLGDTVFVQNTDTLQQHTPTAPLINPPTDPQQNASTQRPHITTHTQDSISDTINTTQETERGRGRGRGRGRGRGRGRGRGRGRRTP

SEQ ID NO: 31786 - protein, 1300 aa, Euproctis similis
MESVNNVSSIGPLPGGDRRGTSGAGAGRSSHTNRQRLSAEQAGESRGTRSYYSRTTGREGADDALQGRASPAHSVGSSASTTNYANDDRRRKWSTEEMEELMFCYYKARSAGPGYIRTLFTLFKDRNPNNPKVNRFDGNKLSNQARRIIKQNVISQELLNRIQQTAEGTSPSLNENIPNEVQVPNIDYIVATDTPQFDTHQEQYTPDADLINELTSNIQVHEDQDPLILNFLQTLAETKETPVTNRLFLPKAKINKQFLRNLKTINDFLPNILVTNNNLLDINNIIYATAKTLILNNKQTPFKPKNTINPKSNPPWKKRIQIKIEKFRKELGQLIEIKRGIGTRRMIKIKEKLYAKYNICSENDHDNTSETLKQKIKALAARIKRYEDMNNRKNQNKLFSENEHKLYRSLGNNSDREIKLPTKERLEEFWTSVLSNSTQYNTDAKWIKELESSVNTVETIDTVEITLEHIKTATKKLLNWKTPGIDQIQNYYLKYLTSIHTHLAKLFTNIVLGNENLEEWFTTGQVILIPKNNNNEDPKNWRPIACLCSIYKLLTSVLADVLYKHCQENHIIAIEQGGCRRGARGCKDHLMVNKAILEDAHQSQKNLSMAWIDYQKAFDTVSHQWLLRVLDIYKCPPMIKRFLQLSMPSWRVVMTARGSKEIVTTEPIYIRRGIFQGDSLSPLLFCLAVNPVSFILSKYELKGYKLKDSFWINHLLYMDDLKIYANTKNNLKVLLDSVETFTNDIGMSFGLDKCNVAHISAGHRNTATGEGHILLSGETFKQLAIGDRYKYLGIHESGKIEHSIIRDQITKEYFKRVRKLLQTHLSARNIIKGINTYAIPVLLYSFGIINYKNNDLKKIDTKTRKLLAIKKAHQQKAEVERLYIPVADGGRGLINVEYIYKSQIVKYKQYLDTESDDLIKAIARHDIHRDKYSIKNDAKEIEREIQLPHNRQHTDTDIKNAIVKKQNSSWRLKQLHGQFPTKVLDQANIDTEFSFKWLKKQHVSPGIESAVFAIQDQAVMTRQHQRDILKVPVDGKCRICQIKDETAQHIISGCEKLAGNYYVKRHNNLVQYVYWCLARKHNIEVSPLWWKENMIQPQVKENESAKILWEMPIQTDITVTHNRPDLIYVDKANNKTFLIDITVPSDYNIGAKEIEKLSKYHLLKTEVSRLWNTQTTIIPIVVGATGIVAKSLTRYIEKLETPIDISILQKQADIHTTTILSKVLGDTVFVQNTDTLQQHTPTAPLINPPTDPQQNASTQRPHITTHTQDSISDTINTTQETERGRGRGRGRGRGRGRRTP

SEQ ID NO: 31787 - protein, 1333 aa, Parnassius apollo
MMERQLRSTIIGPLPEGERRGTSGADAGRDSVRAVSGSLLSRRARVGEPENITADQREGVGMGDALQSTDLPTSSAGSSSMTINNTEHDDRRRKWSTEELQELMFCYFKARSIGPGYIDRLQKLFTERNPNNPKIHKFNGNTLSNQARRIIKQNVLSQELLNRIRKDAEGITPVDNSNSNVIGVQDTQPTLTHITEQNLQHTIELAETIDQMTSNIVVNEDQDPLILHFLQILAETNETRLEDRVFLPKAKINRRFLENLHTLNSYLPNLLITNNSLREINNIIYAAAKTLILNNNQKPYITNNIIKPKCDPPWKKRIQTKIDIFRKELGQLIEIEKGIKTRRMMKIKEKLYTKYSIRNDNDHNNITETIRQKVKALAGRIKRYEDINTRKAQNRFFNESEHRFYRSLGCSNNKDIKIPSKEEVEVFWNSILSNQTQYNLNANWIKEVEMLSSEIHREDTQEITEDQVKFAIRKLLNWKSPGMDKIQNYYLKYLTSVHKYIASLFTKIVSGTEIMEEWFVTGQVTLIPKNENTENPKNWRPIACLPSMYKLLTSIVANVLYSHCDKNNIMAVEQRGCRRGARGCKDHLMVNKAILEDAHQAQKNLSMAWIDYQKAFDSISHEWILKVLDVYKCPLMIKRFLQLAMPLWRVIMTARGSHDSVTTEPIYVRRGIFQGDSLSPLLFCLAINPISCILNKYKLKGYKLKDSFWINHLLYMDDLKVYANNKSNLKVLLDSVEVFTSDIGMRFGIDKCKTIHLSSGYRSNAIGEGHILLSGETFEQLAIGDKYKYLGIHESGKIEHSIIRDQITKEYFKRIKKLLNTHLNSRYLIKGINTYAVPVLLYSFGIINYKNNDLKKIDIKTRKLLSIKKVHQQKAEIERLYLPVTQGGRGLINIEYMYKAQIVKYKQYLKTESDYLIKIIMQHDIHRDKYSIIKEAQEIERELHLTQENTYTDKEIKMAIVKRHNELWRTKPLHGQFLKKVLDQANIDIELSYQWLKRQQVSPSTESSIFAIQDQSINTRQHQRDILNEPVDGKCRLCSYKDETTQHIISGCDKLVGTYYVKRHDNLVQYVYWCLAKKNKMEVSNLWWQETLIRPQIKENEFAKIMWEMPVQTDISVTHNRPDLIYVDKTSNKTFLIDITVPSDYNIGPKEIEKLSKYHLLKTEVSRLWNTQATVIPIVIGATGVVAKSIRKYIDKLDSHINISILQKQAAIHTSTILTKVLGDTVFVHNQPDHLHIQITQQSSNTQQSPSTTDTINTTNTSNIQRSLNIQEQHMQTMQQSLGITDIQQSLNAPNSSNTNYNPNVQQSLNSRQKRGRGRKRMRKDEQNTENTS

SEQ ID NO: 31788 - protein, 1333 aa, Parnassius apollo
MMERQLRSTIIGPLPEGERRGTSGADAGRDSVRAVSGSLLSRRARVGEPENITADQRERMGMGDALQSTDLPTSSAGSSSMTINNTEHDDRRRKWSTEELQELMFCYFKARSIGPGYIDRLQKLFTERNPNNPKIHKFNGNTLSNQARRIIKQNVLSQELLNRIRKDAEGITPVDNSNSNVIGVQDTQPTLTHITEQNLQHTIELAETIDQMTSNIVVNEDQDPLILHFLQILAETNETRLEDRVFLPKAKINRRFLENLHTLNNYLPNLLITNNSLREINNIIYAAAKTLILNNNQKPYITNNIIKPKCDPPWKKRIQTKIDIFRKELGQLIEIEKGIKTRRMMKIKEKLYTKYSIRNDNDHNNITETIRQKVKALAGRIKRYEDINTRKAQNRFFNESEHRFYRSLGCSNNKDIKIPSKEEVEVFWNSILSNQTQYNLNANWIKEVEMLSSEIHREDTQEITEDQVKFAIRKLLNWKSPGMDKIQNYYLKYLTSVHKYIASLFTKIVSGTEIMEEWFVTGQVTLIPKNENTENPKNWRPIACLPSMYKLLTSILANVLYSHCDKNNIMAVEQRGCRRGARGCKDHLMVNKAILEDAHQAQKNLSMAWIDYQKAFDSISHEWILKVLDVYKCPLMIKRFLQLAMPLWRVIMTARGSHDSVTTEPIYVRRGIFQGDSLSPLLFCLAINPISCLLNKYKLKGYKLKDSFWINHLLYMDDLKVYANNKSNLKVLLDSVEVFTSDIGMRFGIDKCKTIHLSSGYRSNAIGEGHILLSGETFEQLAIGDKYKYLGIHESGKIEHSIIRDQITKEYFKRIKKLLNTQLNSRYLIKGINTYAVPVLLYSFGIINYKNNDLKKIDIKTRKLLSIKKVHQQKAEIERLYLPVTQGGRGLINIEYMYKAQIVKYKQYLKTESDYLIKIIMQHDIHRDKYSIIKEAQEIERELHLTQENTYTDKEIKMAIVKRHNELWRTKPLHGQFLKKVLDQANIDVELSYQWLKRQQVSPSTESSIFAIQDQSINTRQHQRDILNEPVDGKCRLCSYKDETTQHIISGCDKLVGTYYVKRHDNLVQYVYWCLAKKNKMEVSNLWWQETVIRPQIKENEFAKIMWEMPVQTDISVTHNRPDLIYVDKTSNKTFLIDITVPSDYNIGPKEIEKLSKYHLLKTEVSRLWNTQATVIPIVIGATGVVAKSIRKYIDKLDSHINISILQKQAAIHTSTILTKVLGDTVFVHNQPDHLHIQITQQSSNTQQSPSTTDTINTTNTSNIQRSLNIQEQHMQTMQQSLGITDIQQSLNAPNSSNTNYNPNVQQSLNSRQKRGRGRKRMRKDEQNTENTS

SEQ ID NO: 31789 - protein, 1122 aa, Parnassius apollo
MTSNIVVNEDQDPLILHFLQILAETNETRLEDRVFLPKAKINRRFLENLHTLNSYLPNLLITNNSLREINNIIYAAAKTLILNNNQKPYITNNIIKPKCDPPWKRRIQTKIDIFRKELGQLIEIEKGIKTRRMMKIKEKLYTKYSIRNDNDHNNITETIRQKVKALAGRIKRYEDINTRKAQNRFFNESEHRFYRSLGCSNNKDIKIPSKEEVEVFWNSILSHQTQYNLNANWIKEVEMLSSEIHREDTQEITEDQVKFAIRKLLNWKSPGMDKIQNYYLKYLTSVHKYIASLFTKIVSGTEIMEEWFVTGQVTLIPKNESTENPKNWRPIACLPSMYKLLTSILANVLYSHCDKNNIMAVEQRGCRRGARGCKDHLMVNKAILEDAHQAQKNLSMAWIDYQKAFDSISHEWILKVLDVYKCPLMIKRFLQLAMPLWRVIMTARGSHDSVTTEPIYVRRGIFQGDSLSPLLFCLAINPISCILNKYKLKGYKLKDSFWINHLLYMDDLKVYANNKSNLKVLLDSVEVFTSDIGMRFGIDKCKTIHLSSGYRSNAIGEGHILLSGETFEQLAIGDKYKYLGIHESGKIEHNIIRDQITKEYFKRIKKLLNTHLNSRYLIKGINTYAVPVLLYSFGIINYKNNDLKKIDIKTRKLLSIKKVHQQKAEIERLYLPVTQGGRGLINIEYMYKAQIVKYKQYLKTESDYLIKIIMQHDIHRDKYSIIKEAQEIERELHLTQENTYTDKEIKMAIVKRHNELWRTKPLHGQFLKKVLDQANIDIELSYQWLKRQQVSPSTESSIFAIQDQSINTRQHQRDILNEPVDGKCRLCSYKDETTQHIISGCDKLVGTYYVKRHDNLVQYVYWCLAKKNKMEVSNLWWQETLIRPQIKENEFAKIMWEMPVQTDISVTHNRPDLIYVDKTSNKTFLIDITVPSDYNIGPKEIEKLSKYHLLKTEVSRLWNTQATVIPIVIGATGVVAKSIRKYIDKLDSHINISILQKQAAIHTSTILTKVLGDTVFVHNQPDHLHIQITQQSSNTQQSPSTTDTINTTNTSNIQRSLNIQEQHMQTMQQSLGITDIQQSLNAPNSSNTNYNPNVQQSLNSRQKRGRGRKRMRKDEQNTENTS

SEQ ID NO: 31790 - protein, 1276 aa, Atrophaneura dixoni
MGMGDALQSTDLPTSSAGSSSMTTNNTEHDDRRRKWSTEELQELMFCYFKARSIGPGYIGRLQKLFTERNPNNPKIHKFNGNTLSNQARRIIKQNVLSQELLNRIRKEAEGITPVDNSNSNDIVVQDTQPTLTHITEQNLQQTQHKIEQVETIGQMTSNIVVNDDQDPLILHFLQILAETNETRLEDRVFLPKAKINRRFLENLHTLNNYLPNLLITNNSLREINNIIYAAAKTLILNNNQKPYITNNIIKTKCDPPWKKRIQTKIDIFRKELGQLIEIEKRIKTRRMMKIKEKLYTKYIIRNDSDHNNITETIRQKVKALAGRIKRYEDINTRKAQNRLFNENEHRFYRSLGCSNNKDIKIPSKGEVEVFWNSILSNQTQYNLNANWIKEVEMLSSEIHREDTQEITEDQVKFAIRKLLNWKSPGMDKIQNYYLKYLTSVHKYIASLFTKIVSGTEIMEEWFVTGQVILIPKNENTENPKNWRPIACLPSMYKLLTSILANVLYNHCDKNNIMAVEQRGCRRGTRGCKDHLMVNKAILEDAHQAQKNLSMAWIDYQKAFDSVSHEWLLKVLDVYKCPLIIKRFLQLAMPLWRVIMTARGSHDSVTTEPIYVRRGIFQGDSLSPLLFCLAINPLSCILNKYKLKGYKLKDGFWINHLLYMDDLKVYANNKSNLKVLLDSVEVFTSDIGMRFGLDKCKTIHLSSGYRSNAIGEGHILLSGETFEQLAIGDKYKYLGIHESGKIEHSIIRDQITKEYFKRIKKLLNTHLNSRYLIKGINTYAVPVLLYSFGIINYKNNDLKKIDIKTRKLLAIKKVHQQKAEIERLYLPVTQGGRGLINIEYMYKAQIVKYKQYLKTESDYLIKIIMQHDIHRDKYSIIKEAQEIERELNLTQEYTYTDKEIKMAIVKRHNELWRTKPLHGQFPKKVLDQANIDIELSYQWLKRQQVSPSTESSIFAIQDQAINTRQHQRDILNEPVDGKCRLCSCKDETTQHIISGCDKLVGTYYVKRHDNLVQYVYWCLAKKNKIEVSNLWWQETLIRPQIKENEFAKIMWEMPVQTDITVTHNRPDLIYVDKTSNKTFLIDITVPSDYNIGPKEIEKLSKYHLLKTEVSRLWNTQATVIPIVIGATGVVAKSIRKYIDKLDSHINISILQKQAAIHTSTILTKVLGDTVFVHNQPDHLHIQITQQSSNTQQSPRTTDTINTTNTSNIQRSLNIQEQHMQTMQQSLGITGIQQSLNAPNSSNTYNPNVQQSLNSRQKRGRGRKRMRKDEQLTESTS

SEQ ID NO: 31791 - protein, 1270 aa, Parnassius apollo
MLCRVRTYLQALTDSSSMTTNNTAHDDRRRKWSTEELQELMFCYFKARSIGPGYIGRLQKLFIERNPNNPKIHKFNGNTLSSQARRIIKQNVLSQELLNRIRKEAEGITPVDNSNSNDIGVQDTQPTLTHITEQNLQHTIELAETIDQMTSNIVVNEDQDPLILHFLQILAETNETRLEDRVFLPKAKINRRFLENLHTLNNYLPNLLITNNSLREINNIIYAAAKTLILNNNQKPYITNNIIKPKCDPPWKKRIQTKIDIFRKELGQLIEIEKGIKTRRMMKIKEKLYTKYSIRNDNDHNNITETIRQKVKALAGRIKRYEDINTRKAQNRFFNESEHRFYRSLGCSNNKDIKIPSKEEVEVFWNSILSNQTQYNLNANWIKEVEMLSSEIHREDTQEITEDQVKFAIRKLLNWKSPGMDKIQNYYLKYLTSVHKYIASLFTKIVSGTEIMEEWFVTGQVTLIPKNENTENPKNWRPIACLPSMYKLLTSILANVLYSHCDKNNIMAVEQRGCRRGARGCKDHLMVNKAILEDAHQAQKNLSMAWIDYQKAFDSISHEWILKVLDVYKCPLMIKRFLQLAMPLWRVIMTARGSHDSVTTEPIYVRRGIFQGDSLSPLLFCLAINPISCILNKYKLKGYKLKDSFWINHLLYMDDLKVYANNKSNLKVLLDSVEVFTSDIGMRFGIDKCKTIHLSSGYRSNAIGEGHILLSGETFEQLAIGDKYKYLGIHESGKIEHSIIRDQITKEYFKRIKKLLNTHLNSRYLIKGINTYAVPVLLYSFGIINYKNNDLKKIDIKTRKLLSIKKVHQQKAEIERLYLPVTQGGRGLINIEYMYKAQIVKYKQYLKTESDYLIKIIMQHDIHRDKYSIIKEAQEIERELHLTQENTYTDKEIKMAIVKRHNELWRTKPLHGQFPKKVLDQANIDIELSYQWLKRQQVSPSTESSIFAIQDQSINTRQHQRDILNEPVDGKCRLCSYKDETTQHIISGCDKLVGTYYVKRHDNLVQYVYWCLAKKNKMEVSNLWWQETLIRPQIKENEFAKIMWEMPVQTDITVTHNRPDLIYVDKTSNKTFLIDITVPSDYNIGPKEIEKLSKYHLLKTEVSRLWNTQATVIPIVIGATGVVAKSIRKYIDKLDSHINISILQKQAAIHTSTILTKVLGDTVFVHNQPDHLHIQITQQSSNTQQSPSTTDTINTTNTSNIQRSLNIQEQHMQTMQQSLGITDIQQSLNAPNSSNTNYNPNVQQSLNSRQKRGRGRKRMRKDEQNTENTS

SEQ ID NO: 31792 - protein, 990 aa, Parnassius imperator
MMKIKKKLYIKYSIWNDNDHSNITETIKQKVKALAGRIKRYEDINTRKIHNRLFNENEHRLYRSLGCNNNKDTKIPSKEGVEEFWNSILSSRTQYNIDANWIKEVEMLSSEIHREDSQEITEDQVKFAARKLLNWKSPGIDKIQNYYLKYLTSAHKYLASLFTKIVSGTEIIDEWFVTGQAILIPKNENTENPKNWRPIACLPSMYKLLTSVLANVLYSHCDKNNIMAVEQRGCRRGARGCKDHLMVNKAILEDAHQTQKNLSMAWIDYQKAFDSISHEWLLKVLDVYKCPLMIKRFLQLAMPLWRVIMTARGSHDSVTTEPIYVRRGIFQGDSLSPLLFCLSINPLSYILNKYELKGYKLKDSFWINHLLYMDDLKVYANNKSNLKVMLDSVEVFTNDIGMQFGLDKCKTIHLNSGYRSNAIGEGHILLSRESFEQLAIGDRYKYLGIHESGKIEHSVIRDQITKEYFNRIKKLLNTHLNSRYLIKGINTYAVPVLLYSFGVINYKNSDLKKIDIKTRKLLAIKKVHQQKAEIERLYLPITQGGRGLTNIEYMYKAQIVKYKQYLKTESDYLIKIIMQHDTQRDKYSIIKEAQEIDRELHLPQGNIYTDKEIKMAIVKKQNEQWRKKPLHGQFPKKVLDQVNIDVELSYKWLKKQQVYPSIESSIFAIQDQAIITRQHQRDILNEPVDGKCRLCSCKDETTQHIISGCDKLAGTYYVKRHDNIVQYVYWCLAKKNKIEVSNLWWQETLIRPQIKENEFAKIMWEMSVQTDITVTHNRPDLIYVDKTRNKTFLIDITVPSDYNIGPKEIEKLSKYHLLKTEVSRLWNTQATIIPIVIGATGVVAKSIKKYIDKLDSHINISILQKQAAIHTSTILTKVLGDTVFVHGPQDHLHIQNTQQSSNTQQSPSTTDSIKIVHTSNIQHSLNIIDQHIQTMQQSSGTTDTQQSSNAPDSSNTNHTPNTQQSLNTRQKRGRGKKKMRNIEQNAKNIS

SEQ ID NO: 31793 - protein, 1333 aa, Parnassius apollo
MMERQLRSTIIGPLPEGERRGTSGADAGRDSVRAVSGSLLSRRARVGEPENITADQREGMGMGDALQSTDLPTSSAGSSSMTTNNTEHDDRRRKWSTEELQELMFCYFKARSIGPGYIDRLQKLFTERNPNNPKIHKFNGNTLSNQARRIIKQNVLSQELLNRIRKDAEGITPVDNSNSNVIGVQDTQPTLTHITEQNLQHTIELAETIDQMTSNIVVNEDQDPLILHFLQILAETNETRLEDRVFLPKAKINRRFLENLHTLNNYLPNLLITNNSLREINNIIYAAAKTLILNNNQKPYITNNIIKPKCDPPWKKRIQTKIDIFRKELGQLIEIEKGIKTRRMMKIKEKLYTKYSIRNDNDHNNITETIRQKVKALAGRIKRYEDINTRKAQNRFFNESEHRFYRSLGCSNNKDIKIPSKEEVEVFWNSILSNQTQYNLNANWIKEVEMLSSEIHREDTQEITEDQVKFAIRKLLNWKSPGMDKIQNYYLKYLTSVHKYIASLFTKIVSGTEIMEEWFVTGQVTLIPKNENTENPKNWRPIACLPSMYKLLTSILANVLYSHCDKNNIMAVEQRGCRRGARGCKDHLMVNKAILEDAHQAQKNLSMAWIDYQKAFDSISHEWILKVLDVYKCPLMIKRFLQLAMPLWRVIMTARGSHDSVTTEPIYVRRGIFQGDSLSPLLFCLAINPISCILNKYKLKGYKLKDSFWINHLLYMDDLKVYANNKSNLKVLLDSVEVFTSDIGMRFGIDKCKTIHLSSGYRSNAIGEGHILLSGETFEQLAIGDKYKYLGIHESGKIEHSIIRDQITKEYFKRIKKLLNTHLNSRYLIKGINTYAVPVLLYSFGIINYKNNDLKKIDIKTRKLLSIKKVHQQKAEIERLYLPVTQGGRGLINIEYMYKAQIVKYKQYLKTESDYLIKIIMQHDIHRDKYSIIKEAQEIERELHLTQENTYTDKEIKMAIVKRHNELWRTKPLHGQFLKKVLDQANIDIELSYQWLKRQQVSPSTESSIFAIQDQSINTRQHQRDILNEPVDGKCRLCSYKDETTQHIISGCDKLVGTYYVKRHDNLVQYVYWCLAKKNKMEVSNLWWQETLIRPQIKENEFAKIMWEMPVQTDISVTHNRPDLIYVDKTSNKTFLIDITVPSDYNIGPKEIEKLSKYHLLKTEVSRLWNTQATVIPIVIGATGVVAKSIRKYIDKLDSHINISILQKQAAIHTSTILTKVLGDTVFVHNQPDHLHIQITQQSSNTQQSPSTTDTINTTNTSNIQRSLNIQEQHMQTMQQSLGITDIQQSLNAPNSSNTNYNPNVQQSLNSRQKRGRGRKRMRKDEQNTENTS

SEQ ID NO: 31794 - protein, 1436 aa, Spodoptera frugiperda
MESQKRNKRLRPLPGGYRRDTSGAGDGRVVGLASDSPLSRRAGVGVGVERGAPNVTADHSEDDALRSGEVSPASSAGTSHSTTLTLNEDTRRKWSNAELEELIFCFYRARALGSGSIKRLETLFRSRNPNNPKAFTFTGNTLSTQARSIIARKAIPTEILNAIKSRAEEPTLQPEETHNTHNSPSITHSIHTSQHTEHTDINVQQHHTQTRTPSPETAEAPEPQPNNIEIVSDDRRRRWSDEEMKELMYCYYKARSAGSGYINRLQRIYIERNPHNPKVNRFNGYSLSTQARTIIKNNMLSQELLNRIKQTAEGILEEAENTEPINNSNSDTQHDTQDTHAHTYTPDEVQTIIQATQNILDSENRDPIILNFLNTLSEVREIPIAERKLLPKANFNKQFFENCHKINKYLPNLLEINTTLREINDIIYAAAKTLIINNNQAPYKPSNTIKPKRDPNWKIRIQKKINKFRKELGRLIEIERGVRSPRMDRSRAYLYNKYNIHSENDHKNIAEMLKQKIKALAGRIKRYEDANSKREQNKLFKENEHKLYSSLGNQKETQEIKIPSKENVEQFWRSILSNPIKYNTDAIWIKEIEESMSEVNTIEPEEITIDEIKFAIKKLHNWKTPGIDKIQNYYLKYLTSTHKYIAKLFTKIVQGSESLEEWFTTGQVILIPKNADTENPKNWRPIACLPSMYKLLTSVLANVLYNHCSSNNIMAAEQRGCRRGARGCKDHLMVNKAILEDAHTSQKNLSMAWIDYQKAFDSVSHEWLLKILDIYKCPPMIKRFLEMTMPSWRVIMTAKGTHESLTTEPISIRRGIFQGDSLSPLLFCLAINPVSHILNKYKFKGYKLRDSFNINHLLYMDDLKIYANNRSNLKILLDSLEIFTIDVGMKFGLNKCNVLHLNLGHRSSTTGEGHVLLSGEQFSELGQGNTYKYLGVSESGKIDHSTIRQQVSKEYFKRVKKLLNSHLNSRNIIKGINTYAIPILLYSIGIINYKHSDLKKIDTKTRKLLAMNKAHQQKAEVERLYLPVMYGGRGLLNVENIYKTQIIKYKQYLRIEQDHLIKTIVQHDINKDKYSIIKEAEEIESELELATGERHTDKEIKEAIIRKQISRWHNKPLHGQFAKKVLGQENIDVVQSFRWIKKQQVSPSIESSVFAIQDQAVMTRQHQRDILKEPVDGKCRLCAVKDETAQHIISGCEKLAGTYYVKRHNNLVQYVYWCLARKHGMDVNKLWWKETLTQPKVVENETGKIMWEIPIHTDVTVAHNRPDIVYTNKITNTTYLIDITVPTDYNIGAKEIEKLSKYHLLKTEIRRLWNTETHVIPIVIGATGVVAKSLSRYTDKLESSIDTTILQKQAAIQTTIILSKVLGDTVFVTNISETDQLQPSQTQTPHTTQSTITQNSYSTTGIQSTSTQNSEQHTNSINTQEVSRRGRRRAIN

SEQ ID NO: 31795 - protein, 1436 aa, Spodoptera frugiperda
MESQNRNKRLRPLPGGYRRDTSGAGDGRVVGLASDSPLSRRAGVGVGVERGAPNVTADHSEDDALRSGEVSPASSAGTSHSTTLTLNEDTRRKWSTAELEELIFCFYRARALGSGYIKRLETLFRSRNPNNPKAFTFTGNTLSTQARSIIARKAIPTERLNTIKSRAEEPTIQPEETHSTHNSPSITHSIHTSQHTEHTDINVQQHHTQTRTPSPETAEAPEPQPNNIEIVSDDRRRRWSDEEMKELMYCYYKARSAGSGYISRLQRIYIERNPHNPKINRFNGYSLSTQARTIIKNNMLSQELLNRIKQTAEGIVEVAENTETINNSNSDTLHDTQDTHAQPYTPDEVQTIIQATQNILDSENRDPIILSFLNTLSEVRETSIADRKLLPKANFNKQFFENCHKINKYLPNLLEINTTLREINDIIYAAAKTLIINNNQAPYKPSNTIKPKRDPNWKIRIQKKINKFRKELARLIEIERGVRSPRMDRSREYLYNKYNIHSENDHKNIAEMLKQKIKALAGRIKRYEDANTKREQNKLFKENEHKLYSSLGNQKETQEIKIPSKENVEQFWRSILSNPIKYNTDAIWIQEIEESMSEVNTIEPEEITIEEIKFAIKKLHNWKTPGIDKIQNYYLKYLTSTHKYIAKLFTKIVQGFESLEEWFTTGQVILIPKNSESENPKNWRPIACLPSMYKLLTSVLANVLYNHCSSNNIMAAEQRGCRRGARGCKDHLMVNKAILEDAHTSQKNLSMAWIDYQKAFDSVSHEWLLKILDIYKCPPMIKRFLEMTMPSWRVIMTAKGTHESVTTEPISIRRGIFQGDSLSPLLFCLAINPVSHILNKYKFKGYKLRDSFNINHLLYMDDLKIYANSRSNLKILLDSLEIFTIDVGMKFGLNKCNVLHLNLGHRSSTTGEGHVLLNGEEFSELGQGNTYKYLGVSESGKIDHSTIRQQVSKEYFKRVKKLLNSHLNSRNIIKGINTYAIPILLYSIGIINYKLSDLKKIDTKTRKLLAMNKAHQQKADVERLYLPVMYGGRGLLNVENIYKTQIIKYKQYLRIEQDHLIKTIVQHDINKDKYSIIKEAEEIESELELATGERHTDKEIKEAIIRKQISRWHNKPLHGQFAKKVLGQENIDVVQSFRWIKKQQVSPSIESSVFAIQDQAVMTRQHQRDILKEPVDGKCRLCAVKDETAQHIISGCEKLAGTYYVKRHNNLVQYVYWCLARKHGMDVNKLWWKETLTQPKVVENETGKIMWEIPIHTDVTVAHNRPDIVYTNKTTNTTYLIDITVPTDYNIGAKEIEKLSKYHLLKTEIRRLWNTETHVIPIVIGATGVVAKSLSRYTDKLESSIDTTILQKQAAIHTTIILSKVLGDTVFVTNIPETDQLQPSQTQTPHTTQSTITQSSQSITGIQSTSTQNSEQHTNSINTQEVSRRGRRRAIN

SEQ ID NO: 31796 - protein, 1193 aa, Spodoptera frugiperda
MKELMYCYYKARSAGSGYINRLQRIYIERNPHNPKVNRFNGYSLSTQARTIIKNNMISQELLNRIKQSAEGIVEVTENTESINNFNSDTLHNTQNTHAQPYTPDEVQTIIQATQNILDSENRDPIILSFLNTLSEVRETPIADRKLLPKANFNKQFFENCHKINKYLPNLLEINTTLREINDIIYAAAKTLIINNNQAPYKPSNTIKPKRDPNWKIRIQKKIDKFRKELARLIEIERGVRSRRMDRSREYLYNKYNIQSENDHKNIAEMLKQKIKALAGRIKRYEDANSKREQNKLFKENEHKLYSSLGNQKEMQEIKIPSKENVEQFWRSILSNPIKYNTDAIWIKEIEESMSEVNTIEPEEITIDEIKFAIKKLHNWKTPGIDKIQNYYLKYLTSTHKYIAKLFTKIVQGFENLEEWFTTGQVILIPKNADTENPKNWRPIACLPSMYKLLTSVLANVLYNHCSSNNIMAAEQRGCRRGARGCKDHLMVNKAILEDAHTSQKNLSMAWIDYQKAFDSVSHEWLLKILDIYKCPPMIKRFLEMTMPSWRVVMTAKGTHESLTTEPISVRRGIFQGDSLSPLLFCLAINPVSHILNKYKFKGYKLRDSYNINHLLYMDDLKIYANNRSNLKILLDSLEIFTIDVGMKFGLNKCNVLHLNLGHRSSTTGEGHVLLSGEQFSELGQGNTYKYLGVSESGKIDHSTIRQQVSKEYFKRVKKLLNSHLNSRNIIKGINTYAIPILLYSIGIINYKQSDLKKIDTKTRKLLAMNKAHQQKADVERLYLPVMYGGRGLLNVENIYKTQIIKYKQYLRIEQDHLIKTIVQHDINKDKYSIIKEAEEIESELELVTGERHTDKEIKEAIIRKQISRWHNKPLHGQFAKKVLGQENIDVVQSFRWIKKQQVSPSIESSVFAIQDQAVMTRQHQRDILKEPVDGKCRLCAVKDETAQHIISGCEKLAGTYYVKRHNNLVQYVYWCLARKHGMDVNKLWWKETLTQPKVVENETGKIMWEIPIHTDVTVAHNRPDIVYTNKITNTTYLIDITVPTDYNIGAKEIEKLSKYHLLKTEIRRLWNTETHVIPIVIGATGVVAKSLSRYTDKLESSIDTTILQKQAAIHTTIILSKVLGDTVFVTNIPESDELQPSQTQTPHTTQSTITQSSHSTTGIQSTSTQNSEQHTNSIYIQEVSRRGRRRVIN

SEQ ID NO: 31797 - protein, 1083 aa, Thymelicus sylvestris
MNRIKQSAEEVPENLENIEPILNTLTHESPNTPHNTQTHNTQTYTPEPAQTIDQVTQNILDSEDQDPIILNFLNILSEIKEIPIPDRKFLPKAKINKKFIENCHKLNKFLPNLLEINTSLREVNDIIYAAAKTLIISNSQAPYEPKNTIKLKHNPAWKKRIQKKINKFRKELGRLIEIERGVRSRRMDRNRQYLYTKYNIQNENDHSNTAELLKQKIKALAGRIQRYQEMNDRKEQNKLFKENEHRLYRNLGSSNEEREVKIPSKDSVEQFWGSILSNPIKYNTKARWLNEVEESVTDVNSVESENITIEEVKFAIKKLHNWKSPGIDKIQNYYLKYLTCTHVYLARLYSRIVQGLEHLEDWFTTSQVILIPKTTDTENPKNWRPIACLPSMYKLLTSVLANILYSHCSNNNIIAAEQRGCRRGARGCKDHLMVNKAILEDAHSTQKNLSMAWIDYQKAFDSVSHEWLLKVLDIYKCPPMIKRFLEMTMPVWKVIMTARGTNESITTGPIYIKRGIFQGDSLSPLLFCLAINPLSFILNKYEFKGYKLKDSHYINHLLYMDDLKIYTNNRSNLKVLLDSIEIFTTDVGMKFGLDKCNILHLNMGQRSGTTGVGHVLLNGEEFSELKIGNTYKYLGVSESGKIVHSEIRDQVTKEYFKRVKKLLDSHLNSRNMIKGINTYAIPVLLYSFGIINYKNSDLRKIDTKTRKLLAIKKAHQQKADVERLYLPVTHGGRGLLNIENMYKTQIIKYKQYLRIEQDHLIKTIVQHDINKDKYSIIKEAEEIETELNLAIDKRHTDKEIKEAIVKKQNKMWRNKQLHGQFAKSVLDQANVDIDQSFKWIKKQQVSPSIESSIFAIQDQAVMTRQHQRDILKDPVDGKCRLCAVKDETAQHIISGCEKLAGTYYVKRHNNLVQYVYWCLIRKHNMDANNLWWKETLTQPKVVENSVAKIMWEIPIQTDVTVSHNRPDLIYVDKSTNNTYLIDITVPSDYNIGAKEIEKLSKYHLLKTELRRIWNTRTHVIPIVIGATGIVAKSISRYIDKLDASIDITILQKQAAIQSSIILSKVLGDTVFVNSLGTDRAETN

SEQ ID NO: 31798 - protein, 1424 aa, Spodoptera frugiperda
MESQKRNKRLRPLPGGYRRDTSGAGDGRVVGLASDSPLSRRAGVGVGVERGAPNVTADHSEDDALRSGEVSPTSSAGTSHSTTLTLNEDTRRKWSNAELEELIFCFYRARALGSGYIKRLETLFRSRNPNNPKAFTFTGNTLSTQARSIIARKAIPTEILNAIKSRAEEPTLHPEETHSTHNSPSITHSTHTSQHTEHTDINVQQHHTQTRTPSPETAEVPDPQPNNIEIVGDDRRRRWSDEEMKELMYCYYKARSAGSGYINRLQRIYIERNPHNPKVNRFNGYSLSTQARTIIKNNMLSQELLNRIKQSAEGIVEVAENTESINNFNSDTLHNTQDTHAQPYTPDEVQTIIQATQNILDSENRDPIILSFLNTLSEVRETPIADRKLLPKANFNKHFFENCHKINKYLPNLLEINTTLREINDIIYAAAKTLIINNNQAPYKPSNTIKPKRDPNWKIRIQKKINKFRKELARLIEIERGVRSPRMDRSREYLYNKYNIQSENDHKNIAEMLKQKIKALAGRIKRYEDANSKREQNKLFKENEHKLYSSLGNQKEMQEIKIPSKENVEQFWRSILSNPIKYNTDAIWIKEIEESMSEVNTIEPEEITIDEIKFAIKKLHNWKTPGIDKIQNYYLKYFTSTHKYIAKLFTKIVQGFENLEEWFTTGQVILIPKNADTENPKNWRPIACLPSMYKLLTSVLANVLYNHCSSNNIMAAEQRGCRRGARGCKDHLMVNKAILEDAHTSQKNLSMAWIDYQKAFDSVSHEWLLKILDIYKCPPMIKRFLEMTMPSWRVIMTAKGTHESLTTEPISIRRGIFQGDSLSPLLFCLAINPVSHILNKYKFKGYKLRDSFNINHLLYMDDLKIYANSRSNLKILLDSLEIFTIDVGMKFGLNKCNVLHLNLGHRSSTTGEGHVLLSGEQFSELGQGNTYKYLGVSESGKIDHSTIRQQVSKEYFKRVKKLLNSHLNSRNIIKGINTYAIPILLYSIGIINYKLSDLKKIDTKTRKLLAMNKAHQQKADVERLYLPVMYGGRGLLNVENIYKTQIIKYKQYLRIEQDHLIKTIVQHDINKDKYSIIKEAEEIESELELATGERHTDKEIKEAIIRKQISRWHNKPLHGQFAKKVLGQENIDVVQSFRWIKKQQVSPSIESSVFAIQDQAVMTRQHQRDILKEPVDGKCRLCAVKDETAQHIISGCEKLAGTYYVKRHNNLVQYVYWCLARKHGMDVNKLWWKETLTQPKVVENEAAKIMWEIPIHTDVTVAHNRPDIVYTNKTTNTTYLIDITVPTDYNIGAKEIEKLSKYHLLKTEIRRLWNTETHVIPIVIGATGVVAKSLSRYTDKLESSIDTTILQKQAAIHTTIILSKVLGDTVFVTNIPESDELQPSQTQTPHTTQSTITQSSQSTTGIQSTSTQNSEQHTNSINTQ

SEQ ID NO: 31799 - protein, 1447 aa, Spodoptera frugiperda
MTNGALATQTKMESQKRNKRLRPLPGGYRRDTSGAGDGRVVGLASDSPLSRRAGVGVGVERGAPNVTADHSEDDALRSGEVSPASSAGTSHSTTLTLNEDTRRKWSNAELEELIFCFYRARALGSGYIKRLETLFRSRNPNNPKAFTFTGNTLSTQARSIIARKAIPTETLNAIKSRAEEPTLHPEETHSTHNSPSITHSTHTSQHMEHTDINVQQHHTQTRTPSPETAEAPDPQPNNIEIVSDDRRRRWSDEEMKELMYCYYKARSAGSGYINRLQRIYIERNPHNPKVNRFNGYSLSTQARTIIKNNMISQELLNQIKQSAEGIVEVAENTESINNFNSDTLHNTQNTHAQPYTPDEVQTIIQATQNILDSENMDPIILSFLNTLSEVRETPIADRKLLPKANFNKHFFENCHKINKYLPNLLEINTTLREINDIIYAAAKTLIINNNQAPYKPSNIIKPKRDPNWKIRIQKKINKFRKELARLIEIERGVRSPRMDRSREYLYNKYNIHSENDHKNIAEMLKQKIKALAGRIKRYEDANSKREQNKLFKENEHKLYSSLGNQKETQEIKIPSKENVEQFWRSILSNPIKYNTDAIWIKEIEESMSEVNTIEPEEITIDEIKFAIKKLHNWKTPGIDKIQNYYLKYLTSTHKYIAKLFTKIVQGFENLEEWFTTGQVILIPKNADTENPKNWRPIACLPSMYKLLTSVLANVLYNHCSSNNIMAAEQRGCRRGARGCKDHLMVNKAILEDAHTSQKNLSMAWIDYQKAFDSVSHEWLLKILDIYKCPPMIKRFLEMTMPSWRVIMTAKGTHESLTTEPISIKRGIFQGDSLSPLLFCLAINPVSHILNKYRFKGYKLRDSYNINHLLYMDDLKIYANNRSNLKILLDSLEIFTIDVGMKFGLNKCNVLHLNLGHRSSTIGEGHVLLSGEQFSELGQGSTYKYLGVSESGKIDHSTIRQQVSKEYFKRVKKLLNSHLNSRNIIKGINTYAIPILLYSIGIINYKLSDLKKIDTKTRKLLAMNKAHQQKADVERLYLPVMYGGRGLLNVENIYKTQILKYKQYLSIEQDHLIKTIVQHDINKDKYSIIKEAEEIESELELATGERHTDKEIKDAIIRKQISRWHNKPLHGQFAKKVLGQENIDVVQSFRWIKKQQVSPSIESSVFAIQDQAVMTRQHQRDILKEPVDGKCRLCAVKDETAQHIISGCEKLAGTYYVKRHNNLVQYVYWCLARKHGMDVNKLWWKETLTQPKVVENETAKIMWEIPIHTDVTVAHNRPDIVYTNKTTNTTYLIDITVPTDYNIGAKEIEKLSKYHLLKTEIRRLWNTETHVIPIVIGATGVVAKSLSRYTDKLESSIDTTILQKQAAIHTTIILSKVLGDTVFVTNIPESDQLQPSQTQTPHTTQSTITQNSHSTPSIQSTSTQNSEQHTNSIYIQEVSRRGRRRAIN

SEQ ID NO: 31800 - protein, 1447 aa, Spodoptera frugiperda
MRVTNGALATQTKMESQKRNKRLRPLPGGYRRDTSGAGDGRVVGLASDSPLSRRAGVGVGVERGAPNVTADHSEDDALRSGEVSPASSAGTSHSTTLTLNEDTRRKWSNAELEELIFCFYRARALGSGYIKRLETLFRSSNPNNSKAFTFTGNTLSTQARSIIARKAIPTETLNAIKSRAEEPTLHPEETHSTHNSPSITHSIHTSQHTEHTDINVQQHHTQTRTPSPETAEAPNPQPNNIEIVSDDRRRRWSDEEMKELMYCYYKARSAGSGYINRLQRIYIERNPHNPKVNRFNGYSLSTQARTIIKNNMISQELLNRIKQSAEGIVEVTENTESINNFNSDTLHNTQNTHAQPYTPDEVQTIIQATQNILDSENRDPIILSFLNTLSEVRETPIADRKLLPKANFNKQFFENCHKINKYLPNLLEINTTLREINDIIYAAAKTLIINNNQAPYKPSNTIKPKRDPNWKIRIQKKIDKFRKELARLIEIERGVRSRRMDRSREYLYNKYNIQSENDHKNIAEMLKQKIKALAGRIKRYEDANSKREQNKLFKENEHKLYSSLGNQKEMQEIKIPSKENVEQFWRSILSNPIKYNTDAIWIKEIEESMSEVNTIEPEEITIDEIKFAIKKLHNWKTPGIDKIQNYYLKYLTSTHKYIAKLFTKIVQGFENLEEWFTTGQVILIPKNADTENPKNWRPIACLPSMYKLLTSVLANVLYNHCSSNNIMAAEQRGCRRGARGCKDHLMVNKAILEDAHTSQKNLSMAWIDYQKAFDSVSHEWLLKILDIYKCPPMIKRFLEMTMPSWRVVMTAKGTHESLTTEPISIRRGIFQGDSLSPLLFCLAINPVSHILNKYKFKGYKLRDSYNINHLLYMDDLKIYANNRSNLKILLDSLEIFTIDVGMKFGLNKCNVLHLNLGHRSSTTGEGHVLLSGEQFSELGQGNTYKYLGVSESGKIDHSTIRQQVSKEYFKRVKKLLNSHLNSRNIIKGINTYAIPILLYSIGIINYKQSDLKKIDTKTRKLLAMNKAHQQKADVERLYLPVMYGGRGLLNVENIYKTQIIKYKQYLRIEQDHLIKTIVQHDINKDKYSIIKEAEEIESELELVTGERHTDKEIKEAIIRKQISRWHNKPLHGQFAKKVLGQENIDVVQSFRWIKKQQVSPSIESSVFAIQDQAVMTRQHQRDILKEPVDGKCRLCAVKDETAQHIISGCEKLAGTYYVKRHNNLVQYVYWCLARKHGMDVNKLWWKETLTQPKVVENETGKIMWEIPIHTDVTVAHNRPDIVYTNKITNTTYLIDITVPTDYNIGAKEIEKLSKYHLLKTEIRRLWNTETHVIPIVIGATGVVAKSLSRYTDKLESSIDTTILQKQAAILTTIILSKVLGDTVFVTNIPETDQLQPSQTQTLHTTQSTITQNSQSTTGIQSTSTQNSEQHTTNSIYIQEVSRSGGEL

SEQ ID NO: 31801 - protein, 1447 aa, Spodoptera frugiperda
MRVTNGALATQTKMESQKRNKRLRPLPGGYRRDTSGAGDGRVVGLASDSPLSRRAGVGVGVERGAPNVTADHSEDDALRSGEVSPTSSAGTSHSTTLTLNEDTRRKWSNAELEELIFCFYRARALGSGYIKRLETLFRSRNPNNPKAFTFTGNTLSTQARSIIARKVIPTEILNAIKSRAEEPTLQPEETHSTHNSPSITHSIHTSQHTEHTDINVQQHHTQTRTPSPETAEAPDPQPNNIEIVSDDRRRRWSDEEMKELMYCYYKARSAGSGYINRLQRIYIERNPHNPKVNRFNGYPLSTQARTIIKNNMLSQELLNRIKQTAEGIVEVAENTESINNSNSDTQHNTQDTHAQPYTPDEVQTIIQATQNILDSENRDPIILSFLNTLSEVRETPIADRKLLPKANFNKNFFENCHKINKYLPNLLEINTTLREINDIIYAAAKTLILNNNQAPYKPSNTIKLKRDPNWKIRIQKKINKFRKELARLIEIERGVRSRRMDRSREYLYNKYNIHSENDHKNIAEMLKQKIKALAGRIKRYEDANSKREQNKLFRENEHKLYSSLGNQKETKEIKIPSKENVEQFWRSILSNPIKYNTDAIWIKEIEESMSEVNTIEPEEITIDEIKFAIKKLHNWKTPGLDKIQNYYLKYLTSTHKYIAKLFTKIVQGFENLEEWFTTGQVILIPKNADTENPKNWRPIACLPSMYKLLTSVLANVLYNHCSSNNIMATEQRGCRRGARGCKDHLMVNKAILEDAHTSQKNLSMAWIDYQKAFDSVSHEWLLKILDIYKCPPMIKRFLEMTMPFWRVIMTAKGTHESLTTEPISIKRGIFQGDSLSPLLFCLAINPVSHILNKYKLKGYKLRDSFNINHLLYMDDLKIYANNRSNLKILLDSLEIFTIDVGMKFGLNKCNVLHLNLGHRSSTTGEGHVLLSGEQFSELGQGNTYKYLGVSESGKIDHSTIRQQVSKEYFKRVKKLLNSHLNSRNIIKGINTYAIPVLLYSIGIINYKHSDLKKIDTKTRKLLAMNKAHQQKAEVERLYLPVMYGGRGLLNVEKIYKTQIIKYKQYLRIEQDHLIKTIVQHDINKDKYSIIKEAEEIESELELATGERHTDKEIKEAIIRKQISRWHNKPLHGQFAKKVLGQENIDVVQSFRWIKKQQVSPSIESSVFAIQDQAVMTRQHQRDILKEPVDGKCRLCAVKDETAQHIISGCEKLAGTYYVKRHNNLVQYVYWCLARKHGMDVNKLWWKETLTQPKVVENETAKIMWETPIHTDVTVAHNRPDIVYTNKTTNTTYLIDITVPTDYNIGAKEIEKLSKYHLLKTEIRRLWNTETHVIPIVIGATGVVAKSLSRYTDKLECSIDTTILQKQAAIHTTIILSKVLGDTVFVTNIPETDQLQPSQTQTLHTTQSTITQNSQSTTGIQSTSTQNSEQHTTNSIYIQEVSRSGGEL

SEQ ID NO: 31802 - protein, 1237 aa, Potamanaxas melicertes
MTADQRGGEGTDDALQSRVSPTDSVGSSVSTTNNAISDDRRRKWSTVEQQELMFCYFKARMDGAGYIERLHKLFIERNPNNPKINKFNGNTLSNQARRIIKQNVLSQELLDLIKKDAEGKIDTVESGEQNVTNEIDEATTHSHINIAHNTDHVEYTTEQLETINQLTQNIEVNEDQDPLILNFLQILSETKETVMEERQLLPKAKINKSFLKNLLTLNKFLPSVLATNNSLREINNIIYAAAKTLILNNNQIPYTPKNIFKIKSDPPWKRRIQTKIERFRKELGQLIEIGRGINSRRMSKIKDKLYRQHNIQNENEHRNVEEILKQKIKALAGRIKRYETINSKKEQNSLFNENEHKLYRSLGGNNLKDIKLPQKEIVEGFWSSILSNPIHYNRNAKWIKEVEASTSEVNTIDTEEITEDHIKHATKKLLNWKTPGVDKIQNYYLKYFTSVHSYLSDIFTKIVSCNESLEEWFTTGQVILVPKNGQTEDPKNWRPIACLPTMYKLLSSVLSNILYNHCHQNNIIAIEQRGCRRAARGCKDHLMVNKAILEDAHQSQKNLSMAWIDYQKAFDSVPHDWLTKVLDVYKCPSIIKRFLELVMPSWRVIMTARGTQNSLTTEPIYVKRGIFQGDSLSPLLFCLATNPLSFILNKYEMKGYKLKDSIWVNHLLYMDDLKLYANNKHNLKVLLDSVEVFTRDIGMRFGLNKCNTIDISSGHRSNVTGEGHILLEGEIIKQLAIGDRYKYLGIHESGKIEHSIIRDQITQEYFKRIKKLMNTHLYSRNLIKGINTYAIPVLLYSFGIINYKINDLKKIDTKTRKLLAIKKAHQQKADVERLYLPVAQGGRGLLNVEYMYKTQILKYKQYLKAGEGDDLIKAIVEHDIRRDKYSIINEAQEIENQLHLTRGNIHTDKDIREAIVKRRKDIWRNKQLHGQFMRKVLDQTNIDTELSFKWIKKQKISPTIESSVFAIQDQCIMTRQHRRDILKEPVDGKCRLCACKDETTQHIVSGCEKLAGNYYVKRHNNLVQYVYWCLAKKHKIEVSGLWWKETLIQPQIKENETAKILWEMPVQTDVTVTHNRPDLIYVDKINNQTYLIDVTVPSDYNIGPKEIEKLSKYHLLKNEVSRLWKTQTTIIPIVVGATGIVGKSIEKYIKKLDTFIDITILQKQAAIHSSTILSKVLGDTVFVNNTQNSHTNSEQPTHTTQETNIQNTTDPIVSQTQEGIQERNGRGRSRRKKRHNV

SEQ ID NO: 31803 - protein, 1317 aa, Muschampia gigas
MEMERNDSNNWPLPGGDRRGTSGADAGRLSMRTVSGSLLNRRAGAGGTQNATADQRGGEGADEVLQSRASPTDSVGSSASTTSNTNDDRRRKWSTEELEELMFCYYKARTGGPGYICRLFKLFKERNPNNPKIHNFNGNTLSNQARRIVKQNVISQEQLNRIQMKAEGRVPIDRSENITLPTQEHNTPEIIQQTSSQHIIIETSNQHESNIEVNEDQDPLILDFLQNLAETIETSLEDRLFLPKAKINKQFIENLNKLNKYLPNLLVTNTSLREINNIIYATAKTLIVNNKQMPFQPKHTIKAKRDPPWKKRIGNKIEILRKELGQLIEIKRGVNSRRMIKIKNKLYTKYNIQNENDHDNISETITQKIKALAGRIKRYTEIITRREQNKLFQENEHKLYRSLGKSSKKDINIPAKETVEDFWKAILSKSSQYNPEAKWIKEVEASSNDIHTEETEEITEEHIKIAIRKLLNWKSPGIDKIQNYYLKYLTSIHKYIALLYTNIVTGRQELENWFTTGQVILIPKNENTEEPKNWRPIACLPSMYKLLTSVLANLLYKHCDQNNLMAVEQRGCRRGARGCKDHLMVNKCILEDAHQSQKNLSMAWIDYQKAFDSVSHDWLLKILDIYKCPHIVKRFLQMTMPSWRVIMTARGSQNSIITDPINIKCGIFQGDSLSPLLFCLAINPLSFILNKYEMKGYKLKDSFWINHLLYMDDLKIYANNKSNLKVLLDSVEIFTNDIGMRFGLDKCNIINIRAGCRNSATGEGHALLNGENLRELAIGDTYKYLGIHESGKIDHKIIRDQFSKEYFKRVKILLKTNLNSRYLIKGINTYAVPILLYSFGIINYKNSDVKNIDIKTRKLLAMNKVHQQKAEVERLYLPITQGGRGLINIEYMYKAQIIKYKQYLKEESDHLIKTIVQHDTHRNKYSIMKEAQEIAEELNLSRGNTYTDKEIREAIVKNYNKIWRSKPLHGQFPKKVLDLTNVDKELSFNWLKKQRISPSIESSIFAIQDSAIMTRQHQRDILKQAVDGKCRLCADKDETTQHIISGCDKLAGTYYVKRHNNLVQYVYWCLAKKHNIKVDDLWWKETLTQPQVKENDSTKILWEIPIHTDITVTHNRPDLVYVDKTNNKTFLIDITVPSDYNLGAKEIEKLSKYHLLKTEITRLWNTQTTVIPIVVGATGIVAKSIVKYIDRLDAKIDLTVLQKQAAIHTSTILSKVLGDTVFVHNIQAQNTQNTEQSPNTQSSLDIPQANTTQTSSNTTNTRNTQSSSNTHTSQNTQRLSVTLSEPCADRTPNTQHALNPQLRRRRRRGRRRRSINT

SEQ ID NO: 31804 - protein, 1328 aa, Ennomos quercinarius
MESRNNVERIGPLPGGDRRGTFGADAGRDSMQTVSGSLLSRRARVGEPENTTADQRGGEGADDALQDRASPTNSAGSSATTTNYAVNDDRRRKWSTEELQELMFCYFKARSEGPGYIGRLEALFTERNPNNPKIHKFNGNTLSNQARRVIKQNVISQELLDRLQKQAEGIMPTETPELILNETVTHDTTPTQILHITQPTPEQSETIDQLTNNIEVNEDQDPLVLEFLQILAETKETPIAERLVLPKAKINKRFIENLNILNKYLPNLLITNNTLREINDIIYATAKTLIISNNQTPFMPKNIIKPKTDPPWKKRIQTKIEKFRKELGHLVEIQRGTNTRRMRKIKDKIYSKYNIQNENDHNNITETIKQKVKALAGRIKRYEEKNTKKEQNKLFGENEHRLYRSLDSKSNSEIKIPSKEGVEEFWKSILSNPEQYNTDAKWITEVENSFSEVNTADIEEITEDQVKHAIRKLLNWKSPGIDKIQNYYLKYLTSVHKYLATLFTNIVSGTETFEEWFTTGQVILIPKNENTEDPKSWRPIACLPSMYKLLTSVLANILYSHCHENSIMAIEQRGCRRGARGCKDHLMVNKAILEDAHESQKNLSMAWIDYQKAFDSVSHEWLLKILDVYKCPALIKRFLLLAMPSWRVIMTARGSQDSITTEPIYIRRGIFQGDSLSPLLFCLAINPLSFILNKYEMKGYKLKDSFWINHLLYMDDLKVYANNRTNLKVLLDSLEIFTSDIGMRFGLDKCNIIHISSGHRSNVTGEGHILLNGETIKQLAIGDRYKYLGVHESGKIEHNTIREQITKEYFKRVEKLMNTHLNSRNLVKGINTYAIPVLLYSFGVINYKNNDLKKIDVKTRKLLAIKKAHQQKAEVERLYLPVNQGGRGLLNVEYMYKTQIVKYKQYLEPKSDHLIEAIVQHDTHRDKYSIMKEAQEIERELHLAVDSRHTDEEIKKAIVKRRNETWRNKQLHGQFPKKVLDQANIDKELSFKWIKKQQISPSIESSIFAIQDQAVMTRQHQRDILKEPVDGKCRLCACKDETTQHIISGCEKLAGTYYVKRHNNLVQYVYWCLAKKHKIEVANLWWKETLVQPQVKENDTTKILWEIPIQTDVTVTHNRPDLIYIDKTNNKTFLIDITVPSDYNIGAKEIEKLSKYHLLKTEISRLWHTQATVIPIVVGATGIVAKSIKKYIDKLDATIDISILQKQAAIHTTTILSKVLGDTVFVHNIPTDQNVPNTQQVSTTQQSSDILDPSNITQTSNTQQSSTTQQTSDTQGPSNTTQISDTQQSSTTQQSSDTPDPSNISRTPNTQQRREQRLGRGRRRRINT

SEQ ID NO: 31805 - protein, 919 aa, Tagiades gana
MLRKELGQLIEIQKGITTRRMIKIKDRLYVKYSIQSENDHANIIEIIKQKVKALSGRIKRYESDNKRKEQNKLFNENEHRLYKTLGCNSNHEINLPSKKEVETFWTSILSIPVNYNVNAKWIKEVEESTSEVNTAKVDEIKEEQVRIATQKLLNWKTPGVDKIQNYYLKYLTSTHKYIASLYTNIITGREILDEWFTTGRVILIAKNENTKDPKNWRPIACLCSMYKLLTSVLSNILYSHCETNHIIAVEQRGCRRGARGCKDHLMINKAILENAHQSKKNLSMAWIDYQKAFDSISHEWLLKILDIYKCPPMIKKFLQLTMPSWQVVMTARGSADSITTEPIHIRRGIFQGDSLSPLLFCLAMNPLSYILNKYEMKGYKLKDSFWINHLLYMDDLKIYANHKSNLKVLLDSVEIFTHDIGMRFGLDKCNILHLRSGYRSNAIGEGHALLSGETLKTLLIGQTYKYLGVHESGKIEHNIIRDQICKEYFKRVKKLLNTHLNSRYLIKGINTYAIPVLLYSIGVINYKNSDLKKIDTKTRKILAMKKAHQQKAEVERLYLPVTQGGRGLINVEHMYETQILKYKQYLELEKDHLIKAIVHHDTNKDKYSIIKEAQEIEAKLQLPQGNLHTDKEIKEAITRLQNKVWRNKQLHGQFPKKVLDQRNIAKDLSFKWTKKQSVSAALESLIFAMQDQAVMTRQHQRDILKLAVDGKCRICDNKDETTQHIISGCEKLAGTYYVKRHNNLVQYIYWCLCKKHNIEVCKLWWKEELIQPQVKENKDVKLMWEMPVQTDITVPNNRPDIIYINKITNQTFLIDVTVPSDYNIGAKEIEKLSKYHLLKNEISRLWNTQTTVIPIVVGATGVVAKSIVKYIDKLESYIDITILQKQAAIHSSVILSKVLGDTIFVRKTQNTQSSDTAPT

SEQ ID NO: 31806 - protein, 1317 aa, Favria cribrellum
MEMEYNDSDNVPLPGGDRRGTSGADAGRLSMRSVSGSLLNRRAGAGGTQNVTADQRVGEGADEVLQSRASPTDSVGSSASTTNNINDDRRRKWSTEELEELMFCYFKARAGGPGYICRLFKLFKERNPNNPKIRHFNGNTLSNQARRIVKQNVISQEQLDRIQMQAEGRVPIDSSEHITPHTHEQNAPAIIQQTSSQHITIEISNQLESNVEVNENQDPLILDFLQNLAETIETSLEDRLFLPKAKINKQFIENLNKLNKYLPNLLVTNTSLREINNIIYATAKTLIVNNKQMPFQPKHTLKAKRDPPWKKRIENKIEIFRKELGQLIEIKRGVNSRRMIKIKNKLYTKYNIQNANDHDNITETITQKIKALAGRIKRYTEIIIRREQNKLFQENEHKLYRSLGKSSNKDINIPAKEKVEDFWKAILSKPSQYNTEARWIKEVESSANDTNTEETEEITEEHIKIATRKLLNWKSPGIDKIQNYYLKYLTSIHKYIALLYTNIVSGRQELENWFTTGQVILIPKNEYTEEPKNWRPIACLPSMYKLLSSVLANILYKHCDQNNLMAVEQRGCRRGARGCKDHLMVNKCILEDAHQSQKNLSMAWIDYQKAFDSVSHEWLLKILDIYKCPQIVKRFLQLTMPSWRVIMTARGSQNSVTTDPINIKCGIFQGDSLSPLLFCLAINPLSYILNKYEMKGYKLKDSFWINHLLYMDDLKIYANNKNNLKVLLDSVEIFTNDIGMRFGLDKCNVINISAGSRNSITGEGHALLSGEKLRELAVSDTYKYLGIHESGKIDHKIIRDQFSKEYFKRVKILLKTNLNSRFLIKGINTYAVPVLLYSFGIINYKNSDIKKIDIKTRKLLAMNKVHQQKAEVERLYLPITQGGRGLINIEYMYKTQMIKYKQYLKEGRDHLIKAIVQHDTHRNKYSIMKEAQEMAEELNLSRGNTYTDKEIREAIVKNYNKIWRSKQLHGQFPKKVLDLTNVDKELSFSWIKKQRISPSLESSIFAIQDSAIMTRQHQRDILKQEVDGKCRLCADKDETTQHIISGCDKLAGTYYVKRHNNLVQYVYWCLAKKHKIKVEDLWWKETLTQPQVKENESTKILWEMPIQTDITVTHNRPDLVYVDKTNNKTFLIDITVPSDYNLGAKEIEKLSKYHLLKTEITRLWNTQTTVIPIVIGATGIVAKSIVKYIDRLDAKIDVTILQKQAAIHTSTILSKVLGDTVFVHNIEAQNTQNTEQSPNTQRSPDIPHANITQTSPSTTNTRNTQSTSNTHSLQITQHSSVTLTDSCTNRTPNNQHASNPQLLRRRRRGRRRGSIDI

SEQ ID NO: 31807 - protein, 1307 aa, Muschampia tessellum
MEMERNDSNNWPLPGGDRRGTSGADAGRLSMRTVSGSLLNRRAGAGGTQNATADQRGEEGADEVLQSRASPTDSVGSSASATSNSNDDRRRKWSTEELEELMFCYYKARTGGPGYICRLFKLFKERNPNNPKIHNFNGNTLSNQARRIVKQNVISQEQLSRIQMKAEGRVPIDRSENITLHTQEHNTPEIIQQTSSQHNTIETSNQHESNIEVNEDQDPLILDFLQNLAETIETSLEDRLFLPKAKINKQFIENLNKLNKYLPNLLVTNTSLREINDIIYATAKTLIVNNKQMPFQPKHTIKAKRDPPWKKRIGNKIEILRKELGQLIEIKRGVNSRRMIKIKNKLYTKYNVQNENDHDNITETITQKIKALAGRIKRYTEIITRREQNKLFQENEHKLYRSLGKSSKKDINIPAKEKVEDFWKAILSKSSQYNPEAKWIKEVEASSNDIHTEETEEITEEHIKIAIRKLLNWKSPGIDKIQNYYLKYLTSIHKYIALLYTNIVTGRQELENWFTTGQVILIPKNENTEEPKNWRPIACLPSMYKLLTSVLANLLYKHCDQNNLMAVEQRGCRRGARGCKDHLMVNKCILEDAHQSQKNLSMAWIDYQKAFDSVSHDWLLKILDIYKCPHIVKRFLQMTMPSWRVIMTARGSQNSIITDPINIKCGIFQGDSLSPLLFCLAINPLSFILNKYEMKGYKLKDSFWINHLLYMDDLKIYANNKSNLKVLLDSVEIFTNDIGMRFGLDKCNIINIRAGCRNSAAGEGHALLNGENLRELAIGDTYKYLGIHESGKIDHKIIRDQFSKEYFKRVKILLKTNLNSRYLIKGINTYAVPILLYSFGIINYKNSDVKNIDIKTRKLLAMNKVHQQKAEVERLYLPITQGGRGLINIEYMYKAQIIKYKQYLKEESDHLIKTIVQHDTHRNKYSIMKEAQEIAEELNLSRGNTYTDKEIREAIVKNYNKIWRSKPLHGQFPKKVLDLTNVDKELSFNWLKKQRISPSIESSIFAIQDSAIMTRQHQRDILKQAVDGKCRLCADKDETTQHIISGCDKLAGTYYVKRHNNLVQYVYWCLAKKHNIKVDDLWWKETLTQPQVKENDSTKILWEMPIHTDNTVTHNRPDLVYVDKTNNKTFLIDITVPSDYNLGAKEIEKLSKYHLLKTEITRLWNTQTTVIPIVIGATGIVAKSIVKYIDRLDAKIDLTVLQKQAAIHTSTILSKVLGDTVFVHNIQDQNAQTTEQSTNTQSSLDIPQANTTQTSSNTTNTRNTQSSSNTHTSQNTQRLSVTLSEPCADRTPNTQHALNPQLRRRRR

SEQ ID NO: 31808 - protein, 943 aa, Bicyclus anynana
MIKTKEKLYAKYQIRNENDHSNTAEIIKQKIKALAGRIKRYVDINTRIEQNKLFKVNEHRLYNSLGNNNLNTDIKVPDKQTIEEYWKSILSNPVNYNNEAKWIKEIEISSNEVKTSEVNYITEEQIRIAIKKLLNWKSPGIDKIQNYYLKYFTSTHKYLASLFTSIVSGAEELEEWFTTGQVILIPKSENTDDPKNWRPIACLPTMYKLLTSVLANIMYTHCQENNIMAVEQRGCRRGARGCKDHLMVNKCILEVAHESKKNLSMAWIDYQKAFDSVSHEWLLKILDIYQCPPMIKKFLMLTMPIWRVIMTARGSQESITTEPIYIRRGIFQGDSLSPLLFCLAINPLSFILNKYELKGYKLKDSFWINHLLYMDDLKVYANNKSNLKVLLDSVEIFTNDIGMRFGLDKCNTIHLSSGYRNNTTGEGHILLSGDTVQQLAIGEQYKYLGIHESGKINHSEIRDKISKEYFKRVKKLTNTHLNSRFLIKGINTYAIPVLLYSFGIIKYKISDLKKLDVKTRKLLAMNKAHQQKAEVERLYLPVDEGGRGFINIEYMYKSQIVNFKQYLNNKSDYLIEAIVKHDKNRDKYSIIKETAEIETELRLTHNDTYTKKEIKSAVTKKQNEQWRSKQLHGQFPKKVLDQANIDRQLSFRWCKKQQISPKVEPSIFAIQDQAILTRQHQRDILKQPVDGKCRLCSNKDETTQHIISGCEKLAGTYYVKRHNNLVQYVYWCLAKKHKIEVSDLWWKETLIQPQVKEIESAKILWEMPVQTDNTVTHNRPDLIYIDKTNNTTFLIDITVPSKYNIGATEIEKLSKYHLLKTEVSRLWDTKTVVIPIVIGATGVVAKSLERYIDKLDANIDITILQKQAAIHTSTIISKVLGDTVFVHNTQVTDQNTHESQNSTITLNLTNQTLTTTNSQTQNTTQTQQRRRGRGRNRGRRKNN

SEQ ID NO: 31809 - protein, 1100 aa, Thymelicus sylvestris
MEELMFCYYKARLGGSGYINRLQRIFIERNPRNSKVKRFNGFGLSTQARTIIKNNMLSQEVMNRIKQSAEEVPENLENIEPILNTLTHESPNTPHNTQTHNTQTYTPEHAQTIDQVTQNILDSEDQDPIILNFLNILSEIKEIPIPDRKFLPKAKINKKFIENCHKLNKFLPNLLEINTSLREVNDIIYAAAKTLIISNSQAPYEPKNTIKLKHNPAWKKRIQKKINKFRKELGRLIEIERGVRSRRMDRNRQYLYTKYNIQNENDHSNTTELLKQKIKALAGRIQRYQEMNDRKEQNKLFKENEHRLYRNLGSSNEEREVKIPSKDSVEQFWGSILSNPIKYNTKARWLNEVEESVTDVNSVESENITIEEVKFAIKKLHNWKSPGIDKIQNYYLKYLTCTHVYLARLYSRIVQGLEHLEDWFTTGQVILIPKTTDTENPKNWRPIACLPSMYKLLTSVLANILYSHCSNNNIIAAEQRGCRRGARGCKDHLMVNKAILEDAHSTQKNLSMAWIDYQKAFDSVSHEWLLKVLDIYKCPPMIKRFLEMTMPAWKVIMTARGTNESITTGPICIKRGIFQGDSLSPLLFCLAINPLSFILNKYEFKGYKLKDSHYINHLLYMDDLKIYTNNRSNLKVLLDSIEIFTTDVGMKFGLDKCNILHLNMGQRSGTTGVGHVLLNGEEFSELKIGNTYKYLGVSESGKIVHSEIRDQVTKEYFKRVKKLLDSHLNSRNMIKGINTYAIPVLLYSFGIINYKNSDLRKIDTKTRKLLAIKKAHQQKADVERLYLPVTHGGRGLLNIENMYKTQIIKYKQYLRIEQDHLIKTIVQHDINKDKYSINKEAEEIETELNLAIDKRHTDKEIKEAIVKKQNKMWRNKQLHGQFAKSVLDQANVDIDQSFKWIKKQQVSPSIESSIFAIQDQAVMTRQHQRDILKDPVDGKCRLCAVKDETAQHIISGCEKLAGTYYVKRHNNLVQYVYWCLIRKHNMDANNLWWKETLTQPKVVENSVAKIMWEIPIQTDVTVSHNRPDLIYVDKTTNNTYLIDITVPSDYNIGAKEIEKLSKYHLLKTELRRLWNTRTHVIPIVIGATGIVAKSINRYIV

SEQ ID NO: 31810 - protein, 946 aa, Junonia evarete
MIKIKEKLYAKYNIQNENDHNNILETIKQKIKALAGRIKRYVDMNTRAKQNKLFKLNEHKLYSNLNININKDIKVPNKQKIEEYWSSILSNPVEYNNEAKWIKEIEASLNEVETSEIESITEEQVKKAIKKLLNWKSAGIDKIQNYYLKYFTSAHKYLASLFTNIVSGAEVLDEWFTTGQVILIPKNENTDDPKNWRPIACLPTMYKLLTSVLANIMYDHCQQNNIIALEQRGCRRGARGCKDHLMVNKSILEDAHQSQKNLSMAWIDYQKAFDSVSHEWILKLLDIYKCPTVIKNFLLLTMPFWRVIMTARGSQESITTDPIHIRRGIFQGDSLSPLLFCLAVNPLSYILNKYELKGYKLKDNFWINHLLYMDDLKLYANNKSNLKVLLDSVEIFTDDIGMKFGLDKCNVIHITAGHRSNATGEGHILLSGDTFKQLAIGQQYKYLGIQESGKINHSDIRDQITKEYFKRIRKLLNTYLNSRFLIKGINTYATPVLLYSFGVINYKINDLKKIDVKTRKMLAMKKAHQQKAEVERLYLPIDEGGRGLINIEYLYKSQIVKYSQYLNNKNDHLIEAIVQHDKNRDKYSILKEAEQIKIELKLTHKDNSTKHEIKEAITKIQNTTWRNKELHGQFPKKVLDQANIDRQLSFRWIKKQQVSPSIESSIFAIQDQTIMTRQHQRDILKEPVDGRCRLCATKDETTQHIISGCEKLAGTYYVKRHNNLVQYVYWCLAKKHKIKVSDLWWKETLTQPQVNENETAKILWEMPVQTDITVTHNRPDLIYIDKNTNKTFLIDISVPSDYNIGAKEIEKLSKYHLLKTEVSRLWDTKTTIIPIVIGATGVVAKSLSKYIDKLDAHIDINILQKQAAIHTSTIISKVLGDTVFVHVRNTTDEITHNTQNNPMSLDTQNTRQSLATIDHDTQNPTQTQNTNQRRGRRRGRGRRGNI

SEQ ID NO: 31811 - protein, 1392 aa, Graphium doson
MMETSNRTRIGPLPEGDRRGTFGADAGRDSGQTVSDSLLNRRARVGEPENVTADQGDGEGTSDALQNRALPTDSAGSSVRTTDIAVSDDRRRKWSTEEMNELMFCYFKARVEGPGYIGRLQQLFTTRNPTNSKIHKFNGNTLATQARRIIKQNVISQELLHLIKSRAEEMIEINTDVEHTSQVTYRPPILPTQNIVQQEQQIVYLTFDNYNTINPIIPIDNTQAENIDRIIQNIDVNEDQDRLILEFLQVLAETKETPIGDRLFLPKAKINRDFMNNLQKLNTYLPNLLVTHCSLREINNIIYAAAKTLIINNNQKPYQPNSIIKPKCDPPWKKRIENKINKLRKELGQLIEIERGVSTSRMIRIKRNLYNKYNIENLNAHKNTIEILKQKIKALAGRIKRYVTISTKKEQNKLFNENEHKLYRSLDSNSITNITLPNKTDLEEFWVSILSNPVQYNNTPEWIKELEISTNEYNTLEITTISEEQVKAALHKLLNWKTPGIDKIQNYYLKYFTSVHNHLALLYTKLVTGSETIEGWFTTGQVILIPKNNNTEEPKNWRPIACLPTMYKLLTSVLANMLQRHCQENNILAVEQRGCRRNTRGCKDHLMVNKAILEDAHQFQKNLSMAWIDYQKAFDSISHEWLLKILEVYKCPPIIKSFLELTMPLWNVIMTARGTETSITTAPIHIRRGIFQGDSLSPLLFCLAINPLSFILNKYEMKGYKLKDSVWVNHLLYMDDLKLFTNSRENLKVLLDSVEIFSNDIGMRFGLEKCNIIDIKSGYRSNASGEGHILLDGKMIKTLGPTDQYKYLGIHESGKLEHSIVKDKITKEYFKRVKKLLCTHLNSRYIIRGINTYAVPVLLYSFGIINFKTTDLQKIDIKTRKLLAINKAHQQKADVERLYLPITHGGRGLLNIEDIHKAQILKYSQYLQSGTDYLIKALVLHDMHRIKYSISKDARAIESELRISRENVHTAKTIKDIIFKIHNTRWRNKPLHGQFPTKVLDQNNIDKELSFLWLKRQQLSPKLESSIFAIQDQAVMTRQHQRDILKAPVDGKCRLCVTKDETTQHIISGCDKLAGTYYVKRHNNLVQYVYWCLAKKHNIEVSDLWWKETLIQPRVTENSTTKILWEIPIQTDITITHNRPDLIYIDKNSNKTYLIDITVPSDYNLGAKEIEKLSKYHLLKTEITRLWNTQAAVIPIVIGATGVVAKSIKRYIDKLDAKINLPILQKQAAIHSSTIISKVLGDTVFVSNQHHTIQTQQSSNITQATNVPNASPPTPNTHQIINSSEMLQSINTNNEIISDDCYRQDNTQETHTKQTHEIQDNIAQPIDIIYTADTQMAQNIRGKRGRGRSRLVRQTDEQNLNQQPRTSNQSPTQTQQILNRTLRRGRSKNIEQ

SEQ ID NO: 31812 - protein, 977 aa, Ophraella communa
MYLKNFHKINKFLPNLLIINTSLREINDIIYATAKTLIVNNNQTPFKPKTTIKPKSDPLWKRRIQTKVEKFRQELGQLIEIKRGVSTRKMIRIKAKLYTKYKILNTNDHDNMMETLKQKIKALAGRIKRYDDLNNNKEQNKMFKENEHRFYRSLNKTGNEEVRIPNKEETEEYWSSILSVPKRCNGEAKWIEDVENSHTNINTQELEQINESQIKVATKKLHNWKTPGLDKIHNYYLKYLTSTHKYLASLFTNILFGTEELPKWFTTGQVILIPKSGNTENPKNWRPIACLPSMYKLLTSVLANILYSHCHENNIMADEQRGCQRGAGGCKDHLMVNKAICEDAHQSKKNLSMAWIDYQKAFDSVSHEWLLKMLDIYKCPSVIKRFLTITMPYWQVTMTVRGSQDSITTDPIHIRRGIFHGDSLSPLLFCLALNPLSHILNKNQLKGYKLKDSNYINHLLYMDDLKVYANTENNLKVLLDSVEIFTRDVGMNFGLNKCNVLHLKSGRRNTTIGQGHVLLTGDSFKELPIDDTYKYLGVHESGKIDHSAIRELITKEYYKRVKKLTSTHLNSRNLIKGINTYAVPVLLYSFGVINYKLSDLQKIDVKTRKLLNIKKAHQQKADVQRLYLPIAEGGRGLINVEFMYKTQILKYKYYLNSGTDYLMQSIVHHDTQRDRYSIIQEADKIQQELQLQRGNNLTPKQIKDAINKIHNTKWRNKPLHGQFPKKVLDQNNIDTELSFRWMKRQPVTPSIESSIFAIQDQAIMTRQHQRDILKEAVDGKCRLCSNKDETTQHIISGCEKLAGTYYAKRHDSLVQYVYWCIAKKHSIEVSNLWWKETEHKPQVKENESAKIMWEMPVQTDVTVTHNRPDIIYTDKTTNHTYLIDITVPSDYNLGPKEIEKLSKYHLLKTEISRLWNTRTTVIPVVIGSTGVVSNSLQKYIDHLDCNINISILQKQAAYHTTIIISKVLGDTVFDNNF

SEQ ID NO: 31813 - protein, 1228 aa, Satarupa nymphalis
MADPLWSMNRNNLRDWPLPGGNRRGTSGADAGRLSMRTVSGSLLNRRARVGGTENITADQRGREGTDEVLQSRLLADNSAGSSVSTTSTIISNDKRRKWSTEELEELMFCYYKAKIGGSGYIERLQEIFKTRNPQNPKIHNFNGNTLSNQARRIIKQKVISQEVLDRIQKQVEVVATVGNIVVIEEETEGQDTRSVQSTTFTRQETQCRLHVQQQTQPLQYTNEQIETIDELTRNILVNEDQDPLILNFLQILAETKDTPLEERLLLPKAKINKKFIENLNVLNAYLPNLLVTNTSLREINNIIYSTAKTLIINNNQKPYTAVNMSKVKSNPPWKRRIQNKIETCRKELGQLIEIKRGINSSRMHKIREKLNAKYNIHNENDHNNVIEVLKQKVKALAARLKRYEDAHKKKEQNKLFCENEHRLYRTLGGSCNQNIEIPRKEEIEDFWTSILSIPEKHNADAKWIKELETSVSQVNTNNIEEIKEDQVKLATRKLLNWKTPGIDRIQNYYLKYITSAHKYLAALYTDIVSGQIMLDEWFTTGQVILIPKSKNTEDAKNWRPIACLCSMYKLLTSVLSNLLYEHCETNNILAVEQRGCRRGTRGCKDHLMVNKAILEDAHKSQKNLSMAWIDYQKAFDSVSHDWLIRILEIYKCPRMITQFLKITMPNWKVIMTARGSKNTVTTNPIYIRRGIFQGDSLSPLLFCLAMNPLSFILNKYKMKGYKLKDSFWINHLLYMDDLKVYANHKSNLKVLLDSTEVFTNDIGMRFGLDKCNVLHLSSGYRSDTTGGGHALLNGKTFQQLAIGETYKYLGVHESGKIQHNVIRDQISKEYFKRIKKLLNTHLNSRHMIKGINSYAIPVLLYTFGAIHYKNSDLKKIDVKTRKILAMSKAHQQKAEVERLYLPVTQGGRGLINVEHMYETQLVKYKQYLEVENDYLIKAIVEHDTRKDKHSIMKVAKDTEEKLHLPRGNKHTDKEIREAVVKNNNIIWRSKQLHGQFPKKVLDANNIATDLSFRWMKKQQVTPSLEASIFAIQDQAIMTRQHQRDILKEPVDGKCRLCANKDETTQHIISGCEKLAGTYYVKRHNNLVQYVYWCLAKKNNIEVSKLWWKETLFQPQVKENENAKLLWEMPVQTDVTVTHNRPDLIYINKNTNRTYLIDITVPSDYNIGAKEIEKLSKYHLLKTEVSRLWKTKATVIPIVIGATGVVAKNIIKYIDKLDSNIDITILQK

SEQ ID NO: 31814 - protein, 1367 aa, Pachythone gigas
MERQNSNYSQGPLPGGDRRGTSGADAGRDSMRTISGSLLNRRAGVGGTENITAELQGGQGTDDALQSRASPTDSVGSSVTTTNNAVNDDRRRKWSTEELQELMYCYFKARSSGVGYIGKLYTLFKDRNPNNPKIHKFNGNTLSNQARRIIKQNVLSQELLNRIQKQAEGALEITETSEQNEGNQEEQNTTLTINTMTQNAQYTDYTEEQAEAIDELAQNIEVNEDLDPLVLNFLQVLAETKETPIPDRLFLPKAKINSNFLKNLHTLNKYLPNILITNCSLRDINNIIYAVARTLIINNKQSPYVPKTTFKSKSDPPWKKRIQSRIETFRRELGQLIELSRGINTRRMLKIKDKLYTKHNIQNENDHKNIEETLKQKIKALAGRLKRYEDLNTKKKQNSLFKENEHKLYRSLENNKNKDIKLPSKEKVEEFWSSILSNPAQYNAEANWIKEVQISSEAVDTTDVDEISEEEIKSAIRKLQNWKTPGTDKIQNYYIKYLTSVHKYLASVFTRIIKQREPLEEWFTTGQVILIPKNEKTEDPKNWRPIACLPTIYKLLTSVLSNVLYNHCHQNGIMAIEQRGCRRGARGCKDHLMVNKAILEDAHHSQKNLSMAWIDYQKAFDSVSHEWLIKVLDIYKCPPVIKKFLELVMPSWRVIITARGTQSSLTTEPISIKRGIFQGDSLSPLLFCLAINPLSFILNKYEMKGYKLKDSLWINHLLYMDDLKIYANNRHNLKVLLDSVEIFTKDIGMRFGLDKCNTIHLSSGYRSNVMGEGHILLNGETIKQLAMGDRYKYLGVHESGKIEHNVIKDQITKEYFKRIKKLLNTHLCARNLIKGINTYAVPILLYSFGIINYKNNDLKKIDVKTRKLMAIKKAHQQKAEVERLYLPVIQGGRGLLNIEYMYKTQIVKYKHYLEAGSDDLIKAIVEHDIHRDKYSIINEARTIENELNLVQGNTYTSKELKEATTKRHNEIWRSKPLHGQFPKKVLDQANINTELSFLWIKKQQISPSIESSIFALQDQAVLTRQHRRDIMKEQIDGKCRLCASKDETTQHIVSGCEKLAGTYYVKRHNNLVKYVYWCLAKRHNLEESGLWWKETLIQPQVKENETAKILWEIPIQTDITVTHNRPDLIYINKSNNKTFLIDITVPSDYNIGPKEIEKLSKYHLLKTEISRLWNTRATVIPIVIGATGIVAKSIKKHIDNLDVPIDITILQKQAAIHSSTILSKVLGDSVFVHNTEIHDTQHTQINQQSLDILVTQQSCNTQTTPDSSTSQITQGLNITQTTQQLSNTQISTQKSTSTVSQAHDTHLTPSIRIRRQKRRKETQTTQQSLTTQTTQQSSITQTTQQSSITQTTQQLSSSIRARGRKKR

SEQ ID NO: 31815 - protein, 1232 aa, Mimoniades nurscia
MPREGRTLETLRVRYTPMTNGALVTFANMKRQFRNRTLGPLPGGDRRGTSGADAGRDSMQTVSDSLLNRRARVGRPENTTADQRGGEGTDDALQSRALPAHSVGASVSTTNNAMSDDRRRKWSTEELQELMFCYFKARFDGVGYIVRLHKLFIERNPNNPKIHKFNGNTLANQARTIIKQNVISQELLDRIQKEAEGRIDTVENLEQTIVEEEVTAPSNTITPSTQHIDYAIEQIESIRQLAQNIEVNEDQDPLILNFLQILSETKETVIEERQLLPKAKINKRFLENLCKLNKFLPNILATMNSLREINNIIYAAAKTLIINNNQVPYTPKNTFKNKSDPPWKKRIQIKIEKFRKELGQMIEIGRGNNTRRMTKIKDKLYRQYSIQNENEHRNIEETLKQKIKALASRIKRYEDINNRKKQNSLFNENEYKLYRSLGGNNFKDIKLPDKEIVEEFWSSILSKPVHYNSKAKWIKEVEMASSEVNTIDIEEISEEHIKHAIKQLLNWKTPGIDKIQNYYLKYLTSVHSYLGSIFTKIVSGKETLEDWFTTGQVILIPKNEQTEDPKNWRPIACLPTMYKLLSSVLSNILYDHCHQNNIIAIEQRGCRRGARGCKDHLMTNKAILEDAHQSQKNLSMAWIDYQKAFDSVPHQWLVKVLDIYKCPPIIKNFLELVMPSWKVTMTARGTRNSLTTEPINIKRGIFQGDSLSPLLFCLAINPLSFVLNKYEMKGYKLKDSLWINHLLYMDDLKVYANNRHNLKVLLDSIEIFTADIGMKFGLDKCNTIHISSGCRNKVTGEGHILLDGEIIKQLAIGDRYKYLGIHESGKIEHSIVKDQINKEYFKRIKKLINTHLNSRNLIKGINTYAIPVLLYSFGVINYKNSDLKKIDTKTRKLLAIKKVHQQKADVERLYLPVTQGGRGLLNVEYMYKTQIVKYKQYLKAEGDELIKAIVTHDKHRDKYSIIKEAQEIQNQLHLARKDIHTDRDIKEAIVKRSKDIWRNKQLHGQFIKKVLDQTNIDTELSFKWIKKQQISPTIESSIFAIQDQSIMTRQYRRDILKESIDGKCRLCACKDETTQHILSGCEKLAGTYYIKRHNNLVKYIYWCLAKKHKIEVSSFWWKETLIQPQVKENETAKILWEIPVQTDVTITHNRPDLIYIDKTNNRTYLIDVTVPSDYNIGPKEIEKLSKYHPLKREVSRLWKTQTTIIPIVIGATGIVGKNIKKYIEKLDTFIDI

SEQ ID NO: 31816 - protein, 1290 aa, Helias cama
MEKSSKRYRKGPLPGGDRRGTSGAGAGRDSMQTVSDSLLNRRARVGGPENITADQRGGEGTDDVLQSRASPTDSVGSSVTTTSNVISDDRRRKWSTEELQELMFCYFMARSEGAGYIDRLYKIFAERNPNNPKIHKFNGNTLSNQARRIIKQNIISQELLDRIQKQAEGSEEAIENSELNLIEVVEEETTTHSNLTHNTHHIEYSTEQIQIIDQLAQNIEVNEDQDPLILNFLQILSETNEITIEERQLLPKAKINKSFVTNLCKLNKFLPSILATNNSLREINNIIYAAAKTLIVNNNQLPFTPKQTFKMKSEPPWKRRIQTKLEKFRKELGQLIEIGRGINTRRMRKIKDKLYRQHNIQNENEHRNTEEILKQKIKALAARIKRYEDINNRKEQNSLFNENEHKLYRSLGGSSFKDIKLPNKEVVEEFWSSILSNPIHYNSEAKWIKEVEASTGEVSTVDVEEISEEHIKHATQKLLNWKTPGVDKIHNYYLKYLTSVHSYLGSTFNKIVLGEETLEEWFTTGQVILIPKNEQTEDPKNWRPIACLPTMYKLLSSVLSNILYNHCHQNNIIAIEQRGCRRGVRGCKDHLMVNKAVLEDAHQHQKHLSMAWIDYQKAFDSVPHEWLTKVLDIYKCPPIIKRFLELVMPSWRVIMTARGTNKSLTTEPINVRRGIFQGDSLSPLLFCLAINPLSFVLNKYEMKGYKLKDSIWINHLLYMDDLKLYTNNKNNLKVLLDSVEIFTKDIGMRFGLDKCNTIHISSGHRNKVTGEGHILLGGEIIKQLEIGDRYKYLGIHESGKIEHSVIRDQITKEYFKRIKKLINTHLNSRNLIKGINTYAIPVLLYSFGIINYKNSDLKKIDTKTRKLLAIKKIHQQKAEVERLYLPVTQGGRGLLNIEYTYKTQIVKYKQYLQAKGDELIQAIVEHDIRRDKYSIIKEAQAIETQLNLALENIHTDKDIREAIVKRSKDVWRNKNLHGQFLKKVLDQTNIDTQLSFKWIKKQKISPALESSIFAIQDQCIMTQQHRRDILKEPVNGKCRLCASKDETTQHIVSGCEKLAGSYYVKRHNNLVQYVYWCLAKKHGMEVSNLWWKETLTQPHVKENETTKILWEMPVHTDVTVTHNRPDLIYVDKINNKTYLIDISVPSDYNIGPKEIEKLSKYHLLKNEVSRLWKTQTTIIPIVVGATGIVGKSLLKYIGRLDTFIDITILQKQAAIHSSTILSKVLGDTVFVKNTQNNDTQNTGQPTQIVQTPNPQNTPTQFLTNTADPVSRQTQGGTQRSGRIRKRRKKN

SEQ ID NO: 31817 - protein, 1292 aa, Cycloglypha thrasibulus
MEKSSKRYRKGPLPGGDRRGTSGAGAGRDSMQTVSDSSLSRRARVGEPENITADQRGGDGTDDALQSRASPTDSVGSSVTTTSNKISDDRRRKWSTEELQELMFCYFKARSEGAGYIDRLHKLFAERNPNNPKIHKFNGNTLSNQARRIIKQNVISQELLDRIQKHAEGIIDTIESTEQNLFEEEEEATTHSHLTITHNTHHIEYSTEQIHEIDQLARNIEVNENQDPLILNFLQILSETNETTIEERQLLPKAKINKSFVTNLCTLNKFLPSILATNNSLREINNIIYAAAKTLIVNNNQLPFTPKHTFKTKCDPPWKRRIQTKIEKFRKELGQLIEIGRGINTRRMIKIKDKLYRQHNIQNENEHKNIEEVLKQKIKALAARIKRYEDINNKKEQNSLFSENEHKLYRSLGGNSFKDIKLPSKEVVEEFWSSILSKPIHYNSEAKWIREVEASTSEVSTAEVEEISEEHIKHATQKLLNWKTPGIDKIHNYYLKYFTSVHSYLGSIFSKIISHKEILEEWFTTGQVILIPKNDQTEDPKNWRPIACLPTMYKLLSSVLSNILYNHCHQNNIIAIEQRGCRRGVRGCKDHLMVNKAVLEDAHQCQKNLSMAWIDYQKAFDSVPHEWLTKVLDLYKCPPIIKRFLELVMPSWRVIMTARGTQNSLTTEPINIRCGIFQGDSLSPLLFCLATNPLSFVLNKYEMKGYKLKDSLWINHLLYMDDLKLYANNRHNLKVLIDSVEIFTRDVGMRFGLDKCNTVHISSGHRNNVTGEGHILLGGEIIKQLEIGDRYKYLGIHESGKIEHSIVRDQITKEYFKRIKKLINTHLNSRNLIKGINTYAIPVLLYSFGIINYKNSDLKKIDTKTRKLLAMKKIHQQKAEVERLYLPVTQGGRGLLNIEYMYNTQIVKYKQYLKAEADELIKAIVEHDIHRDKYSIIKEAQAIETQLHLETGNVHTDKDIREAIVKKRKDVWRNKSLHGQFLKKVLDQTNIDTKLSFKWIKKQKISPTLESSIFAIQDQCIMTQQHRRDILKEPVDGKCRLCACKDETTQHIVSGCEKLAGNYYVKRHNNLVQYVYWCLAKKHKIEVSNLWWKETLTQPQVKENETAKILWEMPVHTDVTITHNRPDLIYIDKVNNKTYLIDISVPSDYNIGAKEIEKLSKYHLLKNEVSRLWKTQTTIIPIVVGATGIVGKNIQKYIDKLETFIDITILQKQAAIHSSTILSKVLGDTVFVNNIQNDETNNTGQPTHAVQVPNTQNTSAQSLSITADPMTRQTPEDTQRRSGRGRKRRRIN

SEQ ID NO: 31818 - protein, 1249 aa, Cecropterus evenus
MTNGALVTFVNMERQFRNRTLGPLPGGDRRGTSGADAGRDSMQTVSGSLLNRRARVGRPENTTADQRGGEGTDDALQSRASPTNSVGSSVSATNNAISDDRRRKWSTEELRELMFCYFKAKLGGTGYIDRLHKLFTERNPNNPKIYKFNGNTLSNQARRIIKQNVISQELLDRIQKHAEGRIDTVENLERNVVEAATAPSNTISPSTHHIDYSIEQIQTIDHLTQNIEVNEDQDPLILNFLQIFCETKEITIEERQLLPKAKINKRFLENLCKLNKFLPNILATNNSLREINNIIYAAAKTLIINNNQIPFTPKNTFKNKCDPPWKKRIQFKIEKNRKELGQLIEIGRGNNTRRMTKIKDKLYRQYNIQSETEHKNVEETLKQKIKAWAGRIKRYEDINCRKEQNSLFNENEHKLYRNLGGNSFKDIKLPDKETLEGFWSSILSNPIHYNSSAKWIKEIEMESNAVNTIEIEKISEEHIKHAIKKLLNWKTPGIDKIQNYYLKYLTSVHSYLGSIFTKIVAGKEILEEWFTTGQVILIPKSEQTEDPKNWRPIACLPTMYKLLSSVLSNILYDHCHQNNIIAIEQRGCRRGARGCKDHLMVNKAILEDAHQSQKNLSMAWVDYQKAFDSVPHEWLVRVLDIYKCPPIIKRFLELVMPSWRVIMTARGTQNLLTTEPIYIKRGIFQGDSLSPLLFCLAINPLSFILNKYEMKGYKLKDSIWINHLLYMDDLKIYANNRHNLKVLLDSVEIFTRDIGMRFGLDKCNTIHISSGRRNDVTGEGHILLEGEIIKQLAIGDRYKYLGIHESGKIEHSLVKDQINKEYFKRIKKLINSYLNSRNLIKGINTYAVPVLLYSFGVINYKNSDLKKIDTKTRKLLAIKKAHQQKAEVERLYLPITQGGRGLLNIEYMYKTQIVKYKQYLKAEGDELLKAIVTHDIHRDKYSIIKEAQEIENQLHLGRKDIHTDKDIKEAIVKKSKDVWRNKQLHGQFIRKVLDQTNIDTELSFKWIKKQQISPTIESSIFAIQDQCIMTRQHRRDILKEPVDGKCRLCACKDETTQHIISGCEKLAGNYYVKRHNNLVQYVYWCLAKKHKIDVSSLWWKETLVQPQVKENETAKILWEMPVQTDVTITHNRPDLIYIDKTHNRTYLIDVTVPSDYNIGPKEIEKLSKYHLLKNEVSRLWKTQTTIIPIVIGATGIVGKNIKKYLEKLDTFIDITILQKQAAINSSTILSKVLGDTVFVNNTQNTHNTE

SEQ ID NO: 31819 - protein, 1323 aa, Ardaris eximia
MPREGRTLETLRVRYTPMTNGALVTFVNMERQFRNRTLGPLPGGDRRGTSGADAGRDSMQTVSDSLLNRRARVGRPENTTADQRGGEGTDDALQSRASPTDSVGSAVSTTNNTISDDRRRKWSTEELQELMFCYFKARFDGVGYIDRLHKLFTERNPNNPKIHKFNGNTLSNQARRIIKQNVISQELLDRIQKHAEGRIDTIENLEQNVVEEELTAPPNTITPSTHHIDYSIDQIRTIDKLAQNIEVNEDQDSLILNFLQIFSETKETLIEERQFLPKAKINKHFLENLCKLNKFLPNILATNNSLREINNIIYAAAKTLIINNNQIPYTPKNTFKNKSDPPWKKRIQVKIEKFRKELGQLIELGRGNKTHRMTKIKDKLYRQYNIQNENEHRNIEETLKQKIKALAGRIKRYEDINSRKKQNNLFTENEHKLYKSLGSNSYKDIKLPDKEKVEEFWSSILSNPIHYNSKTKWIKEIEMASSEFNTIDIEEISEENIKDAIKKLLNWKTPGIDKIQNYYLKYLTSVHSYLGSTFTKIVSGKEMLEEWFTTGQVILIPKNEQTEDPKNWRPIACLPTMYKLLSSVLSNILYDHCHGNKIIAIQQRGCRRGARGCKDHLMVNKAILEDAHQSQKNLSMAWVDYQKAFDSVPHEWLVKVLDVYKCPPIIKRFLELVMPSWKVIMTARGTNNSLTTEPIYVRRGIFQGDSLSPLLFCLAINPLSFILNKYEMKGYKLKDSLWINHLLYMDDLKVYANNRQNLKVLLDSVEIFTRDIGMRFGLDKCNTIHISSGRRNKVTGEGHILLEGEIIKQLGIGDRYKYLGIHESGKIEHSTVRDQINKEYFKRIKKLINTHLNSRNLIKGINTYAIPILLYSFGVINYKNSDLKKIDTKTRKLLAIKKAHQQKAEVERLYLPITQGGRGLLNVEYMYKTQIVKYKQYLKAENDKLIKAIVTHDIHRDKYSIIKEAQDIESQLHLVRDDVHTDKDIREAIVKRCKDIWRNKQLHGQFIRKVLDQTNIDTELSFKWIKKQQISPILESSIFAIQDQCIMTRQHRRDILKESVDGKCRLCACKDETTQHIISGCEKLAGSYYIKRHNNLVQYIYWCLAKKHKIEVSSLWWKETLIQPQVKENETAKILWEIPVQTDVTITHNRPDIIYVDKTSNRTYLIDVTVPSDYNIGPKEIEKLSKYHLLKNEVSRLWKTQTTIIPIVIGATGIVGKNIKKYTDKLNTLIDITILQKQAAINSSIILSKVLGDSVFVNNTQNIQNTQQPRQPIQAPNTQNISEQLLTSTTDSTIQHLTNTGASHCSPHSGIQRKIVRRGRILK

SEQ ID NO: 31820 - protein, 1248 aa, Deilephila porcellus
MERQSRDERIGSLPGGDRRGTSGADAGRDSMRTVSGSQLNRRARVGSPEDITADLRGGEGTDDVLQGRAPPTSSVGSSAMTTSNENNDKRKKWSTEELQELMFCYFQAKAEGSGYISRLQQIFTQRNPNNPKIHKFNGNTLSNQARRIIKQNIISKELLDEIQKQAVDSESLENREGNVYDVYQQPTQNTIPQTLNTDHIIYNTPEQAQAIEHQTQNIEVNEDQNPLILDFLQILAATKETPLPDRLFLPKAKINKHFLQNFHILNKYLPNLLITNNSLMEINNIIYAAAKTLIMKNQQIPYAPKNTLKTKSEPPWKKRIKIKIDKYRKDLGQLIEINRGINTRRMLKIKDKLYRKFNIQSENDQKNAIETIKQKIKALAGRIKRYEDINTKKEQNKLFNENEHLLYRSLGGQSFKDIKLPSKVGIDEFWSSVLSNPIQYNNEATWIKKVEESSNEIRTINTEEILEEHVKSATKKMLNWKTPGIDKIHNYYIKYFTSTHKYLALVYTKIVTGIEALEDWFTTGQVILIPKNEQTEDPKNWRPIACLPTMYKLLTSILTNTLYTHCHDNNIIAVEQRGCRRGARGCKDHLMVNKSILEDAHKSQKNLSMAWIDYQKAFDSISHNWLLKVLDIYKCPPIIKRFLQLTMPAWKVVMTARGHRDTITTDPIYIRRGIFQGDSLSPLLFCLALNPLSFILNKYDRKGYKLKNNVYINHLLYMDDLKIYSNNSNNLKVLLNSVEIFTSDIGMKFGLDKCNILNISSGRRSKATGEGHILLNGEKIKQLGIEDKYKYLGIHESGKIEHSTIREQITKEYFRRIKKLLNTHLNSRYLIKGINTYAIPVLLYTFGIINYKTSDLKKIDTKTRKLLAINKAHQQKADVERLYLPVSEGGRGLINVEYMYKTQILKYKQYLIGEHDYLIKAIIEHDKHKDKFSIVNEAQTIERELHLPQGNIYLEKEIKLAIIKNRNDRWRSKQLHGQFPKKVLDQANVNKELSFDWIKKQHIAPKIESSIFAIQDQAVITRQHQRDILKEQIDGKCRLCANKDETTQHIISGCEKLAGTYYVRRHNNLVQYVYWCLARKHKIEVSDFWWKETLTQPQIKENESAKILWEFPVHTDITVTHNRPDIIYIDKNNNKTYLIDITVPSDYNIGAKEIEKLSKYHLLRNEVSRLWNTQAIIIPVVIGATGIVAKSINKYIDQLNCNINISILQKQAAIHTSTILSKVLGDTVFVTTQRSLYPQDTPNVQNNN

SEQ ID NO: 31821 - protein, 1261 aa, Thyatira batis
MEMNRNNNRIGPLPGGDRRGTLGADAERDSMQTVSGSLLNRRARAGGPEVTTADQRGGEGTGDALQSRASPTDSVGSSVTTRNMLENDDRRKKWSIEETKELMYCYFKARSAGSGYIGRLQAIFTERNPNNPKIHKFNGNTLSNQARTIIKKNVISQELLDRIQKQAEGLITTETPEPIFNENEQQNTIPTQTHNTQPHIQAYTQSHTQSHIQSHIQYTQHTPEQAHTIDQLTNNIEVNEDQDPLILRFLQLLAETKETPIEERLLLPKAKINKHFLENLKILNKYLPNLLITNNSLRGINNLIYAAAKTLIITNNQTPYSPQTIIKPKCDPPWKKRIQIKIEKLRKELGQLIEIERGVNTRKMIKIKCKLYSKYNIQSENDHKNMAETIKQKIKALAGRIKRYEDMSNRKEQNRLFKENEHRLYRSLEGNSNKDIQIPSKENVETFWTSISSNPIQYNDEAKWIKEVELSQNEVNTIDSDEITIDQVKFAIRKLLNWKSPGIDKIQNYYLKYFTSVHEYLASLFTKIATGTESLENWFTTGQVILIPKNDNTTEPKNWRPIACLPSMYKLLTSVLANVLYSHCHENNIISVEQRGCRRGARGCKDHLMVNKAILEDAHQSQKNLSMAWIDYQKAFDSVSHEWLLKILDVYKCPPIIKRFLELSMPAWRVIMTARGSKDSITTEPIYIRRGIFQGDSLSPLLFCLAINPLSYILNKYELKGYKLRDNIWINHLLYMDDLKVYANNKSNLKVLLESVEIFTSDIGMKFGLDKCNTIHISSGHRNSVSGGGHILLSGETVKQLAIGDTYKYLGVNESGKIEHNNIRDQVTKEYFKRVKKLLNTHLSSRFLIKGINTFAIPVLLYSFGIINYKKVDLKKIDIKTRKLLAMNKAHQQKAEVERLYLPLTQGGRGLINVEQMYKSQIVKYKQYLSSETDHLIKAIVQHDTHRDKYSIVKEAQEIERALQLTPGNTHTDKEIKESIIKYQNKTWRNKQLHGQFPKKVLDQANVDSELSFKWLKKQQISPSIESSIFAIQDQAVMTRQHQRDILKEPVDGKCRLCACKDETTQHIISGCEKLAGTYYVQRHNNLVQYVYWCLAKKHKMEVCNLWWKETLIQPQVKENEAAKILWEMPVQTDVTVTHNRPDLIYIDKVNNKTFLIDISVPSDYNIGPKEIEKLSKYHLLKTEVSRLWNTQTTIIPIVIGATGVVAKSINKYIDKLDTTVDITILQKQAAIHTSKILSKVLGDTVFVHNTTEHTQTNNID

SEQ ID NO: 31822 - protein, 1325 aa, Cecropterus phalaecus
MPREGRTLETLVVRYTPMTNGSLVTFVNMERQFRKRTLGPLPGGDRRGTSGADAGRDSMQTVSDSLLNRRARVGGPENITADQRGGEGTDDALQSRASPTDSVGSSVSTTNNKISDDRRRKWSTEELQELMFCYFKARLDGAGYIDRLHKLFAERNPNNPKIHKFNGNTLSNQARRIIKQNVISQELLDRIQKHAEGRIDPVENLEQNVVEEEVNAHSDTITPSTHNIDYSIEQIQTIDQLTHNIEVNEDQDTLILSFLQILSETKETVIKERQLLPKAKINKSFLENLCKLNKFLPSILATNNSLREINNIIYAAAKTLIINNNQIPYTPKNTFKNKSDPPWKKRIQIKIEKFRKELGQLIELGRGNNSRRMSKIKDKLYRHYNIQNENEHRNIEEILKQKIKALAGRIKRYEDINSRKEQNSLFNENEHKLYRTLGGNSFKDIKLPDKEIVQEFWSSILSKPIHCNSKAKWIKEIEMASSEVNTIDIEEISEEHIKHATKKLLNWKTPGIDKIQNYYLKYLTSVHSYLGFIFTKIVSGKETLEEWFTTGQVILIPKNEQTEDPKNWRPIACLPTIYKLLSSVLSNILYDHCHQNNIIAIEQRGCRRGARGCKDHLMVNKAILEDAHQSQKNLSMAWIDYQKAFDSVPHEWLVKVLDIYKCPPVIKRFLELVMPSWRVIMTARSSQNSLTTEPIYVRRGIFQGDSLSPLLFCLAINPLSFVLNKYEMKGYKLKDSLWINHLLYMDDLKIYANNRHNLKVLLDSVEIFTRDIGMRFGLDKCNTIHISSGHRKNVTGEGHILLEGDVIKQLAIEDRYKYLGIHESGKIEHSIVRDQIVKEYFKRIKKLINTHLNSRNLIKGINTYAIPVLLYSFGVINYKNSDLKKIDTKTRKLLAIKKAHQQKAEVERLYLPVTQGGRGLLNVEYMYKTQILKYKQYLKAEGDELIKAIVTHDIHRDKYSIIKEAQEIENQLHLARENIHTDKDIREAIVKRCKEIWRNKRLHGQFIKKVLDQTNIDTELSFKWIKKQQISPTIESSIFAIQDQCIMTRQHRRDILKEPVDGKCRLCACKDETTQHIISGCEKLAGNYYVKRHNNLVQYVYWCLAKKHKIEVSSLWWKETLIQPQVKENETAKILWEMPVQTDVTITHNRPDLIYIDKTNNRTYLIDVTVPSDYNIGPKEIEKLSKYHLLKNEISRLWKTQATIIPIVIGATGIVGKNIKKYIEKLDTFIDITILQKQAAINSSTILSKVLGDTVFVNNTQNTQNTEQLTHTGQTSNTHNTSELLLTNTTDLSTQQSQESCIAARTRERGGRQRGNVRRRGRTLK

SEQ ID NO: 31823 - protein, 1248 aa, Deilephila porcellus
MERQSRDERIGSLPGGDRRGTSGADAGRDSMRTVSGSQLNRRARVGSPEDITADLRGGEGTDDVLQGRAPPTSSVGSSAMTTSNENNDKRKKWSTEELQELMFCYFQAKAEGSGYISRLQQIFTQRNPNNPKIHKFNGNTLSNQARRIIKQNIISKELLDEIQKQAVDSESLENREGNVYDVYQQPTQNTIPQTLNTDHIIYNTPEQAQAIEHLTQNIEVNEDQNPLILDFLQILAATKETPLPDRLFLPKAKINKHFLQNFHILNKYLPNLLITNNSLMEINNIIYAAAKTLIMKNQQIPYAPKNTLKTKSEPPWKKRIKIKIDKYRKDLGQLIEIDRGINTRRMLKIKDKLYRKFNIQSENDQKNAIETIKQKIKALAGRIKRYEDINTKKEQNKLFNENEHLLYRSLGGQSFKDIKLPSKAGIEEFWSSVLSNPIQYNNEATWIKKVEESSNEIRTINTEEILEEHVKSATKKMLNWKTPGIDKIHNYYIKYFTSTHKYLALVYTKIVTGIEALEDWFTTGQVILIPKNEQTEDPKNWRPIACLPTMYKLLTSILTNTLYTHCHDNNIIAVEQRGCRRGARGCKDHLMVNKSILEDAHKSQKNLSMAWIDYQKAFDSISHNWLLKVLDIYKCPPIIKRFLQLTMPAWKVVMTARGHRDTITTDPIYIRRGIFQGDSLSPLLFCLALNPLSFILNKYDKKGYKLKNNVYINHLLYMDDLKIYSNNSNNLKVLLNSVEIFTSDIGMKFGLDKCNILNISSGRRSKATGEGHILLNGEKIKQLGIEDKYKYLGIHESGKIEHSTIREQITKEYFRRIKKLLNTHLNSRYLIKGINTYAIPVLLYTFGIINYKTSDLKKIDTKTRKLLAINKAHQQKADVERLYLPVSEGGRGLINVEYMYKTQILKYKQYLIGEHDYLIKAIIEHDKHKDKFSIVNEAQTIERELHLPQGNIHLEKEIKLAIIKNRNDRWRSKQLHGQFPKKVLDQANVNKELSFDWIKKQHIAPKIESSIFAIQDQAVITRQHQRDILKEQIDGKCRLCANKDETTQHIISGCEKLAGTYYVRRHNNLVQYVYWCLARKHKIEVSDFWWKETLTQPQIKENESAKILWEFPVHTDITVTHNRPDIIYIDKNNNKTYLIDITVPSDYNIGAKEIEKLSKYHLLRNEVSRLWNTQAIIIPVVIGATGIVAKSINKYIDQLNCNINISILQKQAAIHTSTILSKVLGDTVFVTTQRSLYPQDTPNVQNNN

SEQ ID NO: 31824 - protein, 1313 aa, Ctenoptilum multiguttatum
MANPLWSMTDKDSGKWPLPGGDRRGTSGADAGRLSMRTVSGSLLNRRARVGGTENVTADQRGGEGVDDALQSRASPTSSTGSSISTIHTERNDDRRKKWSTIELEELMFCYFKARAGGSGYIIRLQQIFTNRNPQNPKIHNFNGNTLSNQARRVIKQNVISQEVLERIQKRAEDDMHVRSAETLDETEEQRSRPNNIITHIPQEAQCTPQNTQEETQRTLHIDIGVETIDELTRNIQVNEEQDPLILNFLQILAETKETPLEERLLLPKAKINKSFIENLNSLNKYLPNLLVTNNGLRDINNILYATAKTLMINNNQIPYKPRNTTLKPKSDPPWKRRIQTKIEILRKQLGQLVEIKRGISSRRMMKIREKIYHKYNILNESDHDNVTELMKQRVKALAGRIKRYEDANTRKRQNKLFNENEHKLYRTLGENSKRDIKLPKKEVIEDFWTSILSTPINYNVEAKWIKEVEKSASQVNTTNIDEITEDQVRLATQKMHNWKTPGVDKIHNYYLKYITSAHKYLASLFTNLVTGKVSSEEWFTTGQVILLPKSENTEEAKNWRPIACLCSMYKLLTSVLSKVLHHHCEINNIIAVEQRGCRRGVRGCKDHLMVNKAILEDAHQAQKNLSMAWIDYQKAFDNMSHEWLLKVLDIYKCPPIVKQFLQLTMPKWRVIMTARGSKTTLTTEPIYIKRGIFQGDSLSPLLFCIAMNPLSFILNKYEMKGYKLKDSFWINHLLYMDDLKIYANHKSNLKVLIDSVEVFTHDIGMRFGLDKCNILHLNGGYRSNTVGEGHALLSGDTLHQLAIGERYKYLGVHESGKIQHNIIREQINKEYFKRIKKLLNTHLNSRNLIKGINTYAIPVLLYSFGVINYKNIDLKNIDIKTRKLLAIKKAHQQKAEVERLYLPVKQGGRGLINVENMYDTQIIKYKQYLKAENDHLIKAIVQHDIRKEKYSIIKEAQKIEDKLHLLQGKLHTNKEIRDAVIEYQNNKWRCKQLHGQFPKKVLDQNNIAKDLSFKWTKKQQVSPRLESSIFAIQDQAIITRQHQRDILKEPTDGKCRLCANKDETTQHIISGCEKLAGTYYVKRHNNLVKYVYWCLAKKHNVDVSNLWWKETLNQPQVKENESAKLLWEMPVQTDVTVTHNRPDLIYINKNTNQTYLIDITVPSDYNIGAKEIEKLSKYHLLKTEVSRLWNTQATIIPIVIGATGVVAKSIVKYIDKLDSKIDITILQKQAAIHTSTILSKVLGDTIFVHNIQDKPTQNIQHPSTTQQSPDIRQTSEAQQTQDTHISVNTRQTTHSSQSPNTSRIHGTKRAKR

SEQ ID NO: 31825 - protein, 1348 aa, Thisbe lycorias
MERQVSNSCIMPLPGGDRRGTSGADAGRHSMRTISGSPLNRRAGVGGTENVTADQWGGEGTDDALQSRASPTDSAGSPVTTTMNAVSDDRRRKWSTEELQELMFCYFKARVGGPGYIGRLHDLFAERNPNNPKIHKFNGNTLSNQARRLIKQNVLSQELLDRIQKQAEGILDLGQSTELNVVIEEEHNITQTHNIITQDTQPTEYTTEQVENIDNLTSNIEINEDADPLILNFLQVLAETKETPISDRLFLPKAKVNKCFLDNLHTLNNYLPNLLITNNSLREINNIIYAVAKTLITSNNQSPFVPKTTFKARSDPPWKARIKIKIEALRKELGQLIEIGRGVNTRRMIKIKDKLYRKYNVNSENDHKVVEETLKQKIKALAGRLKRYEDINSRKEQNKLFKENEHSLYRRLEESGTRKDIKLPSKERVEEFWTSILSNPAKYNNEAKWIKEVESSSQHVTTIELEVISEDKVNIAIKKLANWKTPGVDKIQNYYLKKLTSTHKYLASLFTNIIKQEEPMEEWFTTGQVILIPKNDQTEEPKNWRPIACLPTMYKLLTSVLANTLYDHCAQNHIMAIEQRGCRRGVRGCKDHLMVNKAILEDAHQSQKNLSMAWIDYQKAFDSVSHEWLLKVLDMYKCPSIIKKFLEIAMASWKVIISARGTQSSLTTEPISIRRGIFQGDSLSPLLFCLAINPLSSVLNRYEMKGYKLKDSIWINHLLYMDDLKIYANGRHNLQTLLDSVEIVTNDIGMRFGFDKCNVVHINSGYRSNVAGEGHILLSGEIFKQLASGDRYKYLGIHESGKIEHSVVRNQITKEYFRRIKKLLNTHLNSRNLIKGINTFAIPVLLYSFGVINYKNSDLKKIDTKTRKLLAIKKAHQQKAEVERLYLPVDQGGRGLLNVEYMYMAQIVKYKQYLKAEGDDLIKAIVEHDKHKDKYSIINEAEMIENQLNLTQGNIHTDKEIKEARIKRCKNVWRNKQLHGQFPKKVLDQANIDLDLSFLWIKRQQVSPGVESAVFAIQDQAIMTKQHLRDILKEPVDGKCRLCVTKDETAQHIISGCEKLAGTYYVKRHNDLVKYVYWCIAKKHKMNASNLWWLETLVQPQVKENEFAKILWEVPIQTDVTVTHNRPDLIYVDKINNKTYLIDITVPSDYNIGAKEIEKLSKYHLLRTEISRLWNTQATVIPIVVGATGVVAKSITRYTENLEANINLTILQKQAAIHTTNILSKVLGDSVFVHNTEIHNTQQIQISQTSDIPTAYESSDTQITHESQGTQESSDTQITHQHYDTQITHQHYDTQITQEPFHIQITHQSSDTQNTHLSLDIQTAHESTDTQTTQQSSNIRTRKRRTKR

SEQ ID NO: 31826 - protein, 1249 aa, Chiomara georgina
MTKGALATFVNMERQLRNRTLGPLPGGDRRGTSGAGAGRDSMQTVSGSLLNRRARVGGPENTTADQRGGEGTDDALQSRASPTDSVGSSVTTTNNAVSDDRRRKWSTEELQELMFCYFKARSEGEGYIDRLHKLFAERNPNNPKVQKFNGNTLSNQARGIIKNNRLSQELLDRIQRRAEGIIEIEERSHHNVVEEETTPISNITCTPTHYIDYTAEQIHTIDQLAQNVVVDENQDPIIINFLQILSETNETAIEERQLLPKAKINKTFCKNLCTLNNFLPNILATNNTLREINNIIYSAAKTLIVNNNQLPYTPKNSFKNKSDPPWKRRIKTKLEKNRRELGQLIEIGRGINTRRMIKIKDKLYRHYNIQNENDHRNIEEMLKQKIKALAARIKRYEDLNNKQEQNNLFNENEHKLYRSLEGNSLKDIKLPDKEVVQQFWSSILSNPVHYNSEAKWIKEVETSVNEVSTIDIEEISEDHIKHAIQKLQNWKTPGIDQIHNYYLKYLTSIHSYLGTLFTKIVSRQEILEEWFITGQVILIPKNEQTEDPKNWRPIACLPTMYKLLSSVLSNILYDHCHQNDLIAIEQRGCRRRVRGCKDHLMVNKAILEDAHKSQKNLSMAWIDYQKAFDSVPHEWLTKVLEVYKCPPIIKRFLELVMPSWRVIMTARGAHNSLTTEPIFVRRGIFQGDSLSPLLFCLAVNPLSFILNKYEMKGYKLKDSLWINHLLYMDDLKLYASNNHNLKVLIDSVEIFTRDIGMRFGLDKCNTIDINSGRRNKTTGEGHILLEGEIIKQLAIGDTYKYLGIHESGKIEHSTVRDQIIKEYFKRIKKLLNTHLYSRNLIKSINTFAIPVLLYSFGIINYKNSDLKKIDVKPRKLLAIKKVHQQKSEVERLYLPVTQGGRGLINVEYMYKAQIVKYKQYLQAESDDLIKAIVEHDKHRDKYSIIKEAQEIENQLHLRTGNIHTDKDIREAIVKRSKDIWRNKQLHGQFIKKVLDQTNIDNPLSFRWIKKQKISPMLESAIFAIQDQSVTTRQHRRDILKEPIDGKCRMCGCKDETTQHIISGCEKLAGNYYVKRHNNLVQYVYWCIAKKHKIEVSNLWWKETLTQPQVKENETAKILWEMPVHTDITITHNRPDLIYIDKVKNKTYLIDVTVPSDYNIGPKEIEKLSKYHLLKNEVSRLWKTQTTVIPIVVGATGIVNKNIQKYIEKLDTFIDITILQKQAAIHTSTILSKVLGDSVFVNNSQNIEDT

SEQ ID NO: 31827 - protein, 1037 aa, Mimoniades fallax
MHQLAQNVEVNEDQDPLILSFLQILGETRETLIEERQFLPKTKINKCFLENLCKLNKFLPYILATMNSLREINNIIYAAAKTLIINNSQKPYTPKNTFKNKSNPPWKKRIQIKIEKFRKELGQLIELSRGNNTRRMTKIKDKLYRQYHIQNENDHRNIEETLKQKIKALASRIKRYEDINSRKKQNSLFKENEHKLYKSLGGNSFKDIKLPDKEVVQEFWSSILSNPIHYNSKAKWIKEIGMVSSEANTIDIEEITEEHIKHAIKKLLNWKTPGIDKIQNYYLKYLTSVHSYLGSTFTKIVSGKESLEEWFTTGQVILIPKNEQTEDPKNWRPIACLPTMYKLLSSVLSNILYDHCHQNNIIAIELRGCRRGARGCKDHLMINKAILEDVHQSQKNLSMAWVDYQKAFDSVPHQWLVKVLDIYKCPPIIKRFLELVMPSWKVFMTARGTNNSLTTEPINVRRGIFQGDSLSPLLFCLAINPLSFILSKYEMKGYKLKDSLWINHLLYMDDFKVYANNKHNLKVLLDSIEIFTTDIGMKFGLDKCNIIHIRSGRRNKVAGEGHILFDGEIIKHLAVGDRYKYLGIHESGKIEHSIVKDQINKEYFKRIKKLTNTHLNSRNLIKGINTYAIPVLLYSFGVINYKNSDLKKIDTKTRKLLAIKKSHQQKAEVERLYLPINQGGRGLLNVEYMYKTQIVKYKQYLKAEGDELIKAIVNHDIHRDKYSIIKEAQEIENQLYLARKDIHTDKDIREAIVKRCKDTWRNKQLHGQFIRKVLDQANIDTELSFKWIKKQQISPTVESSIFAIQDQCIMTRQHRRDILKEPVDGKCRLCACKDETTQHIITGCEKLAGNYYMKRHNNLVQYIYWCLAKKHKIEVSSLWWKETLIQPQVKENETTKILWEMPVQTDITVTHNRPDLIYIDKTNNRTYLIDVTVPSDYNIGPKEIEKLCKYHLLKNEVSRLWKTQTTIIPIVIGATGIVGKNIKKYVQKLDTFIDITILQKQAAINSSTILSKVLGDTVFINNTQNTQNTEQPTHSIT

SEQ ID NO: 31828 - protein, 1188 aa, Timochares trifasciata
MFCYFKARSEGVGYIDRLQKLFVERNPNNPKIHKFNGNTLSTQARRIIKQNVISQELLDRIQKQAEGRMDRVESSEQGVEEDEDTTTHSNLTITHNTHHIEYSTEQIQTIVQLAQNIEVNEDQDPLILNFLQILSETNESKIEERELLPKAKINKSFVTNLCTLNKFLPSILASNNSLREINNIIYAAAKTLIVNNNQLPYTPKNTFKMKCDPPWKRRIISKLEKFRKELGQLIEIGRGITTRRMIKIKEKLYKQHNIQNENDHRNIEELLKQKIKALAARIKRYEDINNRKEQNSLFIENEHKLYRSLGGTNFKDIKLPNKEVVEEFWSSILSNPMHYNSKAKWITEVEASTSEISTEDIEEISEEHIKHATLKLLNWKTPGIDRIHNYYLKYFTSVHSYLGTIFSKIISCKENLEDWFTTGQVILIPKNGQTEDPKNWRPIACLPTMYKLLTSVLSNILYNHCHQNNIIAMEQRGCRRGARGCKDHLMVNKAVLEDAHQCQKNLSMAWIDYKKAFDSVPHEWLAKVLDIYRCPPIVKRFLELVMPTWRVIMTARGTQNSLTTEPINVRRGIFQGDSLSPLLFCLAVNPLSFVLNKYEMKGYKLKDSLWINHLLYMDDLKLYANNKHNLKVLLDSVEIFTSDIGMSLGLDKCNTIHINSGQRNKAIGEGHILLGGEIIKQLEIGDTYKYLGIHESGKIEHSCVRDRITKEYFKRIKKLINTHLNSRNLIKGINTYAIPVLLYSFGIVNYKNSDLKKIDTKTRKLLAIKKIHQQKAEVERLYLPVSQGGRGLLNIEYMYNTQILKYKQYLKAEGDELIKAIVEHDIHRDKYSIIKEAQVIETQLHLVSGNIHTDKDIKEAIVKRSKDVWRNKQLHGQFLKKVLNQTNIDTQLSFKWIKRQVISPALESSIFAIQDQSIMTQQHRRDILKEPVDGKCRLCACKDETTQHIVSGCEKLAGNYYVRRHNNLVQYVYWCLAKKHQIEVSSLWWKETLLQPQVKENETAKILWEMPVHTDVTITHNRPDLIYTDKVNNKTYLIDIAVPSDYNIGPKEIEKLSKYHPLKNEVSRLWKTQTTIIPIVIGATGIVSKNLLKYIKKLDTTIDITILQKQAAIHSSTIVSKVLGDTVFVNNTRNNDTQNTVQPTHIVQVPDTQRLSTQLLTNTADLMTGQTQGGTQRSGRGRKRRKKN

SEQ ID NO: 31829 - protein, 1239 aa, Hemaris fuciformis
MEREFSNARIGPLPGGDRRGTSGADAGRDSMRTVSGSLLNRRAGVGGPEDITADLRGGEGADDVLQSRASPTHSVGSSASTTNNVNNDKRRKWSLEELKELMFCYFKARSEGSGYLNRLQEMFTERNPNNPKIQKYNGNTLANQARRIIKQNTISKELLDQIQKHAEGTFDTTEITDGNVIESDSPITHRTTPQIVLNTRHAHIPIDHAENIDRLTGNIEVNEDQNPLVLEFLQILAETKATPLEERLFLPKAKINKKFIANLHILNTYMSNLLIINNSLREINNIIYAAAKTLIINNKQIPYMPKNIIKLKTVPPWKKRIQIKIEKLRKELGQLIEVDRGITTRRMIKVKDRLYKKHNICNDNDHKNVIEILKQKIKALAGRIKRYEDMSIKKEQNKLFVENEHRLYRSLERNNVQDIKLPNKASIEEFWTSVLSNPIEYNSEANWIKDIEMESRKINTTTIDVILEEHVQYATKKLLNWKSPGIDKVQNYYVKYFTSVHKHLATAYTNIFTGIESLEEWFTTGQVILIPKNDHTEDPKNWRPIACLPTMYKLLTSILTNTLYSHCQENHIIAVEQRGCRRGTRGCKDHLMVNKAILEDAHKHKKNLSMAWIDYQKAFDSISHDWLIKILEIYKCPSIIRQFLQLTMPSWKVIMTARGLNDSITTEPIHIRRGIFQGDSLSPLLFCLAINPISSILNKYVLKGYKLKDSYQINHLLYMDDLKVYSNSSSNLKVLLNSIEIFTSDIGMTFGLNKCNILNINSGYRSNVTGEGHILLGGEIIKQLPRGDTYKYLGVHESGKIEHNVVREQITKEYFRRIKKLLNTHLTSRYLIKGINTYATPVLLYSFGVINYKLTDLKKIDTKTRKLLAMKKAHQQKADVDRLYLPIIQGGRGLQNIEYLYKSQILKYKVYLKTQNDHLIKTIVQHDTRKDKYSIIDEAQTIERELNLATGNTHTEKEIKEAITKNYNQRWRNKQLHGQYPKKVLDQANIDIQLTFNWIKKQQITPSIEASIFAIQDQAVMTRQHQRDILKETIDGKCRLCASKDETAQHIISGCEKLAGTYYIKRHNNLVQYVFWCLARKHSIEVSNLWWKEVLLHPQIRENESAKILWEMPVQTDITVTHNRPDIIYIDKIKNKTYLIDVTVPSDYNIGAKEIEKLSKYHLLKNEVSRLWSTQTTVIPIVIGATGTVAKSIQKYINSLDSNIDINILQKQAAIHTSTILSKVLGDTVFVTAHQTPNT

SEQ ID NO: 31830 - protein, 1322 aa, Cecropterus confusis
MPREGRTLETLRVRYTPMTNGALVTFVNMERQFRNRTLGPLPGGDRRGTSGADAGRDSMQTVSDSLLNRRARVGGPENTTADQRGGEGTDDALQSRASPTNSVGSSVSTTNNAISNDRRRKWSTEELQELMFCYFKARLDGAGYIDRLHNLFTERNPNNPKIHKFNGNTLSNQARRIIKQNVLSQELLDRIQKHAEGRVDIVENLEQNIAVEEVIAHSNTITISTHHIDYSTEQIQTIDQLAQNIEVSEDLDPLILNFLQILSETKETVIEERQLLPKAKINKCFLENLCKLNKFLPNILATNNSLREINNIIYAAAKTLITNNNQIPYTPKNIFKNKSDPPWKKRIQIKIEKFRKQLGQLIELGRGNNTRRMSTIKDKLYRQYNIQNENEHRNIEETLKQKIRALAGRIKRYENINSRKEQNSLFNENEHKLYRSLGGNTFKDIKLPNKEIVEEFWTSILSNPIHYNSKAKWIHEIEMTSSEVNTMDIEEISEEHIKQAIKKLLNWKTPGIDKIQNYYLKYLTSVHSYLGSLFTKIVTGKETLDEWFTTGQVILIPKNEQTEDPKNWRPITCLPTMYKLLSSVLSNILHDHCHQNNIIAIEQRGCRRGARGCKDHLMVNKAILEDAHQSQKNLSMAWVDYQKAFDSVPHEWLVKVLDVYKCPPIIKRFLELVMPSWRVIMTARSTQNSLTTGPIYVRRGIFQGDSLSPLLFCLAINPLSFVLNKYEMKGYKLKDSLWINHLLYMDDLKVYANNRHNLKVLLDSVEIFTRDIGMRFGLDKCNTIHISSGHRNEVIGEGHILLEGDIIEQLAIGDSYKYLGIHESGKIEHSIVREQIVKEYFKRIKKLINTHLNSRNLIKGINTYAIPVLLYSFGVINYKNSDLKKIDTKTRKLLAIKKAHQQKAEVERLYLPITQGGRGLLNVEYMYKTQIVKYKQYLKREDDELIKAIVTHDKHRDKYSIMKEAQEIENQLHLARGNIHTDKDIREAIVKRCKHIWRNKQLHGQFIKKVLDQTNIDTELSFKWIKKQQISPTIESSIFAIQDQCIMTRQHRRDILKEPVDGKCRLCACKDETTQHIISGCEKLAGNYYVKRHNNLVQYVYWCLAKKHKIEVSSLWWKETLIQPQVKENETAKILWEMPVQTDVTVTHNRPDLIYIDKTNNRTYLIDVTVPSDYNIGPKEIEKLSKYHLLKNEVSRLWKTQTTIIPIVIGATGIVGKNIKKYINKLDTFIDITILQKQAAISSSTILNKVLGDTVFVNNIQNAQNTEQPTHTQQASNIQDISEQLTTEFNTQQTRECCIAVQTPKRGGMQRRTVRRRGRKIK

SEQ ID NO: 31831 - protein, 1248 aa, Deilephila porcellus
MERQSRDERIGSLPGGDRRGTSGADAGRDSMRTVSGSQLNRRARVGSPEDITADLRGGEGTDDVLQGRAPPTSSVGSSAMTTSNENNDKRKKWSTEELQELMFCYFQAKAEGSGYISRLQQIFTQRNPNNPKIHKFNGNTLSNQARRIIKQNIISKELLDEIQKQAVDSESLENREGNVYDVYQQPTQNTIPQTLNTDHITYNTPEQAQAIEHLTQNIEVNEDQNPLILDFLQILAATKETPLPDRLFLPKAKINKHFLQNFHILNKYLPNLLITNNSLMEINNIIYAAAKTLIMKNQQIPYAPKNTLKTKSEPPWKKRIKIKIDKYRKDLGQLIEIDRGINTRRMLKIKDKLYRKFNIQSGNDQKNAIETIKQKIKALAGRIKRYEDINTKKEQNKLFNENEHLLYRSLGGQSFKDIKLPSKVGIEEFWSSVLSNPIQYNNEATWLKKVEESSNEIRTINTEEILEEHVKSATKKMLNWKTPGIDKIHNYYIKYFTSTHKYLALVYTKIVTGIEALEDWFTTGQVILIPKNEQTEDPKNWRPIACLPTMYKLLTSILTNTLYTHCHDNNIIAVEQRGCRRGARGCKDHLMVNKSILEDAHKSQKNLSMAWIDYQKAFDSISHNWLLKVLDIYKCPPIIKRFLQLTMPAWKVVMTARGHRDTITTDPIYIRRGIFQGDSLSPLLFCLALNPLSFILNKYDRKGYKLKNNVYINHLLYMDDLKIYSNNSNNLKVLLNSVEIFTSDIGMKFGLDKCNILNISSGRRSKATGEGHILLNGEKIKQLGIEDKYKYLGIHESGKIEHSTIREQITKEYFRRIKKLLNTHLNSRYLIKGINTYAIPVLLYTIGIINYKTSDLKKIDTKTRKLLAINKAHQQKADVERLYLPVSEGGRGLINVEYMYKTQILKYKQYLIGEHDYLIKAIIEHDKHKDKFSIVNEAQTIERELHLPQGNIYLEKEIKLAIIKNRNDRWRSKQLHGQFPKKVLDQANVNKELSFDWIKKQHIAPKIESSIFAIQDQAVITRQHQRDILKEQIDGKCRLCANKDETTQHIISGCEKLAGTYYVRRHNNLVQYVYWCLARKHKIEVSDFWWKETLTQPQIKENESAKILWEFPVHTDITVTHNRPDIIYIDKNNNKTYLIDITVPSDYNIGAKEIEKLSKYHLLRNEVSRLWNTQAIIIPVVIGATGIVAKSINKYIDQLNCNINISILQKQAAIHTSTILSKVLGDTVFVTTQRSLYPQDTPNVQNNN

SEQ ID NO: 31832 - protein, 1319 aa, Cecropterus dorantes
MPREGRTLETLRVGYAPMTNGALVTFVTMERQFSNRTLGPLPGGDRRGTSGADAGRDSMQTVSDSLLNRRARVGGPENTTADQRGGEGTDDALQSRASPTDSVGSTVSTTNNAISDDRRRKWSIEELEELMFCYFKARLDGAGYIDRLHKLFTERNPNNPKIHKFNGNTLSNQARRIIKQNVISQELLDRIQKHAEGRIDTVENLEQNIVEEEITAHSNTITPSTHHIDYSIEQIQTIDQLAQNIEVNEDQDPLILNFLQTLSETKETVIEERQLLPKAKINKRFLENLCKLNKFLPNILATNNSLREINNIIYAAAKTLITNNNQIPYTPKNTFKNKSDPPWKKRIQIKIEKFRKQLGQLIELGRGNNTRRMTKIKDKLYRQYNIQNENEHKNVEETLKQKIKALAGRIKRYEDINSRKEQNSLFNENEHKLYRSLGGNSLKDIKLPAKEIVEEFWSSILSNPIHYNSKAKWIKEIETASSEVNTKYTEDISEEHIKLAVKKLLNWKTPGVDKIQNYYLKYLTSVHSYLGSIFTKIVSGEEALDEWFTTGQVILIPKNEQTEDPKNWRPIACLPTMYKLLSSVLSNILYDHCHQNNIIAIEQRGCRRGARGCKDHLMVNKAILEDAHQSQKNLSMAWVDYQKAFDSVPHEWLVKVLDIYKCPPIIKRFLELAMPMWRVIMTARGTQSSLTTAPIYVRRGIFQGDSLSPLLFCLAINPLSFILNKYEMKGYKLKDSLWINHLLYMDDLKVYANNRHNLKVLLDSVEIFTRDIGMRFGLDKCNTIHISSGHRNKVTGEGHILLEGEIIKQLAIGDRYKYLGIHESGKIEHTTVREQIIKEYFKRIKKLINTHLNSRNLIKGINTYAIPVLLYSFGVINYKNSDLKKIDTKTRKLLAIKKAHQQKAEVERLYLPVTQGGRGLLNVENMYKTQIIKYKQYLTAEGDDLIKAIVNHDIHRDKYSIIKEAQDIENQLHLARDNIHTDKDIKEAIVKRSKDIWRNKQLHGQFIKKVLDQTNIDTELSFNWIKKQQISPTIESSIFAIQDQCIMTRQHRRDILKEPVEGKCRLCACKDETTQHIISGCEKLAGNYYVKRHNNLVQYVYWCLARKHKIEVSSLWWKETLIQPQVKENETAKILWEMPIQTDVTITHNRPDLIYIDKINNRTYLIDVTVPSDYNIGPKEIEKLSKYHLLKNEISRLWKTQTTIIPIVIGATGIVGKNIKKYIEKLDTFIDITILQKQAAINSSIILSKVLGDTVFVNNTQYTQNTEQPPHTEQASNIQNISAPITTEFNIQQPQECRITARTRERGGRKVRRRGRILK

SEQ ID NO: 31833 - protein, 902 aa, Apodemia chisosensis
MSKIRDRIYMKYKIQNINEHKNIEEILKQKIKALAARIKRYTDSNAKKEQNILFKENQHKFYKTLDNSGCKEIKIPNKDNVEEFWSSMISNPIQYNSEAKWIKEIEFSTKTVNVTDTKEITEEQIKAAIRKLSNWKTPGIDKIQNYYLKYFTSFHGYLASLFTKIINYDEPLEEWFTTGMVILIPKNEDTQDPKNWRPIACLPTMYKLFTSVLANILYSHCKENNILAIEQRGCRRGARGCKDHLMVNKSILEDAHRSQKNLSMAWIDYQKAFDSVSHEWLIKVLDVYKCPPVVKRFLQLVMPLWRVIMTARGTKNSLTTEPISIKRGIFQGDSLSPLLFCLAINPLSFIMNKYKLKGYKLKNSFWINHLLYMDDLKIYANNRYNLKVLLDSVEIFTGDIGMKFGLDKCKVIHISSGQRSRVEGEGHILLDGKVIKQLNLEDKYKYLGINESGKIEHNVIKEQITTEYFRRIKKLLNTHLNSRHLITGINSYAIPVLSYSFGIINYKNIDLKKIDIKTRKLLTIKKVHQHKAEVNRLYLPVTQGGRGLLNVEYLYKTQIIKYKQYLKAEGDDLIKAIVEHDIHKDKYSVISEAQEIEKDLNLVEGNTNMDSEIKEAIVNKYNQIWRNKQLHGQFPSKILDALNIDTELSFHWIKRQQISPSVESTVFAMQDQAITTRQYKRDIMKEPIDGKCRLCTCKDETTQHIISGCEKLAGNYYIKRHNNLVQYVYWCLARKHNIKVSNFWWKETLIQPQIVENDTVKILWEFPVHTDINITHNRPDLIYIEKQNNKTYLIDITVPSDYNVGAKEIEKLSKYHALKTELKRLWNTQTNIIPIVIGATGIVAKSIKRYMNQLDASIDLSILQKQAAIHSSIIISKVLGDSVNNTQNSILLLDPVYGACHL

SEQ ID NO: 31834 - protein, 1268 aa, Epargyreus clarus
MPREGRTLETPRVRYTPMTNGALVTFVNMERQFRNRTLGPLPGGDRRGTSGADAGRDSMQTVSDSLLNRRARVGGPENTTADQRGGEGTGDALQSRAAPIDSVGSSVTTTNNAISDDRRRKWSTEEQQELMFCYFKARLDGAGYIDRLYKLFTERNPNNPKIHKFNGNTLSNQARMIIKKNVLSQELLDRIQKHAEGTIDTRESSEQNVVEEEEQGTAHSHITVTQNTDYIEYATEQIQTLDQLVQNIDVNEDQDPLILHFLQILSETKETVIEERQLLPKAKINKRFLENLCKLNKFLPNILACNNSLREINNIIYAAAKTLIINNNQSPYTPKNVFKTKSDPPWKRRIQTKIEKFRKELGQLIEICRGINTRRMAKIKDKLYTQYNIQNENDHKNIEEILKQKIKALAGRIKRYEDINSRKEQNSLFSENEHKLYRSLGGNSFKDIKLPEKETVEGFWSSILSNPIQYNSKAKWIKEVETSSSGFNTIDIEEITEEHIKIAIRKLLNWKAPGIDKVQNYYLKYLTSVHSYLGLIFTKIVTHKEILEEWFTTGQVILIPKNEQTEDPKNWRPIACLPTMYKLLSSVLANVLYDHCHQNNIMAIEQRGCRRGARGCKDHLMVNKAILEDAHQCQKNLSMAWIDYQKAFDSVPHEWLTKVLDVYKCPPIIKRFLELVMPTWRVIMTARGTQNSLTTGPIWVKRGIFQGDSLSPLLFCLAINPLSFILSKYEMKGYKLKDSLRINHLLYMDDLKLYANNKHNLKVLLDSVEIFTSDIGMRFGLDKCNTIDIISGHRNKVTGDGHILLDGDIIKQLAIEDRYKYLGIHESGKIEHSVIRDQIRKEYFKRLKKLLNSHLNSRNLIKGINTYAIPVLLYSFGVINYKNSDLKKIDTKTRKLLAIKKAHQQKAEVERLYLPVTQAGRGLLNIENMYKTQILKYKQYLIAESDDLIKAIVEHDKHRDKYSIINEAKEIEFQLNLARGNIHTDKDIREAIVKRSKDIWRNKQLHGQFIKKVLDQSNIDTELSFKWIKKQQISSAIESSVFAIQDQSIMTRQYRRDILKEPIDGKCRMCACRDETTQHIISGCEKLAGNYYVKRHNNLVQYVYWCLAKKHKIEVSSLWWKETLTQPQVKENETAKILWEMPVQTDTTISHNRPDIIYIDKTNNHTYLIDVTVPSDYNIGPKEIEKLSKYHLLKNEVSRLWKTQTTVIPIVIGATGVVAKSIKKYIEKLDTFIDITILQKQAAIHTSIILSKVLGDTVIVNNTQNKDT

SEQ ID NO: 31835 - protein, 1239 aa, Hemaris fuciformis
MEREFSNARIGPLPGGDRRGTSGADAGRDSMRTVSGSLLNRRAGVGGPEDITADLRGGEGADDVLQSRASPTHSVGSSASTTNNVNNDKRRKWSLEELKELMFCYFKARSEGSGYLNRLQEMFTERNPNNPKIQKYNGNTLANQARRIIKQNTISKELLDQIQKHAEGTFDTTEITDGNVIESDSPITHRTTPQIVLNTTHAHIPIDHAENIDRLTGNIEVNEDQNPLVLEFLQILAETKATPLEERLFLPKAKINKKFIANLHILNTYMSNLLIINNSLREINNIIYAAAKTLIINNKQIPYMPKNIIKLKTVPPWKKRIQIKIEKLRKELGQLIEVDRGITTRRMIKVKDRLYKKHNICNDNDHKNVIEILKQKIKALAGRIKRYEDMSIKKEQNKLFVENEHRLYRSLERNNVQDIKLPNKASIEEFWTSVLSNPIEYNSEANWIKDIEMESREINTTTIDVILEEHVQYATKKLLNWKSPGIDKVQNYYVKYFTSVHKHLATAYTNIFTGIESLEEWFTTGQVILIPKNDHTEDPKNWRPIACLPTMYKLLTSILTNTLYSHCQENHIIAVEQRGCRRGTRGCKDHLMVNKAILEDAHKHKKNLSMAWIDYQKAFDSISHDWLIKILEIYKCPSIIRQFLQLTMPSWKVIMTARGLNDSITTEPIHIRRGIFQGDSLSPLLFCLAINPISSILNKYVLKGYKLKDSYQINHLLYMDDLKVYSNSSSNLKVLLNSIEIFTSDIGMTFGLNKCNILNINSGYRSNVTGEGHILLGGEIIKQLPRGDTYKYLGVHESGKIEHNVVREQITKEYFRRIKKLLNTHLTSRYLIKGINTYATPVLLYSFGVINYKLTDLKKIDTKTRKLLAMKKAHQQKADVDRLYLPIIQGGRGLQNIEYLYKSQILKYKVYLKTQNDHLIKTIVQHDTCKDKYSIIDEAQTIERELNLATGNTHTEKEIKEAITKNYNQRWRNKQLHGQYPKKVLDQANIDIQLTFNWIKKQQITPSIEASIFAIQDQAVMTRQHQRDILKETIDGKCRLCASKDETAQHIISGCEKLAGTYYIKRHNNLVQYVFWCLARKHSIEVSNLWWKEVLLHPQIRENESAKILWEMPVQTDITVTHNRPDIIYIDKIKNKTYLIDVTVPSDYNIGAKEIEKLSKYHLLKNEVSRLWSTQTTVIPIVIGATGTVAKSIQKYINSLDSNIDINILQKQAAIHTSTILSKVLGDTVFVTAHQTPNT

SEQ ID NO: 31836 - protein, 1159 aa, Chioides albofasciatus
MFCYFKARSEGAGYIDRLYKLFAERNPNNPKIHKFNGNTLSNQARRIIKQNVLSQELLDRVQKHAEGTIDARERSEQNVVEEEQDTIRSHITVTQNTDQIEYSTEQIQTINQLVQNIEVNEDQDPLILNFLQTLSEVKETAIEERQLLPKAKINRRFLENLCKLNKFLPNILPINNSLREINNIIYAAAKTLIINNNQSPYTPKNIFKTKSDPPWKRRIQIKIEKFRKELGQLIEINKGINTRRMVKIKDKLYRNYNIENENDHRNIAEILKQKIKALAGRIKRYEDINTRKDQNSLFSENEHKLYRSLGGNSFKDIKLPEKETVEEFWSSILSNPKQYNSNAKWIKEVEGSSSGFNTTDIEEITEEQIKIAIRKLQNWKTPGIDKIQNYYLKYLTSVHSYLGLLFTKIVAHKENLEEWFTTGQVILIPKNEQTEDPKNWRPIACLPTMYKLLSSVLANVLYDHCHQNNIMAIGQRGCRRGARGCKDHLMVNKAILEDAHQSQKNLSMAWIDYQKAFDSVPHEWLTKVLDVYKCPPVIKRFLQLVMPTWRVIMTARGTQSSLTTGPIWVKRGIFQGDSLSPLLFCLAINPLSFILGKYEMKGYKLKDSLWINHLLYMDDLKLYANNKHNLKVLLDSVEIFTSDIGMRFGLDKCNTIHITSGHRNKVTGEGHILLDGDVIKQLAIEDRYKYLGIHESGKIEHSVIRDQIMKEYFKRLKKLLNSHLNSRNLLKGINTYAIPVLLYSFGVINYKNSDLKKIDTKTRKLLAIKKAHQQKAEVERLYLPVTQGGRGLLNVESMYKTQIVKYKDYLIAENDDLIKAIVDHDKHRDKYSIINEAKEIENQLNLTRGNIHTDKEIREAIIKISKDIWRNKQIHGQFIKKVLDQTNIDTELSFKWIKKQQISSTIESSVFAIQDQSIMTRQYKRDILKEATDGKCRLCVCKDETTQHIISGCEKLAGNYYVKRHNNLVQYVYWCLAKKHKIEVSSLWWKETLTQPQVKENETAKILWEMPVQTDTTITHNRPDIIYIDKTNNKTYLIDVTVPSDYNIGPKEIEKLSKYHLLKNEVSRLWKTQTTVIPIVIGATGVVAKSIKKHIEKLDTFIDITILQKQAAIHTSIILSKVLGDTVFVNNTQNNDTHNIAQLTHTHHNHPIYRQIYQH

SEQ ID NO: 31837 - protein, 1248 aa, Deilephila porcellus
MERQSRNERIGSLPGGDRRGTSGADAGRDSMRTVSGSQLNRRARVGSPEDITADLRGGEGTDDVLQGRAPPTSSVGSSAMTTSNENNDKRKKWSTEELQELMFCYFQAKAEGSGYISRLQQIFTQRNPNNPKIHKFNGNTLSNQARRIIKQNIISKELLDEIQKQAVDSESLENREGNVYDVYQQPTQDTIPQTLNTDHIIYNTPEQAQAIEHLTQNIEVNEDQNPLILDFLQILAATKETPLPDRLFLPKAKINKHFLQNFHILNKYLPNLLITNNSLMEINNIIYAAAKTLIMKNQQIPYAPKNTLKTKSEPPWKKRIKIKIDKYRKDLGQLIEIDRGINTRRMIKIKDKLYRKFNIQTNNDQKNAIETIKQKIKALAGRIKRYEDINTKKEQNKLFNENEHLLYRSLGGQSFKDIKLPSKVGIEEFWSSVLSNPIQYNNEATWIKKVEESSNEIRTINTEEILEEHVKSATKKMLNWKTPGIDKIHNYYIKYFTSTHKYLALVYTKIVTGIEALEDWFTTGQVILIPKNEQTEDPKNWRPIACLPTMYKLLTSILTNTLYTHCHDNNIIAVEQRGCRRGARGCKDHLMVNKSILEDAHKSQKNLSMAWIDYQKAFDSISHNWLLKVLDIYKCPPIIKRFLQLTMPAWKVVMTARGHRDTITTDPIYIRRGIFQGDSLSPLLFCLALNPLSFILNKYDRKGYKLKNCVYINHLLYMDDLKIYSNNSNNLKVLLNSVEIFTSDIGMKFGLDKCNVLNISSGRRSKATGEGHILLNGEKIKQLGIEDKYKYLGIHESGKIEHSTIREQITKEYFRRIKKLLNTHLNSRYLIKGINTYAIPVLLYTFGIINYKNSDLKKIDTKTRKLLAINKAHQQKADVERLYLPVSEGGRGLINVEYMYKTQILKYKQYLIGEHDHLIKAIIEHDKHKDKFSIVNEALTIERELHLPQGNIHLEKEIKLAIIKNRNDRWRSKQLHGQFPKKVLDQANVNKELSFDWIKKQHIAPKIESSIFAIQDQAVITRQHQRDILKEQIDGKCRLCANKDETTQHIISGCEKLAGTYYVRRHNNLVQYVYWCLARKHKIEVSDFWWKETLTQPQIKENESAKILWEFPVHTDITVTHNRPDIIYIDKNNNKTYLIDITVPSDYNIGAKEIEKLSKYHLLRNEVSRLWNTQAIIIPIVIGATGIVAKSINKYIDQLNCNINISILQKQAAIHTSTILSKVLGDTVFVTTQRSLYPQDTHNIQNNN

SEQ ID NO: 31838 - protein, 1293 aa, Camptopleura auxo
MEKSLKRYRKGPLPGGDRRGTSGAGAGRDSMQTVSDSLLNRRARVGGPENITADQRGGEGTDDALQSRASPTDSVGSSVTTTSNAVSDDRRRKWSTEELQELMFCYFKARSEGAGYIDRLHKLFAERNPNNIKIHKFNGNTLSNQARRIIKQNVISQELLDRIQKQAEGTIDTAGSSEQNIIEEEEEEVTAHSHITTTHNTHHIEYTTEQIEEINQITQNIEVSEDQDPLILNFLQILSETKETTVEERQLLPKAKINKSFITNLCTLNKFLPSILATNDSLREINNIIYAAAKTLIVNNNQLPFTPKNTFRIKCDPPWKRRIQTKLEKFRKELGQLIEVGRGINTRRMIKIKDRLYRQHNIQNENEHKNIEEMLKQKIKALAARIKRYEDINNKKEQNSLFSENEHKLYRSLGGNSFKDIKLPNKEVVEEFWSSILSNPIHYNSEARWINEVEASTSEVSTVDIEEISEEHIKHATQKLLNWKTPGIDKIQNYYLKYLTSVHSHLGSIFSKIISGKEILEEWFTTGQVILIPKNDQTEDPKNWRPIACLPTMYKLLSSVLSNILYNHCHQNNIIAIEQRGCRRGVRGCKDHLMVNKAVLEDAHQCQKNLSMAWIDYQKAFDSVPHEWLAKVLDIYKCPPIIKRFLELVMPSWRVIMTARGTQNSLTTEPINVRRGIFQGDSLSPLLFCLAINPLSFVLNKYEMKGYKLKDSLWINHLLYMDDLKLYANNRHNLKVLLDSVEIFTRDIGMRFGLDKCNTIHISSGHRNKVTGEGHILLGGEIIKQLDIGDRYKYLGIHESGKIEHSVIRDQIIKEYFKRVKKLLDTHLNSRNLIKGINTYAVPVLLYSFGIINYKNSDLKKIDTRTRKLLAIKKMHQQKAEVERLYLPVTQGGRGLVNIEYMYNTQIVKYKQYLKAESDELIKAIVEHDIHRDKYSIIKEAQAIQTKLHLASGNIHTDKDLREAVIKRSKDVWRNKQLHGQFIKKVLDQTNIDTQLSFKWIKKQKISPALESSVFAIQDQCIMTQQHRRDILKEPIDGKCRLCACKDETTQHIVSGCEKLAGNYYVKRHNNLVQYVYWCLAKKHKIEVSDLWWKETLTQPQVKENETAKILWEMPVHTDVTITHNRPDLIYIDKVNNKTYLIDITVPSDYNIGPKEIEKLSKYHLLKNEVSRLWKTQTTIIPIVVGATGIVGKSILKYIERLDTFIDITVLQKQAAIHSSTILSKVLGDTVFVNNTQNDDTQNTGQPTQTLQTPNTQNTSTQYLTSTADPITGQTQGSTQRRCGRGRGRRKKN

SEQ ID NO: 31839 - protein, 1257 aa, Thyatira batis
MEMNRNNNRIGPLPGGDRRGTLGADAERDSMQTVSGSLLNRRARAGGPEVTTADQRGGEGTGDALQSRASPTDSVGSSVTTRNMLENDDRRKKWSIEETKELMYCYFKARSAGSGYIGRLQAIFTERNPNNPKIHKFNGNTLSNQARTVIKKNVISQELLDRIQKQAEGLITTETPEPIFNENEQQNTTPTQTHNTQPHIQSYTQSHTQSHIQSHIQYTQHTPEQAHTIDQLTNNIEVNEDQDPLILRFLQLLAETKETPIEERLLLPKAKINKHFLENLKILNKYLPNLLITNNSLRDINNLIYAAAKTLIITNNQTPYSPQTIIKPKCDPPWKKRIQIKIEKLRKELGQLIEIERGVNTRKMIKIKCKLYSKYNIQSENDHKNMAETIKQKIKALAGRIKRYEDMSNRKEQNRLFKENEHRLYRSLEVNSNKDIQIPSKENVETFWTSILSNPIQYNDEAKWIKEVELSQNEVNTIDSDEITIDQVKFAIRKLLNWKSPGIDKIQNYYLKYFTSVHEYLASLFTKIATGTESLENWFTTGQVILIPKNDNTTEPKNWRPIACLPSMYKLLTSVLANVLYSHCHENNIISVEQRGCRRGARGCKDHLMVNKAILEDAHQSQKNLSMAWIDYQKAFDSVSHEWLLKILDVYKCPPIIRRFLELSMPAWRVIMTARGSKDSITTEPIYIRRGIFQGDSLSPLLFCLAINPLSYILNKYELKGYKLRDNIWINHLLYMDDLKVYANNKSNLKVLLESVEIFTSDIGMKFGLDKCNTIHISSGHRNSVSGGGHILLSGETVKQLAIGDTYKYLGVNESGKIEHNNIRDQVTKEYFKRVKKLLNTHLSSRFLIKGINTFAIPVLLYSFGIINYKKVDLKKIDIKTRKLLAMNKAHQQKAEVERLYLPLTQGGRGLINVEQMYKSQIVKYKQYLSSETDHLIKAIVQHDTHRDKYSIVKEAQEIERELQLTPGNTHTDKEIKESIIKYQNKTWRNKQLHGQFPKKVLDQANVDSELSFKWLKKQQISPSIESSIFAIQDQAVMTRQHQRDILKEPVDGKCRLCACKDETTQHIISGCEKLAGTYYVQRHNNLVQYVYWCLAKKHKMEVCNLWWKETLIQPQVKENEAAKILWEMPVQTDVTVTHNRPDLIYIDKVNNKTFLIDITVPSDYNIGPKEIEKLSKYHLLKTEVSRLWNTQTTIIPIVIGATGVVAKSINKYIDKLDTTVDITILQKQAAIHTSKILSKVLGDTVFVHNTQTNNID

SEQ ID NO: 31840 - protein, 1323 aa, Cecropterus bathyllus
MPREGRTLETLRVRYTPMTNGALATFVNMERQFTNSTLGPLPGGDRRGTSGADAGRDSMQTVSDSLLNRRARVGGPENTTADQRGGEGTDDALQSRASPTNSVGSSVSTTNNAVSDDRRRKWSTEELQELMFCYFKARLDGAGYIDRLHKLFTERNPNNPKIHKFNGNTLSNQARRIIKQNVISRELLDRIQKHAEGRIDTVEDLEQNIVKEEVTAHSNTIALSTHHIDYSIEQIQTIDQLAQNIEVSEDQDPLILNFLQILSETKETLIEERQLLPKAKINKRFSENLCKLNKFLPNILATNNSLREINNIIYAAAKTLIMNNNQIPYTSKNTFKNKSDPPWKRRIQIKIEKFRKQLGQLIEIGRGNNTRRMTKIKDKLYRQYNIQNENEHRNIEETLKQKIKALAGRIKRYEDINSRKEQNSLFNENEHKLYRSLGGNSFKDIKLPDKEIVEEFWSSILSKPIHYNSKANWIKEIEMASSEVNIEHIEVISEEHIKHAIKKLLNWKTPGIDKIQNYYLKYLTSVHSYLGSLFTKIVSGKETLEEWFTTGQVILIPKNEKTEDPKNWRPIACLPTIYKLLSSVLSNILYDHCHQNNIIAIEQRGCRRGARGCKDHLMVNKAILEDAHQSQKNLSMAWVDYQKAFDSVPHEWLVKVLDLYKCPPIIKRFLELVMPSWRVIMTARGTQNSLTTGPIYVRRGIFQGDSLSPLLFCLAINPLSFVLNKYEMKGYKLKDSLWINHLLYMDDLKVYANNRHNLKVLLDSVEIFTRDIGMRFGLDKCNTIHISSGHRNKVTGEGHILLGGDIIKQLAIGDRYKYLGIHESGKIEHSIVRDQIIKEYFKRIKKLINTHLNSRNLIKGINTYAIPVLLYSFGVINYKNSDLKKIDTKTRKLLAIKKAHQQKAEVERLYLPITQGGRGLLNVEYMYKTQIVKYKQYLKAGGDELIKAIVNHDIHRDKYSIFKEAQDIENQLHLARENIHTDKDIREAIVKRCKDTWRNKQLHGQFIKKVLDQTNIDTELSFKWIKKQQISPIIESSIFAIQDQCIMTRQHRRDILKEPVDGKCRLCACKDETTQHIISGCEKLAGNYYVKRHNNLVKYVYWCLAKKHKIEVSSLWWKETLIQPQVKENETAKILWEIPVQTDVTVTHNRPDLIYIDKTNNQTYLIDVTVPSDYNIGPKEIEKLSKYHLLKNEISRLWKTQTTIIPIVIGATGIVGKNIKKYIDKLDTFIDITILQKQAAISSSTILSKVLGDTIFANNTQNTQNTEQSTHTGQASNIQNISEQLTTEINTQQTQECRITARTRERGGMQRRNVSRRGRILKS

SEQ ID NO: 31841 - protein, 1269 aa, Epargyreus clarus
MPREGRTLETPRVRYTPMTNGALVTFVNMERQFRNRTLGPLPGGDRRGTSGADAGRDSMQTVSDSLLNRRARVGGPENTTADQRGGEGTGDALQSRAAPIDSVGSSVTTTNNAISDDRRRKWSTEEQQELMFCYFKARLDGAGYIDRLYKLFTERNPNNPKIHKFNGNTLSNQARMIIKKNVLSQELLDRIQKHAEGTIDTRESSEQNVVEEEEEQGTAHSHITVTQNTDYVEYTTEQIQTLDQLVQNIDVNEDQDPLILHFLQILSETKETVIEERQLLPKAKINKRFLENLCKLNKFLPNILACNNSLREINNIIYAAAKTLIINNNQSPYTPKNVFKTKSDPPWKRRIQTKIEKFRKELGQLIEICRGINTRRMAKIKDKLYTQYNIQNENDHKNIEEILKQKIKALAGRIKRYEDINSRKEQNSLFSENEHKLYRSLGGNSFKDIKLPEKETVEGFWSSILSNPIQYNSKAKWIKEVEASSSGFNTIDIEEITEEHIKIAIRKLLNWKAPGIDKVQNYYLKYLTSVHSYLGLIFTKIVTHKEILEEWFTTGQVILIPKNEQTEDPKNWRPIACLPTMYKLLSSVLANVLYDHCHQNNIMAIEQRGCHRGARGCKDHLMVNKAILEDAHQCQKNLSMAWIDYQKAFDSVPHEWLTKVLDVYKCPPIIKRFLELVMPTWRVIMTARGTQNSLTTGPIWVKRGIFQGDSLSPLLFCLAINPLSFILGKYEMKGYKLKDSLWINHLLYMDDLKLYANNKHNLKVLLDSVEIFTSDIGMRFGLDKCNTIDIISGHRNKVTGDGHILLDGDIIKQLAIEDRYKYLGIHESGKIEHSVIRDQIRKEYFKRLKKLLNSHLNSRNLIKGINTYAIPVLLYSFGVINYKNSDLKKIDTKTRKLLVIKKAHQQKAEVERLYLPVTQAGRGLLNIENMYKTQILKYKQYLIAECDDLIKAIVEHDKHRDKYSIINEAKEIEFQLNLARGNIHTDKDIREAIVKRSKDIWRNKQLHGQFIKKVLDQSNIDTELSFKWIKKQQISSAIESSVFAIQDQSIMTRQYRRDILKEPIDGKCRMCACRDETTQHIISGCEKLAGNYYVKRHNNLVQYVYWCLAKKHKIEVSSLWWKETLTQPQVKENETAKILWEMPVQTDTTISHNRPDIIYIDKTNNHTYLIDVTVPSDYNIGPKEIEKLSKYHLLKNEVSRLWKTQTTVIPIVIGATGVVAKSIKKYLEKLDTFIDITILQKQAAIHTSIILSKVLGDTVIVNNTQNNGT

SEQ ID NO: 31842 - protein, 893 aa, Epargyreus clarus
MAKIKDKLYTQYNIQNENDHKNIEEILKQKIKALAGRIKRYEDINSRKEQNSLFSENEHKLYRSLGGNSFKDIKLPEKETVEGFWSSILSNPIQYNSKAKWIKEVEASSSGFNTIDIEEITEEHIKIAIRKLLNWKAPGIDKVQNYYLKYLTSVHSYLGLIFTKIVTHKEILEEWFTTGQVILIPKNEQTEDPKNWRPIACLPTMYKLLSSVLANVLYDHCHQNNIMAIEQRGCRRGARGCKDHLMVNKAILEDAHQCQKNLSMAWIDYQKAFDSVPHEWLTKVLDVYKCPPIIKRFLELVMPTWRVIMTARGTQNSLTTGPIWVKRGIFQGDSLSPLLFCLAINPLSFILGKYEMKGYKLKDSLWINHLLYMDDLKLYANNKHNLKVLLDSVEIFTSDIGMRFGLDKCNTIDIISGHRNKVTGDGHILLDGDIIKQLAIEDRYKYLGIHESGKIEHSVIRDQIRKEYFKRLKKLLNSHLNSRNLIKGINTYAIPVLLYSFGHINYKNSDLKKIDTKTRKLLAIKKAHQQKAEVERLYLPVTQAGRGLLNIENMYKTQILKYKQYLIAECDDLIKAIVEHDKHRDKYSIINEAKEIEFQLNLARGNIHTDKDIREAIVKRSKDIWRNKQLHGQFIKKVLDQSNIDTELSFKWIKKQQISSAIESSVFAIQDQSIMTRQYRRDILKEPIDGKCRMCACRDETTQHIISGCEKLAGNYYVKRHNNLVQYVYWCLAKKHKIEVSSLWWKETLTQPQVKENETAKILWEMPVQTDTTISHNRPDIIYIDKTNNHTYLIDVTVPSDYNIGPKEIEKLSKYHLLKNEVSRLWKTQTTVIPIVIGATGVVAKSIKKYLEKLDTFIDITILQKQAAIHTSIILSKVLGDTVIVNNTQNNDT

SEQ ID NO: 31843 - protein, 1329 aa, Typhedanus ampyx
MPREGRTLETLRVRYAPMTNGALATFVNMKRQFRNRTLGPLPGGDRRGTSGADAGRDSMQTVSDSLLNRRARVGGPENTTADQRGGEGTGDVLQSRASPTNSVGSSASTTNNVVSDDRRRKWSIEELQELMFCYFQARSEGAGYIDRLHKLFAERNPNNPKIHKFNGNTLSNQARRIIKQNVLSQELLDRIQKLAEGTIDTIENSEIHVFEEEVTTNSHIPIIQNTHHIEYTIEQIETIDQLTQNIEVDEDQDPLILNFLQILSETKESAMEERQLLPKAKINKRFLQNLHKLNKFLPNILASNCSLREINNIIYASAKTLIINNNQLPYTPKTTYKNNTHPPWKKRIQTKIERFRKELGQLIEIGKGINTRRMTKIKDKLYRQYNIRNENEHRNIEEILKQKIKALAGRIKRYEDINSRKKQNSLFNENEHKLYRSLGGNSFKDIKLPDKEIVEEFWSSILSNPIHYNSEAKWIMEVEEASREVNSADIVEISEEHIKHAIRTLLNWKTPGVDKIQNYYLKYLTSVHSYLALIFTKIVTHNESLEDWFTTGQVILIPKNEQTEDPKNWRPIACLPTMYKLLSSILSNILYDHCHQNNIIAIEQRGCRRGARGCKDHLMVNKAILEDAHHSQKNLSMAWIDYQKAFDSVPHEWLTKVLDIYKCPPIIKRFLELVMPSWRVIMTARSTEKSLTTEPIHVRRGIFQGDSLSPLLFCLAINPLSFVLNKYEMKGFKLKDSLWINHLLYMDDLKLYANNRYNLKILLDSVEIFTRDIGMRFGLDKCNTIHISSGHRNKVNGEGHILLEGGIIQQLAIGDRYKYLGIHESGKIEHSVIREQFIKEYFKRIKKLINTQLNSRNLIKGINTYAVPILLYSFGVINYKNSDLKKIDTKTRKLLAIKKAHQQKAEVERLYLPVTEGGRGLLNIEYMYKTQIVKYKQYLKSESDELIKAIVDHDTRRDKYSIINEAQEIENELQLARGNIHTDKEIREAIVKRSKNIWRNKQLHGQFIKKVLDQTNIDTELSFKWIKKQQISPSIESSIFAIQDQCIMTLQHKRDILKDPVDGKCRLCTCKDETTQHIISGCEKLAGTYYVKRHNNLVQYVYWCLAKKHKIEVSGLWWKETLTQPQVKENEDAKILWEIPIQTDVTITHNRPDLIYVDKANNQTYLIDVTVPSDYNIGPKEIEKLSKYHLLKNEVSRLWKTQTTIIPIVIGATGIVGRNIKRYIDKLGTFIDITILQKQAAIHSSTILSKVLGDTVFVNNTLKQDTQNTSQPTQTVQESTEQNISEQLLTNTPNTHTITQSQDYHTGTYVQEQRDTQQNNRRGRRRRRT

SEQ ID NO: 31844 - protein, 1311 aa, Zera sp.
MKRQIMHSRLGPLPGGDRRGTSGADAGRDSMQTVSDSLLNRRARVGGPENITAELGGGEKIDDALQSRASPTDSVGSSVTTTNNVVSDDRRRKWSTEELQELMFCYFKARINGAGYIDRLHKLFAERNPNNPKIHKFNGNTLSNQARRILKQNVLSQELLDRLQKHAEGTLQEVGNSSQDTVVEKQTMIQSHVTTQNTYHIEYTAEQIQAIDKLTQNIEVSENQDPLILNFLQVLSETKETNIEDRPFLPKAKINKHFIKNLNTLNKYLPNILVTNNSLREINNIIYAVAKTLITQNNQSPYVPKNTLKNKSTPPWKRRIQTKIEAFRKELGQLIEIGKGINTRRMTKIRNKLYKKHNIHNENDHKNIQEILTQKIKALAGRIKRYEDINSRKVQNNMFSESEHRLYRSLGVSEVSDITLPSKETVEEFWSSVLSNPIQYNDKAKWIQEVEASSSEVNTIDIEEITEEHIKIAIRKLLNWKMPGIDKIQNYYLKYLTSLHGYLATLFTKIVTQKETLEEWFTTGQVILVPKNEHTEDPKNWRPIACLPTIYKLLTSVLANILYNHCHQNNIIAIEQRGCRRGCRGCKDHLMINKAILEDAHQSQKNLSMAWIDYQKAFDSVSHEWLTKVLDVYKCPLIIKRFLHLVMPTWKVVMTARGTRNSLTTEPICVRRGIFQGDSLSPLLFCLAINPLSFILNRYEMKGYKLKDSIWINHLLYMDDLKLYANNKHNLKVLVDSVEIFTNDIGMRFGLDKCNVVHMSSGHRSNVKGNGHILLDGNMIKELAIGDKYKYLGIHESGKIEHSVIRDQVTKEYFKRIKKLLNTHLNSRNLIKGINTYAIPVLLYSFGVINYKNSDLKKIDTKTRKLLALNKVHQQKAEVERLYLPIIQGGRGLLNIENMYKKQIIKYKQYLEAESDDLLKAIVEHDKHKEKYSIIKEAQKVESELHLAQGDIHTDKEISVAVVKRCKEIWRNKQLHGQFPKKVLDQTNIDTELSFKWIKKQHISPSIESSIFAIQDQSIMTRQHRRDILKEPVDGKCRLCGGKDETTQHIISGCEKLAGTYYVKRHNNLVQYVYWCLARKHKIDVSSLWWKETLIQPQVQENDTAKIMWEMPVQTDITITHNRPDLIYIDKTNNKTYLIDVTVPSDYNIGPKEIEKLSKYHLLRNELTRLWKTQTTVIPIVVGATGVVAKSIKRYIEQLDTYIDISILQKQAAIHSSTILSKVLGDTVFVTNTQTSLQDTHNLEQPTHTIQASNLQPTIRTPISSDQRLSQTEQIFTNTLDVNQHIITRTQEQTNAQQGNRRGRRRGGIRK

SEQ ID NO: 31845 - protein, 1299 aa, Xestia xanthographa
MERQRNSTRIGPLPGGERRGTSRADAGRDSIRAVSGSLLSRRARVGEPEGTTAEQRGGVDTDDALRSRATTPIYHSAGSSRETIQELNEDRRKKWSTEELKELMYCFFKAQSQGPGYINRLFTLFIDRNPTNPKIHKFNGNTLSNQARRIIKQNVFSQELLNRIRDEAEGRVTENTEITTNMTEPNSATDTTNTQHDSPINTQHDIHTNTQPSLEQTELIDQLTRNVTVSEDQDPLILNFLQVLAETKETPIKDRYLLPKAKINRFFLQNLHTLNSYLSNLLITADTLRELNNIIYATAKTLILKNKQIPFVPKNVIKARSDPPWKKRIQNKIEKYRKELGQLVEIGRGVNTRRMNNIKTKLYNKYNIQCENERNNTEEILKQKVKALAGRIKRYEEISNRKEQNRLFKENEHRLYSSLGNNSNSNDIKLPSKECVEEFWKSILSKPIQYNKDARWIDELEISSNRIGTVESQEITEEQVKIAIGKLHNWKTPGIDKIQNYYLKYLTSTHKYFATVFTNIIGGRDQLEEWFTTGQVILIPKNENTEDPKNWRPIACLPSSYKLLTSILANQLYNHCQENSIMAIEQRGCRRGARGCKDHLMVNKAILEDAHQSQKNLSMAWIDYQKAFDSVSHEWLLRILDIYKCPPMIKAFLEITMPTWKVIMTARGTNESLCTEPIHIKRGIFQGDSLSPLLFCLAINPISSILNKYEMKGYKLKDSFWVNHLLYIDDLKIYANNKNNLKVLLDSVEIFTNDIGMTFGLNKCNTIHIRSGHRNNTIGEGHILLSGDAFEQLGIDRTYKYLGVHESGKIEHNQIREQVTKEYFKRTKKLLNTHLNARNIIKGINTYAIPVLLYSFGIINYKNSNLKAIDIKTRKLLAIKKAQKQKADVERLYLPIIEGGRGLINVENMYKTQILKYKHYLEGENDDLIKVIVQHDKNRDKYSIIKEAQEIERELQLPQNSIHTDKEIKHAIIKIQNDKWRNKQLHGQFPKAVLDQANIDKEKSFKWIKKQQISPSIESAIFAIQDQAVMTRQHQRDILKVEIDGKCRLCDSKDETVQHIISGCEKLAGTYYVKRHNNLVQYVHWCLAKKHNIEVSSLWWKESLTQPQVKENEQAKIMWEIPIQTDVTVTHNRPDLIYVDKTNNNTFLIDIAVPSDYNIGAKEIEKLSKYHLLKTEIRRLWNTQTTVIPIVVGATGIISKSLHRYIDQLNVKIDVTILQKQAAIHTTTILSKVLGDTVFVNRPPSTLETTPETQQTSHTVDSQHLSVTQRSSTSDTTNTQSHPSTTQNIISTRRCRRRR

SEQ ID NO: 31846 - protein, 1248 aa, Deilephila porcellus
MERQSRNERIGSLPGGDRRGTSGADAGRDSMRTVSGSQLNRRARVGSPEDITADLRGGEGTDDVLQGRAPPTSSVGSSAMTTSNENNDKRKKWSTEELQELMFCYFQAKAEGSGYISRLQQIFTQRNPNNPKIHKFNGNTLSNQARRIIKQNIISKELLDEIQKQAVDSESLENREGNVYDVYQQPTQDTIPQTLNTDHIIYNTPEQAQAIEHLTQNIEVNEDQNPLILDFLQILAATKETPLPDRLFLPKAKINKHFLQNFHILNKYLPNLLITNNSLMEINNIIYAAAKTLIMKNQQIPYAPKNILKTKSEPPWKKRIKIKIDKYRKDLGQLIEIDRGINTRRMIKIKDKLYRKFNIQSENDQKNAIETIKQKIKALAGRIKRYEDINTKKEQNKLFNENEHLLYRSLGGQSFKDIKLPSKVRIEEFWSSVLSNPIQYNNEATWIKRVEESSNEIRTINTEEILEEHVKSATKKMLNWKTPGIDKIHNYYIKYFTSTHKYLALVYTKIVTGIEALEDWFTTGQVILIPKTEQTEDPKNWRPIACLPTMYKLLTSILTDTLYTHCHDNNIIAVEQRGCRRGARGCKDHLMVNKSILEDAHKSQKNLSMAWIDYQKAFDSISHNWLLKVLDIYKCPPIIKRFLQLTMPAWKVVMTARGHRDTITTDPIYIRRGIFQGDSLSPLLFCLALNPLSFILNKYDRKGYKLKNNVYINHLLYMDDLKIYSNNSNNLKVLLNSVEIFTSDIGMKFGLDKCNILNISSGRRSKATGEGHILLNGEKIKQLGIEDKYKYLGIHESGKIEHSTIREQITKEYFRRIKKLLNTHLNSRYLIKGINTYAIPVLLYTFGIINYKTSDLKKIDTKTRKLLAINKAHQQKADVERLYLPVSEGGRGLINVEYMYKTQILKYKQYLIGEHDYLIKAIIEHDKHKDKFSIVNEAQTIERELHLPQGNIHLEKEIKLALIKNRNDRWRSKQLHGQFPKKVLDQANINKELSFDWIKKQHIAPKIESSIFAIQDQAVITRQHQRDILKEQIDGKCRLCANKDETTQHIISGCEKLAGTYYVRRHNNLVQYVYWCLARKHKIEVSDFWWKETLTQPQIKENESAKILWEFPVHTDITVTHNRPDIIYIDKNNNKTYLIDITVPSDYNIGAKEIEKLSKYHLLRNEVSRLWNTQAIIIPVVIGATGIVAKSINKYIDQLNCNINISILQKQAAIHTSTILSKVLGDTVFVTTQRSLYPQDTHNVQNNN

SEQ ID NO: 31847 - protein, 1257 aa, Thyatira batis
MEMNRNNNRIGPLPGDDRRGTLGADAERDSMQTVSGSLLNRRARAGGPEVTTADQRGGEGTGDALQSRASPTDSVGSSVTTRNMLENDDRRKKWSIEETKELMYCYFKARSAGSGYIGRLQAIFTERNPNNPKIHKFNGNTLSNQARTIIKKNVISQKLLDRIQKQAEGLTTTETPEPIFNENEQQNTTLTQTHNTQPHIQSYTQSHTQSHIQSHIQYTQHTPEQAHTIDQLTNNIEVNEDQDPLILRFLQLLAETKETPIEERLLLPKAKINKHFLENLKILNKYLPNLLITNNSLRGINNLIYAAAKTLIITNNQTPYSPQTIIKSKCDPPWKKRIQIKIEKLRKELGQLIEIERGVNTRKMIKIKCKLYSKYNIQSENMAETIKQKIKALAGRIKRYEDMSNRKEQNRLFKENEHRLYRSLEGNSNKDIQIPSKENVETFWTSILSNPIQYNDEAKWIKEVELSQKEVNTIDSDEITIDQVKFAIRKLLNWKSPGIDKIQNYYLKYFTSVHEYLASLFTKIATGTESLENWFTTGQVILIPKNDNTTEPKNWRPIECLPSMYKLLTSVLANVLYSHCHENNIISVEQRGCRRGARGCKDHLMVNKAILEDAHQSQKNLSMAWIDYQKAFDSVSHEWLLKILDVYKCPPIIKRFLELSMPAWRVIMTARGSKDSITTEPIYIRRGIFQGDSLSPLLFCLAINPLSYILNKYELKGYKLRDNIWINHLLYMDDLKVYANNKRNLKVLLESVEIFTSDIGMKFGLDKCNTIHISSGHRNSVSGGGHILLSGETVKQLAIGDTYKYLGVNESGKIEHNNIRDQVTKEYFKRVKKLLNTHLSSRFLIKGINTFAIPVLLYSFGIINYKKVDLKKIDIKTRKLLAMNKAHQQKAEVERLYLPLTLGGRGLINVEQMYKSQIVKYKQYLSSETDHLIKAIVQHDTHRDKYSIVKEAQEIERELQLTPGNTHTDKEIKESIIKYQNKTWRNKQLHGQFPKKVLDQANVDSELSFKWLKKQQISPSIESSIFAIQDQAVMTRQHQRDILKEPVDGKCRLCACKDETTQHIISGCEKLAGTYYVQRHNNLVQYVYWCLAKKHKMEVCNLWWKETLIQPQVKENEAAKILWEMPVQTDVTVTHNRPDLIYIDKVNNKTFLIDITVPSDYNIGPKEIEKLSKYHLLKTEVSRLWNTQTTIIPIVIGATGVVAKSINKSIYIKESRVCFNTYNSRSAEPIFMVIDSLDLSPPRIAEYILKRMKTGCV

SEQ ID NO: 31848 - protein, 1311 aa, Allancastria cerisyi
MTNGALVTFLNMERQLENIRIGPLPGGDRRGTSGADAGRDSMQAVSGSLLSRRARVGGPEDVTADQRGREGADNVLQSRASPTNSVGLSAATTNNAINDDRRRKWSTVELTELMFCYFKARSEGPGYIGRLHQLFTERNPDNPKIRKFNGNTLSNQARRVIKQNVLSQEQLDRIQKEAEGIIPTENSELILNDQVMEQDILLTQTPSDNIHQDTQYTQEQAETIEQLTHTIEVSEGTDPFILQFLQILAETKETLPADRLFLPKAKINKRFIENLNKLNRYLPSLLITNNSLREINNIIYATARTLIINNNQTPYLPQQAIKSKCDPPWKKRIQTKIDKLRKDLGQLIEIDRGINTKKMMKIKDKLYTKYNIQNENDHLITKETITQKIKALAGRIKRYEDINIRKTQNRLFHENEKKLYRSLGGNNYKDIKIPNKEKTEEFWSSILSKSVQYNVNAKWIKEVEIASSEINTVNMEKITEDQIKSATRKLMNWKSPGIDKIQNYYLKYLTSVHKYLASLFTNIVSGTEMLEEWFTTGQVILIPKNGNTEDPKNWRPIACLPSTYKLLTSVLANILYSHCQENNIMAVEQRGCRRGARGCKDHLMVNKSILEDAHQSQKNLSMAWIDYQKAFDSVSHEWLLKILDIYKCPPIIKNFLQLVMPSWKVIMTARGSRDSLTTEPIYIRRGIFQGDSLSPLLFCLAINPISFILNKYERKGYKLKDSFWINHLIYMDDLKVYANNKNNLKVLLDSVEIFTNDIGMRFGFDKCNVIHITSGYRSSATGEGHILLSGDTFKQLAIKDTYKYLGVHESGKIEHNNIREQITKEYFKRTKQLLNTHLNSRYLIKGINTYAVPVLLYSFGIINYKNSDLKKIDVKTRKLLAIKKAHQQKAELNRLYLPVSQGGRGLLNIEYMYKTQIVKYKQYLKTENDHLIQSIVQHDIHRDKYSIMKEALEIEQELHLTQGNIHTDKEIKEAIVKNQNEAWRNKQLHGQFPKKVLDQANINMELSFNWIKKQGIPPSIESSIFAIQDQAIMTRQHQRDILKEPVDGKCRLCACKDETTQHIISGCDKLAGNYYVKRHNNLVQYIYWCLAKKHKIEVCDVWWKETLIQPQVKENESAKILWEIPIQTDVTVINNRPDLIYIDKNSSKTFLIDITVPSDYNIGAKEIEKLSKYHLLKTEVSRLWNTQTMVIPVVIGTTGIVAKSINKYIDKLDACIDISILQKQAAIHSSTIISKVLGDTVFVHNTQDHHILNTQQISDEQQSLNTQHRSNTPEQSNIMHTSNIQQPINIHQRSRRRRRRLTRTQRDRDAP

SEQ ID NO: 31849 - protein, 1332 aa, Narcosius parisi
MPREGRTLETLRVRYAPMTNGALVTFVNMERQFRNRTLGPLPGGDRRGTFGADAGRDSMQTVSDSLLNRRARVGGPENTTADQRGGEGTDGALQSRASPTDSVGSSVTTTNNAVSDDRRRKWSTEELQELMFCYFKARSGGAGYIDRLYTFFAERNPNNPKVHKFNGNTLSNQARRILKKNVLSQELLDRIQKHAEGTIDMIESSGQNVVEEEQVTLHPHITVTQNTHHIEYTIEQIQTIDQLAQNIEVTEEQDPLILNFLQILSETKETAIDERQLLPKAKINRCFLENLCKLNNFLPNILATNNSLREINNIIYAAAKTLIINNNQSPYTPKISFKIRSDPPWKKRIQTKIERFRKELGQMIELGRGINTRRMQKIKDKLYRQYNIQNENEHRNIEEILKQKIKALAGRIKRYEDINTRKEQNSLFNENEHKLYRSLGGNSYKDIKLPDKKITEEFWSSILSKPVQYNSNAKWIKEVESSSSEVNTINIQEISEEHIKIAIKKLLNWKTPGIDKIQNYYLKYLTSIHSYLGAIFTKIVTGMETLEEWFTTGQVILIPKNEQTDDPKNWRPIACLPTMYKLLSSVLANILYDHCHQNNIINIEQRGCRRGARGCKDHLMVNKAILEDAHQCQKNLSMAWIDYQKAFDSLPHEWLTKVLDIYKCPPIIKRFLELVMPSWRVIMTARGTQNSLTTGPICVKRGIFQGDSLSPLLFCLAINPLSFVLNKYEMKGYKLRDSLWVNHLLYMDDLKLYANNKHNLKVLLDSVEIFTNDIGMSFGLDKCNIIHINSGHRNKVTGEGHILLDGEIIKQLAIGDRYKYLGIHESGKIEHSVIRDQIIKEYFKRIKKLLNTYLNSRNLIKGINTYAIPVLLYSFGVINYKNSDLKKIDTKTRKLLAMKKAHQQKAEVERLYLPVTQGGRGLLNVEYMYKTQIIKYKQYLKAGNDDLIKAIVEHDLHRNKYSIINDAKEIESQLHLVQGNIHTDKDIREAIVKRCKDIWRNKQLHGQFIKKVLDQTNIDTELSFKWIKKQQISSAIESSIFAIQDQCIMTSQHRRDILKEPVDGKCRLCACKDETAQHIISGCEKLAGNYYVKRHNNLVQYVYWCLAKKHKIEVSSLWWKETLIQPHVKENETAKILWEIPVQTDVTVSHNRPDLIYIDKTNNQTYLIDVTVPSDYNIGPKEIEKLSKYHLLKNEVSRLWKTQTTVIPIVVGATGVVAKSIKKYVEKLGTFIDIGILQKQAAIHSSTILSKVLGDTVFLNNTQHKNTHNITQPPHTVQASIIESTLHTPGSSVQQSSHIHHTPVSELLLTGTLNSTSTSHTQEHHTATHTRT

SEQ ID NO: 31850 - protein, 1306 aa, Anastrus sempiternus
MPREGRTSETRRVRYTPMTNGALVTFVNMERQLRNRTLGPLPGGDRRGTFGADAGRDSMQTVSDSLLSRRARVGGPENITADQRGGEGTDDALQSRASPTDSVGSTVSTTNNAISDDRRRKWSTEEQQELMYCYFKARMDGAGYIERLHKLFTERNPNNPKIYKFNGNTLSNQARRIIKQNVISQELLDRIQKHAEGIIDTVENGEQNVNKEQVEESTTHTHINITNNTQHIEYTIEELETIDRLTQNIDVNEDQDPLILNFLQMLSETKETIIEDRQLLPKAKINKNFLKNLSTINKFLPSILATNNSLREINNIIYAAAKTLILNNNQLPYTPKNIFKTKSDPPWKRRIQTKIEKFRKELGQLIEIGRGINTPRMAKIKDKLYRQHNIQNENEHRNVEEILKQKVKALAGRIRRYETINSKKEQNSLFSENEHKLYRSLGGNSFKDIKLPNKEIVEDFWSSILSNPIHFNYSANWIKEVEASTSQVNTIDVEEITEEHIKHAIRKLLNWKTPGVDKIQNYYLKYFTSIHSYLGSIFTKIVSCKETLEEWFTTAQVILVPKNEQTEDPKNWRPIACLPTMYKLLSSVLSNILYNHCHQNNIIAIEQRGCRRGARGCKDHLMVNKAILEDAHQSQKNLSMAWIDYQKAFDSVPHDWLTKILDVYKCPSIIKRFLELVMPSWRVIMTARGTQNSLTTEPICVRRGIFQGDSLSPLLFCLAINPLSFILNRYEMKGYKLKDSIWINHLLYMDDLKLYANNKHNLKVLLDSVEIFTRDIGMRFGLDKCNTIDISAGHRINATGEGHILLEGEIIKQLAIGNRYKYLGIHESGKIEHSVIRDQITQEYFKRIKKLMNTHLYSRNLIKGINTYAIPVLLYSFGIINYKNNDLKKIDTKTRKLLAIKKAHQQKADVERLYLPVVQGGRGLLNVEYMYKTQILKYKQYLKAESDDLIKAIVEHDKHRYKYSIIKEAQEIENHLHLDRGNIHTDKDIREAIVKSRKDTWRSKQLHGQFIRKVLDQTNIDTELSFKWISRQKISPTIESSIFAIQDQCIMTRQHRRDILKENIDGKCRLCASKDETTQHIISGCEKLAGNYYVKRHNNLVQYVYWCLAKKHKLEVASLWWKETLTQPQIKENETAKILWEMPVQTDVTVTHNRPDLIYIDKINNHTYLIDVTVPSDYNIGPKEIEKLSKYHLLKNEVSRLWKTQTTIIPIVVGATGIVGKSIQKYIKKLDTFIDITILQKQAAIHSSTILSKVLGDTVFVNNTQNNDIIHSEQQSQVAQENIQGRNGRGRRRKERHNNENNTTHT

SEQ ID NO: 31851 - protein, 1248 aa, Deilephila porcellus
MERQSRDERIGSLPGGDRRGTSGADAGRDSMRTVSGSQLNRRARVGSPEDITADLRGGEGTDDVLQGRAPPTSSVGSSAMTTSNENNDKRKKWSTEELQELMFCYFQAKAEGSGYISRLQQIFTQRNPNNPKIHKFNGNTLSNQARRIIKQNIISKELLDEIQKQAVDSESLENREGNVYDVYQQPTQNTIPQTLNTDHIIYNTPEQAQAIEHQTQNIEVNEDQNPLILDFLQILAATKETPLPDRLFLPKAKINKHFLQNFHILNKYLPNLLITNNSLMEINNIIYAAAKTLIMKNQQIPYAPKNTLKTKSEPPWKKRIKIKIDKYRKDLGQLIEINRGINTRRMLKIKDKLYRKFNIQSENDQKNAIETIKQKIKALAGRIKRYEDINTKKEQNKLFNENEHLLYRSLGGQSFKDIKLPSKVGIDEFWSSVLSNPIQYNNEATWIKKVEESSNEIRTINTEEILEEHVKSATKKMLNWKTPGIDKIHNYYIKYFTSTHKYLALVYTKIVTGIEALEDWFTTGQVILIPKNEQTEDPKNWRPIACLPTVYKLLTSILTNTLYTHCHDNNIIAVEQRGCRRGARGCKDHLMVNKSILEDAHKSQKNLSMAWIDYQKAFDSISHNWLLKVLDIYKCPPIIKRFLQLTMPAWKVVMTARGHRDTITTDPIYIRRGIFQGDSLSPLLFCLALNPLSFILNKYDRKGYKLKNNVYINHLLYMDDLKIYSNNSNNLKVLLNSVEIFTSDIGMKFGLDKCNILNISSGRRSKATGEGHILLNGEKIKQLGIEDKYKYLGIHESGKIEHSTIREQITKEYFRRIKKLLNTHLNSRYLIKGINTYAIPVLLYTFGIINYKTSDLKKIDTKTRKLLAINKAHQQKADVERLYLPVSEGGRGLINVEYMYKTQILKYKQYLIGEHDYLIKAIIEHDKHKDKFSIVNEAQTIERELHLPQGNIYLEKEIKLAIIKNRNDRWRSKQLHGQFPKKVLDQANVNKELSFDWIKKQHIAPKIESSIFAIQDQAVITRQHQRDILKEQIDGKCRLCANKDETTQHIISGCEKLAGTYYVRRHNNLVQYVYWCLARKHKIEVSDFWWKETLTQPQIKENESAKILWEFPVHTDITVTHNRPDIIYIDKNNNKTYLIDITVPSDYNIGAKEIEKLSKYHLLRNEVSRLWNTQAIIIPVVIGATGIVAKSINKYIDQLNCNINISILQKQAAIHTSTILSKVLGDTVFVTTQRSLYPQDTPNVQNNN

SEQ ID NO: 31852 - protein, 902 aa, Mysoria xanthippe
MAKIKEKLYRQYNIQTENEHRNIEEKLKQKIKALAGRIKRYEDINSRKQQNSLFSENEHKLYRSLGGNSFKNIKLPDKEIVEEFWSSILSNPVHYNSQAKWIKEIEMASSEVNTADVEEISEEQVKHAIKNLLNWKTPGVDKIQNYYLKYFTSVHSYLGSTFSKIVSGEETLEEWFTTGQVILIPKNEQSDDPKNWRPIACLPTMYKLLSSVLSNILYDHCHQNKIIAIEQRGCRRGVRGCKDHLMVNKAILEDAHQSQKNLSMAWIDYQKAFDSVPHEWLVKVLDVYKCPPIIKRFLKLVMPSWKVIMTARGTNNSLTTEPIYVRRGIFQGDSLSPLLFCLAINPLSFILNKYEMKGYKVKDSIWINHLLYMDDLKIYANNRHNLKVLLESVEIFTRDIGMRFGLDKCSTIHISSGRRNKVTGEGHILLEGEIIKQLAIGDTYKYLGIHESGKIEHSIVRDQINKEYFKRIKKLINTHLNSRNLIKGINTYAIPVLLYSFGVINYKNSDLKKIDTKTRKLLAIKKAHQQKAEVERLYLPVSQGGRGLLNVEYMYKTQIVKYKQYLKAESDELIKAIVMHDIHRDKYSIIKEAQNIEIELQLARKDIYTDKDIRESIVKRCKNTWRNKQLHGQFMRKVLDQTNIDTELSFKWIKKQKISATIESSIFAIQDQCIMTRQHRRDILKEPVDGKCRLCACKDETTQHIISGCEKLAGNYYIKRHNNLVQYIYWCLAKKHKIEVSSLWWKEALLQPQVKENETTKILWEMPVQTDVTITHNRPDLIYIDKTNNQTYLIDVTVPSDYNIGPKEIEKLSKYHLLKNEVSRLWKTQTTIIPIVIGATGIVGKNIKKYIEKLNTFIDITILQKQAAIHSSTILSKVLGDTVFVNNTQNTQNTEQPTHSIT

SEQ ID NO: 31853 - protein, 1246 aa, Metardaris cosinga
MERQFRNCTLGPLPGGDRRGMSGADAGHDSMQTVSGSLLNRRARVGRPENTTADQRGGEGTDDALQSRASPTDSVGSSVSTTNNAINDDRRRKWSTEELQELMYCYFKARLDGVGYINRLHRLFTERNPNNPKIHKFDGNTLSNQARRIIKQNVISQELLNRIQKHAEGRIDVVENMEQNIGEEEVTVPLSTITLNTHHIDYSTEQIKTINQLVQNIEVNEDQDPLILNFLQILSETKETLIEERQLLPKAKINKCFIENLCKLNKFLPNILATENSLREINNIIYAAAKTLIINNNQKPYTSKNVYKNKCDPPWKKRIRIKIEKFRKELGQLIELGRGNNTRRMTKIKEKLYRQYNIQTENEHRNIEEKLKQKIKALAGRIKRYEDINSRKQQNSLFNENEHKLYRSLGGNSFKNIKLPDKEIVEEFWSSILSNPVYYNSQAKWIKEIEMASSEVNTADVEEISEEQVKHAIKNLLNWKTPGVDKIQNYYLKYFTSVHSYLGSTFSKIVSGEETLEEWFTTGQVILIPKNEQSDDPKNWRPIACLPTMYKLLSSVLSNILYDHCHQNKIIAIEQRGCRRGVRGCKDHLMVNKAILEDAHQSQKNLSMAWIDYQKAFDSVPHEWLVKVLDVYKCPPIIKRFLKLVMPSWKVIMTARGTNNSLTTEPIYVRRGIFQGDSLSPLLFCLAINPLSFILNKYEMKGYKVKDSIWINHLLYMDDLKIYANNRHNLKVLLESVEIFTRDIGMRFGLDKCSTIHFSSGRRNKVTGEGHILLEGEIIKQLAIGDTYKYLGIHESGKIEHSIVRDQINKEYFKRIKKLINTHLNSRNLIKGINTYAIPVLLYSFGVINYKNSDLKKIDTKTRKLLAIKKAHQQKAEVERLYLPVNQGGRGLLNVEYMYKTQIVKYKQYLKAESDELIKAIVTHDIHRDKYSIIKEAQNIEIELQLARKDIYTDKDIREAIVKRCKNTWRNKQLHGQFMRKVLDQTNIDTELSFKWIKKQKISATIESSIFAIQDQCIMTRQHRRDILKEPVDGKCRLCACKDETTQHIISGCEKLAGNYYIKRHNNLVQYIYWCLAKKHKIEVSSLWWKEALLQPQVKENETTKILWEMPVQTDVTITHNRPDLIYIDKTNNQTYLIDVTVPSDYNIGPKEIEKLSKYHLLKNEVSRLWKTQTTIIPIVIGATGIVGKNIKKYIEKLNTFIDITILQKQAAIHSSTILSKVLGDTVFVNNTQNTQNTEQPTHSIT

SEQ ID NO: 31854 - protein, 1322 aa, Autochton zarex
MPREGRTLETLRVRHAPMTNGALVTFNMERQFRNRTLGPLPGGDRRGTSGADAGRDSMQTVSDSLLNRRARVGRPENTTADQRGGEGTGDALQSRASPTDSVGSSVSTTNNTVSDDRRRKWSTEELQELMFCYFKARFDGAGYIDRLHKLFKERNPNNPKIHNFNGNTLSNQARRIIKQNVISQELLDRIQKHAEGRIDVAEDREQNVMEEEITAPSNTITPSTHHVDYSIEQIQTIDQLAQNIEVNEDQDPLILNFLQIFSETKETIIEERQLLPKAKINKRFLENLCKLNKFLPNILATNNSLREINNIIYAAAKTLIINNNQIPYTPKNIFKNKSDPPWKKRIKIKIEKFRKELGQLIELGRGNNSRRMTKIKDKLYRQYNIQNENEHKNIEETLKQKIKALAGRIKRYEDINSRKEQNSLFNENEHKLYRSLGGNSFKDIKLPDKEIVEEFWSSILSNPINYNSKAKWIKEIEMASSEVNTIDIEEISEEQIKHAVKKLLNWKTPGIDKIQNYYLKYLTSVHSYLGSIFTKIVSEKETLEGWFTTGQVILIPKNEQTEDPKNWRPIACLPTMYKLLSSVVSNILYEHCHQNNIIAIEQRGCRRGARGCKDHLMVNKAILEDAHQTQKNLSMAWVDYQKAFDSVPHEWLIKVLDVYKCPPIIRRFLELVMPSWRVIMTARGTQNSLTTEPIYVRRGIFQGDSLSPLLFCLAINPLSYVLNKYEMKGYKLKDSIWINHLLYMDDLKVYANNSHNLKVLLDSVEIFTRDIGMKFGLDKCNTIHISSGRRNKVIGEGHILLEGEIINQLAIGDRYKYLGIHESGKIEHSIVRDQINKEYFKRIKKLLNSHLNSRNLIKGINTYAIPVLMYSFGVINYKNSDLKKIDTKTRKLLAIKKTHQQKAEVERLYLPVTQGGRGLLNVEYMYKTQIVKYKQYLKAESDELIKAIVTHDVHRDKYSIIKEAEEIENQLHLVRKDIHTDKDIREAIVKRRKDIWRNKQLHGQFIRKVLDQTNIDTELSFKWIKKQQISPTIESSIFAIQDQCIMTRQHRRDILKEPVDGKCRLCACKDETTQHIISGCEKLAGNYYVKRHNNLVQYVYWCLAKKHKIEVSSLWWKETLIQPQVKENETAKILWEMPVQTDVTVTHNRPDLIYIDKTNNRTYLIDVTVPSDYNIGPKEIEKLSKYHLLKNEVSRLWNTQTTIIPIVVGATGIVGKNIKKYIEKLDTFIDITILQKQAAINSSIILSKVLGDTVFVNNTQNTQNTEQPTHTGQGLNIQDTSEQILTSTTDSTIQHPTNTDACTRGRGGTQRRIVRRRGRILR

SEQ ID NO: 31855 - protein, 1316 aa, Autochton pseudocellus
MPREGRTLETLRVRYTPMTNGSLATFVNMERQFRNRTLGPLPGGDRRGTSGADAGRDSMQTVSDSLLNRRARVGGPENTTADQRGGEGTDDALQSRASPTDSVGSSVSTTNNAISDDRRRKWSTEELQELMFCYFKARLDGAGYIDRLHKLFTERNPNNPKIHKFNGNTLSNQARRIIKQNVISQELLDRIQKHAEGRIDTVENLEQNIVEEEVTVHSNTITLSTHHIDYTIEQIQTIDQLAQNIEVSEDQDPLILNFLQILSETKETVIEERQLLPKAKINKRFLENLCKLNKFLPNILATNNSLREINNIIYAAAKTLITNNNQIPYTPKNTFKNKSDPPWKKRIQNKIEKFRKQLGQLIELGRGNNTRRMTKIKDKLYRQYNIQNENEHRNIEETLKQKIKALAGRIKRYEDINSRKEQNSLFNENEHKLYRSLGGNSFKDIKLPDKEIVEEFWSSILSNPVHYNSKAKWIKEIEMAASEVNITDIEEISEEHIKHATKKLLNWKTPGIDKIQNYYLKYLTSVHSYLGSLFTKIVSGKETLEEWFTTGQVILIPKNEKTEDPKNWRPIACLPTIYKLLSSVLSNILYDHCHQNNIIAIEQRGCRRGARGCKDHLMVNKAILEDAHQSQKNLSMAWVDYQKAFDSVPHEWLVKVLDVYKCPPIIKRFLELVMPSWRVIMTARGTQNSLTTGPIYVRRGIFQGDSLSPLLFCLAINPLSFVLNKYEMKGYKLKDSLWINHLLYMDDLKVYANNRHNLKVLLDSVEIFTRDIGMRFGLDKCNTIHISSGHRNEVTGEGHILLEGDIIKQLAIGDRYKYLGIHESGKIEHSIVRDQISKEYFKRIKKLINTHLNSRNLIKGINTYAIPVLLYSFGVINYKNSDLKKIDTKTRKLLAIKKAHQQKAEVERLYLPVTEGGRGLLNVEYMYKTQIVKYKQYLKAEGDDLIKAIVTHDIHRDKYSIIKEAQEIENQLHLARQDIHTDKDIREAIVKRRKDIWRNKQLHGQFIKKVLDQTNIDTELSFKWIKKQQISPSIESSIFAIQDQCIMTRQHRRDILKEPVDGKCRLCACKDETTQHIISGCEKLAGNYYVKRHNNLVQYVYWCLAKKHKIEVSSLWWKETLIQPQVKENETAKILWEMPVQTDVTITHNRPDLIYIDKINNRTYLIDVTVPSDYNIGPKEIEKLSKYHLLKNEISRLWKTQATIIPIVIGATGIVGKNIKKYTEKLDTFIDITILQKQAAINSSTILSKVLGDTVFVNNTQNTQNTEQPTHTGQASNIHNISEQLTTEFNTQQTQECRITARTRERGGMQRRNIRR

SEQ ID NO: 31856 - protein, 1248 aa, Deilephila porcellus
MERQSRNERIGSLPGGDRRGTSGADAGRDSMRTVSGSQLNRRARVGSPEDIKADLREGEGTDDVLQGRAPPTSSVGSSAMTTSNENNDKRKKWSTEELQELMFCYFQAKAEGSGYISRLQQIFTQRNPNNPKIHKFNGNTLSNQARRIIKQNIISKELLDEIQKQAVDSESLENREGNVYDVYQQPTQDTIPQTLNTDHIIYNTPEQAQAIEHLTQNIEVNEDQNPLILDFLQILAATKETPLPDRLFLPKAKINKHFLQNFHILNKYLPNLLITNNSLMEINNIIYAAAKTLIMKNQQIPYAPKNTLKTKSEPPWKKRIKIKIDKYRKDLGQLIEIDRGINTRRMIKIKDKLYRKFNIQTDNDQKNAIETIKQKIKALAGRIKRYEDINTKKEQNKLFNENEHLLYRSLGGQSFRDIKLPSKVGIEEFWSSILSNPIQYNNEATWINKVEESSNEIRTINTEEILEEHVKSATKKMLNWKTPGIDKIHNYYIKYFTSTHKYLALVYTKIVTGIEALEDWFTTGPVILIPKNEQTEDPKNWRPIACLPTMYKLLTSILTNTLYTHCHDNNIIAVEQRGCRRGARGCKDHLMVNKSILEDAHKSQKNLSMAWIDYQKAFDSISHNWLLKVLDIYKCPPIIKRFLQLTMPAWKVVMTARGHRDTITTDPIYIRRGIFQGDSLSPLLFCLALNPLSFILNKYDRKGYKLKNNVYINHLLYMDDLKIYSNNSNNLKVLLNSVEIFTSDIGMKFGLDKCNILNISSGRRSKATGEGHILLNGEKIKQLGIEDKYKYLGIHESGKIEHSTIKEQITKEYFRRIKKLLNTHLNSRYLIKGINTYAIPVLLYTFGIINYKTSDLKKIDTKTRKLLAINKAHQQKADVERLYLPVSEGGRGLINVEYMYKTQILKYKQYLIGEHDYLIKAIIEHDKHKDKFSIVNEAQTIERELHLPQGNIHLEKEIKLAIIKNRNDRWRSKQLHGQFPKKVLDQANVNKELSFDWIKKQHIAPKIESSIFAIQDQAVITRQHQRDILKEQIDGKCRLCANKDETTQHIISGCEKLAGTYYVRRHNNLVQYVYWCLARKHKIEVSDFWWKETLTQPQIKENESAKILWEFPVHTDITVTHNRPDIIYIDKNNNKTYLIDITVPSDYNIGAKEIEKLSKYHLLRNEVSRLWNTQAIIIPIVIGATGIVAKSINKYIDQLNCNINISILQKQAAIHTSTILSKVLGDTVFVTTQRSLYPQDTHNVQNNN

SEQ ID NO: 31857 - protein, 1324 aa, Cecropterus albociliatus
MPREGRTLETLVVRYTPMTNGALVTFVNMERQFRNRTLGPLPGGDRRGTSGADAGRDSMQTVSDSLLNRRARVGGPENVTADQRGGEGTDDALQSRASPTDSVGSSVSTTNNAISDDRRRKWSTEELQELMFCYFKARLDGAGYIDRLHKLFTERNPNNPKIHKFNGNTLSNQARRIIKQNVISQELLDRIQRHAEGRIDPVENLEQNVVEEESIAHSNTITPSTHIDYSIEQIQTIDQLTHNIEVNEDQDALILNFLQILSETKETVIEERQLLPKAKINKRFLENLCKLNKFLPNILATNNSLREINNIIYAAAKTLIINNNQMSYTPKNAFKNKSDPPWKKRIQIKIEKFRKELGQLIELGRGNKSRRMTKIKDKLYRLYNIQNENEHRNTEEILKQKIKALAGRIKRYEDINSRKEQNSLFNENEHKLYRTLGGNSFKDTKLPDKEIVEEFWSSILSKPMHCNSKAKWIKEIEMASSEVNTIDIEEISEEHIKHAIKKLLNWKTPGIDKIHNYYLKYLTSVHSYLGSIFTKIVSGKETLEEWFTTGQVILIPKNEQTEDPKNWRPIACLPTIYKLLSSVLSNILYDHCQQNNIIAIEQRGCRRGARGCKDHLMVNKAILEDAHQSQKNLSMAWIDYQKAFDSVPHEWLVKVLDIYKCPPVIKRFLELVMPSWRVIMTARSTQNSLTTEPIYVKRGIFQGDSLSPLLFCLAINPLSFVLNKYEMKGYKLKDSLWINHLLYMDDLKVYANNRHNLKVLLDSVEIFTRDIGMRFGLDKCNTIHISSGHRKNVTGEGHILLEGDVIKQLAIEERYKYLGIHESGKIEHSIIRDQIIKEYFKRIKKLINTHLNSRNLIKGINTYAIPVLLYSFGVINYKNSDLKKIDTKTRKLLAIKKAHQQKAEVERLYLPITQGGRGLLNVEYMYKTQILKYKQYLKAEGDELIKAIVTHDIHRDKYSIIKEAQEIENQLHLTRENIHTDKDIREAIVERCKDIWRNKQLHGQFIKKVLDQTNIDTELSFKWIKKQQISPTIESSIFAIQDQCIMTRQHRRDILKEPVDGKCRLCACKDETTQHIISGCEKLAGNYYVKRHNNLVQYVYWCLAKKHKIEVSNLWWKETLIQPQVKENETAKILWEMPVQTDVTITHNRPDLIYIDKINNRTYLIDVTVPSDYNIGPKEIEKLSKYHLLKNEISRLWKTQTTIIPIVIGATGIVGKNIKKYIEKLDTFIDITILQKQAAINSSTILSKVLGDTVFVNNTQNTQNTEQPTHTGQTSNTNNTSEQLLTSTTEFNSQQTQERRIAAPTRERGGRQRRNVRRRGRSLK

SEQ ID NO: 31858 - protein, 1238 aa, Ebrietas anacreon
MEKSSKRYRKGPLPGGDRRGTSGAGAGRDSMQTVSDSLLNRRARVGGPENITADHRGGEGTDDALQSRASPTDSVGSSVTTTSNTISDDRRRKWSTEELQELMFCYFKARSEGAGYIDRLHKIFAERNPNNPKIHKFNGNTLSNQARRIVKQNVISQELLDRIQKHAEGQIDMEESSEQHIIEEEETTAHSNINTTHNTHHIEYTTEQIELLDQLAQNVEVSEDQDPLILNFLQILSETNETTIEERQFLPKAKINASFVTNLCTLNKFLPSLLATNNSLREINNIIYAAAKTLIVNNNQLPYTPKNSFRTKSDPPWKRRIQTKIEKFRKELGQLIEIGRGVNTRRMIKIKDKLYRQHNIQNENEHKNIEEVLKQKIKALAARIKRYEDINNRKEQNSLFSENEHKLYRSLGGNTFKDIKLPNKEVVEDFWSSILSNPINYNSEAKWIREVEASTSEVSTVNVEEITEEHIKHATQKLLNWKTPGIDKIHNYYLKYFTSVHSYLGSTFNRIVLRKENLEEWFTTGQVILIPKNEQTEDPRNWRPIACLPTMYKLLSSVLSNILYNHCHQNNILAIEQRGCRRGVRGCKDHLMVNKAILEDAHQCQKNVSMAWIDYQKAFDSVPHEWLAKVLDIYKCPPIIKRFLELVMPSWRVIMTARGTQDSLTTDPMNVRRGIFQGDSLSPLLFCLAINPLSFVLNKYEMKGYKLKDSLWINHLLYMDDLKLYANNRHNLKVLIDSVEIFTRDIGMRFGLDKCNTIHISSGHRNNVTGEGHILLGGEIIKHLEIGDRYKYLGIHESGKIEHSVIRDQITKEYFKRIKKLLNTHLNCRNLVKGINTYAIPVLLYSFGIINYKNSDLKKIDTKTRKLLAIKKVHQQKAEVERLYLPVTQGGRGLLNIEYMYNTQILKYKQYLKAECDELIKAIVEHDIHRDKYSIIKEAQAVETQLNLATGNIHTDKDIREAIVKRRKDVWRNKNLHGQFPKKVLDQSNIDTQLSFKWIKKQKISPALESSIFAIQDQCVMTQQHRRDILKEPVDGKCRLCACKDETTQHIISGCEKLAGNYYVKRHNNLVQYVYWCLAKKHKIEVSNLWWKETLTQPHVKENDTAKILWEMPVHTDVTITHNRPDLIYIDKVNNKTYLIDVTVPSDYNIGPKEIEKLSKYHLLKNEISRLWKTQTTIIPIVVGATGIVGKNIQKYIEKLGTLIDITILQKQAAIHSSTIVSKVLGDTVFLNNTRNEE

SEQ ID NO: 31859 - protein, 1298 aa, Xestia c-nigrum
MERQRNSTRIGPLPGGERRGTSGAGAGRDSIRAVSDSLLSRRARVGGPEGTTAEQRGGVDTDDALRSRATTPIDDSAGSSRETIQELNEDRRKKWSTEELKELMYCFFKAQSQGPGYINRLFTLFQDRNPTNPKIHKFNGNTLSNQARRIIKQNVFSQELLNRLKDEAEGRVADNTVITSNMTESHSPTDTSNTQHDLHTNTQHDTHTNTQPSLEQTELIDQLTRNVTVTEDQDPLILSLLQVLAETKETPINDRFLLPKAKINRHFLQNLHTLNSYLPNLLITTDTLRELNNIIYATAKTLILNNKQIPFAPKNVIKPKSDPPWKKRIQNKIEKYRKELGQLVEIGRGVSTRRMNNIKTKLYNKYNIQSENERNNTEEILKQKIKALAGRIKRYEEISNRKEQNRLFKENEHRLYRSLGTNSKSNDIKLPSKECVEAFWKSILSEPIQYNKDARWINELEISSDRIGTVESQEITEEQVKIAIRKLHNWKTPGIDKIQNYYLKYLTSTHKYFATVFTNIIGGREQLEEWFTTGQVILIPKNENTEDPKNWRPIACLPSSYKLLTSILANQLHNHCQQNNIMAIEQRGCRRGARGCKDHLMVNKAILEDAHQSQKNLSMAWIDYQKAFDSVSHEWLLRILDIYKCPPMIKTFLEITMPTWKVIMTARGTNESLSTEPIYIKRGIFQGDSLSPLLFCLAINPISSILNKYELKGYKLKDSFWVNHLLYMDDLKIYANNKNNLKVLLDSVEIFTNDIGMTFGLNKCNTIHIRSGHRNNTIGEGHILLSGDTFEQLGIGRTYKYLGIHESGKIEHSQIREQVTKEYFKRTKKLLNTHLNARNIIKGINTYAIPVLLYSFGIINYKNSDLKAIDIKTRKLLAIKKAHQQKADVERLYLPVIEGGRGLINVENMYKTQILKYKHYLYGENDDLIKVIVQHDKNRDKYSIIKEAQEIERELQLLTNNIYTDKEIKRAIVKKQNDRWRNKQLHGQFPKAVLDQANIDKEKSFKWIKKQQISPSIESAIFAIQDQAVMTRQHQRDILKVDIDGKCRLCATKDETTQHIISGCEKLAGTYYVKRHNNLVQYVHWCLAKKHNIDVSSLWWKESLTQPQVKENEQAKIMWEIPIQTDVTVTHNRPDLIYVDKTNNNTFLIDIAVPSDYNIGAKEIEKLSKYHLLKTEIRRLWNTQTTVIPIVIGATGIISKSLHRYIDQLNITIDITILQKQAAIHTTTILSKVLGDTVFVNRSASTQETTPDTQQTSHTVDSQQSSVTQLSSTTHTPNTQSQPSTTQSIPNTRRRRRI

SEQ ID NO: 31860 - protein, 1337 aa, Gindanes brontinus
MMKRKLRNLRQGPLPGERRGTLGAGAERDSIRAASGSSLIRRAGVGDPENTTADRYSDTDDALQSRESPASSAGALVPTTTSSTHLDDARRKWSQEELYELIYCYFRSKAEGPGYIKRLEQLFKTRNSHNPKINKFTGNTLSNQARSILKRKFISEEVIQEIQQKVKETTHTTNVNSTMVTQNIHDYPLNESNTTLGIAEKEQTIAQSHVTIIPNTHHIEYTTEQIQTIDQLTQNIEVNEDQDPLILNFLQILSEIKETKIEDRPLIPKAKINKKFIGNLNKLNKYIPNVLVTHNSLREINNIIYAVAKTLITNNNQSTYLARQNLKNKTTPPWKRRIQTKIEIFRKELGQLIEIGKGINTRKMIKLKDKLYRKHNIQNENDHKNVQEILMQKIKALAGRIKRYDDINSRKEQNNLFNENEHKFYRSLGGNRIKDVKLPSKETVEEFWSSILSSPIQYKDEANWIKEVEESASEINTIDIEEITEEQIKVAVKKLLNWKMPGIDKIQNYYLKYLTSVHRYLATLFTNIVTHNETLEEWFTTGQVILIPKNENTEDPKNWRPIACLPTMYKLLTSVLANTLYNHCHQNNIIAIEQRGCRRACRGCKDHLMVNKAILEDAHQSQKNLSMAWIDYQKAFDSVSHEWLRRVLDVYKCPIIIKSFLELVMPSWKVIMTARGTRDSITTESINVRRGIFQGDSLSPLLFCLAINPLSLILNKYEMKGYKLKDSIWINHLLYMDDLKIYANNKHNLKVLIDSVEIFTKDIGMTFGLDKCSIIHLSSGHRSSVTGEGHILLDGEMIKELAIEEKYKYLGVHESGKIEHSIVRDQVTKEYFKRIKKLLNTHLNSRNLIKGINTYAIPVLMYSFGVINYKNSDLKKIDTKTRKLLTLNKVHQQKAEVERLYLPILQGGRGLLNIENMYNKQLIKYKQYLNSGSDDLVRAVVEHDRHRDKYSIIYEAQKIENQLQLVQGKIHTDKEINDAIVKGCKETWRNKKLHGQFLKKVLDQTNIDTELSFKWIKKQKISRTIESSLFAIQDQAIMTRQHRRDILKEPVEGKCRLCSGKDETTQHIISGCEKLAGNYYVKRHNNLVQYVYWCLAKKHKIEVSNLWWKETLTQPLVKESNTAKIMWEMPIQTDVTITHNRPDLIYVDKINNKTYLIDVTVPSDYNLGPKEIEKLSKYHLLKNEITRLWKTQTSVIPIVIGATGVVAKSIKKYIDQLDTYIDISILQKQASIHSSTILSKVLGDTVFVNNTQDQDTHNTEPPSHTIRTPSQQPTSHTLRVTSSHGHTTDIQQTIITQQILTSPQNLINTAHTVGQQQENTQQSNRGRRRRRSGRIRK

SEQ ID NO: 31861 - protein, 955 aa, Apodemia mormo
MYAAARTLICCNDQVPYLLKNSTKIKSDPPWKKRIQSKIQILRKELGQLTEINKGIITRRMTKIKDKLYSKYKIQTENDHKNIEEILKQKIKALAGRIKRYEGMNARKKQNNLYKENESKFYRSLENNTYKEIKIPTQEKVEEFWSSILSNPSQYNREAKWIQEIENSVNDVAVSDVEEISEEQIKFAIKKLINWKMPGIDKIHNYYLKYFTTCHKYLALVYTKIITHKESLEDWFTTGQVILIPKNENTEDPKNWRPIACLPTMYKLLTSVLANILYKHCQENNILAVEQRGCRQGARGCKDHLMMNKVILEDAHQSQKNLSMAWIDYQKAFDSVSHEWLVKVLDVYKCPSMVKKFLEIAMPSWRVIMTARGTQNSLTTNPIFIRRGIFQGDSLSPLLFCLAINPLSFLLNKYETKGYRLKNNFWINHLLYMDDLKIYSNNKYNMKVLLDSVEIFTSDIGMKFGLDKCSVIDINSGQRDRANGKGHILLDGKIIEQLGVGERYKYLGIHESGKIEHNVIRDQITKEYFKRIKKLLNSHLSSRYIIKSINTYAIPILLYSFGVINYKNSDLKKIDIKTRKLLAIKKVHQYKAEVERLYLPVSQGGRGLLSVEYIYKAQIIKYKQYLNTKSDNLIKTIAEHDTGRDKYSIINDSKEIENQLNLIQGKIHTDGEIKEAIINKCNITWRNKQLHGQFPKKVLDASNIDTELSFNWIKTQHISPSIESTLFAIQDQAFTTRQHRRDILKEQVDGKCRLCQYKDETIQHIISGCEKLVGNYYVKRHNNLVQYIYWCLARKHKMEVSKLWWEEALIEPQVKENQTTKILWEIPVHTDVSVMHNRPDLIYIDKLNNKTYLIDVTVPSDYNIGPKEIEKLSKYHLLKTEVNRLWNTQTAIIPIVIGATGVVAKSIKRYINQLDTNIDISILQKQAVIHSSTIVRKVLGDNVFFNNTQNHENQD

SEQ ID NO: 31862 - protein, 1253 aa, Apodemia duryi
MTNGALVTFLKMKRQFRNSRLGPLPEGDRRGTSGAGAGRDRMQAASGSSLNRRAGVGTPECTTADQRGEEGIDDALQSRASPTDFAGSSLTTTNNELNDDRRRKWSTEEINELMFCYFRAKSGGLGYLSRLQKLFTERNPNNPKIHKFDGNTLANQARRVIKQNIISQELLNRIQINAECTSHTIENFEETESQVSSINVIQPQIDISQNTQSKEPIAEPIGTVEQPVCNIVINEDLDPLILSFLQTLAETKETPIAERLFLPKAKINRSFLENLHKLNQFLPNILITHNSLLDINNIMYAAARTLICCNDQVPYLLKNSTKIKSDPPWKRRIQSKIQILRKELGQLTEINKRIITRRMTKIKDKLYRKYKIQTENDHKNIEEMLKQKIKALAGRIKRYEGMNARKKQNNLYKENESKFYRSLENNTYKEIKIPTQEKVEEFWSSILSNPSQYNREAKWIQEIENSVNDVAVPDVEEISEEQIKFATKKLINWKMPGIDKIHNYYLKYFTTCHKYLALVYTKIITHKESLEDWFTTGQVILIPKNENTEDPKNWRPIACLPTMYKLLTSVLANILYKHCQENNILAVEQRGCRQGARGCKDHLMMNKVILEDAHQSQKNLSMAWIDYQKAFDSVSHEWLVKVLDVYKCPSMVKKFLEIAMPSWRVIMTARGTQNSLTTNPIFIRRGIFQGDSLSPLLFCLAINPLSFLLNKYETKGYRLKNNFWINHLLYMDDLKIYSNNKYNMKVLLDSVEIFTSDIGMKFGLDKCSVIDINSGQRDRANGKGHILLDGKIIEQLGVGERYKYLGIHESGKIEHNVIRDQITKEYFKRIKKLLNSHLSSRYIIKSINTYAIPILLYSFGVINYKNSDLKKIDIKTRKLLAIKKVHQYKAEVERLYLPVSQGGRGLLSVEYIHKAQIIKYKQYLNTKSDNLIKTIAEHDTGRDKYSIINDSKEIENQLNLIQGKIHTDGEIKEAIINKCNITWRNKQLHGQFPKKVLDASNIDTELSFNWIKTQHISPSIESTLFAIQDQAFTTRQHRRDILKEQVDGKCRLCQYKDETIQHIISGCEKLVGNYYVKRHNNLVQYIYWCLARKHKMEVSKLWWEEALIEPQVKENQTTKILWEIPVHTDVSVMHNRPDLIYIDKLNNKTYLIDVTVPSDYNIGPKEIEKLSKYHLLKTEVNRLWNTQTAIIPIVIGATGIVAKSIKRYINQLDTNIDISILQKQAVIHSSTIVRKVLGDNVFFNNTQNHENQD

SEQ ID NO: 31863 - protein, 1300 aa, Apostictopterus fuliginosus
MMMERSKNRKRIGPLPGGDRRGTSGAGAGRPSMQTVSDSLLNRRAGVGEPENNTADQRGGEGVDEVLQDRASPINSVGSSASTTNKISDDKRRKWSTEELLELMYCYFKARSEGLGYIGRLYQLFTERNPNNPKIHKFNGNTLSNQARRIIKQNVISQELLDRVQKQAEGLIPMDSSDSISNEDPIVTLFHTSNTHNGHHNQYSSEQVEEINQMTHNIEVNEEQEPLILEFLQVLAETKETPIEQRLLLPKAKINKQFIENLNTLNKYLPNLLITNSSLREVNNIIYATAKTLILINKQTPYTLKNTLKPKIVPPWKRRIQNKIEKLRKELGQLIEIQRGITTRKMMKIKEKIYAKYNIQNENDHNNTAETIKQKVKALAGRIKRYVDMNTKKEQNKLFNFNEHRLYSSLGENNINKDIKVPSKEGVEVFWKSILSNPIEYNKEAKWVKEIENSLNEVKTAAIQEITEDQVNIATKKLLNWKSPGVDKIQNYYLKYLTSVHKYLASLFTNIVSGAEMFEEWFTTGQVILIPKNDNTDDPKNWRPIACLPTMYKLLTSVLANIMYTHCQDNNILAVEQRGCRRSSRGCKDHLMTNKAILEDAHQSQKNLSMAWIDYQKAFDSVSHEWLLKLLDVYKFPPLIKQFLQLSMPFWKVIMTARGYQESITTEPIYVRRGIFQGDSLSPLLFCLAINPLSFILNKYEMKGYKLKDSFWINHLLYMDDLKLYANNKSNLKVLLDSVEVFTSDIGMKFGLDKCNIIHISSGHRNNITGEGHILLSGETVKQLAVGEKYKYLGIQESGKIDHNIIRDQIIKEYFKRVKKLLNTHLNSRYLIKGINTYAIPILLYSFGVINYKNSDLKKIDVKTRKILAMKKAHQQKAEVERLYLPVSEGGRGLINVENMYKSQIVKYKQYLNTKCDHLIKAIVQHDTNRDKYSIMKEAAEIEIELCLKQRGIHTKKEIKEAIVKLQKETWRNKHLHGQFPKKVLDQANIDRELSFRWIKKQQLAPSTESSIFAIQDQSIMTRQHQRDILKEPVDGKCRLCATRDETTQHIISGCEKLAGTYYVKRHNNLVQYVYWCLAKKHKIDVSDLWWKETLIHPQVKENESAKILWEMPVHTDVTVKHNRPDLIYIDKNRNKTFLIDITVPSDYNIGAKEIEKLSKYHLLKTEVSRLWDTKATVIPIVIGATGIVAHSIKKYLEKLDTFIDISILQKQAGIHASIIVSKVLGDTIFVHNTQPQLTQNPQIHHNITESSNTAYAHNTEQTLITTASHTQNTSQTHQRRGRGRVRGRRGRRVTRAQDT

SEQ ID NO: 31864 - protein, 974 aa, Melitaea cinxia
MRSSLITSAYRSPLLDIIIIIIIIIIIIIIIIIIIIIRSENDHKNTAEIIKQRIKALAGRIKRYEEMNTKKEQNKLFAENEHKLYRSLGSNTAKDIKIPSKENVEEFWKSILSNPQPYNAEANWIKEIETMSNEVNTVDSVEVTEDQVKFALRRIHNWKSPGLDQIQNYYIKYLTNVHKYLASLFTNIVSGTEPIEEWFTTGKVILVPKNENTEDPKNWRPIACLPSMYKLLTSVLANFLYNHCHKNNIISEEQRGCRRGVRGCKDHLMVNKAILEDAHQSQKNLSMAWIDYRKAFDSVSHEWLLKLLDVYRCPPVIKRFLILAMPSWRVIMTARGSHESITTEPIYIRRGIFQGDSLSPLLFCLALNPLSFVLNKYEMKGYKLKDSIWINHLLYMDDLKIYANNRTNLKVLLDSVEIFTSDIGMKFGLEKCNVLHLNAGHRNIALGGGHILLSGETFKQLAIDDRYKYLGVHESGKIEHSVIREQISKEYLKRVKKLLNTHLNSRNLIKGINTYAVPVLLYSFGVINYKNSDLKKIDVKTRKLLAIKKAHQQKAEVERLYLPINQGGRGLLNVEYMYKTQIVKYKQYLKAESDHLIKAIVQHDTSRDRYSIIKEAQEIERELHLPQGNALTDEEIRKSTVNRHNEIWRNKQLHGQFPKKVLDQGNIDKELSFKWIKKQQISPSIESSIFAIQDQAIMTRQHQRDILKEPVDGKCRLCASKDETTQHIISGCEKLAGTYYVKRHNNLVQYIYWCLARQHKMEVSHLWWKETLTQPQVKENNSAKIMWEIPVQTDVTITHNRPDLIYTNKDNNKTYLIDVTVPSDYNIGAKEIEKLSKYHLLKTEISRLWNTQTVVIPIVIGATGVVAKSIKKYLEQLDSNIDVSILQKQAAIHTTIILSKVLGDTVFVHNIQDPLSQNTQLSVDRDTQQSPDTQQLADTPHSLNTTHEPSTNNLQRRGRGRGRRRNGAQRACIE

SEQ ID NO: 31865 - protein, 1290 aa, Timochares trifasciata
MTTLSTSEDARRKWSPEETEELIFCYYRARAMGPGYIKRLHTLFRSRNPNNPKKDKFTGNNLSTHARNVIARKVIPIETLESIKSRAESITTTPNTQTTVHNTPDNDNDSNNITPDITYIQHRVSPAEITVVPRSRANEPVVCDDRRRKWSDDEMTELMLCYYKARSSGPGYIIRLEKMFLERNPHHPKINKINGYYLSTQARTIIKNNMLSQEVLNRIKNLAKGIEESVTTSTNTEEHITLQLTENESQYYSVEQAETINRATHNILESENQDPIILQFLNILSESKEIPINERHNLPKAKINKEFIENCNKLNQYLPNLLEISNTLRDINEILYAAAKTLIVANNQSPYIPQNKIKPKKTPPWKKRIQGKINKFRKELGQFIEIEKGVNSRRMIQIKDRLYRRYKIQNVDELKNTIEILKQKIKALAARIKRYEEINDKKEHNKLFSENQHRFYRSLGNTSNREIEIPDKYNVEQFWTSIYSNPIQYNREARWIEEIEDSVNGVVTPTVEEITIDQVKFAIRKLHNWKTPGIDKLQNYYLKYFTSAHKYLANLYTKIIKGRENLEEWFTTGQVILIPKNDNTEHPKNWRPIACLPSMYKVLTSVLANVLYTHCSNNNILAVEQRGCRRGARGCKDHLMVNKAILEDAHQSQKNLSMAWIDYQKAFDSVSHEWLLKILDVYQCPPMIKNFLLMTMPTWKVIMTARGTRDSITTEPISIRRGIFQGDSLSPLLFCLAINPLSHILNKYENKGYKLKDSFWINHLLYMDDLKVYANNKSNLKVLLDSVEVFTNDIGMNFGLDKCNIIHINSGHINNTIGNGHVLLSGETFNQLTVGQTYKYLGVNESGRIDHNVIREQITKEYFKRIKKLLNTYLNSRNIIKSINTYAIPVLLYSFGVINYKNNDLKKIDTKTRKLLAIKKIHQQKADVERLYLPVLQGGRGLLNVEYMYKTQILKYKQYLKAEQDHLIKTIVQHDTGKDKYSIINEAKEIETEIHLKINCTHTNKDIKEAIYKIQHTRWRNKSLHGQFPKKVLDQANVDTESSFRWFKKQQISPTIEASIFAAQDQAVMTRQHQRDIVGQPIDGKCRLCACKDETTQHILAGCEKLAGTYYVKRHNNLVQYIYWCLARKHNIEVDRLWWKETLIQPKVVENETAKIMWEIPIQTDITVTHNRPDLIYVDKTTNNTYLIDITVPSDYNIGAKEVEKLSKYHLLKIEIKRLWNTNTHIIPIVIGATGVVAKSLDRYIGKLNYNIDITILQKQAAIHSITILSKVLGDTVFVNTTGESASSFP

SEQ ID NO: 31866 - protein, 1309 aa, Cycloglypha thrasibulus
MLSISEDARRRWSIEEMNELIYCYFRARATGAGYMKRLETLFRDRNPNNPKIDRFTGNNLATQARNIIARKVLPTETIESIKIKAEHVTTTPNTNTINDRPNSVRSFNNTNNRQETEHTSTNTTHTLNSLQHNTHADNADRVSPTVVTADLVSEGDENLGTDDRRRKWSDVEMRELMFCYYKARLGGPGYINRLQKIFVERNPHNPKIHRFNGYSLSTQARTIIKNNMLSQELLNRIKNLAEGIQEPVTTSTTTTDHTASQIAGHEVPQQYSAEQAETIDQATQNIFVSDNADPVILQFLNILSETKEISIADRQHLPKAKINKQFIENCNKLNKYLPNLLQIHNTLRDINDILYAAAKTLIIVNKQSPFIPQNTIKPKGTPNWKKRIQGKVNKFRKELGQFIEIERGVDSRKMIKIKDKLYRKYKIHSVNELKNTIETLKQKIKALAARIKRYEEVNGRRDQNKMFVENQHRFYRNLGNASDRKIPLPNKDDTEQFWTSIYSNPIQYNREAKWIEEEETLSSDIDVDILEEITTDQVKFAIRKLHNWKTPGIDKLQNYYLKYFTSAHKYLAILFSKIVKGNEDLEEWFTTGQVILIPKNENTEQPKNWRPIACLPSMYKVLTSVLANVLYIHCNNNNILAVEQRGCRRGARGCKDHLMVNKAILEDAHQSQKNLSMAWIDYQKAFDSVSHEWLLKILDVYRCPPMIKNFLLMTMPSWKVVMTARGTHESITTEPISIRRGIFQGDSLSPLLFCLAINPLSHILNKYERKGYKLRDSYYINHLLYMDDLKVYANSKNNLKVLIDSVEVFTKDIGMNFGLDKCNIIHITSGCINNTVGTGHVLLSGETFDQLGVGKTYKYLGVNESGRIDHNTIREKITKEYFKRIKKLLNTYLSSRNIIKGINTYAIPVLLYSFGIINYKNSDLKKIDTKTRKLLAIKKAHQQKAEVERLYLPVLQGGRGLLNVEFMYKTQILKYKTYLKAGQDHLIETIVQHDTGKDKYSITSEAIEIETEIHLKINSTHTDKDIKEAIHKTQSTRWRNKPLHGQFPKKVLDQANVDTESSFRWFKKQQISPTIEASIFAAQDQAVMTRQHQRDIVGQPIDGKCRLCACKDETTQHILAGCEKLAGTYYVKRHNNLVQYIYWCLARKHNIEVDRLWWKEILTQPKTVENETAKIMWEIPIQTDITVTHNRPDLVYVDKTTNNTYLIDITVPSDYNIGAKEVEKLSKYHLLKTELKRLWNTHTHVIPIVIGATGVVAKSLNRYIERLNCNIDTTVLQKQAAIHSITILSKVLGDTVFVNGAGQSVSSLP

SEQ ID NO: 31867 - protein, 1392 aa, Camptopleura auxo
MERNYRSKRLGPLPGGDRRDTSAAGSGRVAGLASDSLLNRRAGVGDPEGGRDASNTTAEHNAGDILRSRDHSPTCSAGASGSTTLSISEDARRKWSIEEVEELIYCYFNARIMGAGYMKRLETLFRNRNPNNPKIGKFTGNNLATQARNIIARKVIPAETIESIKVRAENTTTAPNTQTISDRSHSVRSSNNTNNSQETEHTSTIATYTQHNSQHNIHADRVGRVTPNEVTADPVSESDENLGTDDRRRKWSDAEMKELMFCYYKARLGGPGYINRLQKIFIDRNPHNPKINRFNGYSLSTQARTIIKNNMLSQELLNRIKNLTEGIQEPVTASTNTVDYTTSQIAEQEVQYYSAEQAETINQAAQNISDSENEDPLILQFLNILSEIKEMPIADRHHLPKAKINKQFIENCNKLNKYLPNLLEIHNTLRDINDILYAAAKTLIIVNKQSPFIPQTTIKQKRTPPWKKRIQGKINKFRKELGQFLEIEKGVNSRRMIKIKDKLYRKYRIHSNDDLKNTIETLKQKIKALAARIKRYEEINGRRDQNKLFGENQHRFYRSLGNTNDRDIQIPNKDETEQFWTSIYSNPIQYNREAKWIEEEEEILSDDIVIDTLEEITTDQVKFAIRKLHNWKTPGIDKLQNYYLKYFTNAHKYLATLFSKIVKGKENLEEWFTTGQVILIPKNENTEQPKNWRPIACLPSMYKVMTSVLANVLYIHCSNNNILAVEQRGCRRGARGCKDHLMVNKAILEDAHQSQKNLSMAWIDYQKAFDSVSHEWLLKILDVYRCPPIIKKFLLMTMPSWKVVMTARGTRESITTEPISIRRGIFQGDSLSPLLFCLAINPLSHILNKYERKGYKLKDSFCINHLLYMDDLKVYANNKNNLKILIDSVEVFTKDIGMNFGLDKCNIIHINSGHINSTIGTGHVLLSGETFDQLGVGKTYKYLGVNESGRIDHNAIREQITKEYFKRIKKLLNTHLSSRNIITGINTYAIPVLLYSFGIINYKNSDLKKIDTKTRKLLAIKKAHQQKAEVERLYLPVLQGGRGLLNVEFMYKTQILKYKQYLKAEQDHLIKTIVQHDTSKDKYSIINEAIEIETEIQLKLNSTHTDKDIKEAIHKMQCTRWRNKPLHGQFPKKVLDQANVDCKGSFRWIKKQQISPTIEASVFAAQDQAVMTRQHQRDIVGQLIDGKCRLCECKDETTQHILAGCEKLAGTYYVKRHNNLVQYIYWCLARKHNIEVDRLWWKEMLTRPKTVENETAKIMWEIPIQTDITVTHNRPDLVYVDKTTNNTYLIDITVPSDYNIGAKEVEKLSKYHLLKTELKRLWKTHTHVIPIVIGATGVVAKSLNRYIERLNCTIDTTILQKQAAIHSITILSKVLGDTVFVNRAGESVSSFP

SEQ ID NO: 31868 - protein, 908 aa, Melitaea cinxia
MNTKKEQNKLFAENEHKLYRSLGSNTAKDIKIPSKENVEEFWKSILSNPQPYNAEANWIKEIETMSNEVNRVDSVEITEDQVRFALRRMHNWKSPGLDQIQNYYIKYLTNVHKYLASLFTNIVSGTEPVEEWFTTGKVILVPKNEITEDPKNWRPIACLPSMYKLLTSVLANVLYNHCHKNNIISEEQRGCRRGVRGCKDHLMVNKAILEDAHQSQKNLSMAWIDYRKAFDSVSHEWLLKLLDVYRCPPVIKRFLILAMPSWRVIMTARGSHESITTEPIYIRRGIFQGDSLSPLLFCLALNPLSFVLNKYEMKGYKLKDSIWINHLLYMDDLKIYANNRTNLKVLLDSVEIFTSDIGMKFGLEKCNVLHLNAGHRNIALGGGHILLSGETFKQLAIDDRYKYLGVHESGKIEHSVIREQISKEYLKRVKKLLNTHLNSRNLIKGINTYAVPVLLYSFGVINYKNSDLKKIDVKTRKLLAIKKAHQQKAEVERLYLPINQGGRGLLNVEYMYKTQIVKYKQYLKAESDHLIKAIVQHDTSRDRYSILKEAQEIEREIHLPQGNALTDEEIRKSTVNRHNEIWRNKQLHGQFPKKVLDQGNIDKELSFKWIKKQQISPSIESSIFAIQDQAIMTRQHQRDILKEPVDGMCRLCASKDETTQHIISGCEKLAGTYYVKRHNNLVQYIYWCLARHHKMEVSHLWWKETLIQPQVKENNSAKIMWEIPVQTDVTITHNRPDLIYTNKDNNKTYLIDVTVPSDYNIGAKEIEKLSKYHLLKTEISRLWNTQTVVIPIVIGATGVVAKSIKKYLEQLDSNIDVSILQKQAAIHTTIILSKVLGDTVFVHNIQDPLSQNTQLSVDRDTQQSPDTQQLADTPHSLNTTQEPSTNNLQRRGRGRGRRRNGAQRARIE

SEQ ID NO: 31869 - protein, 1374 aa, Erynnis brizo
MESNSSRYRKGPLPGGDRRGTSVAGGGRDSMLASDPRRTGWSGVGDRTGGTSPDATAEEFHGDTLRRRGVYPTSSAGASESTTLSTSDDARRKWSPEENDELLFCFYRARALGSGYIKRLETLFKTRNPNNPKVDKFTGDKLATQARNIIARKIISTEKLESIKIRAQNITSTSVSVSNNINSNQESEHTSTFTQNNSHHNTHTNNIERVSPGLPPLLTEIEENTISDDRRRKWTEAEMEELMFCYYRSRMAGPGYIKRLQRIYIERNPHNPKINRFNGYSLSTQARTIIKNNMLSQELLNRIKNLAEEVQEPVVVDNNTEDHITLNEAEHESQQFSREQAEVINQAAQNILDSANEDPLILQFLNILAETKEIPIAERHLLPKAKINKQFIENCQKLNKYLPNLLEIHNTLKDINEIMYAAAKTLIINNNQTPYIPNNTIKPKRNPPWKKRIQGKINKFRKELGQLIEIEKGVNSHRMIKIKDRLYRKHKIQNIDELKNTIEILKQKVKALAARIKRYEEMNARKEHNSLFGENQHKFYKSLGNKSDRNIKIPSKDNIEKFWTSLYSNPIQYKREAEWIEEEEILFNEVETHTVDEITIDQVKFAIRKLHNWKTPGVDKLQNYYIKYFTSAHKYLATMFTKIVKGAESLEEWFTTGQVFLIPKNENTEEPKNWRPIACLPRMYKVLTSVLANILYTHCTNNNILAVEQRGCRRGARGCKDHLMVNKAILEDAHQSQKNLSMAWIDYQKAFDSVSHEWLIKILDVYQCPPMIREFLRMTMPSWKVVMTARGTCESITTEPIPIRRGIFQGDSLSPLLFCLAINPLSHILNKYELKGYKLKDSYWINHLLYMDDLKVYANNKNNLKVLLDSVDIFTQDIGMNFGLDKCNTIHINSGHINNTIGTGHVLLSGETFNQLAVGKTYKYLGVHESGKIDHNAIREQITKEYFKRIKKLLNTHLNSRNIIKGINTYAIPVLLYSFGIINYKNSDLKKIDTKTRKLLAMNKVHQQKAEVERLYLPIIQGGRGLLNVEFMYKTQILKYKQYLKAEQDHLIKTIVQHDINRDKYSIINEAIEIEAEIQLEINKTHTDKEIKEAINKKQSTQWRNKPLHGQFPKNVLDQANVDTENSFRWFKKQKISPAIEASIFAIQDQAVMTRQHQRDILGLPMDGKCRLCAAKDETAQHILAGCEKLAGTYYVKRHNNLVQYIYWCLARKHNMEVDKLWWKETLTQPKTIENETAKIMWEIPIQTDITVTHNRPDLVYVEKTTNNTYLIDVTVPSDYNIGAKEVEKLSKYHLLKTELRRLWNTHTHVTPIVIGATGVVAKSLKRYLEKLNCAIDTTILQKQAAIHSSIILSKVLGDTVFVNRDGVAASSLP

SEQ ID NO: 31870 - protein, 1307 aa, Melitaea cinxia
MESFINDERIEPLPGGERRGTFGADAGRDSMQTVSGSLLSRRARAGGPEDTTADQRGGEGTDDVLQSRASPTNSVGSSASTTNKAVSDDRRRKWSTEELEELMFCYFKARSGGVGYINRLEELFAARNPENPKILKFYGNTLANQARRVIKQNVISQERLNRIQKRAEGISTTENIDHFSTPSHIEHTHIQSEESGITQIQTQHDPPSNNTQPTSTERAEEIDQLTRNIVVDENQEPIVLQFLQTLAEIKDIPIEERLFLPKAKINKSFIENLNTLNKYLPNLLVTNNSLREINNILYATAKTLIVNNNQNPYAPTIAIKPKRDPPWKKRIQIRIEKLRKELGQLIEIERGINTNRMRKIRDKLYTKHNIRSENDHKNTAEIIKQRIKALAGRIKRYEEMNTKKEQNKLFAKNEHKLYRSLGSNTAKDIKIPSKENVEEFWKSILSNPQPYNAKANWIKEIETMSNEVNTVDSVEITEDQVKFALRRMHNWKSPGLDQIQNYYIKYLTNVHKYLASLFTNIVSGTEPVEEWFTTGKVILVPKNENTEDPKNWRPIACLPSMYKLLTSVLANVLYNHCHKNNIISEEQRGCRRGVRGCKDHLMVNKAILEDAHQSQKNLSMAWIDYRKAFDSVSHEWLLKLLDVYRCPPVIKRFLILAMPSWRVIMTARGSHESITTEPIYIRRGIFQGDSLSPLLFCLALNPLSFVLNKYEMKGYKLKDSIWINHLLYMDDLKIYANNRTNLKVLLDSVEIFTSDIGMKFGLEKCNVLHLNSGHRNIALGGGHILLSGETFKQLAIDDRYKYLGVHESGKIEHSVIREQISKEYLKRVKKLLNTHLNSRNLIKGINTYAVPVLLYSFGVINYKNSDLKKIDVKTRKLLAIKKAQQQKAEVERLYLPINQGGRGLLNVEYMYKTQIVKYKQYLKAESDHLIKAIVQHDTSRDRYSIIKEAQEIERELHLPQGNALTDEEIRKSSVNRHNEIWRNKQLHGQFPKKVLDQGNIDKELSFKWIKKQQISPSIESSISAIQDQAIMTRQHQRDILKEPVDGKCRLCASKDETTQHIISGCEKLAGTYYVKRHNNLVQYIYWCLARHHKMEVSHLWWKETLTQPQVKENNSAKIMWEIPVQTDVTITHNRPDLIYTNKDNNKTYLIDVTVPSDYNIGAKEIEKLSKYHLLKTEISRLWNTQTVVIPIVIGATGVVAKSIKKYLEQLDSNIDVSILQKQAAIHTTIILSKVLGDTVFVHNIQDPLSQNTQLSVDRDMQQSPDTQQLADTPHSLNTTHETNTNNLQRRGRGRGRRRNGAQRARIE

SEQ ID NO: 31871 - protein, 956 aa, Craniophora ligustri
MIAIKENLYTKYNIQSENDHNNVAETVKQKIKALAGRIRRYEDMNSRKEQNRLFSENEHRLYKSLGGSHSNKDIKIPRKELVEEFWTGILSNPIQYNTEAKWIKNIESFSNDINTIDIDEITENQIKLAIRKLLNWKTPGIDKIQNYYIKYLTSVHKYLALLFTNIVTGTETLEQWFTTGQVILIPKNDNTEDPKNWRPIACLPSMYKLLTSVLANILYSHCDENDIMAVEQRGCRRGARGCKDHLMVNKAILEDAHQSQKNLSMAWIDYQKAFDSVSHEWLLKILDIYKCPPMIKRFLQLAMPSWRVIMTARGSQESITTDPIYIRRGIFQGDSLSPLLFCLAINPLSFVLNKYELKGYKLKDSFWINHLLYMDDLKIYANNKSNLKVLLDSVEIFTGDIGMKFGLDKCNIIHISSGYRSSAIGEGHILLNGEIFKELAVGDRYKYLGVQESGTIEHSIIRDQITKEYFKRIKKLSNSHLNSRNLIKGINTYAIPVLLYSFGVINYKNRDLKKTDVKTRKLLAMKKAQQQKADVERLYLPVTQGGRGLLNVEYLYKTQILKYKQYLKAGNDHLIKAIVQHDTNRDKYSIMKEALQIETELHLTQNNIHTDKEIKEAVIKNQNTTWRNKQLHGQFPKKVLDQANVDKELSFKWIKKQQISPSVESSIFAIQDQAVMTRQHQRDILKAPVDGKCRLCASKDETTQHIISGCEKLAGTYYVKRHNNLVQYVYWCIARKHKIEVSDLWWKETLTQPQVKENESAKLLWEIPVQTDITVTHNRPDLIYTDKSNNKTFLIDVTVPSDYNIGAKEIEKLSKYHLLKTEISRLWNTKTTVIPIVIGATGIVAKSITKYIDQLDSNININILQKQAAIHTSIILSKVLGDTVFVHNNEEQHIRNTQPSPSTQRTNVTLQSSNSTDLINTTHTPNTQQSHNTQNPDTRRRRGRRRPAQTNNTDTQ

SEQ ID NO: 31872 - protein, 1272 aa, Camptopleura auxo
MGAGYMKRLHTLFKTRNPNNPKKDKFTGNNLATHARNLIARKVIPIETLESIKTRAENIKTIPNIQHIVNSTQNNDNDSNNINRHQEIDHTFTTITPDATLTQHRVSPAEVTADPISGANEQVVSDDRRRKWSNEEMKELMFCYYKARLGGPGYISRLQKIFLERNPHHPRIDRINGYYLSTQARTAIKNNMLSQELLNRIQNLAEGIQESVTASTNTEDHITLEVTESESQYYSAEQAETINQAAHNILNSENEDPIILQFLNILSETKEIPITERHHLPKAKINKHFIENCNKLNKYLPNLLEIHTTLRDINEILYAAAKTLIVANKQCPYIPQNILKPKKTPPWKKRIQGKIDKLRKELGQFIEIDKGVNSRRMIKVKDRLYRKYNIQNVEALKNTIEILKQKIKALAARIKRYEEINDRKEHNKLFSENQHRFYRSLGNSGDREIEIPDKCNIEQFWTSIYSNPIQYNKDARWIEEIEDSSNDVDTATIEEITTDQVKFAIRKLHNWKTPGIDKLQNYYIKYFTSVHKYLASLFTKIVKGKENLDECFTTGQVILIPKNENTEQPKNWRPIACLPSIYKVLTSVLANVLYTHCSNNNILAVEQRGCRRGARGCKDHLMVNKAILEDAHQSQKNLSMAWIDYQKAFDSVSHEWLLKILDVYQCPPMIKNFLLKTMPTWRVIMTARGTRNSITTEPIAVRRGIFQGDSLSPLLFCLAINPLSHILNKYELKGFKLRDSIWINHLLYMDDLKVYANNKSNLKVLLDSVEVFTNDIGMNFGLDKCNVIHINSGHINNTIGTGHVLLSGETFNQLAAGKTYKYLGINESGKIDHNVIREQITKEYFKRIKKLLNTFLNSRNIIKGINTYAIPVLLYSFGIINYKNSDLKKIDTKTRKLLAIKKAHQQKAEVERLYLPVLQGGRGLVNVENMYKTQILKYKQYLKTEQDHLIKTIVQHDIGKDKYSLINEAKEIETEIHLKTNSIHTDKDIKEAIYKTQCMRWRNKPLHGQFPKKILDQANVDTESSFRWFKKQQISPTIEASIFAAQDQAVMTRQHQRDIIGQPIDGKCRLCACKDETTQHILAGCEKLAGTYYVKRHNNLVQYIYWCLARKHNIEVDRLWWKETLTQPKIVENETAKIMWEIPIQTDITVTHNRPDLVYIDKTTNNTYLIDITVPSDYNIGAKEVEKLSKYHLLKTELKRLWNTNTHVIPIVIGATGVVAKSLNRYIEKLNYPINTSILQKQAAIHSITILSKVLGDTVFVNGAGESVSSFP

SEQ ID NO: 31873 - protein, 951 aa, Melitaea cinxia
MRKIRDKLYAKHNIRSENDHKNTAEIIKQRIKALAGRIKRYEEMNTKKEQNKLFAENEHKLYRSLGSNTAKDIKIPSKENVEEFWKSILSNPQPYNAEANWIKEIETMSNEVNTVDSVEVTEDQVKFALRRMHNWKSPGLDQIQNYYIKYLTNVHKYLASLFTNIVSGTEPVEEWFTTGKVILVPKNENTEDPKNWRPIACLPSMYKLLTSVLANVLYNHCHKNNIISEEQRGCRRGVRGCKDHLMVNKAILEDAHQSQKNLSMAWIDYRKAFDSVSHEWLLKLLDVYRCPPVIKRFLILAMPSWRVIMTARGSHESITTEPIYIRRGIFQGDSLSPLLFCLALNPLSFVLNKYEMKGYKLKDSIWINHLLYMDDLKIYANNRTNLKVLLDSVEIFTSDIGMKFGLEKCNVLHLNAGHRNIALGGGHILLSGETFKQLAIDDRYKYLGVHESGKIEHSVIREQISKEYLKRVKKLLNTHLNSRNLIKGINTYAVPVLLYSFGVINYKNSDLKKIDVKTRKLLAIKKAQQQKAEVERLYLPINQGGRGLLNVEYMYKTQIVKYKQYLKAESDHLIKAIVQHDTSRDRYSIIKEAQEIERELHLPQGNALTDEEIRKSTVNRHNEIWRNKQLHGQFPKKVLDQGNIDKELSFKWIKKQQISPSIESSIFAIQDQAIMTRQHQRDILKEPVDGKCRLCASKDETTQHIISGCEKLAGTYYVKRHNNLVQYIYWCLARHHKMEVSHLWWKETLTQPQVKENNSAKIMWEIPVQTDVTITHNRPDLIYTNKDNNKTYLIDVTVPSDYNIGAKEIEKLSKYHLLKTEISRLWNTQTVVIPIVIGATGVVAKSIKKYLEQLDSNIDVSILQKQAAIHTTIILSKVLGDTVFVHNIQDSLSQNTQLSVDRDTQQSPDTQQLADTPHSLNTTHEPSTNNLQRRGRGRGRRRNGAQRARIE

SEQ ID NO: 31874 - protein, 951 aa, Melitaea cinxia
MRKIRDKLYAKHNIRSENDHKNTAEIIKQRIKALAGRIKRYEEMNTKKDQNKLFAENEHKLYRSLGSNTAKDIKIPSKENVEEFWKSILSNPQPYNAEANWIKEIETMSNEVNTVDSVEVTEDQVKFALHRMHNWKSPGLDQIQNYYIKYLTNVHKYLASLFTNIVSGTEPVEEWFTTGKVILVPKNENTEDPKNWRPIACLPSMYKLLTSVLANVLYNHCHKNNIISEEQRGCRRGVRGCKDHLMVNKAILEDAHQSQKNLSMAWIDYRKAFDSVSHEWLLKLLDVYRCPPVIKRFLILAMPSWRVIMTARGSHESITTEPIYIRRGIFQGDSLSPLLFCLALNPLSFVLNKYEMKGYKLKDSIWINHLLYMDDLKIYANNRTNLKVLLDSVEIFTSDIGMKFGLEKCKVLHLNAGHRNIALGGGHILLSGETFKQLAIDDRYKYLGVHESGKIEHSVIREQISKEYLKRVKKLLNTHLNSRNLIKGINTYAVPVLLYSFGVINYKNSDLKKIDVKTRKLLAIKKAQQQKAEVERLYLPINQGGRGLLNVEYMYKTQIVKYKQYLKAESDHLIKAIVQHDTSRDRYSIIKEAQEIERELHLPQGNALTDEEIRKSTVNRHNEIWRNKQLHGQFPKKVLDQGNIDKELSFKWIKKQQISPSIESSIFAIQDQAIMTRQHQRDILKEPVDGKCRLCASKDETTQHIISGCEKLAGTYYVKRHNNLVQYIYWCLARHHKMEVSHLWWKETLTQPQVKENNSAKIMWEIPVQTDVTITHNRPDLIYTNKDNNKTYLIDVTVPSDYNIGAKEIEKLSKYHLLKTEISRLWNTQTVVIPIVIGATGVVAKSIKKYLEQLDSNIDVSILQKQAAIHTTIILSKVLGDTVFVHNIQDSLSQNTQLSVDRDTQQSPDTQQLADTPHSLNTTHEPSTNNLQRRGRGRGRRRNGAQRARIE

SEQ ID NO: 31875 - protein, 1345 aa, Melitaea cinxia
MPPKILPYARVDHQTSWGAGNVYNENLYGQQGSGKPSKMESFINDERIEPLPGGERRGTFGADAGRDSMQTVSGSLLSRRARAGGPEDTTADQRGGEGTDDVLQSRASPTNSVGSSASTTNKAVSDDRRRKWSTEELEELMFCYFKARSGGAGYINRLEELFAARNPENPKILKFYGNTLANQARRVIKQNVISQELLNRIQKRAEGIVTTENIDHFSTPSHIEHTHIQSEESGITQIQTLHDPPSNNTQPTSIERAEEIDQSTRNIVVDENQEPIVLQFLQTLAEIKDIPIEERLFLPKAKINKSFIENLNTLNKYLPNLLVTNNSLREINNILYATAKTLIVNNNQNPYAPTITIKPKRDPPWKKRIQIRIEKLRKELGQLIEIERGINTNRMRKIRDKLYTKHNIRSENDHKNTAEIIKQRIKALAGRIKRYEEMNTKKEQNKLFAENEHKLYRSLGSNTAKDIKIPSKENVEEFWKSILSNPQPYNAEANWIKEIETMSNEVNTVDSVEITEDQVKFALRRMHNWKSPGLDQIQNYYIKYLTNVHKYLASLFTNIVSRTEPVEEWFTTGKVILVPKNENTEDPKNWRPIACLPSMYKLLTSVLANVLYNHCHKNNIISEEQRGCRRGVRGCKDHLMVNKAILEDAHQSQKNLSMAWIDYRKAFDSVSHEWLLKLLDVYRCPPVIKRFLILAMPSWRVIMTARGSHESITTEPIYIRRGIFQGDSLSPLLFCLALNPLSFVLNKYEMKGYKLKDSIWINHLLYMDDLKIYANNRTNLKVLLDSVEIFTSDIGMKFGLEKCNVLHLNSGHRNIALGGGYILLSGETFKQLAIDDRYKYLGVHESGKIEHSVIREQISKEYLKRVKKLLNTHLNSRNLIKGINTYAVPVLLYSFGVINYKNSDLKKIDVKTRKLLAIKKAQQQKAEVERLYLPINQGGRGLLNVEYMYKTQIVKYKQYLKAESDHLIKAIVQHDTSRDRYSIIKEAQEIERELHLPQGNALTDEEIRKSTVNRHNEIWRNKQLHGQFPKKVLDQGNIDKELSFKWIKKQQISPSIESSIFAIQDQAIMTRQHQRDILKEPVDGKCRLCASKDETTQHIISGCEKLAGTYYVKRHNNLVQYIYWCLARHHKMEVSHLWWKETLTQPQVKENNSAKIMWEIPVQTDVTITHNRPDLIYTNKDNNKTYLIDVTVPSDYNIGAKEIEKLSKYHLLKTEISRLWNTQTVVIPIVIGATGVVAKSIKKYLEQLDSNIDVSILQKQAAIHTTIILSKVLGDTVFVHNIQDPLSQNTQLSVDRDTQQSPDTQQLADTPHSLNTTHEPITNNLQRRGRGRGRRRNGAQRARIE

SEQ ID NO: 31876 - protein, 1094 aa, Apodemia mormo
MSRKIQHTDDTNREFESIEDTQHAHAQEDEDPIILNFLQTLAETKETRIENRLFLPKAKINRKFLENLHKLNQYLPNILVMYNSLRDINDIIYAAAKTLILNNNQTPYLPKKTFKIKTDPPWKKRIQSKIELLRRELGQLIEIDKGVNTRRMIKIKDRLYRKYKIQSNNDHKNAEEILKQKIKAFAGRIKRYNDINARKEQNTLFKDNEHKFYKSLECSDYREIKIPNKEKVEEFWTSILSNTIDYSSESKWIKEVEMTTKEVSTIDITEITEDQLKSAIRKLINWKTPGIDKIQNYYIKYLTSIHRHLASLFTKIIKYEETLEEWFTTGLVILIPKNEDTEEPKNWRPIACLPTIYKLFTSVLADILYNHCSENNILAIEQRGCRQGARGCKDHLMVNKAILEDAHRSQKNLSMAWIDYQKAFDSVSHEWLIKVLDVYKCPTVVKKFLQLVMPSWRVIMTARGTQTSLTTEAISIKRGIFQGDSLSPLLFCLAINPLSFILNKYSIKGYKLRDSYWINHLLYMDDLKIYASNRHNLKILLDSVEIFTGDIGMKFGLDKCNVIHINSGHRNRVVGEGHILLDGQLIKQLNIEDTYKYLGIHESGKIEHNIIRDQAIKEYFRRVRKLLNTHLNSRNLIKAINVYAIPVLLYTFGIINFKNNDLKKIDSKTRKLLTTKQAHQHKAEVNRLYLPITQGGRGLLNIEYMYKTQILKYNQYLKNESDNLIKAIIKHDIHKEKYSVINEARDIEKELNLVQGNIHTNADIKEAIFDKYNKTWRYKSLHGQFPKKILDAANIDIESSFNWIKKQNISPRVESSVFAIQDQAVTTRQHRRDILKEPIDGKCRLCARKDETTQHIITGCDNLAGSCYVKRHNNLVQYVYWCLAKKHCIKVSNFWWTENLKQPQIIENQTAKILWEIPVQTDKTVTHNRPDLIYIDKINNKTYLIDITVPSDYNIGSKEIEKLSKYHPLKAEVSRLWDTQAIIIPVVIGATGVVAKNITKYTDQLNANIDISILQKQAAIHSSIIISKVLGDNVFTENPHSQNTQNDITSLDSIRESRNNLYINQIPDSEYLIGLTDSNATAYSQNLSRQNYIQ

SEQ ID NO: 31877 - protein, 1259 aa, Apodemia duryi
MQTVSGSQLSRRARVGGPEHITAENWGRGDIDDALQSRAASQGSAGSSMMTTNNDANDDKRRKWSTDELHELMFCYFKARSGGIGYIARLQELFKERNPNNSKIHKFNGNTLATQARRVIKQNILSQELLNRIQNHAEVNKETVKSPQRNGIEEEDLVDTVPQNIMSRKIQHTDDTNREFESIEDTQHAHTQEDGDPIILNFLQTLAETKETRIENRLFLPKAKINRKFLENLHKLNQYLPNILVMYNSLRDINDIIYAAAKTLILNNNQTPYLPKKIFKIKTDPPWKKRIQSKIELLRRELGQLIEIDKGVNTRRMIKIKDRLYRKYKIQSNNDHKNAEEILKQKIKAFAGRIKRYNDINARKEQNTLFKDNEHKFYKSLECSDYREIKIPNKEKVEEFWTSILSNTIDYSSESKWIKEVEMTTKEVSTIDITEITEDQLKSAIRKLINWKTPGIDKIQNYYIKYLTSIHRHLASLFTKIIKYEETLEEWFTTGLVILIPKNEDTEEPKNWRPIACLPTIYKLLTSVLADILYNHCNENNILAIEQRGCRRGARGCKDHLMVNKAILEDAHRFQKNLSMAWIDYQKAFDSVSHEWLVKVLDVYKCPTVIKKFLQLVMPSWRVIMTARGTETSITTEPISVKRGIFQGDSLSPLLFCLAINPLSFILNKYSIKGYKLRDSFCINHLLYMDDLKIYANNRHNLKILVDSVEIFTGDIGMKFGLDKCNVIHINSGHRNRVVGEGHILLDGQLIKQLNIEDTYKYLGIHESGKIEHNIIRDQAIKEYFRRVRKLLNTHLNSRNLIKAINVYAIPVLLYTFGIINFKNNDLKKIDSKTRKLLTTKQAHQHKAEVNRLYLPITQGGRGLLNIEYMYKTQILKYNQYLKNESDNLIKAIIKHDIHKEKYSVINEARDIEKELNLVQGNIHTNTDIKEAIFDKYNKTWRYKSLHGQFPKKILDAANIDIESSFKWIKKQNISPRVESSVFAIQDQAVTTRQHRRDILKEPIDGKCRLCARKDETTQHIITGCDNLAGSCYVKRHNNLVQYVYWCLAKKHCIKVSNFWWTENLKQPQIVENQTAKILWEIPVQTDKTVTHNRPDLIYIDKINNKTYLIDITVPSDYNIGSKEIEKLSKYHPLKAEVSRLWDTQAIIIPVVIGATGVVAKNITKYTDQLNANIDISILQKQAAIHSSIIISKVLGDNVFAENPHSQNTQNDITSLDSIRESRNNLYINQTPDSEYLIGLTDSNATAYSQNLSRQNYSQ

SEQ ID NO: 31878 - protein, 1233 aa, Morvina fissimacula
MKRQRRNRTLGPLPGGDRRGTSGADAGRDSMQSVSDSLLNRRARVGGPENTTADQRGGKGTDDALQSRVSPTDSVGSSVSTTNNAVSDDRRRKWSIEELQELMFCYFKARSDGAGYIDRLHKLFAERNPNNPKVHKFNGNTLSNQARRIIKQNVLSQELLDRIQKHAEGIIDNIKNSGQNVVEEEVATHSNTTITHNTHPVEYEIEQIGTIDQLAQNVEANEDQDPLILNFLQILSETKETTIEERHFLPKAKINKCFIQNLCKLNKFLPSILVSNNTLREINNIIHAAAKTLITNNNQLPYTPKNTFKLKSDPPWKKRIKTKIEIFRKELGQLTEIGRGVNTRRMLKIKDKLYRKYNIQNEIEHKNIEETVKQKIKALAGRIKRYEDLNNKKEQNSLFNENEHKFYRSLGGNNFKEIKLPDKEVVEEFWTSILSNRIQYNNNAKWIKEVEESSSDINTIDTEEISEEHIKHATRKLMNWKTPGIDKIHNYYLKYFTSIHSYLSSLFTKIVTRQETLEEWFTTGQVILIPKHEPTEDPKNWRPIACLPTMYKLLSSVLSNILYDHCHHNNLIAIEQRGCRRGARGCKDHLMVNKAILEDAHESQKNLSMAWIDYQKAFDSVPHEWLTKVLDLYKCPPIIKRFLEFVMPSWRVIMTARGTHNSLTTEPIYIRRGIFQGDSLSPLLFCLAINPLSFILNKYEMKGYKLKDSLWINHLLYMDDLKLYANNRHNLKVLVDSVEIFTKDIGMRFGLDKCNIIHISSGHRNNVIGEGHILLEGEVIKQLEIGDKYKYLGIHESGKIEHSVIRDQIIKEYFKRVKKLLNTHLNSRNLIKGINTYAIPILLYSFGVINYKNSDLKKTDTKTRKLLAIKKAHQQKAEVERLYLPVPEGGRGLLNVEYMYKTQIVKYKQYLKAESDELIKAIVEHDIHRTKYSIINEAQEIENELHLTRGNIHTDKDIREAIVKRRMNTWRNKLLHGQFIKKVLDQTNIDTELSFKWIKKQQISPVIESSVFAIQDQCIMTRQHRRDILKEPVDGKCRLCVCKDETAQHIVSGCEKLAGNYYVKRHNNLVQYVYWCLAKKHKIEVSNLWWKETLSQPHVKENETAKILWEMPVQTDVTITHNRPDLIYIDKIKNQTYLIDVTVPSDYNIGPKEIEKLSKYHLLKTEVSRLWKTQTTVVPIVIGVTGIVAKSIKKYIEKLDSNIDITILQKQAAIHSTTILSKVLGDTIFVKDT

SEQ ID NO: 31879 - protein, 1211 aa, Apodemia mejicanus
MMTTNNDANDDKRRKWSTDELHELMFCYFKARSGGIGYIARLQELFKERNPNNSKIHKFNGNTLATQARRVIKQNILSQELLNRIQNHAEGNKETVKSPQRNEIEEEDLVDTVPQNIMSRKIQHTDDTNREFESIEDTQHAHAQEDEDPIILNFLQTLAETKETRIENRLFLPKAKINRKFLENLHKLNQYLPNILVMYNSLRDINDIIYAAAKTLILNNNQTPYLPKKTFKIKTDPPWKKRIQSKIELLRRELGQLIEIDKGVNTRRMIKIKDRLYRKYQIQSNNDHKNAEEILKQKIKAFAGRIKRYNDINARKEQNTLFKDNEHKFYKSLECSDYREIKIPNKEKVEEFWTSILSNTIDYSSESKWIKEVEMTTKEVSTIDITEITEDQLKSAIRKLINWKTPGIDKIQNYYIKYLTSIHRHLASLFTKIIKYEETLEEWFTTGLVILIPKNEDTEEPKNWRPIACLPTIYKLLTSVLADILYNHCNENNILAIEQRGCRRGARGCKDHLMVNKAILEDAHRFQKNLSMAWIDYQKAFDSVSHEWLVKVLDVYKCPTVVKKFLQLVMPSWRVIMTARGTETSITTEPISVKRGIFQGDSLSPLLFCLAINPLSFILNKYSIKGYKLRDSFCINHLLYMDDLKIYANNRHNLKILVDSVEIFTGDIGMKFGLDKCNVIHINSGHRNRVMGEGHILLDGQLIKKLNIEDTYKYLGIHESGKIEHNIIRDQAIKEYFRRVRKLLNTHLNSRNLIKAINVYAIPVLLYTFGIINFKNNDLKKIDSKTRKLLTTKQAHQHKAEVNRLYLPITQGGRGLLNIEYMYKTQILKYNQYLKNESDNLIKAIIKHDIHKEKYSVINEARDIEKELNLVQGNIHTNTDIKEAIFDKYNKTWRYKSLHGQFPKKILDAANIDIESSFKWIKKQNISPRVESSVFAIQDQAVTTRQHRRDILKEPIDGKCRLCARKDETTQHIITGCDNLAGSCYVKRHNNLVQYVHWCLAKKHGIKVSNFWWTENLKQPQIIENQTAKILWEIPVQTDKTVTHNRPDLIYIDKINNKTYLIDITVPSDYNIGSKEIEKLSKYHPLKAEVSRLWDTQAIIIPVVIGATGVVAKNITKYTDQLNANIDISILQKQAAIHSSIIISKVLGDNVFAENPHSQNTQNDITSLDSIRESRNNLYINQTPDSEYLIGLTDSNATAYSQNLSRQNYIQ

SEQ ID NO: 31880 - protein, 1344 aa, Hypophylla argenissa
MERQTRSTRIRPLPGGDRRGTSGADAGRDSMQTVSGSLLNRRARVGEPECTTAEQRGGEGIGDALQSGDLPVECSVGSSAATTTNSISDDKRRKWSNEEMEELMFCYFKAQLQGVGYMVRLEKLFTDRNPNNPKIHKFNGNTLSNQARRILKQNIISQELLYQIKRRAEGLQVESIENTELNEEHSTSNTQQNTTRHNYHTNTIQNTYQSTQHEYTSTQIEIVNQLINNIAVDEDQDPLILDFLRILAETKEVPIADRYLLPKAKINRQFLQNLHKLDKYLPNLLITNNSLREINDIIYAAAKTLIVSNNQIPFVPKTVVKPKSDPYWKKRIVNKLEKCRKELGQLIEISRGVSTSRMLRIKDNLYRKYNVGNENDLSNQIEILTQRVKALAARIKRYEDINSRKEQNRLFSENQHRLYRSLNNNNNTFNDVRLPSKDNVELFWKSILSNPIQYNKKAKWIEEVNNLTDQVHTKTTEEIAVEEVKDAIRRLHNWKTPGIDRIQNYYLKYFSSTHIYLASAFTNIVKGTELMEEWFTTGQVILIPKNEHTEDPKNWRPIACLPSTYKLLTSILANQLYSHCYDNNIMAVEQRGCRRGAKGCKDHLMVNKAILEDAHLSQKNLSMAWVDYQKAFDSISHEWLLKILDIYKCPPMIKNFLTAAMPSWRVIMTARGSQNSVTTEPISIRRGIFQGDSLSPLLFCLAINPLSFILNKYELKGYKLKDSVYINHLLYMDDLKVYANHSSKLKILLDSVEIFTNDIGMSFGLNKCNIIHLRSGYRNNTAGQGHVLLSGETFSQLTVGNTYKYLGVHESGKIEHSVVRQQITKEYFRRVNKLLNTHLNSRNIIKGINTYAIPVLLYSFGIINFKINDLKKIDTKTRKLLNIKKAHQQKADVERLYLPVLQGGRGLINVENMYKSQIIKYKLYLEMQSDFLIQAIVQHDINRNKYSIVKDCEEIEKELRLPQGNRHISKEIKEAIVKMQNNKWRNKNLHGQFPKSVLDQANIDKELSFKWIKKQKISPSLESAVFAIQDQAIMTRQHQRDILKKPVDGKCRLCSTKDETTQHIISGCEKLAGTYYVKRHNDLVKYVYWCIAKKHKIQVNDLWWQESLTQPQVKENDTAKLLWEIPIQTDITVTHNRPDLIYVDKDNNKTYLIDVTVPSDYNIGAKEIEKLSKYHLLRTEISRLWNTQATVIPIVVGATGIVAKSITRHIDKLESNINITILQKQAAIHTSTILSKVLGDSVFIHNTEIQETQQIQNTQPSYTRITLQSSDTQSTNNPPVTQATHQSPDTQITHQSPDTQITHQSCDTQKSPDTQITHQSIDLQTTHTSPNIQTRRRKRTNIIN

SEQ ID NO: 31881 - protein, 1286 aa, Junonia coenia
MMMESQFNEIRIGSLPGGERRGTSGADAGRLSMQTVSDSLLNRRAGVGEPENSTADQRNGEGADDALQNRATLITSAGSSASTTDKMSDDKRRKWSNEELMELMFCFFKARSEGPGYIGRLQQLFTERNPNNPKIKKFNGNTLSNQARRILKQNILSQELLNRLQKQAEGVMPINDSEPILNHDQIQNNIPSNRERIFYTPEQVEEINQTMQILVNEDQDPLILDFLQVLAEVKETPIEERLVLPKANINKQFIINFNTLNTYLPKLLLTNNTLRDINNIIYAAAKTLIVNNNQTPYTPKTTIKTKKDPPWKVRLQLKIEKLRRESGQLIEIQRGVKTRKMIKIKEKLYAKYNIQNENDHNNILETIKQKIKALAGRIKRYVDMKTRIEQNKLFKQNQHKLYSSLDNNLKKDIKLPNKQNIEEYWTSILSNPVEYNRKAKWIKEIEMSLNEVKTTEIESITEEQVKIAIKKLLNWKSAGIDKIQNYYLKYFTSVHKYLALLFTNIVSGSEVLDDWFTTGQVILIPKNENTDDPKNWRPIACLPTMYKLLTSVLANIMYEHCQENNIMAVEQRGCRRGTRGCKDHLMVNKSILEDAHQSQKNLSMAWIDYQKAFDSVSHEWLLKLLDIYKCPTVIKNFLLLTMPFWRVIMTARGSQESITTDPIHIRRGIFQGDSLSPLLFCLAVNPLSFILNKYELKGYKLKDSFWINHLLYMDDLKLYANNKSNLKVLLDSVEIFTDDIGMKFGLDKCNVIHITAGHRSNTTGEGHILLSGDTFKHLTIGQQYKYLGIQESGKINHSDIRDQITKEYFKRIRKLLNTHLNSRFLIKGINTYAMPILLYSFGVINYKINDLKKIDVKTRKMLATKKAHQQKAEVERIYLPVDEGGRGLINIEYLYKSQIIKYSQYLNSKNDHLIKAIVQHDTNRDKYSILKEADQIKTELKLKQKDTYTKNEIKEAIVKTQNTTWRNKELHGQFPKKVLDQANIDRQLSFRWIKKQHVSPSVESSIFAIQDQAIMTRQHQRDILKEPIDGKCRLCASKDETTQHIISGCEKLAGTYYVKRHNNLVQYVYWCLAKKHKMEVSDLWWKETLTQPQVKENESAKILWEMPVQTDITVTHNRPDLIYIDKNNNKTFLIDISVPSDYNIGAKEIEKLSKYHLLKTEVSRLWNTKTTIIPIVIGATGVVAKSLLKYIEKLDTYIDISILQKQSAIHTSIIISKVLGDTVFVHNTNTTDENTQNTQNNPITLDTPNTRQSIARTDNEAQNPTQTRNINQARGRRRGRGRRGNI

SEQ ID NO: 31882 - protein, 1200 aa, Junonia evarete
MSDDKRRKWSNEELMELMFCFFKARSEGPGYIGRLQQLFTERNPNNPKIKKFNGNTLSNQARRILKQNILSQELLNRLQKQAEGVMPINDSEPILNHDQIQNNIPSNRERIFYTPEQVEEINQTMQILVNEDQDPLILDFLQVLAEVKETPIEERLVLPKANINKQFIINFNTLNTYLPKLLLTNNTLRDINNIIYAAAKTLIVNNNQTPYTPKTTIKTKKDPPWKVRLQLKIEKLRRESGQLIEIQRGVKTRKMIKIKEKLYAKYNIQNENDHNNILETIKQKIKALAGRIKRYVDMKTRIEQNKLFKQNQHKLYSSLDNNLKKDIKLPNKQNIEEYWTSILSNPVEYNRKAKWIKEIEMSLNEVKTTEIESITEEQVKIAIKKLLNWKSAGIDKIQNYYLKYFTSVHKYLALLFTNIVSGSEVLDDWFTTGQVILIPKNENTDDPKNWRPIACLPTMYKLLTSVLANIMYEHCQENNIMAVEQRGCRRGTRGCKDHLMVNKSILEDAHQSQKNLSMAWIDYQKAFDSVSHEWLLKLLDIYKCPTVIKNFLLLTMPFWRVIMTARGSQESITTDPIHIRRGIFQGDSLSPLLFCLAVNPLSFILNKYELKGYKLKDSFWINHLLYMDDLKLYANNKSNLKVLLDSVEIFTDDIGMKFGLDKCNVIHITAGHRSNTTGEGHILLSGDTFKHLTIGQQYKYLGIQESGKINHSDIRDQITKEYFKRIRKLLNTHLNSRFLIKGINTYAMPILLYSFGVINYKINDLKKIDVKTRKMLATKKAHQQKAEVERIYLPVDEGGRGLINIEYLYKSQIIKYSQYLNSKNDHLIKAIVQHDTNRDKYSILKEADQIKTELKLKQKDTYTKNEIKEAIVKTQNTTWRNKELHGQFPKKVLDQANIDRQLSFRWIKKQHVSPSVESSIFAIQDQAIMTRQHQRDILKEPIDGKCRLCASKDETTQHIISGCEKLAGTYYVKRHNNLVQYVYWCLAKKHKMEVSDLWWKETLTQPQVKENESAKILWEMPVQTDITVTHNRPDLIYIDKNNNKTFLIDISVPSDYNIGAKEIEKLSKYHLLKTEVSRLWNTKTTIIPIVIGATGVVAKSLLKYIEKLDTYIDISILQKQSAIHTSIIISKVLGDTVFVHNTNTTDENTQNTQNNPITLDTPNTRQSIARTDNEAQNPTQTRNINQVRGRRRGRGRRGNI

SEQ ID NO: 31883 - protein, 1286 aa, Junonia stemosa
MMMESQFNEIRIGSLPGGERRGTSGADAGRLSMQTVSDSLLNRRAGVGEPENSTADQRNGEGADDALQNRATLTNSAGSSASTTDKMSDDKRRKWSNEELIELMFCFFKARSEGPGYIGRLQQLFTERNPNNPKIKKFNGNTLSNQARRVLKQNVLSQELLNRLQKQAEGVMPVNTLEPILNYDQIQNNIPPNTEHICYTPERVQEINQMTQILVNEDQDPLILEFLQILAEVKETPIEERLVLPKANINKQFIHNLNTLNTFLPKLLLTNNTLREINNIIYAAAKTLIVNNNQIPYTPKTTIKTKQDPPWKVRLQIKTEKLRRELGQLIEIQRGVTTRKMIKIKENLYTKYNIQNENEHNNTVEIIKQKIKALAGRIKRYVDMNTRAEQNKLFKLNEHKLYSNLNININKDIKVPNKQKIEEYWSSILSNPVEYNNEAKWIKEVEASLNEVETSEIESITEEQVKKAVKKLLNWKSAGIDKIQNYYLKYFTSAHKYLASLFTNIVSGAEVLDEWFTTGQVILIPKNENTDDPKNWRPIACLPTMYKLLTSVLANIMYDHCQQNNIIALEQRGCRRGARGCKDHLMVNKSILEDAHQSQKNLSMAWIDYQKAFDSVSHEWLLKLLDIYKCPALIKNFLLLTMPYWRVIMTARGSQESIITDPIHIRRGIFQGDSLSPLLFCLAINPLSFILNKYELKGYKLKDSFWINHLLYMDDLKLYANNKSNLKILLDSVEIFTDDIGMKFGLEKCNVIHITAGHRSNATGEGHILLGGDTFKQLAIGQQYKYLGIQESGKINHSDIRDQITKEYFKRIRKLLNTHLNSRFLIKGINTYATPVLLYSFGVINYKINDLKKIDVKTRKMLAMKKAHQQKAEVERLYLPVDEGGRGLINIEYLYKSQIVKYSQYLNNKNDHLIEAIVQHDKNRDKYSILKEAEQIKIELKLTHKDNPTKHEIKEAITKIQNTTWRNKELHGQFPKKVLDQANIDRQLSFRWIKKQQVSPSIESSIFAIQDQTIMTRQHQRDILKEPVDGRCRLCATKDETTQHIISGCEKLAGTYYVKRHNNLVQYVYWCLAKKHKIKVSDLWWKETLTQPQVNENETAKILWEMPVQTDISVTHNRPDLIYIDKNTNKTFLIDISVPSDYNIGAKEIEKLSKYHLLKTEVSRLWDTKTIIIPIVIGATGVVAKSLSKYIDKLDAHIDINILQKQAAIHTSTIISKVLGDTVFVHNRNTTDEITHDTQNNPMSLDTQNTRQSLATIDYDTQNPTQTQNTNQRRGRRRDRGRRGNI

SEQ ID NO: 31884 - protein, 1286 aa, Junonia litoralis
MMMESQFKEIRIGSLPGGERRGTSGADAGRLSMQTVSDSLLNRRAGVGEPENSTADRRNGEGADDALQNRATLITSAGSSASTTDKMSDDKRRKWSNEELIQLMFCFFKARSEGPGYIGRLQQLFTERNPNNPKIKKFNGNTLSNQARRILKQNILSQELLNRLQKQAEGVIPINDSEPILIHDQIQNNIPSNRERIFYTPEQVEEINQTMQILVNEDQDPLILDFLQVLAEVKETPIEERLVLPKANINKQFIINFNTLNTYLPKLLLTNNTLRDINNIIYAAAKTLIVNNNQTPYTPKTTIKTKKDPPWKVRLQLKIEKLRRESGQLIEIQRGVKTRKMIKIKEKLYAKYNIQNENDHNNILETIKQKIKALAGRIKRYVDMKTRIEQNKLFKQNQHKLYSSLDNNLKKDIKLPNKQNIEEYWTSILSNPVEYNRKAKWIKEIEMSLNEVKTTEIESITEEQVKIAIKKLLNWKSAGIDKIQNYYLKYFTSVHKYLALLFTNIVSGSEVLDDWFTTGQVILIPKNENTDDPKNWRPIACLPTMYKLLTSVLANIMYEHCQENNIMAVEQRGCRRGTRGCKDHLMVNKSILEDAHQSQKNLSMAWIDYQKAFDSVSHEWILKLLDIYKCPTVIKNFLLLTMPFWRVIMTARGSQESITTDPIHIRRGIFQGDSLSPLLFCLAVNPLSYILNKYELKGYKLKDSFWINHLLYMDDLKLYANNKSNLKVLLDSVEIFTDDIGMKFGLDKCNVIHITAGHRSNTTGEGHILLSGDTFKHLTIGQQYKYLGIQESGKINHSDIRDQITKEYFKRIRKLLNTHLNSRFLIKGINTYAMPILLYSFGVINYKINDLKKIDVKTRKMLATKKAHQQKAEVERIYLPVDEGGRGLINIEYLYKSQIIKYSQYLNSKNDHLIKAIVQHDTNRDKYSILKEADQIKTELKLKQKDTYTKNEIKEAIVKTQNTTWRNKELHGQFPKKVLDQANIDRQLSFRWIKKQHVSPSVESSIFAIQDQAIMTRQHQRDILKEPVDGRCRLCATKDETTQHIISGCEKLAGTYYVKRHNNLVQYVYWCLAKKHKIKVSDLWWKETLTQPQVNENETVKILWEMPVQTDITVTHNRPDLIYIDKNTNKTFLIDISVPSDYNIGAKEIEKLSKYHLLKTEVSRLWDTKTTIIPIVIGATGVVAKSLSKYIDKLDAHIDINILQKQAAIHTSTIISKVLGDTVFVHNRNTTDEITHNTQNNPMTLDTQNTRQSLATTDHETQNPTQTQNTNQRRGRRRVRGRRGNI

SEQ ID NO: 31885 - protein, 1283 aa, Junonia pacoma
MMMESQFNEIRIGSLPGGERRGTSGADAGRLSMQTVSDSLLNRRAGVGEPENSTADQRNGEGADDALQNRVTLTNSAGSSASTTDKMSDDKRRKWSNEELIELMFCFFKARSEGPGYIGRLQQLFTERNPDNPKIKKFNGNTLSNQARRVLKQNVLSQELLNRLQKQAEGVMPINTSEPILNYNQIQNNIPSNTEHICYTPERVQEINQMTQILVNEDQDPLILEFLQVLAEVKETPIEERLVLPKANINKQFIHNLNTLNTFLPKLLLTNNTLREINNIIYAAAKTLIVNNNQIPFTPKTTKKIKKDPPWKVRLQIKTEKLRRELGQLIEIQRGVRTRKMIKIKENLYTKYNIQNENEHNNIVEIIKQKIKALAGRIKRYVDMNTRAEQNKLFKLNEHKLYSNLNININKDIKVPNKQKIEEYWSSILSNPVEYNNEAKWIKEIEASLKEVETSEIESITEEQVKKAVKNLLNWKSAGIDKIQNYYLKYFTSAHKYLASLFTNIVSGAEVLDEWFTTGQVILIPKNENTDDPKNWRPIACLPTMYKLLTSVLANIMYDHCQQNNIIALEQRGCRRGARGCKDHLMVNKSILEDAHQSQKNLSMAWIDYQKAFDSVSHEWLLKLLDIYKCPALIKNFLLLTMPFWRVIMTARGSQESITTDPIHIRRGIFQGDSLSPLLFCLAINPLSFILNKYEIKGYKLKDSFWINHLLYMDDLKLYANNKSNLKILLDSVEIFTDDIGMKFGLEKCNVIHITAGHRSNATGEGHILLSGDTFKQLAIGQQYKYLGIQESGKINHSDIRDQITKEYFKRIRKLLNTYLNSRFLIKGINTYATPVLLYSFGVINYKINDLKKIDVKTRKMLAMKKAHQQKAEVERLYLPVDEGGRGLINIEYLYKSQIVKYSQYLNNKNDHLIEAIVQHDKNRDKYSILKEAEQIKIELKLTHKDNPTKHEIKEAITKIQNITWRNKELHGQFPKKVLDQANIDRQLSFRWIKKQQVSPSIESSIFAIQDQTIMTRQHQRDILKEPVDGRCRLCATKDETTQHIISGCEKLAGTYYVKRHNNLVQYVYWCLAKKHKIKVSDLWWKETLTQPQVKENETAKILWEMPVQTDITVTHNRPDLIYIDKNTNKTFLIDISVPSDYNIGAKEIEKLSKYHLLKTEVSRLWDTKTTIIPIVIGATGVVAKSLSKYIDKLDAHIDINILQKQAAIHTSTIISKILGDTVFVHDRNTTDEITHNTQNNPITLDTQNTRQSLATIDHETQNPTQTQNTNQRRRGKGRRGNI

SEQ ID NO: 31886 - protein, 1200 aa, Junonia neildi
MSDDKRRKWSNEELMELMFCFFKARSEGPGYIGRLQQLFTERNPNNPKIKKFNGNTLSNQARRILKQNILSQELLSRLQKQAEGVMPINDSEPILNHDQIQNNIPSNRERIFYTPEQVEEINQTMQILVNEDQDPLILDFLQVLAEVKETPIEERLVLPKANINKQFINNFNTLNTYLPKLLLTNNTLREINNIIYAAAKTLIVNNNQTPYTPKTTIKTKKDPPWKVRLQLKIEKLRRESGQLIEIQRGVKTRKILKIKEKLYAKYNIQNENDHNNILETIKQKIKALAGRIKRYVDMKTRIEQNKLFKQNQHKLYSSLDNNLKKDIKLPNKQNIEEYWTSILSNPVEYNRKAKWIKEIEMSLNEVKTTETESITEEQVKIAIKKLLNWKSAGIDKIQNYYLKYFTSVHKYLALLFTNIVSGSEVLDDWFTTGQVILIPKNENTDDPKNWRPIACLPTMYKLLTSVLANIMYEHCQENNIMAVEQRGCRRGTRGCKDHLMVNKSILEDAHQSQKNLSMAWIDYQKAFDSVSHEWLLKLLDIYKCPTVIKNFLLLTMPFWRVIMTARGSQESITTDPIHIRRGIFQGDSLSPLLFCLAVNPLSFILNKYELKGYKLKDSFWINHLLYMDDLKLYANNKSNLKVLLDSVEIFTDDIGMKFGLDKCNVIHITAGHRSNATGEGHILLSGDTFKHLTIGQQYKYLGIQESGKINHSDIRDQITKEYFKRIRKLLNTHLNSRFLIKGINTYAMPILLYSFGVINYKINDLKKIDVKTRKMLATKKAHQQKAEVERIYLPVDEGGRGLINIEYLYKSQIIKYSQYLNSKNDHLIKAIVQHDTNRDKYSILKEAGQIKTELKLTQKDTYTKNEIKEAIVKTQNTTWRNKELHGQFPKKVLDQANIDRQLSFRWIKKQHVSPSIESSIFAIQDQAIMTRQHQRDILKEPIDGKCRLCGSKDETTQHLISGCEKLAGTYYVKRHNNLVQYVYWCLAKKHKMEVSDLWWKETLTQPQVKENESAKILWEMPVQTDITVTHNRPDLIYIDKNNNKTFLIDISVPSDYNIGAKEIEKLSKYHLLKTEVSRLWNTKTTIIPIVIGATGVVAKSLLKYIEKLDTYIDISILQKQAAIHTSIIISKVLGDTVFVHNTNTTDENTQNTQNNPITLDTPNTRQSIARTDNEAQNPTQIRNINQVRGRRRGRGRRGNI

SEQ ID NO: 31887 - protein, 946 aa, Junonia stemosa
MIKIKEKLYAKYNIQNENDHNNILETIKQKIKALAGRIKRYVDMNTRIEQNKLFKQNEHKLYSSLDNNLKKDIKLPNKQNIEEYWTSILSNPVEYNRKAKWIKEIEMSLNEVKTTETESITEEQVKIAIKKLLNWKSAGIDKIQNYYLKYFTSVHKYLALLFTNIVSGSEVLDDWFTTGQVILIPKNENTDDPKNWRPIACLPTMYKLLTSVLANIMYEHCQENNIMAVEQRGCRRGTRGCKDHLMVNKSILEDAHQSQKNLSMAWIDYQKAFDSVSHEWLLKLLDIYKCPTVIKNFLLLTMPFWRVIMTARGSQESITTDPIHIRRGIFQGDSLSPLLFCLAVNPLSFILNKYELKGYKLKDSFWINHLLYMDDLKLYANNKSNLKVLLDSVEIFTDDIGMKFGLDKCNVIHITAGHRSNATGEGHILLSGDTFKHLTIGQQYKYLGIQESGKINHSDIRDQITKEYFKRIRKLLNTHLNSRFLIKGINTYAMPILLYSFGVINYKINDLKKIDVKTRKMLATKKAHQQKAEVERIYLPVDEGGRGLINIEYLYKSQIIKYSQYLNSKNDHLIKAIVQHDTNRDKYSILKEADQIKTELKLTQKDTYTKNEIKEAIVKTQNTTWRNKELHGQFPKKVLDQANIDRQLSFRWIKKQHVSPSVESSIFAIQDQAIMTRQHQRDILKEPIDGKCRLCASKDETTQHIISGCEKLAGTYYVKRHNNLVQYVYWCLAKKHKMEVSDLWWKETLTQPQVKENESAKILWEMPVQTDITVTHNRPDLIYIDKNNNKTFLIDISVPSDYNIGAKEIEKLSKYHLLKTEVSRLWNTKTTIIPIVIGATGVVAKSLLKYIEKLDTYIDISILQKQSAIHTSIIISKVLGDTVFVHNTNTTDENTQNTQNNPITLDTPNTRQSIARTDNEAQNPIQIRNINQVRGRRRGRGRRGNI

SEQ ID NO: 31888 - protein, 1286 aa, Junonia vestina
MMMESQFNEIRIGSLPGGERRGTSGADAGRLSMQTVSDSLLNRRAGVGEPENSTADQRNGEGADDALQNRATLTNFAGSSASTTDKMSDDKRRKWSNEELIELMFCFFKARSEGPGYIGRLQQLFTERNPNNPKIKKFNGNTLSNQARRVLKQNVLSQELLNRLQKQAEGVIPVNTLEPILNYDQIQNNIPPNTEHICYTPERVQEINQMTQILVNEDQDPLILEFLQILAEVKETPIEERLVLPKANINKQFIHNLNTLNTFLPKLLLTNNTLREINNIIYAAAKTLIVNNNQIPYTPKTTIKTKKDPPWKVRLQIKTEKLRRELGQLIEIQRGVRTRKMIKIKENLYTKYNIQNENEHNNIVEIIKQKIKALAGRIKRYVDMNTRAEQNKLFKLNEHKLYSNLNININKDIKVPNKQKIEEYWSSILSNPVEYNNEAKWIKEVEASLNEVETSEIESITEEQVKKAVKKLLNWKSAGIDKIQNYYLKYFTSAHKYLASLFTNIVSGAEVLDEWFTTGQVILIPKNENTDDPKNWRPIACLPTMYKLLTSVLANIMYDHCQQNNIIALEQRGCRRGARGCKDHLMVNKSILEDAHQSQKNLSMAWIDYQKAFDSVSHEWLLKLLDIYKCPALIKNFLLLTMPYWRVIMTARGSQESITTDPIHIRRGIFQGDSLSPLLFCLAINPLSFILNKYELKGYKLKDSFWINHLLYMDDLKLYANNKSNLKILLDSVEIFTDDIGMKFGLEKCNVIHITAGHRSNATGEGHILLGGDTFKQLAIGQQYKYLGIQESGKINHSDIRDQITKEYFKRIRKLLNTYLNSRFLIKGINTYATPVLLYSFGVINYKINDLKKIDVKTRKMLAMKKAHQQKAEVERLYLPVDEGGRGLINIEYLYKSQIVKYSQYLNNKNDHLIEAIVQHDKNRDRYSILKDAEQIKIELKLTHKDNPTKREIKEAITKIQNTTWRNKELHGQFPKKVLDQANIDRQLSFRWIKKQQVSPSIESSIFAIQDQTIMTRQHQRDILKEPVDGRCRLCATKDETTQHIISGCEKLAGTYYVKRHNNLVQYVYWCLAKKHKIKVSDLWWKETLTQPQVNENETAKILWEMPVQTDITVTHNRPDLIYIDKNTNKTFLIDISVPSDYNIGAKEIEKLSKYHLLKTEVSRLWDTKTTIIPIVIGATGVVAKSLSKYIDKLDAHIDINILQKQAAIHTSTIISKVLGDTVFVHNRNTTDEITHNTQNNPMSLDTQNTRQSLATIDLDTQNPTQTQNTNQRRGRRRGRGRRGNI

SEQ ID NO: 31889 - protein, 1286 aa, Junonia evarete
MMMESQFNEIRIGSLPGGERRGTSGADAGRLSMQTVSDSLLNRRAGVGEPENSTADQRNGEGADDALQNRATLTNSAGSSASTTDKMSEDKRRKWSNEELIELMFCFFKARSEGPGYIGRLQQLFTERNPNNPKIKKFNGNTLSNQARRVLKQNVLSQELLNRLQKQAEGVLPVNTSEPILNYDQIQNNIPSNTEHICYTPERAQEINQMTQILVNEDQDPLILEFLQILAEVKETPIEERLVLPKANINKQFIYNLNTLNTFLPKLLLTNNTLREINNIIYAAAKTLIVNNKQIPYTPKTAIKTKKDPPWKVRLQIKTEKLRRELGQFIEIQRGVRTRKMIKIKENLYTKYNIQNENEHNNTVEIIKQKIKALAGRIKRYVDMNTRAKQNKLFKLNEHKLYSNLNININKDIKVPNKQKIEEYWSSILSNPVEYNNEAKWIKEIEASLNEVETSEIESITEEQVKKAVKKLLNWKSAGIDKIQNYYLKYFTSAHKYLASLFTNIVSGAEVLDEWFTTGQVILIPKNENTDDPKNWRPIACLPTMYKLLTSVLANIMYDHCQQNNIIALEQRGCRRGARGCKDHLMVNKSILEDAHQSQKNLSMAWIDYQKAFDSVSHEWLLKLLDIYKCPALIKNFLLLTMPFWRVIMTARGSQESITTDPIHIRRGIFQGDSLSPLLFCLAINPLSFILNKYEIKGYKLKDSFWINHLLYMDDLKLYANNKSNLKILLDSVEIFTDDIGMKFGLEKCNVIHITAGHRSNATGEGHILLSGDTFKQLAIGQQYKYLGIQESGKINHSDIRDQITKEYFKRIRKLLNTYLNSRFLIKGINTYATPVLLYSFGVINYKINDLKKIDVKTRKMLAMKKAHQQKAEVERLYLPVDEGGRGLINIEYLYKSQIVKYSQYLNNKNDHLIEAIVQHDKNRDKYSILKEAEQIKIELKLTHKDNPTKHEIKEAITKIQNTTWRNKELHGQFPKKVLDQANIDRQLSFRWIKKQQVSPSIESSIFAIQDQTIMTRQHQRDILKEPVDGRCRLCATKDETTQHIISGCEKLAGTYYVKRHNNLVQYVYWCLAKKHKIKVSDLWWKETLTQPQVNENETAKILWEMPVQTDITVTHNRPDLIYIDKNTNKTFLIDISVPSDYNIGAKEIEKLSKYHLLKTEVSRLWDTKTTIIPIVIGATGVVAKSLSKYIDKLDAHIDINILQKQAAIHTSTIISKVLGDTVFVHNRNTTDEITHNTQNNPMSLDTQNTRQSLATIDHDTQNPTQTQNTNQRRGRRRGRGRRGNI

SEQ ID NO: 31890 - protein, 1286 aa, Junonia grisea
MMMESQFKEIRIGSLPGGERRGTSGADAGRLSMQTVSDSLLNRRAGVGEPENSTADQRNGEGADDALQNRATLITSAGSSASTTDKMSDDKRRKWSNEELMELMFCFFKARSEGPGYIGRLQQLFTERNPNNPKIKKFNGNTLSNQARRILKQNILSQELLSRLQKQAEGVMPINDSEPILNHDQIQNNIPSNRERIFYTPEQVEEINQTTQILVNEDQDPLILDFLQVLAEVKETPIEERLVLPKANINKQFINNFNTLNTYLPKLLLTNNTLREINNIIYAAAKTLIVNNNQTPYTPKTTIKTKKDPPWKVRLQLKIEKLRRESGQLIEIQRGVKTRKMIKIKEKLYAKYNIQNENDHNNILETIKQKIKALAGRIKRYVDMNTRIEQNKLFKQNEHKLYSSLDNNLKKDIKLPNKQNIEEYWTSILSNPVEYNRKAKWIKEIEMSLNEVKTTETESITEEQVKIAIKKLLNWKSAGIDKIQNYYLKYFTSVHKYLALLFTNIVSGSEVLDDWFTTGQVILIPKNENTDDPKNWRPIACLPTMYKLLTSVLANIMYEHCQENNIMAVEQRGCRRGTRGCKDHLMVNKSILEDAHQSQKNLSMAWIDYQKAFDSVSHEWLLKLLDIYKCPTVIKNFLLLTMPFWRVIMTARGSQESITTDPIHIRRGIFQGDSLSPLLFCLAVNPLSFILNKYELKGYKLKDSFWINHLLYMDDLKLYANNKSNLKVLLDSVEIFTDDIGMKFGLDKCNVIHITAGHRSNATGEGHILLSGDTFKHLTIGQQYKYLGIQESGKINHSDIRDQITKEYFKRIRKLLNTHLNSRFLIKGINTYAMPILLYSFGVINYKINDLKKIDVKTRKMLATKKAHQQKAEVERIYLPVDEGGRGLINIEYLYKSQIIKYSQYLNSKNDHLIKAIVQHDTNRDKYSILKEADQIKTELKLTQKDTYTKNEIKEAIVKTQNTTWRNKELHGQFPKKVLDQANIDRQLSFRWIKKQHVSPSIESSIFAIQDQAIMTRQHQRDILKEPIDGKCRLCASKDETTQHLISGCEKLAGTYYVKRHNNLVQYVYWCLAKKHKMEVSDLWWKETLTQPQVKENESAKILWEMPVQTDITVTHNRPDLIYIDKNNNKTFLIDISVPSDYNIGAKEIEKLSKYHLLKTEVSRLWNTKTTIIPIVIGATGVVAKSLLKYIEKLDTYIDISILQKQAAIHTSIIISKVLGDTVFVHNTNTTDENTQNTQNNPITLDTPNTRQSIARTDNEAQNPTQTRNINQARGRRRGRGRRGNI

SEQ ID NO: 31891 - protein, 1286 aa, Junonia grisea
MMMESQFKEIRIGSLPGGERRGTSGADAGRLSMQTVSDSLLNRRAGVGEPENSTADQRNGEGADDALQNRATLTNSAGSSASTTDKMSDDKRRKWSNEELIELMFCFFKARSEGPGYIGRLQQLFTERNPNNPKIKKFNGNTLSNQARRVLKQNVLSQELLNRLQKQAEGVMPVNTLEPILNYDQIQNNIPPNTEHICYTPERVQEINQMTQILVNEDQDPLILEFLQILAEVKETPIEERLVLPKANINKQFIHNLNTLNTFLPKLLLTNNTLREINNIIYAAAKTLIVNNNQIPYTPKTTIKTKKDPPWKVRLQIKTEKLRRELGQLIEIQRGVRTRKMIKIKENLYTKYNIQNENEHNNIVEIIKQKIKALAGRIKRYVDMNTRAEQNKLFKLNEHKLYSNLNININKDIKVPNKQKIEEYWSSILSNPVEYNNEAKWIKEVEASLNEVETSEIESITEEQVKKAVKKLLNWKSAGIDKIQNYYLKYFTSAHKYLASLFTNIVSGAEVLDEWFTTGQVILIPKNENTDDPKNWRPIACLPTMYKLLTSVLANIMYDHCQQNNIIALEQRGCRRGARGCKDHLMVNKSILEDAHQSQKNLSMAWIDYQKAFDSVSHEWLLKLLDIYKCPALIKNFLLLTMPYWRVIMTARGSQESITTDPIHIRRGIFQGDSLSPLLFCLAINPLSFILNKYELKGYKLKDSFWINHLLYMDDLKLYANNKSNLKILLDSVEIFTDDIGMKFGLEKCNVIHITAGHRSNATGEGHILLGGDTFKQLAIGQQYKYLGIQESGKINHSDIRDQITKEYFKRIRKLLNTHLNSRFLIKGINTYATPVLLYSFGVINYKINDLKKIDVKTRKMLAMKKAHQQKAEVERLYLPVDEGGRGLINIEYLYKSQIVKYSQYLNNKNDHLIEAIVQHDKNRDKYSILKEAEQIKIELKLTHKDNPTKHEIKEAITKIQNTTWRNKELHGQFPKKVLDQANIDRQLSFRWIKKQQVSPSIESSIFAIQDQTIMTRQHQRDILKEPVDGRCRLCATKDETTQHIISGCEKLAGTYYVKRHNNLVQYVYWCLAKKHKIKVSDLWWKETLTQPQVNENETAKILWEMPVQTDISVTHNRPDLIYIDKNTNKTFLIDISVPSDYNIGAKEIEKLSKYHLLKTEVSRLWDTKTIIIPIVIGATGVVAKSLSKYIDKLDAHIDINILQKQAAIHTSTIISKVLGDTVFVHNRNTTDEITHDTQNNPMSLDTQNTRQSLATIDYDTQNPTQTQNTNQRRGRRRDRGRRGNI

SEQ ID NO: 31892 - protein, 1286 aa, Junonia genoveva
MMMESQFNEIRIGSLPGGERRGTSGADAGRLSMQTVSDSLLNRRAGVGEPENSTADQRNGEGADDALQNRATLITSAGSSASTTDKMSDDKRRKWSNEELIELMFCFFKARSEGPGYIGRLQQLFTERNPDNPKIKKFNGNTLSNQARRVLKQNVLSQELLNRLQKQAEGVMPVNTSEPILNYDQIQNNIPSNTEHICYTPERAQEINQMTQILVNEDQDPLIVEFLQILAEVKETPIEERLVLPKANINKQFIYNLNTLNTFLPKLLLTNNTLREINNIIYAAAKTLIVNNKQIPYTPKTTIKTKKDPPWKVRLQIKTEKLRRELGQFIEIQRGVRTRKMIKIKENLYTKYNIQNENEHNNTVEIIKQKIKALAGRIKRYVDMNTRAEQNKLFKLNEHKLYSNLNININKDIKVPNKQKIEEYWSSILSNPVEYNNEAKWIKEIEASLNEVETSEIESITEEQVKKAVKKLLNWKSAGIDKIQNYYLKYFTSAHKYLASLFTNIVSDAEVLDEWFTTGQVILIPKNENTDDPKNWRPIACLPTMYKLLTSVLANIMYDHCQQNNIIALEQRGCRRAARGCKDHLMVNKSILEDAHQSQKNLSMAWIDYQKAFDSVSHEWLLKLLDIYKCPALIKNFLLLTMPFWRVIMTARGSQESITTDPIHIRRGIFQGDSLSPLLFCLAINPLSFILNKYEIKGYKLKDSFWINHLLYMDDLKLYANSKSNLKILLDSVEIFTDDIGMKFGLEKCNVIHITAGHRSNATGEGHVLLSGDTFKQLAIGQQYKYLGIQESGKINHSDIRDQITKEYFKRIRKLLNTYLNSRFLIKWINTYATPVLLYSFGVINYKINDLKKIDVKTRKMLAMKKAHQQKAEVERLYLPVDEGGRGLINIEYLYKSQIVKYSQYLNNKNDHLIEAIVQHDKNRDKYSILKEAEQIKIELKLTHKDNPTKHEIKEAITKIQNTTWRNKELHGQFPKKVLDQANIDRQLSFRWIKKQQVSPSIESSIFAIQDQTIMTRQHQRDILKEPVDGRCRLCATKDETTQHIISGCEKLAGTYYVKRHNNLVQYVYWCLAKKHKIKVSDLWWKETLTQPQVKENETAKILWEMPVQTDITVTHNRPDLIYIDKNTNKTFLIDISVPSDYNIGAKEIEKLSKYHLLKTEVSRLWDTKTTIIPIVIGATGVVAKSLSKYIDKLDAHIDINILQKQAAIHTSTIISKVLGDTVFAHNRNTTDEITHNTQNNPMSLDTQNTRQSLATIDHDTQNPTQTQNTNQRRGRRRGRGRRGNI

SEQ ID NO: 31893 - protein, 1115 aa, Junonia vestina
MPINDSEPILNHDQIQNNIPSNRERIFYTPEQVEEINQTMQILVNEDQDPLILDFLQVLAEVKETPIEERLVLPKANINKQFIINFNTLNTYLPKLLLTNNTLRDINNIIYAAAKTLIVNNNQTPYTPKTTIKTKKDPPWKVRLQLKIEKLRRESGQLIEIQRGVKTRKMIKIKEKLYAKYNIQNENDHNNILETIKQKIKALAGRIKRYVDMKTRIEQNKLFKQNQHKLYSSLDNNLKKDIKLPNKQNIEEYWTSILSNPVEYNRKAKWIKEIEMSLNEVKTTEIESITEEQVKIAIKKLLNWKSAGIDKIQNYYLKYFTSVHKYLALLFTNIVSGSEVLDDWFTTGQVILIPKNENTDDPKNWRPIACLPTMYKLLTSVLANIMYEHCQENNIMAVEQRGCRRGTRGCKDHLMVNKSILEDAHQSQKNLSMAWIDYQKAFDSVSHEWLLKLLDIYKCPTVIKNFLLLTMPFWRVIMTARGSQESITTDPIHIRRGIFQGDSLSPLLFCLAVNPLSFILNKYELKGYKLKDSFWINHLLYMDDLKLYTNNKSNLKVLLDSVEIFTDDIGMKFGLDKCNVIHITAGHRSNATGEGHILLSGDTFKHLTIGQQYKYLGIQESGKINHSDIKDQITKEYFKRIRKLLNTHLNSRFLIKGINTYAMPILLYSFGVINYKINDLKKIDVKTRKMLATKKAHQQKAEVERIYLPVDEGGRGLINIEYLYKSQIIKYSQYLNSKNDHLIKAIVQHDTNRDKYSILKEADQIKTELKLTQKDTYTKNEIKEAIVKTQNTTWRNKELHGQFPKKVLDQANIDRQLSFRWIKKQHVSPSVESSIFAIQDQAIMTRQHQRDILKEPIDGKCRLCASKDETTQHIISGCEKLAGTYYVKRHNNLVQYVYWCLAKKHKMEVSDLWWKETLTQPQVKENESAKILWEMPVQTDITVTHNRPDLIYIDKNNNKTFLIDISVPSDYNIGAKEIEKLSKYHLLKTEVSRLWNTKTTIIPIVIGATGVVAKSLLKYIEKLDTYIDISILQKQSAIHTSIIISKVLGDTVFVHNTNTTDENTQNTQNNPITLDTPNTRQSIARTDNEAQNPTQTRNINQVRGRRRGRGRRGNI

SEQ ID NO: 31894 - protein, 1200 aa, Junonia zonalis
MSDDKRRKWSNEELMELMFCFFKARSEGPGYIGRLQQLFTERNPNNPKIKKFNGNTLSNQARRILKQNILSQELLNRLQKQAEGVMPINDSEPILNHDQIQNNIPSNRERIFYTPEQVEEINQTMQILVNEDQDPLILDFLQVLAEVKETPIEERLVLPKANINKQFIINFNTLNTYLPKLLLTNNTLRDINNIIYAAAKTLIVNNNQTPYTPKTTIKTKKDPPWKVRLQLKIEKLRRESGQLIEIQRGVKTRKMIKIKEKLYAKYNIQNENDHNNILETIKQKIKALAGRIKRYVDMKTRIEQNKLFKQNQHKLYSSLDNNLKKDIKLPNKQNIEEYWTSILSNPVEYNRKAKWIKEIEMSLNEVKTTEIESITEEQVKIAIKKLLNWKSAGIDKIQNYYLKYFTSVHKYLALLFTNIVSGSEVLDDWFTTGQVILIPKNENTDDPKNWRPIACLPTMYKLLTSVLANIMYEHCQENNIMAVEQRGCRRGTRGCKDHLMVNKSILEDAHQSQKNLSMAWIDYQKAFDSVSHEWILKLLDIYKCPTVIKNFLLLTMPFWRVIMTARGSQESITTDPIHIRRGIFQGDSLSPLLFCLAVNPLSFILNKYELKGYKLKDSFWINHLLYMDDLKLYANNKSNLKVLLDSVEIFTDDIGMKFGLDKCNVIHITAGHRSNTTGEGHILLSGDTFKHLTIGQQYKYLGIQESGKINHSDIRDQITKEYFKRIRKLLNTHLNSRFLIKGINTYAMPILLYSFGVINYKINDLKKIDVKTRKMLATKKAHQQKAEVERIYLPVDEGGRGLINIEYLYKSQIIKYSQYLNSKNDHLIKAIVQHDTNRDKYSILKEADQIKTELKLKQKDTYTKNEIKEAIVKTQNTTWRNKELHGQFPKKVLDQANIDRQLSFRWIKKQHVSPSVESSIFAIQDQAIMTRQHQRDILKEPIDGKCRLCASKDETTQHIISGCEKLAGTYYVKRHNNLVQYVYWCLAKKHKMEVSDLWWKETLTQPQVKENESAKILWEMPVQTDITVTHNRPDLIYIDKNNNKTFLIDISVPSDYNIGAKEIEKLSKYHLLKTEVSRLWNTKTTIIPIVIGATGVVAKSLLKYIEKLDTYIDISILQKQSAIHTSIIISKVLGDTVFVHNTNTTDENTQNTQNNPITLDTPNTRQSIARTDNEAQNPTQTRNINQARGRRRSRGRRGNI

SEQ ID NO: 31895 - protein, 1256 aa, Junonia zonalis
MMMESQFNEIRIGSLPGGERRGTSGADAGRLSMQTVSDSLLNRRAGVGEPENSTADQRNGEGADDALQNRATLTNSAGSSASTTDKMSEDKRRKWSNEELIELMFCFFKARSEGPGYIGRLQQLFTERNPNNPKIKKFNGNTLSNQARRVLKQNVLSQELLNRLQKQAEGVMPVNTSEPILNYDQIQNNIPSNTEHICYTPERAQEINQMTQILVNEDQDPLILEFLQILAEVKETPIEERLVLPKANINKQFIHNLNTLNTFLPKLLLTNNTLREINNIIYAAAKTLIVNNNQIPFTPKTTKKIKKDPPWKVRLQIKTEKLRRELGQLIEIQRGVRTRKMIKIKENLYTKYNIQNENEHNNIVEIIKQKIKALAGRIKRYVDMNTRAEQNKLFKLNEHKLYSNLNININKDIKVPNKQKIEEYWSSILSNPVEYNNEAKWIKEIEASLNEVETSEIESITEEQVKKAVKKLLNWKSAGIDKIQNYYLKYFTSAHKYLASLFTNIVSGAEVLDEWFTTGQVILIPKNENTDDPKNWRPIACLPTMYKLLTSVLANIMYDHCQQNNIIALEQRGCRRGARGCKDHLMVNKSILEDAHQSQKNLSMAWIDYQKAFDSVSHEWLLKLLDIYKCPALIKNFLLLTMPYWRVIMTARGSQESITTDPIHIRRGIFQGDSLSPLLFCLAINPLSFILNKYELKGYKLKDSFWINHLLYMDDLKLYANNKSNLKILLDSVEIFTDDIGMKFGLEKCNVIHITAGHRSNATGEGHILLGGDTFKQLAIGQQYKYLGIQESGKINHSDIRDQITKEYFKRIRKLLNTYLNSRFLIKGINTYATPVLLYSFGVINYKINDLKKIDVKTRKMLAMKKAHQQKAEVERLYLPVDEGGRGLINIEYLYKSQIVKYSQYLNNKNDHLIEAIVQHDKNRDKYSILKEAEQIKIELKLTHKDNPTKHEIKEAITKIQNTTWRNKELHGQFPKKVLDQANIDRQLSFRWIKKQQVSPSIESSIFAIQDQTIMTRQHQRDILKEPVDGRCRLCATKDETTQHIISGCEKLAGTYYVKRHNNLVQYVYWCLAKKHKIKVSDLWWKETLTQPQVNENETAKILWEMPVQTDITVTHNRPDLIYIDKNTNKTFLIDISVPSDYNIGAKEIEKLSKYHLLKTEVSRLWDTKTTIIPIVIGATGVVAKSLSKYIDKLDAHIDINILQKQAAIHTSTIISKVLGDTVFVHNRNTTDEITHNTQNTRQSLAKTDHETQNPT

SEQ ID NO: 31896 - protein, 1254 aa, Junonia litoralis
MQTVSDSLLNRRAGVGEPENSTADQRNGEGADDALQNRVTLTNSAGSSASTTDKMSDDKRRKWSNEELIELMFCFFKARSEGPGYIGRLHQLFTERNPDNPKIKKFNGNTLSNQARRVLKQNVLSQELLNRLQKQAEGVMPINTSEPILNYNQIQNNIPSNTEHICYTPERVQEINQMTQILVNEDQDPLILEFLQVLAEVKETPIEERLVLPKANINKQFIHNLNTLNTFLPKLLLTNNTLREINNIIYAAAKTLIVNNKQIPYTSKTTIKTKKDPPWKIRLQIKTEKLRRELGQFIEIQRGVRTRKMIKIKENLYTKYNIQNENEHNNTVEIIKQKIKALAGRIKRYVDMNTRAEQNKLFKLNEHKLYSNLNININKDIKVPNKQKIEEYWSSILSNPVEYNNEAKWIKEIEASLKEVETSEIESITEEQVKKAVKKLLNWKSAGIDKIQNYYLKYFTSAHKYLASLFTNIVSGAEVLDEWFTTGQVILIPKNENTDDPKNWRPIACLPTMYKLLTSVLANIMYDHCQQNNIIALEQRGCRRGARGCKDHLMVNKSILEDAHQSQKNLSMAWIDYQKAFDSVSHEWLLKLLDIYKCPALIKNFLLLTMPFWRVIMTARGSQESITTDPIHIRRGIFQGDSLSPLLFCLAINPLSFILNKYEIKGYKLKDSFWINHLLYMDDLKLYANNKSNLKILLDSVEIFTDDIGMKFGLEKCNVIHITAGHRSNATGEGHVLLSGDTFKQLAIGQQYKYLGIQESGKINHSDIRDQITKEYFKRIRKLLNTYLNSRFLIKGINTYATPVLLYSFGVINYKINDLKKIDVKTRKMLAMKKAHQQKAEVERLYLPVDEGGRGLINIEYLYKSQIVKYSQYLNNKNDHLIEAIVQHDKNRDKYSILKEAEQIKIELKLTHKDNPTKHEIKEAITKIQNTTWRNKELHGQFPKKVLDQANIDRQLSFRWIKKQQVSPSIESSIFAIQDQTIMTRQHQRDILKEPIDGKCRLCASKDETTQHIISGCEKLAGTYYVKRHNNLVQYVYWCLAKKHKMEVSDLWWKETLTQPQVKENESAKILWEMPVQTDITVTHNRPDLIYIDKNNNKTFLIDISVPSDYNIGAKEIEKLSKYHLLKTEVSRLWNTKTTIIPIVIGATGVVAKSLLKYIEKLDTYIDISILQKQSAIHTSIIISKVLGDTVFVHNTNTTDENTQNTQNNPITLDTPNTRQSIARTDNEAQNPTQTRNINQVRGRRRGRGRRGNI

SEQ ID NO: 31897 - protein, 1115 aa, Junonia evarete
MPINDSEPILNHDQIQNNIPSNRERIFYTPEQVEEINQTMQILVNEDQDPLILDFLQVLAEVKETPIEERLVLPKANINKQFIINFNTLNTYLSKLLLTNNTLRDINNIIYAAAKTLIVNNNQTPYTPKTTIKTKKDPPWKVRLQLKIEKLRRESGQLIEIQRGVKTRKMIKIKEKLYAKYNIQNENDHNNILETIKQKIKALAGRIKRYVDMKTRIEQNKLFKQNQHKLYSSLDNNLKKDIKLPNKQNIEEYWTSILSNPVEYNRKAKWIKEIEMSLNEVKTTEIESITEEQVKIAIKKLLNWKSAGIDKIQNYYLKYFTSVHKYLALLFSNIVSGSEVLDDWFTTGQVILIPKNENTDDPKNWRPIACLPTMYKLLTSVLANIMYEHCQENNIMAVEQRGCRRGTRGCKDHLMVNKSILEDAHQSQKNLSMAWIDYQKAFDSVSHEWILKLLDIYKCPTVIKNFLLLTMPFWRVIMTARGSQESITTDPIHIRRGIFQGDSLSPLLFCLAVNPLSYILNKYELKGYKLKDSFWINHLLYMDDLKLYANNKSNLKVLLDSVEIFTDDIGMKFGLDKCNVIHITAGHRSNTTGEGHILLSGDTFKHLTIGQQYKYLGIQESGKINHSDIRDQITKEYFKRIRKLLNTHLNSRFLIKGINTYAMPILLYSFGVINYKINDLKKIDVKTRKMLATKKAHQQKAEVERIYLPVDEGGRGLINIEYLYKSQIIKYSQYLNSKNDHLIKAIVQHDTNRDKYSILKEADQIKTELKLKQKDTYTKNEIKEAIVKTQNTTWRNKELHGQFPKKVLDQANIDRQLSFRWIKKQHVSPSVESSIFAIQDQAIMTRQHQRDILKEPIDGKCRLCASKDETTQHIISGCEKLAGTYYVKRHNNLVQYVYWCLAKKHKMEVSDLWWKETLTQPQVKENESAKILWEMPVQTDITVTHNRPDLIYIDKNNNKTFLIDISVPSDYNIGAKEIEKLSKYHLLKTEVSRLWNTKTTIIPIVIGATGVVAKSLLKYIEKLDTYIDISILQKQSAIHTSIIISKVLGDTVFVHNTNTTDENTQNTQNNPITLDTPNTRQSIARTDNEAQNPTQTRNINQVRGRRRGRGRRGNI

SEQ ID NO: 31898 - protein, 1220 aa, Emesis temesa
MEELMFCYFKAQFQGPGYIVRLERLFTERNSSNPKIHKFNGNTLSNQARRIIKQNIISQEVLNRIKNRAETELESTQNYTQIEEHIATNTQQDIQITHEHIHTNTTQSIHQSSQQEYTPTQLENINQLTQNINVNESEDPLVLDFLRTLAETKETPISDRYLLPKAKINKQFLQNLHKLNQYLPNLLVINHSLGGVNDIIYATAKTLILNNKQTPFLPKSVRKLKSNPMWKVRITTKLEKCRKEVAQLIEITRGISSRRMLKIKDKLYSKYKIESDNDVRNQIEILTQRIKALAARIKRYDDINNRKEQNRLFSENEHRFYRSLGYSNDNDVNHTQLPSKENIEQFWKSILSSPKQYNKKAKWIEELEISTEEISINDEDNITVELVKIAINKLRNWKTPGIDKIHNYYLKYLTSTHEYLASLFTNIVKGNEVVEEWFSTGQVILIPKNEHTKDPKNWRPIACLPSTYKLLTSVLANKLYRHCHENNIMAVEQRGCRRGARGCKDHLMVNKAILEDAHMSQKHLSMAWVDYQKAFDSISHEWILKILDIYKCPPMIKKFLQNIMPQWRVIMNARGSQTTVTTEPIYIRREIFQGDSLSPLLFCLAINPLSQILNKYELKGYKLRDSVYINHLLYMDDLKIYANHKNNLKVLIDSVEIFTNDIGMSFGLDKCNTIHLKSGFRSSAIGEGHVLLSGETFSQLEIGNTYKYLGVHESGKIEHSVVREQTTKKYFKRIKILLNTHLHSRNLIKGINTYAIPILLYSFGIVNYKISDLRKIDVKTRKLLNIKKAHQQKADVERLYLPITQGGRGLINVENMYKTQIIKYKQYLQTQGDYLIGAVVQHDDNRHKYSITKDFDEIERELSLPQGNTHINKEIKDAIWRTQNHRWRNKQLHGQFPKSVLDQINIDKELSFKWIKKQKISPSLESSIFAIQDQAVMTRQHQRDILKEQVDGKCRLCASKDETTQHIISGCEKLAGTYYIKRHNDLVKYVYWCLAKKHNFKVSDLWWQETLVQPQVKENDTAKILWEIPIQTDVTVVHNRPDLIYVDKIYNKTYLIDITVPSDYNIGAKEIEKLSKYHLLRTEISRLWNTQTTVVPIVVGATGIVAKSIIKYIEKLETPIDISILQKQAAMHTSGIFSKVLGDTIFENITDIHCTQQTQITGHSYEIQITQQPSVTQITQQSKNTQITKQLSDIQSDTHQTFNTQDTPAYTHITQPSTII

SEQ ID NO: 31899 - protein, 1311 aa, Colias croceus
MERQLNNNERIWPLPGGDRRGTSGADAGRDSMQTVSGSLLNRRARAGEPENITADQRGGEGTDDALQSRGSPINFAGSSVETTINNVTSNQDKRRKWSKEEIEELMFCYFKARLGGSGYIGRLEQLFTERNPNNPKIHKFNGNTLSNQARRIIKQNIMSQELLNQIQKNAEGLIEIAVTPDQDVCDQGEENTPLTCNITEQNNHYTEYTIEQAEEIDRLTNNIEVNEDQDPLILNFLQILAEIKETPISDRFILPKAKINKHFLENLNKINNFLPKILIANNSIRDINNTIYAAAKTLIINNNQAPYTPKTSFKTKSDPPWKKRIQNKIEIFRKELGQLIELNRGVNSRRMIKIKDKLYKKHNIQNDNDHKNVEEILKQKIKALAGRIKRYEAINIRKEQNKMFFENEHKLYKNLTGNNFTDIKLPDKKDIELFWSDILSKPIKYNKEAEWIKEVETSSNTIDTIDVEGITEIHVKNAVRKLLNWKSPGIDKIQNYYLKNFTSIYRYLALSFTRIITQKETLEDWFTTGQVILIPKNENTEDPKNWRPIACLPTMYKLLTSVLANILYNHCEGNKIIAIEQRGCRRGARGCKDHLMVNKAILEDAHQSQKNLSMAWIDYQKAFDSVSHEWLLKVLDMYKCPPVIKQFLEQVMPSWKVIMTARGTQNSITTEPIYIRRGIFQGDSLSPLLFCLAVNPLSFVLNKYETKGYNLKDSVCINHLLYMDDLKIYANNRYNLKVLLDSVEIITKDIGMRFGLDKCNILHINAGHRRSAIGEGHILLSGETIEHLAIGDRYKYLGVHESGKIEHSVIRDQITKEYFKRIKKLLNTHLNSRYLIKGINTYAIPVLLYSFGVINFKINDLKKIDIKTRKLLAIKKAHQQKADVERLYIPVAQGGRGLLNVEYMYKTQIIKYKQYLESKTDNLIKAIADHDIHRNKYSIFKEAQEIERQLHLMQQNTYTDKQIKESITKKHNEIWRSKQLHGQFPKKVLDQTNIDTELSFKWMKKQKISPRIEAEIFAIQDQAVMTRQHKRDILKEPIDGKCRLCACKDETAQHIISGCEKLAGTYYVKRHNNLVLYVYWCLAKKHKLADSNLWWKETLVQPQVKENDTAKILWEMPVQTDVTITHNRPDLIYVDKINNKTYLIDITVPIDYNIGPKEIEKLSKYQLLKTEVSRLWKTQTTVIPIVIGATGVVAKNIIKYIDKLDTFIDISILQKQAAIHSSIILSKVLGDNVFINAAVNHNTQSIGLSTHTSQPMNIQHTSQTDEPDNRLEPHQISTDEQTINIAPDSISTVHAPRNQEQNKRRRRRLNE

SEQ ID NO: 31900 - protein, 954 aa, Anthocharis cardamines
MIKIKEKLYKKYNINNENDHKNTEEILKQKIKALAGRIKRYEDINIRKEQNSLFTENEHRLYRSLGGNSFKEIKLPNKDKLEEFWSSILSNPIQYNHEAKWIKEVDISLNQVNTTNIEEITEEQIKIAVRKLINWKSPGIDKIQNYYIKYLTSTHSYLAKLFTKIVTHTECLEEWFTTGQVILIPKNEHTEDPKNWRPIACLPTMYKLLTSVLANILYNHCHENNIMAIEQRGCRRGARGCKDHLMVNKAILEDAHQCQKNLSMAWIDYQKAFDSVSHEWLLKMLDIYKCPPLIKRFLATVMPSWKVIMTARGTQTSLTTEPIFVKRGIFQGDSLSPLLFCLAINPLSFILNKYEMKGYKLKDSFWINHLLYMDDLKVYANNKYNLKVLLDSVEIFTNDIGMRFGLDKCNTIHISSGHRSSAIGEGHILLSGDEIKQLAIGEKYKYLGVHESGKIEHSVIRDQITKEYFKRIKKLLNTHLNSRNLIKGINTYAIPVLLYSFGVINYKNSDLKNIDIKTRKLLAIKKVHQQKAEVERLYLPIPQGGRGLLNIEFMYKTQIVKYKQYLKAESDDLIKVIIKHDMQKEKYSIINEARTIENQLHLVQGKIHTNKEIKESIIIRNNEIWRSKQLHGQFPKKVLDQANIDVELSFMWIKKQKISPSIESSIFAIQDQAVMTRQHRRDILKESIDGKCRLCGSKDETTQHIISGCEKLAGTYYIKRHNNLVQYIYWCLAKKHNIEVSKIWWKEHLTQLQVKENETTKILWEIPVQTDVTVTHNRPDLIYVDKTNNKTYLIDITVPSDYNIGAKEIEKLSKYHLLKTEISRLWNTQTTVIPIVIGATGIVAKNIKKYIDQLDTFIDISILQKQAAIHTSIILSKVLGDTVFVNNPQNHDTQIIDQSSDRTQVSNITFTSHTQQTSISENLTNTQNTTHTTHSQNIQEQSNNQNSCRRRRKR

SEQ ID NO: 31901 - protein, 1301 aa, Anthocharis cardamines
MKRQFNDLRTGPLPGGERRGTSGADAGRDSMQTVSGSLLNRRARAGGPENITADLGGEGTDGALQSRASPTDSVGSSVSTTNNAISDDRRRKWSTEELQELMFCYFKARAGGPGYIGRLQELFRERNPYQPKIHKFNGNTLSNQARRVLKHNVLSQELLDRIRKQAEGITDVIENTEQNLIVEEEITTQPTTTHNTLQNTQHIEYTTEQVETIDQLTQNIEVNEEQDPLILNFLQILAETKETLISQRPFLPKAKINRHFLENLHILNRYLPNILITNNTLRDINNIIYAVAKTLIITNNQSPYEPKSVFKSKSDPPWKRRIQVKIERFRKELGQLIELSRGINTRRMIKIKEKLYKKYNINNVNDHKNTEEILKQKIKALAGRIKRYEDINIRKEQNSLFTENEHRLYRSLGGNSFKEIKLPNKDKLEEFWSSILSNPIQYNHEAKWIKEVDISLNQVNTTNIEEITEEQIKIAVRKLINWKSPGIDKIQNYYIKYLTSTHSYLAKLFTKIVTHTESLEEWFTTGQVILIPKNEHTEDPKNWRPIACLPTMYKLLTSVLANILYNHCHENNIMAIEQRGCRRGARGCKDHLMVNKAILEDAHQCQKNLSMAWIDYQKAFDSVSHEWLLKMLDIYKCPPLIKRFLATVMPSWKVIMTARGTQTSLTTEPIFVKRGILQGDSLSPLLFCLAINPLSFILNKYEMKGYKLKDSFWINHLLYMDDLKVYANNKYNLKVLLDSVEIFTNDIGMRFGLDKCNTIHISSGHRRSAIGEGHILLSGDEIKQLAIGEKYKYLGVHESGKIEHSVIRDQITKEYFKRIKKLLNTHLNSRNLIKGINTYAIPVLLYSFGVINYKNSDLKNIDIKTRKLLAIKKVHQQKAEVERLYLPITQGGRGLLNVEFMYKTQIVKYKQYLKAESDDLIKVIIKHDMQKEKYSIINEARTIENQLHLVQGKIHTNKEIKESIIIRNNEIWRSKQLHGQFPKKVLDQANIDVELSFMWIKKQKISPSIESSIFAIQDQAVMTRQHRRDILKESIDGKCRLCGSKDETTQHIISGCEKLAGTYYIKRHNNLVQYIYWCLAKKHNIEVSKIWWKEHLTQPQVKENETTKILWEIPVQTDVTVTHNRPDLIYVDKTNNKTYLIDITVPSDYNIGAKEIEKLSKYHLLKTEISRLWNTQATVIPIVIGATGIVAKNIKKYIDQLDTFIDISILQKQAAIHTSIILSKVLGDTVFVNNPQNHDTQIIDQSSDRTQVSNITFTSHTQQTSISENLTNTQNTTHTTHSQNIQEQSNNQNSCRRRRKR

SEQ ID NO: 31902 - protein, 1096 aa, Udranomia kikkawai
MMMMMIINDDRRRKWSTEELQELMFCYFKARSSGGGYIDKLHRLFTERNPNNPKIHKFNGNTLSNQARRIIKQNVLSQELLDRIKKDAENIIEVIDNSEQNILQEEEENTCIAQTYTPQNTTQNTRISQTHTPQNIHHTEYTTEQIHTIDELTRNIVINEDQDPVILNFLQILIETRETPIAERPFLPKAKINRNFIQNLNTLNRYLPNLLVTDNSLRNINNIIYATAKTLIINNNQSPYVPKNTFKSKTDPPWKKRIRNKIEIFRKELGQLIEIDKGINTRKMVKIKDKIYTKYNIQNINDHKNTEEILKQKIKALAGRIKRYEDINSKKEQNSLFSENEHKLYRSLGKDGFKDIKLPSKEIVEGFWSSILSNPVQYNDNANWIKEVESSTDNINTTDINDISEDQIKYAIRKLSNWKSPGIDKIQNYYLKYLTSVHSYLATLFTKIVTHKETLEEWFTTGQVILIPKNVDTEDPKNWRPIACLPTMYKLLTSVLANILYNHCHQNNIMAIEQRGCKRGARGCKDHLMVNKAILEDAHQSQKNLSMAWIDYQKAFDSVSHEWLTKVLDVYKCPPMIKTFLKLVMPSWRVIMTARGTQSSFTTEPIYIRRGIFQGDSLSPLLFCLAINPLSFVLNKYEMKGYKLKDSIWVNHLLYMDDLKIYTNNRHNLKVLLDSVEIFTNDIGMRFGLDKCNVIHISSGHRSSVVGEGHVLLDGEKIKQLAIGDTYKYLGIHESGKIEHSVIRDQISKEYFRRLKQLLNTHLNSRYLIKGINTYAIPVLLYSFGIINYKNTDLKRIDTKTRKLLAINQAHRQKAEVERLYLPVTQGGRGLINVEWMYKTQIVKYKQYLKAESDDLIKAIVEHDIHKDKYSIINEAQEIENELHLGRENIHTDKDIKKAIVKKSSEIWRSKQLHGQFIKKVLDQTNIDTELSFKWIKKQQISPNIESSIFAIQDQAVMTRQHRRDILKEPVDGKCRLCNSKDETTQHIISGCEKLAGNYYVKRHNNLVQYVYWCLAKKHKIEVSNLWWKETLTQPHVKENESAKILWEMPVQTDQTITHNRPDLIYVDKTNNKNIFNRLAAPAHFVSPLNHFSVPC

SEQ ID NO: 31903 - protein, 1301 aa, Anthocharis cardamines
MKRQFNDLRTGPLPGGERRGTSGADAGRDSMQTVSGSLLNRRARAGGPENITADLGGEGTDGALQSRASPTDSVGSSVSTTNNAISDDRRRKWSTEELQELMFCHFKARTGGPGYIGRLQELFRERNPYQPKIHKFNGNTLSNQARRVLKHNVLSQELLDRISKQAEGITDVIENTEQNLIVEEEITTQPTTTHNTLQNTQHIEYTTEQVETIDQLTQNIEVNEEQDPLILNFLQILAETKETLISQRPFLPKAKINRHFLENLHILNRYLPNILITNNTLRDINNIIYAVAKTLIITNNQSPYEPKSVFKSKSDPPWKRRIQVKIERFRKELGQLIELSRGINTRRMIKIKEKLYKKYNINNENDHKNTEEILKQKIKALAGRIKRYEDINIRKEQNSLFTENEHRLYRSLGGNSFKEIKLPNKDKLEEFWSSILSNPIQYNHEAKWIKEVDISLNQVNTTNIEEITEEQIKIAVRKLINWKSPGIDKIQNYYIKYLTSTHSYLAKLFTKIVTHTESLEEWFTTGQVILIPKNEHTEDPKNWRPIACLPTMYKLLTSVLANILYNHCHENNIMAIEQRGCRRGARGCKDHLMVNKAILEDAHQCQKNLSMAWIDYQKAFDSVSHEWLLKMLDIYKCPPLIKRFLATVMPSWKVIMTARGTQTSLTTEPIFVKRGIFQGDSLSPLLFCLAINPLSFILNKYEMKGYKLKDSFWINHLLYMDDLKVYANNKYNLKVLLDSVEIFTNDIGMRFGLDKCNTIHISSGHRSSAIGEGHILLSGDEIKQLAIGEKYKYLGVHESGKIEHSVIRDQITKEYFKRIKKLLNTHLNSRNLIKGINTYAIPVLLYSFGVINYKNSDLKNIDIKTRKLLAIKKVHQQKAEVERLYLPITQGGRGLLNVEFMYKTQIVKYKQYLKAESDDLIKVIIKHDMQKEKYSIINEARTIENQLHLVQGKIHTNKEIKESIIIRNNEIWRSKQLHGQFPKKVLDQANIDVELSFMWIKKQKISPSIESSIFAIQDQAVMTRQHRRDILKESIDGKCRLCGSKDETTQHIISGCEKLAGTYYIKRHNNLVQYIYWCLAKKHNIEVSKIWWKEHLTQPQVKENETTKILWEIPVQTDVTVTHNRPDLIYVDKTNNKTYLIDITVPSDYNIGAKEIEKLSKYHLLKTEISRLWNTQTTVIPIVIGATGIVAKNIKKYIDQLDTFIDISILQKQAAIHTSIILSKVLGDTVFVNNPQNHDTQIIDQSSDRTQVSNITFTSHTQQTSISENLTNTQNTTHTTHSQNIQEQSNNQNSCRRRRKR

SEQ ID NO: 31904 - protein, 1303 aa, Anthocharis cardamines
MKRQFNDLRTGPLPGGERRGTSGADAGRDSMQTVSGSLLNRRARAGGPENITADLGGEGTDGALQSRASPTDSVGSSVSTTNNAISDDRRRKWSTEELQELMFCYFKARAGGPGYIGRLQELFRERNPYQPKIHKFNGNTLSNQARRLLKHNVLSQELLDRIRKQAEGITDVLVIENTEQNLIVEEEITTQPTITHNTLQNTQHIEYTTEQVETIDQLTQNIEVNEEQDPLILNFLQILAETKETLISQRPFLPKAKINRHFLENLHILNRYLPNILITNNTLRDINNIIYAVAKTLIITNNQSPYEPKSVFKSKSDPPWKRRIQVKIERFRKELGQLIELSRGINTRRMIKIKEKLYIKYNINNENDHKNTEEILKQKIKALAGRIKRYEDINIRKEQNSLFAENEHRLYRSLRGNSSKEIKLPNKDKLEEFWSSILSNPIQYNHEAKWIEEVDISLNQVNTTNIEDITEEQIKIAVRKLINWKSPGIDKIQNYYIKYLTSAHSYLAKLFTKIVTHTESLEEWFTTGQVILIPKNEHTEDPKNWRSIACLPTMYKLLTSVLANILYNHCHENNIMAIEQRGCRRGARGCKDHLMVNKAILEDAHQCQKNLSMAWIDYQKAFDSVSHEWLLKMLDIYKCPPLIKRFLATVMPSWKVIMTARGTQTSLTTEPIFVKRGIFQGDSLSPLLFCLAINPLSFILNKYEMKGYKLKDSFWINHLLYMDDLKVYANNKYNLKVLLDSVEIFTNDIGMRFGLDKCNTIHISSGHRSSAIGEGHILLSGDEIKQLAIGEKYKYLGVHESGKIEHSVIRDQITKEYFKRIKKLLNTHLNSRNLIKGINTYAIPVLLYSFGVINYKNSDLKNIDIKTRKLLAIKKVHQQKAEVERLYLPITQGGRGLLNVEFMYKTQIVKYKQYLKAESDDLIKVIITHDMQKEKYSIINEARAIENQLHLVQGKIHTNKEIKESIIVRNNEIWRSKQLHGQFPKKVLDQANIDVELSFMWIKKQIISPSIESSIFAIQDQAVMTRQHRRDILKESIDGKCRLCGSKDETTQHIISGCEKLAGTYYIKRHNNLVQYIYWCLAKKHNIEVSKIWWKEHLTQPQVKENETTKILWEIPVQTDVTVTHNRPDLIYVGKTNNKTYLIDITVPSDYNIGAKEIEKLSKYHLLKTEISRLWNTQTTVIPIVIGATGIVAKNIKKYIDQLDTFIDISILQKQAAIHTSIILSKVLGDTVFVNNPQNHDTQIIDQSSDRTQVSNITFTSHTQQTSISENLTNTQDTTHTTHSQNIQEQSNNQNSCRRRRKR

SEQ ID NO: 31905 - protein, 1312 aa, Colias croceus
MERQLNNNERIWPLPGGDRRGTSGADAGRDSMQTVSGSLLNRRARAGEPENITADQRGGEGTDDALQSRGSPTNFAGSSVETTINNVTSNQDKRRKWSKEEIEELMFCYFKARLGGSGYIGRLEQLFTERNPNNPKIHKFNGNTLSNQARRIIKQNIMSQELLNQIQKNAEGLIDIAVTPDQDVCDQGEENTPLTCNITEQNNHYTEYTIEQAEEIDRLTNNIEVNEDQDPLILNFLQILAEIKETPISDRFILPKAKINKHFLENLNKINNFLPKILIANNSIRDINNTIYAAAKTLIINNNQVPYTPKTSFKTKSDPPWKKRIQNKIEIFRKELGQLIELNRGVNSRRMIKIKDKLYKKHNIQNDNDHKNVEEILKQKIKALAGRIKRYEAINIRKEQNKMFFENEHKLYKNLAGNNYFTDIKLPDKKDIELFWSDILSKPIKYNKEAEWIKEVETSSNTIDTIDVEGITEIHVKNAVRKLLNWKSPGIDKIQNYYLKNFTSIYRYLALSFTRIITQKETLEDWFTTGQVILIPKNENTEDPKNWRPIACLPTMYKLLTSVLANILYNHCEGNKIIAIEQRGCRRGARGCKDHLMVNKAILEDAHQSQKNLSMAWIDYQKAFDSVSHEWLLKVLDMYKCPPVIKQFLEQVMPSWKVIMTARGTQNSITTEPIYIRRGIFQGDSLSPLLFCLAVNPLSFVLNKYETKGYNLKDSVCINHLLYMDDLKIYANNRYNLKVLLDSVEIITKDIGMRFGLDKCNILHINAGHRRSAIGEGHILLSGETIEHLAIGDRYKYLGVHESGKIEHSDIRDQITKEYFKRIKKLLNTHLNSRYLIKGINTYAIPVLLYSFGVINFKINDLKKIDIKTRKLLAIKKAHQQKADVERLYIPVAQGGRGLLNVEYMYKTQIIKYKQYLESKTDNLIKAIADHDIHRNKYSIFKEAQEIERQLHLMQQNTYTDKQIKESITKKHNEIWRSKQSHGQFPKKVLDQTNIDTELSFKWMKKQKISPRIEAEIFAIQDQAVMTRQHKRDILKEPIDGKCRLCACKDETAQHIISGCEKLAGTYYVKRHNNLVLYVYWCLAKKHKLADSNLWWKETLVQPQVKENDTAKILWEMPVQTDVTITHNRPDLIYVDKINNKTYLIDITVPIDYNIGPKEIEKLSKYQLLKTEVSRLWKTQTTVIPIVIGATGVVAKNIIKYIDKLDTFIDISILQKQAAIHSSIILSKVLGDNVFINAAVNHNSQSIGLSTHTSQPMNIQHTSQTDEPDNRLEPHQISTDEQTINIAPDSISTVHAPRNQEQNKRRRRRLNE

SEQ ID NO: 31906 - protein, 1206 aa, Colias croceus
MFCYFKARLGGSGYIGRLEQLFTERNPNNPKIHKFNGNTLSNQARRIIKQNIMSQELLNQIQKNAEGLIEIAVTPDQDVCDQGEENTPLTCNITEQNNHYTEYTIEQAEEIDRLTNNIEVNEDQDPLILNFLQILAEIKETPISDRFILPKAKINKHFLENLNKINNFLPKILIANNSIRDINNTIYAAAKTLIINNNQVPYTPKTSFKTKSDPPWKKRIQNKIEIFRKELGQLIELNRGVNRRRMIKIKDKLYKKHNIQNDNDHKNVEEILKQKIKALAGRIKRYEAINIRKEQNKMFFENEHKLYKNLAGNNFTDIKLPDKKDIELFWSDILSKPIKYNKEAEWIKEVETSSNTIDTIDVEGITEIHVKNAVRKLLNWKSPGIDKIQNYYLKNFTSIYRYLALSFTRIITQKETLEDWFTTGQVILIPKNENTEDPKNWRPIACLPTMYKLLTSVLANILYNHCEDNKIIAIEQRGCRRGARGCKDHLMVNKAILEDAHQSQKNLSMAWIDYQKAFDSVSHEWLLKVLDMYKCPPVIKQFLEQVMPSWKVIMTARGTQNSITTEPIYIRRGIFQGDSLSPLLFCLAVNPLSFVLNKYETKGYNLKDSVCINHLLYMDDLKIYANNRYNLKVLLDSVEIITKDIGMRFGLDKCNILHINAGHRRSAIGEGHILMSGETIEHLAIGDRYKYLGVHESGKIEHSVIRDQITKEYFKRIKKLLNTHLNSRYLIKGINTYAIPVLLYSFGVINFKINDLKKIDIKTRKLLAIKKAHQQKADVERLYIPVAQGGRGLLNVEYMYKTQIIKYKQYLESKTDNLIKAIADHDIHRNKYSIFKEAQEIERQLHLMQQNTYTDKQIKESITKKYNEIWRSKQLHGQFPKKVLDQTNIDTELSFKWMKKQKISPRIEAEIFAIQDQTVMTRQHKRDILKEPIDGKCRLCACKDETAQHIISGCEKLAGTYYVKRHNNLVLYVYWCLAKKHKLADSNLWWKETLVQPQVKENDTAKILWEMPVQTDVTITHNRPDLIYVDKINNKTYLIDITVPIDYNIGPKEIEKLSKYQLLKTEVSRLWKTQTTVIPIVIGATGVVAKNIIKYIDKLDTFIDISILQKQAAIHSSIILSKVLGDNVFINAAVNHNTQSIGLSTHTSQPMNIQHTSQTDEPDNRLEPHQISTDEQTINIAPDSISTVHATRNQEQNKRRRRRLNE

SEQ ID NO: 31907 - protein, 1374 aa, Lymantria dispar
METDNNETRIGPLPRGDRLGTSGADAGRGSMRTVSGSLLNRRAGVGRTEDVTADQRDGEGADDALQSRASPTDSVGSSASTTIGNEDRRRKWSNKETEELLYCYFKARMAGPGYIRKLYTLFKDRNPNNPKVRKFDGNKLSNQARRIIKQNVISQEIQDRIKRQAEGTLTLAPTSTVYASNDNEHTDTSPNVHAITTSTNTQQTHNSAEQAATIDELTSNIEVNEDQDPLILQFLQILAETKETTLADRLFLPKAKINKQFIDNLHTINKYIPNLLITNTDLISINNIIYATAKTLIINNNQTPFMPKNTIKPKTDPPWKKRIANKIEKLRKELGQFIEVKRGITTRRMINIKNKLYEKYNIKNENDHNNTAETIKQKIKALAARIKRYEEMSGRKEHNQLFAENEHKLYRSLGNNNNTDIKLPTKEGIEEFWTSILSKPTKYNTQANWIKEVEESTNTIDTTNIEEITIEQVKTAVRKLLNWKTPGVDKIQNYYLKYLTSTHKYLSLLFTKIITGQETLEEWFTTGQVILIPKNSNTEEPKNWRPIACLSSIYKLLTSVLADILYSHCDSNNIMAIEQRGCRRGARGCKDHLMVNKAILEDAHQAQKNLSMAWIDYQKAFDTVSHEWLLKVLDIYKCPSVIKSFLKWSMPAWKVIMTARGSHESITTEPIYIKRGIFQGDSLSPLLFCLAINPISFILNKYELKGYKLKDSFWINHLVYMDDLKIYANNKSNLKVLLDSVEIFTSDIGMRFGLDKCNVIHIRAGHRSTVTGEGHILLSQEKFKELEVGNSYKYLGIHESGKIEHSKIREQITKEYIKRVKKLIQTHLNARNIIKGINTYAIPVLLYSFGIINYKITDLKKIDTKTRKLLAIKKAHQQKAEVERLYLPIAQGGRGLINIEYMYKTQIVKYKQYLKTEFDDMIKAIVQHDINRDKYSIIKEAREIEQELHLPQDNLHTDTEIKQAIVKTQNTSWRAKQLHGQFPKKVLDQANINTELSFKWINKQHISPGIVSAVFAIQDQAVMTLQHQRDILRTAVDGKCRLCRVKDETAQHIISGCEKLAGTYYVKRHNNLVQYVYWCLAKKHKIEVSPLWWKETMIQPQVKENDTTKIMWETPVQTDITVTHNRPDLIYIDKINNKTFLIDISVPSDYNIGAKEIEKLSKYHLLKTEISRLWNTQTAVIPIVVGATGVVAKSINAYLEKLNTTIDITILQKQAAIHSTTIISKVLGDTVFVNNANTQEEPTQNEQQTLNTQHSENTQLTANTQDTNTTPDIPETVSGERGRRGNQKAHTQNTANTQITHTTQEKATHTEQTRNKQRIQTHDRAGQEEEAAEPHQQHAHNTQEIEWGYRYLFSRRQRDGVFIKIRQKSSENFN

SEQ ID NO: 31908 - protein, 1341 aa, Apodemia walkeri
MKRQRNSIRLGPLPGGERRGTSGADAGRDSMRTVSGSLLNRRARVGGPEDTTAEYRGGVGTDDALRSGASTPIESTAGSSGETIENSSDDRRRKWSTEEEKELMFCFFKAQSQGPGYINRLYTLFKDRNPTNAKIHKFNGNTLSNQARRIIKQNVLSQELLNRIKDEAEGRVAENTEMTSDTTETNLNTDTNITQHNFHIITQHDSNINTQHTPNIDTQPSVDQAHLLDQLTRNITVTEDQDPLILNFLQVLAETKETEIKDRLLLPKAKLNRHFIQNLHTLDNYIPNLLVHTNTLRELNDILYATAKTLILSNKQIQFVPKHVIKVITDPPWKKRIKYRIEKIRKELGQLIEIGRGVNSRRLTNIKTKLYNKYNIQQENERSNTVEILKQKIKALAGRIKRYEEASQRKNQNRLFNENEHRLYRSLGNNSTTHDIKLPSKDSVEEFWKSILSNPIEYNKDAKWIEEIESSSDGINTVESQEITEEQVKIAITKLHNWKTPGIDKIHNYYLKYLTSTHKYLATVFSNIIGGREQFEEWFTTGQVILIPKNEDTEDAKNWRPIACLPSIYKLLTSVLANQLHKHCQENNIMAIEQRGCRRGVRGCKDHLMINKAILEDSHQSQKNLSMAWIDYQKAFDSVSHEWLLRILDIYKCPPTIRAFLKIAMPTWKVIMTARGTQESLTTEPIYIKRGIFQGDSLSPLLFCLAINPVSYILSKYEMKGYKLKDSFWVNHLLYMDDLKVYANTRHNLKVLLDSIEIFTDDIGMRFGLSKCNTLHIRSGHRSNTSGDGHVLLSGDTFEQLGIDKTYKYLGIHESGKIEHIKIREQVTKEYFRRIKQLLNTHLNSRNIIKGINTYAIPVLLYSFGIINYKSSDLKTIDIKTRKLLAIKKAQQQKADIERLYLPIVVGGRGLINVENMYKMQILKYKQYLERESDDLIKVIVQHDKNRDKYSIFKEAKDIERELQMTPHNTHTDKEIKQAIVEKQKAKWRFKQLHGQFPKAVLDQANIDTENSFKWMRKQQISPSIESAIFAMQDQAVMTRQHQRDILKENTDGKCRLCASKDETTQHIISGCEKLAGTYYVKRHNSLVQYVHWCLAKKHNIEVSNLWWKESLTQPQIKENDQTKIMWEIPIQTDVTVTHNRPDLIYVDKSNNTTFLIDIAVPSDYNIGAKEIEKLSKYHLLKTEIRRLWNTQTKVIPIVVGATGVISKSLQRYIDQMNTKIDITILQKQAAIHTTTILSKVLGDTIFVNSTPNTLEPASETQQTSHIYTQQALHAIATPQTLDTQITPNTQEHLTDTQQTSHTQTSQHSSDTQYSSNTPNTQNQTPNIQSLTRTRRRARKR

SEQ ID NO: 31909 - protein, 1317 aa, Arctia plantaginis
MENFNIGIRIGSLPGGDRRGTSGAGAGRDSIRTTSGSLLNRRARVGDLENVTAEQRGGEGADDALQSRVSPVDSVGSSTTTTNNAISDDRRRKWSTEELKELMFCYFKARSEGPGYIGRLQTLYTERNPNNDKIHKFNGNTLSNQARRVIKQNVISQELLDLIQKQAEGNTVTENPEHISHATQERHETPSSIHNTLQAIPHTQYSSEQTEAIDQLTNNIEVNDDQDPLVLHYLQILAETKETPLTERLLLPKAKINKQFIQNLNTLDKFLPNLLVTNTSLREINNIIYAAAKTLILNNNQTPYTPTHTIKPKYDPPWKKRIRNKIEKFRKELGQLIEIERGISTRRMRNIKEKLYSKYNIQNENDHQNAAEILKQKIKALAGRIKRYDDINSRKEQNSLFKENEHRFYKTLGNRNTSKDIKIPSREGVEEFWTSILSKPSQYNTEAKWIKEVETLTSEVSTIDIEEIAEDEVKSAIRKLQNWKAPGIDKIQNYYLKYFISIHPYLSSLFTNIVAGTEALEDWFTTGKVILIPKNENTEEPKNWRPLACLPSIYKLLTSVLANILYSHCDQNNIMAVEQRGCRRGTRGCKDHLMVNKAILEDAHQTQKNLNMAWIDYQKAFDSVSHEWLLKILDVYKCPSIIKRFLKLVMPSWRVIMTARGSQDSITTEPITIKRGIFQGDSLSPLLFCLAINPLSFILNKYEMKGYKLKDSFWINHLIYMDDLKIYANNGSNLKILLDSVEIFTRDIGMSFGLDKCNVIHIRSGYRSSVRGEGHILLSGEKFQDLAIGDRYKYLGIHESGKIEHSVIRDQITKEYFKRIKKLLKTHLNSRSIVKGINTYAIPVLLYSFGVINYKISDLKKVDVKTRKLLAMNKAHQQKAEVKRLYLPLTEGGRGLINVEYMYKTQIVKYKQYLKTERDHLIQAIVQHDSHRDKYSIIKEAQEIEEELHLTAGNTHTDDEIKKAIIKTHNAVWRSKQLHGQFPHKVLDQANIDAELSFKWIKKQQISPKLESSLFAIQDQAIMTRQHQRDILKESVDGKCRICACKDETTQHIISGCEKLAGTYYVKRHNNLVQYVYWCLAKKHKIEISDLWWKETLIQPQVKENESTKILWEMPVQTDITVTHNRPDLIYIDKTSNKTYLIDITVPSDYNIGAKEIEKLSKYHLLKTEVTRLWNTQTTVIPIVIGATGIVAKSIKKYIDKLGANIDITILQKQAAIHTVTILSKVLGDTVFIHSTQDQHTQNTQESQNMHQSQDPQPQDSQQSPDIPQSSDTLDPLNIAHTLDTQHTLSIRRVRGRGRGRGRRRAANNTHHTTDTH

SEQ ID NO: 31910 - protein, 1300 aa, Ochropleura plecta
MERQRNSTRIGPLPGGERRGTSGADAGRDSIRTVSGSLLNRRARVGGPEDTTAEQGDGVDTDDALRSRASTPIENSAGSSRETIQDSNEDRRRQWSTEELRELMYCFFKAQSQGPGYINRLFTLFTDRNPTNPKIHKFNGNTLSNQARRVIKQNVLSQELLNCIRDEAEGRVTESTEITNSMTGPNSTTDAPIIQRDLHTNTQHETNTNTQHSLEQVELIDQLTRNVTVTEDQDPLILSFLQVLAETKETPIKDRYLLPKAKINRHFVQNLHALNSYLPNLLITTDTLRELNNIIYAAAKTLILNNKQIPFIPKNVIKPISDPPWKKRIKNKIDKYRKEVGQLIEIGRGVNTRRMNNIKTKLNNKYNIQSENERNNTEEILKQKIKALAGRIKRFEEISNRKEQNRLFNENEHRLYRSLGNNSTTHDIKLPSKESVEEFWKSILSKPIQYNKDAKWIEELEITSDKINTAELQEITVEQVKIAIRKLHNWKTPGIDKIHNYYLKYLTSTHQYLATAFTNIIEGKEQLEEWFTLGQVILIPKNENTENAQNWRPIACLPSIYNLLTSILANQLYDHCQENNIMAIEQRGCRRGARGCKDHLMVNKAILEDAHQSAKNLSMAWIDYQKAFDSVSHEWLLRILEIYRCPPIIKTFLEIAMPTWKVIMSARGTNEFLTTDPIYIKRGIFQGDSLSPLLFCLAINPISLILSKYEMKGYKLKDSFWINHLLYMDDLKIYANNNSNLKVLLDSVEIFTNDIGMSFGLNKCNTIQIRSGHVNNTTGEGHILISGDTFEQLGIDRTYKYLGIHESGKIEHSKIREQVTKEYFKRTKKLLNTHLSSRNIIKGINTYAVPVLLYSFGIINYKNSDLKAIDTKTRKLLAIKKAQKQKADVERLYLPIVEGGRGLINAENMYKTQILKYKQYLERENDDLIKVIVQHDKNRDKYSIIKEAQEIERELQLTQNNIHTDKEIKEAIVKKQKEKWRNKQLHGQFPKAVLDQTNIDKENSFKWLKKQQISPSIESAIFAIQDQAINTRQHQRDIFKVNIDGKCRLCVNKDETTQHIISGCEKLAGTYYVKRHNNLVQYVHWCLAKKHNIDVSSLWWKEALTQPQVKENEQAKIMWEIPIQTDVTVTHNRPDLIYVDKTKNLTFLIDIAVPSDYNIGAKEIEKLSKYHLLKTEIRRLWNTQTAVIPIVIGATGIISKSLQRYIDQLNTKIDITVLQKQAAIHTTIILSKVLGDTVFVHGTPRTQEPTTDTQHTVDSQQSSITQHLSSSRTPNTPMNSSTTQSSTNIRRRRGRRDRYE

SEQ ID NO: 31911 - protein, 1372 aa, Lymantria dispar
METDNNETRIGPLPRGYRLGTSVADAGRGSMRTVSGSLLNRRAGVGRTEDVTADQRGGEGADDALQSRASPTDSVGSSASTTIGNEDRRRKWSNKETEELLYCYFKARMAGPGYIRKLYTLFKDRNPNNPKVRKFDGNKLSNQARRIIKQNVISQEIQERIKRQAEGTLTLAPTSTVYASNDNEHSDTSLNIHAITTSTSYASNDNEHTDTSPNVHAITTSTNTQQTHNSVEQAATIDELTSNIEVNEDQDPLILQFLQILAETKETTLADRLFLPKAKINKQFIDNLHTINKYIPNLLITNNDLISINHIIYATAKTLIINNNQTPFMPKNTIKPKTDPPWKKRIANKIEKLRKELGQLIEVKRGITTRKMINIKNKLYEKYNIKNENDHNNTAETIKQKIKALAARIKRYEEMSGRKEHNQLFFENEHKLYRSLGNNNNTDIKLPTKEGIEEFWTSILSKPTKYNTQANWIKEVEESTNTIDTTNIEEITIEQVKTAVRKLLNWKTPGVDKIQNYYLKYLTSTHKYLSLLFTKIITGQETLEEWFTTGQVILIPKNSNTEEPKNWRPIACLPSIYKLLTSVLADILYSHCDSNNIMAIEQRGCRRGARGCKDHLMVNKAILEDAHQAQKNLSMAWIDYQKAFDTVSHEWLLKVLDIYKCPPVIKSFLKWSMPAWKVIMTARGSHESITTEPIYIKRGIFQGDSLSPLLFCLAINPISFILNKYELKGYKLKDSFWINHLVYMDDLKIYANNKSNLKVLLDSVEIFTSDIGMRFGLDKCNVIHIRAGHRSTVTGKGHILLSQEKFKELEVGNSYKYLGIHESGKIEHSKIREQITKEYIKRVKKLIQTHLNARNIIKGINTYAIPVLLYSFGIINYKITDLKKIDTKTRKLLAIKKAHQQKAEVERLYLPIAQGGRGLINIEYMYKTQIVKYKQYLKTEFDDMIKAIVQHDINRDKYSIIKEAREIEQELHLPQDNLHTDTEIKQAIVKTQNTSWRAKQLHGQFPKKVLDQANINTELSFKWINKQHISPGIVSAVFAIQDQAVMTLQHQRDILRTAVDGKCRLCRVKDETAQHIISGCEKLAGTYYVKRHNNLVQYVYWCLAKKHKIEVSPLWWKETMIQPQVKENDTTKIMWETPVQTDITVTHNRPDLIYIDKINNKTFLIDISVPSDYNIGAKEIEKLSKYHLLKTEISRLWNTQTAVIPIVVGATGVVAKSINTYLEKLNTTIDITILQKQAAIHSATIISKVLGNTVFVNNANTQEEPAQNEQQTLNTQHSENTQLTTNTQDTNTTPDIPETVSGERGRRGNQTAHTQNTANTQITHTTQEESHTHRTDTQKTTHSNTRQGRTRGRGRRATPTTRTQHTRNRVGI

SEQ ID NO: 31912 - protein, 901 aa, Astraptes naxos
MVNIKDKLYRQYNIQNENDHSNIEEILKQKIKALAGRIKRYQDINTKKEQNSLFSENEHKLYRSLGGNSFKDIKLPDKEIVEEFWTSILSNPIHYNSKATWIKEVEESSSEVNTIDLEEISEEHIKQAIKKLLNWKTPGIDKIQNYYLKYLTSVHSCLGSVFTKIVSRRETLEGWFTTGQVILIPKNEETEEPKNWRPIACLPTMYKLLSSVLSNILYDHCHQNNIIAIEQRGCRRGARGCKDHLMVNKAILEDAHQSQKNLSMAWIDYQKAFDSVPHEWLAKVLDVYKCPPIIKSFLEVVMPSWRVIMTARGTQTSLTTEPIYVKRGIFQGDSLSPLLFCLAINPLSFVLNKYEMKGYKLKDSLWINHLLYMDDLKIYANNRHNLKVLLDSVEIFTRDIGMRFGLDKCNTIHISSGHRSKVTGEGHILLEGEIIKQLAIGDRYKYLGIHESGKIEHNVIRDQITKEYFKRIKKLINTYLNSRNLIKGINTYAIPVLLYSFGVINYKNSDLKKIDTKTRKLLAMKKAHQQKAEIERLYLPISQGGRGLLNVEYMYKTQIVKYKQYLNAENDDLIKAIVEHDSRRNKYSISNEAQEIENQLHLRQGITHTDKDIREAIVKRCKDIWRNKQLHGQFIKKVLDQTNIDTELSFKWIKKQQISPAIESSIFAIQDQSIMTRQHRRDILKEPVDGKCRLCASKDETTQHIISGCEKLAGNYYVKRHNNLVQYVYWCLAKKHKIDVSSLWWKETLIQPQVKENETAKILWEMPVQTDVTITHNRPDLIYIDKINNKTYLIDVTVPSDYNIGPKEIEKLSKYHLLKNEVSRLWKTQTTIIPIVIGATGIVGKNIKKYIDKLDTFIDITILQKQAAIHTSTILSKVLGDTVFVNNSQSHTQNAQQPTHT

SEQ ID NO: 31913 - protein, 1276 aa, Urbanus esmeraldus
MPREGRTLETLRVRYAPMTNGALVTFVNMERQFRNRTLGPLPGGDRRGTSGADAGRDSMQTVSDSLLNRRARVGGPENTTAEHRGGEGTGDALQSRASPTDSVGSSVSTTNNTVSDDRRRKWSTEELQELMFCYFKARSDGPGYIDRLHRLFSERNPNNPKIHKFNGNTLSNQARRIIKQNIISQELLDRIQKHAEGRTDTVESSEQNEVEEEETTTHSHITITHDTNHIEYTTEQIQTIDQLAQNIEVNEDQDPLILNFLQILSETKETAIEERQLLPKAKINKHFIENLGILNNFLPNILATNNSLREINDVIYAAAKTLIIKNNQLPYTLKNTFKVKSNPPWKRRIQSKIERFRKELGQLIEIGRGINTRRMINIKYKLYRQYNIQNENEHSNIEEILKQKIKAMAGRIKRYEDINGRKEQNSLFSENEHKLYRTLGGNSFKDIKLPDKAIVEEFWKSILSNPIHYNSKATWIKEVEESTSAVNTIDIEEISEDHIKQAIKKLLNWKTPGIDKIQNYYLKYLTSVHSYLGAIFTKIVSRRETLEGWFTTGQVILIPKNEETEEPKNWRPIACLPTMYKLLSSVLSNILYDHCHQNNIIAIEQRGCRRGARGCKDHLMVNKAILEDAHQSQKNLSMAWIDYQKAFDSVPHEWLAKVLDVYKCPPIIKRFLEIVMPSWRVIMTARGSQNSITTEPIYVKRGIFQGDSLSPLLFCLAVNPLSFVLNKYEMKGYKLRDSLWINHLLYMDDLKLYANNRHNLKVLLDSVEIFTRDIGMRFGLDKCNTIHLNSGRRSKATGEGHILLEGETIKQLAIGDRYKYLGIHESGKIEHSVVRDQIIKEYFKRIKKLINTYLNSRNLIKGINTYAIPVLLYSFGVINYKNSDLKKIDTKTRKLLAIKKAHQQKAEVERLYLPISQGGRGLLNVEYMYKTQIVKYKQYLKAESDDLIKAIVEHDSRRNKYSIINDAQEIEDQLHLTRGNTHTDKDIREAIVKRSKDIWRNKQLHGQFIKKVLDQANIDTELSFKWIKKQQISPTVESSIFAIQDQCIMTRQHRRDILKEPVDGKCRLCASKDETTQHIISGCEKLAGNYYVKRHNNLVQYVYWCLAKKHKIEVSSLWWKESLIQPQVKENETAKILWEMPVQTDVTITHNRPDLIYIDKINNKTYLIDVTVPSDYNIGPKEIEKLSKYHLLKNEVSRLWKTQTTIIPIVIGATGIVGKNIKKYIDKLGTFIDITILQKQAAIHTSTILSKVLGDTVFVHNSPSQDTQNAQQPIQT

SEQ ID NO: 31914 - protein, 1349 aa, Lymantria monacha
METENNETRIGPLPGGDRRGTSGADAGRLSMRTVSGSLLNRRARVGRTEDATADQRGGEGADDALQSRASPTDSVGSSASTTIGNEDRRRKWSNEETEELLYCYFKARIAGPGYIRKLYTLFKDRNPNNPKIRKFDGNKLSNQARRIIKQNVISQEIQDRIKRQAEGTLTLPSTSTDYVSIDSEHADTAPNIHAITTTANTQQTHYSPEQAATIDELTSNIEVNEDQNPLILQFLQILAETTETTLADRLFLPKAKINKQFIDNLHTINKYIPNLLITNNGLISINNIIYATAKTLIINNNQRPFMPKNTIKPKTDPPWKKRIVNKIEKLRKELGQLIEIKRGTTTRRMINIKNKLYEKYNIKNENDHNNIAETIKQKIKALAARIKRYEEISGRKEQNQLFAENEHKLYRSLGNNNNSDIKLPTKEGIEEFWTSILSTPTKYNTQANWIKEVEETTNTIDTTNIEEITIEQVKTAIRKLLNWKTPGIDKIQNYYLKYLTSTHKYLSLLFTKIITGQEPLEEWFTTGQVILIPKNCNTAEPKNWRPIACLPNIYKLLTSVLADILYSHCDSNDIMSIEQRGCRRGARGCKDHLMVNKAILEDAHQSQKNLSMAWIDYQKAFDTVSHEWLLKVLDIYKCPPVIKRFLEWSMPAWKVIMTARGSQESITTEPIYIKRGIFQGDSLSPLLFCLAINPISFILNKYELKGYKLKDSFWINHLVYMDDLKIYANNKSNLKVLLDSVEIFTSDIGMRFGLDKCNVIHIRAGHRSTVSGEGHILLSQEKFKELQVGDSYKYLGIHESGKIEHSKIREQITKEYTKRVKKLIQTHLNARNIIKGINTYAIPVLLYSFGIINYKITDLKKIDTKTRKLLAIKKAHQQKAEVERLYLPITQGGRGLINVEYMYKSQIVKYKQYLKTEFDDMIKAIVQHDINKDKYSIIKESREIEQQLNLPQNNSHTDTEIKQAIVKTQNTSWRGKQLHGQFPKKVLDQANINTELSFKWIKKQHVSPGIVSAVFAIQDQAVMTLQHQRDILRAAVDGKCRLCRVKDETAQHIISGCEKLIGTYYVKRHNNLVQYVYWCLAKKHKIEVSPLWWKETMIQPQVKENDTTKIMWETPVQTDITVTHNRPDLIYIDKINNKTFLIDISVPSDYNIGAKEIEKLSKYHLLKTEISRLWNTQTAVIPIVVGATGIVAKSINTYLDKLGTTIDITILQKQAAIHSSTIISKVLGDTVFVNNTNTQQELAQNGQQASNTQQSENTQLTTNTQDTNITVDIPETVRGGRGRRSNQTAHTQNTANTQTTHTPEEESHTHRLDTQQTTNINTRQGRIRGRGPRATSTTRTHHTRNRVGI
